United States Patent Application Publication US 2014/0057251 A1 - sequence listing, part 126

SEQ ID NO: 229240 - DNA, 3229 bp, Cannabis indica
tcccgatgggtccagtccgatgggcccgatggatccgatggtctgatgcgatgctatttttttttaatttttggctctgggttcgatggacccgatgggatccacgatgggtccgatgctcatttggctgggaattttttcgggttttggtccgatacgcgatggtgagggggtgacgggagagggtcctacgaggtggagaggggggctgggtcctgggtcgggtcgtaggcggtggtgagggggtgacggcgcggtggtgtgttggggtttgaatggtgtggggtgttaggttgagagaaaagctagagagatagaggaagagagagagttggggtgttagttttttttattttgaaatgtattggtttaggtataaaatattaaggtttttaaagtataattttttaaataaacatcctatagtatacactctgccttttaatatttctctattaattaccattttctcatgtaaattagctaagtgattttttttttttcttatgctatgaccatacagccaatcacaacattttaggtaaactcttacaaattattaaacgtttttcattgagggagcaaaacgtagtgcactttctatatttctacaatgacacataaatatccaagatatttgtactaacaagcaaaaattgtcaattttgaattatatttggataaggttattaccattttcatttgccattgtccctttttctagatgatgattatgctcatatatgcacacttctcttgttggatgtatctatctatgtctaaatacttcaaaaggaaatcttaaaaagagagaaacaaattattaacattgatgcaatattgcaacaattattcatatatgtttataacatgtataatgatatagatattctcttaaattatacatcataatgtgtcattattatcaaccatataatatttttagataagactcaaattttattttgtgtaattataataattacagttcataatgtgccaaaataatgtagaatattactcctattgcatgatttatacaagtcattattggaattacagttcataatgcgtgcaaaaacaaattttgtttttgttttagtgtttaattgttggcacatttggttttagtaaaagttaaaagcaaaaatagaactaaatttgagtcattcttatgcaggaagggaggacctatatggggaccacccatgttaagcaagtcaaggcctccatttttttttttttgagaaaaagcgtttatatcataaaatcaaatagttagacctcgcggtcgttacacaatatattgtttggtaaatccgaaaccgggatagacccaaaaacctgatgagcgaacgcccatctagccacattatgagcggcgaagttacaagatctactaacataaacaaaattacaactaataaaaaagggagaattcttagtacaaaatgagatgtaattatcaagagcccagcgagaaaccttcccattgagagcattgatcaccacactcgagtcattctccacaatcacaaatttcgaaccaatctctaaggctacggagaccgccaagcaacaggccgcagcttctccacaaagaacatccgaaaagtcttcccgagccgtttgaactctaatgactctgccaacatgatcccttgcaacaacagcaatgcacatactattatatcccaccttgacatcacaattcagcttaatccaatccgggggaggaggggaccaagcttcctttaggtcaggagtgggagtagggagcaaagtaacatgtaaatctgcataagaagtacaaatattatcaatacatttttttaaatcaggagagcaattattgtgaactttctcattgcgcgccctccaaatagtatccacaacaatcgaggcatataaaaacacatcatcagctcgaacccctctgttgtttagatcccaaataaacttgacccaatcccaaactcggataccagtgtcacaaattggaaagatgccccagggagaggagcgccataaatgaaacgccacatcacaggacaagaaaaggtgttcaaacgtttcctcccccaaaccacataaggggcaggttgtgtcatcaatatggaatctttttccaatcaccgctctaaccgggagggcattcgagaggatacaccaccacagaactttgtgacgttccaagattttgctattccataacttgttccagagtttcggagctacctcacagggaggagctctttcctgagcctgagacagatacgcagatttggacgagaatcgcccattactttctagcgtccaaacccaactatcggagcccgttccagcagggtggcctcctttaagaatgtccgagactgtttcatggtcgaaatagcctcgcagttttggaacatcccactgcccattatctaacaataaatcagcgacacaatttacattgggggagggacccccgattggtttcggacggaaccctttacgatgcggaatccagggatcctcccaaatcttagtactctcaccattggtaaccaacttgcaggcacctttccttaagatagcgtttgctttgacaacacttttccaaaaccaagaatctgcatctttatagctgcaattaaggaagtctttccctcttagatatttggctcttaaaactctacagcataaagattggcttccagtaaggatattccatccccatttggccagaaaggcctgattcatctctttagttttacggaagccaagaccaccaagcgacttaggaagacacagtttatcccaggccttgagatggattccatgatttcccttctcaaaaccccaccaaaaatccctaaccatgccatcaatcttgttaaccattcgagaagaaagtttggttgtttgcatagcatacataggcatagacaagcccacagatttgataagagtagcacgccctgctttggatagagttttagccttccaaccctgcagtttcgacgttagattatccagaataaaattgaaatcagcatctttctgtctagatcgaaacaggggcaaccccaagtatttgatacaaccttcaggggaatcgattcccaacgcttcctttatttcccctcttaagctcaccggggtatttctactaaagaaaatggtagtcttgagcttgttgacctgttggcccgaccacaagcagaaattctctaaacatctc

SEQ ID NO: 229241 - DNA, 971 bp, Cannabis indica
ctcaagaaaatatctattaaatataattcataatatatatatatgatttcaacaacattttaaaaaaatacacactctatatattattattattattattgaatttctggaccaaaaataaaataaaaaaattcaaaaaattaccccaaatatatatataaataatttttttaagttattataaggttgtttgaagagtacccactatatgtaatccaaaaatatagaaaagaataacaaaacatcgccaccactactattttcagcaaaaaaagaacaaaagatattaaaatcttaggcaaattaagctctaagaaatttccaagcatccttagtgttgtgtgaagcttacccaatttgaacctataacatccaaatataaaccaacatttcataaatttactcaactttttaaactaaaaaaaagtttaaaatttagggtacaaatataaaaaaatatacaccagtaaaaaatattcaaacttacattttctttgtagtgtagtagtgatgaagagacaagaaaactagattttggatcaatcttgggcatttttagatgaaatttagaaaaaggggaaatattttgggaagaagaagagattgggaaaaaaaattacaggttgggcggcttaataaaaactttaaactgtagtgaccaatctcagagggccttaatgagcccgccatgattggggtgttgtatttggttaatggagtagcgcgagataaactagggctagggttttttttttagaccaatcactcgacgggcccataggggaccgccgtgatagagtacctatggaaagactcggtttttgaccgagtcaaatgtatatatatatataaaatattaattaaataatgatatatatattattttgaatatactgaaccccttcgttcccctgtctcattctatctatctttctctctttctctctctttaaaatacaaaaataaaaccc

SEQ ID NO: 229242 - DNA, 1736 bp, Cannabis indica
tatatatatatatatatatgttttatatgtatagtggatatgtgaggacttagtgaggagcataaattgttgatattttgagtataggtagcactagttggccacaccattacttattgagtttaaaaaccaatctcatcttttgttaagtcaattttagagaactttgtgtattgaataaagaaattctacatagacaaaattagcaaaaagttcttttgggttgctaaaaaggtttaagatattataatgcaatagctttatagttcttttccttagagaaaaatatcacttcttagaaccccacaaagctaatcttttaaaataataataataaaaagaatcttttaatcaattaggaaatctatgattatttaaaataggaattatttaaaaaaatacacaaaagttacaaaaatacagttgtacagaattttaaatattttttatagattttaagattttatttacataaaaatataatttttttgatgttttcatgttgtttttatgttatattcttgctattttgttattgttttgttgttggttttttgttatttgtatattattttatattgtacttggatgttattttttatgttattttttattgttgttgtttttttatatttttcatgttaacaccgtaaaagtatatatatatatataattaaatgtaagagtgtaaaaaatttaccaaaaacatccatatgaaaatagataaattttaaaatgtctaacatattagtatatcgatattaatataagtaaatattagataatttaaattaaattaggtgaaatttaatattaaattttttatcttaagctcaatgaaaatattaataatctcataagtcataacacgatgagagcaatttgaagctatacctagattttttttttatgaaagaggaaaacctagaattaattatattataaatattattaaaaaaatatatcattttattacttcatgcatggactagtatttcacatttgtccatggaaaatgggttgagagaaaaaaagggtccattaatgaaaattagtggctaacccaattcttattgtccaaccattattgtctctcccattatatatattatgagaagaaaattttatggatgtcacttttatttttattggttaggatgtttttgttttcggtatattgagaaattataaattaattttttttatataataatgtatattattaatataagatgtatctcacaagctctcaaaaaaattaaaagtgttaaaaataaaatttaaataattaattacacacgttctagtttcaactaaaataaaaataaaattataaaagaaatattgggtgtagtaagttacaaaataaagaaaattaatgaatcacgtcaattgttagaaaaattaaatgggggcaatatcaataatatattagaagtattatatatataatatattgttggatataatttacttaagtttaaagccatcaacaataacaataattaaatgtgacaaatatcaaatattgagtaagtgtcattacttgcctaattaatttcatttgaactatattgaacttttatttaatagacaatatagtaatatgcttaatagtatggttattgagtactaatagtgtcaaatatattttataggtgttatccaagcaatgcccacctaccaaatgtcctgttttaaaaattccagagggtatcggggaagagatagaaaaa

SEQ ID NO: 229243 - DNA, 2075 bp, Cannabis indica
acaatttcggggccctgagctttcgggggcccaaggcgcatgcctagcctgcctaccctcagggccggccctggttctaccgtgtatttttccaattagttaaatattaaaatatatgttttaatataaaaacaaccttatttacatgtgtctacatatacaaaggacacatcacatcgggatataattcaagccactagactccggctgaatagcacttctctaaaaaaatttaggtgatgatttggagagattagtgactgttttcattctactaccatctcttaatccaaatagctgcactacataaatgagtatagtctaaaataatgcaattaattggttgataattaacgtactaattaatatattatattgattatataaattacacatacaaactactatgtgaaagaaaaaaaaaatcaaccaattatgttttatctaattattaaaagtggacttataccatatcaaatttttatatatagtatttattcacataaattactcacaaatataacataaaaaaaatttcctatttgtaagaattgaaaatgagtgattattgacctgtctgtgatatgtgctggaaagcatttaaagaacatatcgtaattgtcctcatcatggcatataatgatacgtcatcataatataactatctataattatcataaccacgtggaatattaaggcttatatatacagccaaaggtcactagatgtattaacgttggtagagttatgacttatttaaatatcaatcatgtagttgtgtcttaaaaattttagtatatttacatattttttggaaattattttacggcaatgataataatataaaatgttaacgaaagtgttacatgaataaatatacaaaattaatgttataacattctctcccttgttgttaataagcataagcttagttttctttttgttatggagtctaagttgttagttggacattgtgatatttttagaactagactaatgcttttgaagtacttaagaatggtcttagtggtggtcttttgttattttggaaaaaagatgttaatgttactattttgaactattcctctaatcatattgattgtgttgtcacctttgaggataatataactaatcatatttcatgttactatggctacctttatgttcgtgataaacctcatacttgggtacttttggatagtctttttgataatgctcctcaacttccttagcttgttctaggggattttaatgattatctttccattaatgatagaagtagtagttcttccttacctcattatgctatggttaacttccaagcttttgttaataagtattctttagcaccggttcactttgttggtaataaatttacttggaagcatggttccacttatgaacgtttggattggggaattgctaatgataagtggtttcatcattatccccaggccattcttcatcacctcaatttttatggctcggatcatagggtgttaaaattagtcctttctgatgatagtatgcataaagtgaaaaataagaggtttctttttgaaaatcattggcttactgaacccactttttttactactgttaataattcctggagttgttcaaactctggctctaataatcatcctttgtcaaattttcttagtaagcagagcagttgtattcaggctatccgaacttggaatcaatcttttaatagtttatctaataggattaataaaattgataggcagcttaatgacatcttttcttcccttcctatttctaatgagaacttgtccgaggcctctaatcttcagtcccagcttgatagccttctttataaacaagagatcttttggaagcaaagatctaaagtccattggcttcgggctggtgacaaaaataccaaatttttccatcacaaagcctcatctcggaaaagaaccaatttcattagaaagctcactcttgatgatggtagtactatttctaatcaagctgccattgaagctgaaatctgtcgttttttctcaaccctttttccattctcagggcagtagcagggatgctactaa

SEQ ID NO: 229244 - DNA, 1368 bp, Cannabis indica
tctctctctctctctcgaatcccttggagaaccaatagtaattggacatcttcaactggtttttggtggattgtagttagttctaggtgtatctattgaaggtaacccctttagcatcttttccctcttagtttcttaaattttaaataatgaattttgcatgaaattgggtattagggttctgtgttgttgattggtgtttgtttctattttttgaagttgaattaaagtaaatatgttgaattgaattggatttgaaggttgttgtgatgttttatcaagctttgagattaagaactcaagctttgctctttaatggtagattttgattctgagttggtagagttgttttattgcttagaatatgttcattgtggtctaaatagaaggtttggaaggtttaggattgaattgagggtgtagtgaaattttgaagttttcctgcactgaaccggtcgaccggttcagggggacttgcaggaaccaaaattctgattggtccccaagaaaccccacagaaccggaattctggttggggaactggtcttccagttggggaatttttgggaaccctagtttttctcgtttttacgatatttagagtatttccatgttattcatggatagggaaacttttagcttcaagtttaagtccccgaaaagtgattaggcgtgtcactcatcagttttacaaataatgtgattaaggggcctgtaattcgtcaaccagctgttccactcaggatggtcgacacactttaattcggaaacgaggtaagattagtataataatatgcatatatatatatttacatgtttagcgtgcatgttagttaagcctattagattacattataatatcgagatcagtatgtttagtattatattggatatcgataaatgtatgttggcttaagtactattcgacaatatcacattggtacgactagtgtaccgagtataggctgatattatggtcgatagtactgtactacttgatagtatcacatcggtacaactagagtacgactagcgcacccagtataggctgatattatggtccgtagtactgtattacaatcgttcttgactcagcaccatgctggacacaggattaggattatggttgagtgtatgggcgcctgattataatccaggttatttttggtaaacagaaatatcataaattttattttggtactataaactatttggaatttttcaaaaaaattcacgaatgatattgtaactataacaaataccgctatgaaaaattaaaaaaataattagggatgttattttgggcgcagaggttgactaagatgttgtagttagcattcctcgtgtgattttgatattgtataattt

SEQ ID NO: 229245 - DNA, 1598 bp, Cannabis indica
ttacacttttacttttaaaaatatttaaatggtatagcactctccgaaaatactataattatgatctctcacattattatttaatatatatcctaatttttaacaacaataacattttagctttaattttttattaatgaatagcatccatgtaaatttctaaaatagcatccatctcgctctaatggtatagtcatctacaatattttgtcatgtaatatatctacctcggcaagcatcctctaaatttttaccattggagatgctcttgtttagatagttttatatattgtcccaaattatttagatagtatagtggtcttttaatatacactataaacatcatttcttttgtcatttttatatgtcccaaaacactactacaaaaaggagctttattttcgagtttttttttgcttatttatctacagttaaaaaaaatctcgctatcaaagagtactatcaaggtgaaaacataggtcctgaaaataccgaaaatgtgtggggggcctatgtcttcggttatttaaaaaacatgagtattttctttatataaataaaaaaaaaattcgatgcgtacaccctaaattgaaaccatcatttaacaccatcgttgtcaagccccaaacacacaaaaccctaaaatgaaaatccttaaacaatattatttttcaatcacttccatttaacaccactaaattttcaagctctgccattaattttccatcaaccaccatggatttttcgaccaccaccgtgatatccaaaccctatatcaaactcacaaaaaaaaacatacaaaaatacaagctaaaagacatattaaagttatctatgcctcaatccaaacttaaagacctaaaaaaatagctccaaaagccaccgttttatattgtcgccactgactccaaaactcacaaaaccctaaagtagaaatagtttatttactccctaaaatttaaaataaaacagtttctatggtgtatttttgtttctgggtgataataacaattagaagaagaagaagaagaagaacaacaacaacgatggtttatggaggaaatggttgttcgggttcggtggttattagggttttggttgagaagatgatgagagaagagagaaaatgaaaggtttcaacttttccaaggatttatagaccttatgtctttggttatttttcggttatttcaaaataaccaaagacataggtttgcgttttttgttcatttctcctactttatcttcgagtttatattttatatcgtaaaaaattgaagatatatacaatttttctagtagtgaaattactattttttttggcttcttagataatttattaaaagaagtcttaaactaattaattcagtcttactcagttaatcagttgtagtttttaaaatttatctaagctataatctataatattaataatatatttttattatttttatgtttatataaatatatattattattattttataataatatatgtctttattttgactcttatgcaattttattttataattaacaaatttttttagatacatatgtatatactaataaaaggctacgtgcgaggcacgtatact

SEQ ID NO: 229246 - DNA, 1222 bp, Cannabis indica
aaagaaaaaaaaatgggcctggaaagtataaaaaaaatttctgccgtgtggcagtatctttgtaaagattagaaaaaaaaattagtatttttgtaagtttccctaaataaatgcattcatgcaattgaaattataataacctagtttaccgtccatgctgaccaaggcaactatttaaatttttccttctcaatgattcactccatggagaatcatagagttttggaggttgagtttggctttgatttttgacaaaggtaaaatttattagctcttatctatcatgagaatgcatcacagtagtctattatttagttttggatcttcagtttgataagtgtctatgcattacttttttagaaattctttattctttattctttatttatttttatattaatatttattgagaattttattcttaattaacacgtgaatcaaatatggtctcccctttctaacagcagtaaagttagaatcacttttgaggatattgaagaggaagtctctttctggacaccatctattgtctgttatgtattgggggctaatcctccattacatgtgcttgaaggttttgtcaatagaatatggaaagataaaattgataaggtgaaactattagcatatggagtctttatcatccgatttagctctatagaatatagagatcagattttgaatggagggtatattttctttaataggaggcctgtgataatgaagccttggaacccccatgaaaactttaagaaagagaatgtgaagtgtgtgcccatatggattcaattagatgagttggaactgaaatattggggtcatggaacactgtccaagattgtaagccaggttgggaagttggttatgcttgattcaatcactagggagagagagcggttgagctatgcaagagttatggttgaggtgatgatggatcagaaatttccagactttttggaatttgaaaatgcattcggttcaactactacagtgatgctgaagtatgagtggaaaccagtagcctgttctcactgttctggatttggacatacagcagaggaatgtaggaaacactctaatggaaagccacaatgggtaatgaaaaaggacaataggaagcaggttgagacagatgaagagggctttgtgaaggtgactcgaaataagagtaaagctgagtataatgaatatgaagttgttgggaagaagggggcaagtacta

SEQ ID NO: 229247 - DNA, 1219 bp, Cannabis indica
acgtaacttttactagtatatatatatatatatatatatatgtgtgggtggcccacatgttagaatgggtttgtaattgttggttttagtgacaaatagacaagagtatttatcaaaatgaaaattaactagagtacgtaatcagtttacaacttttgttctctatataataaaatgttaaaattggacaagagttgggaaaaatattatcaatttttgtatagaatcttagcttaatttgatattaagagaatggatatgtatgttaactatttataatattaataaataaaggaatattggtatgattctttgaatgaaagaaattcttcatattataatgctgctattttgaaatgattgatccccgaaatatctaaacccaataattcaaggcaaagataaaagatccaagaacaatgaaatatttaattaagtctcttgcatgaattttacttttcctaataattctctatatgttgtaattagtcattatttaaggagctgttttagtacgttgtgttatattgtattgtattgtataatattgtgaattgtactgtattatatcaatattatttaatacaatactatgttaatttggtattgacttgtattaatagtttgtataaaattatattatctttaccataaattcgactctaggatccaaagaccaagtccgggtacacgtttggatttggggttgggttcgggtccaagctcaaatttgggtttggaaccaaactggatctggggccgggattcccaatctcgaaccttttataaatattataatacaaattattacagataatttgatattaatttcttaaaatttatggttgtaataattaatacagtacaatattttatacaaatttaatgttacttgtcatttaaatacaaccttccaaatgagttcaactagtattaattaatctaagttaaaaatattatataataattaattaaaagaaaatttctacgtacacgtaaaatataaaaatattctttctcaattaattgtctcacttattttttcccctatataaacacacacaccaattctccacattttccacacaaattacaaactcaaatacaatctcacaatttcaatttgaatcatcataaattagcaaaaatcaataacattaatttcatcaaaattatgggtatcaagattgttatggtattagccattgtggctcttgtg

SEQ ID NO: 229248 - DNA, 1948 bp, Cannabis indica
aaaaaaaaaagaaaaagagattgtgtcttgtggtatgtatatttaaattttactcatgatcacattacactacaaaaatttaagtctgtattaccgagaacctgtcatccttattatattaacatgaattaagagacctaataattttttaatatatataattatttttcaaaatcgataaccatattgatcgagtaaatatgtataatacaagtcttaattccagcgtgtatgacctgttcatttaattcttttccacttatatatatatattcaaatagtcaagggtcaaataaacttatcataatatttagacattgaaattgaaaagggaaaaaaaacaacaatattcaagtcatgatgattcaatagtaatatttattagacatatactagctataaaaacaccttatgtattgttagctccacatcgtgaactcatcaacattatatttattgcatatatcgatataatatattttacaacaaaattataaacaatttatattataccacaaaattatttggtagctaattaagtgttagaaatgatgaggaatttatttgtggttttggtcactatgttggcaattatcaacttattattatgtgttgatccgattgaaggtggtcgagttctgaatcgagacaaagatttaaataatttattgatttcgtctttacagagaggaaataatcaaccaccttcacccaatccaaacaaacctgcatctttcaacgaaagaaactttgctggtacaagtagtcgtagtagactattagttcattctccaccaccaccacctgcaccaactcatgatgtgcttaagagctcggatttcgcataacaatgttcaacatgcgacatatacgtacaaacttatttattacatagtaaagatgtatgataatgaataacattagctaaccctagctaattgttgcttagatcaatatgatggtcaaccatagatcaatatgatcatcattacttttattttaagtttttaacataattaatttaatctttgttatgattggtgtaatttatgtagtaattttattaaaataaatcttgggtatttatatttagtgtgtagtgtactagcagtactatctcttacatattttatatgtaatattgaattaacgtgtcttaaatctctttgcatgagtgtgcacgtgcatggatccaagtatatgtatatataattatttgctattatatataataaatatcgtgtagtttttaaagctgcaaaaatcaatgacaattttttgtagatagtagcaaataatttatatatacctagctagtagccatttgagaaatgataaaagttacttaatattattatttatccaatacttaattaagtatcgtgttttatataatttaatataatacttttaaagattattattagctaatcgcaaaacgataaaaaaaaaatgttaaagtatataattataggttattaagctagctagctattataattttgaaaatttttgtagtagatttttaaatggtcgttttgttataagattttttttatttattttagtatcttaaaaattattttagtttaaatttttttatgatagctatattaggaaaacttgcaaatttttataaaaattacgaataatttacaagaacaatcaaaataaaatttaaacaagatgtatataagaaaaacagacgcatacaatatctaaaattgataaaaagtgggtatgttgatattcttgagttagcccaatatgagaagcccaagcccaagcccaatcataaaccaaagcaagtttcatttcatcattccaaaggcacagcttcttggctctctctcggccattttggctttcttcagttctgtcactgaactcaatcagtgctaccctagagattttatcagactgagattggagattggagatcggatat

SEQ ID NO: 229249 - DNA, 2664 bp, Cannabis indica
attcctagttgatatatgcagtcaaaagaagcccaattttatattcttttgtgaaactttatgcaacaatgatattgtggataggcttaaagttcggttgggctttgaaaattgttttactgtgccagcccaaggtagaaaaggaggactagcttttttatggaagacatcttctgatgctcatttactcaagtactcggcccaccatattgatttggaagtccatattcctggatatgatcgatggcaccttactggattttatgggcgaaccgaatcgcactctacgccatacaacttgggcgcttctgcgtgacctggccgatgactcgaagttgccatggtgtatcattggtgacttcaacaacatcacttctcacgaagataagaaagggggtcggctctatcctgaatctctaattaatggcttcaacgtggtgcttcaagactgccggctgtgtgagcttcaattatgtgggcacaaatatacatgggaacgtggcaaagggactcaaaatcacattgaaataaggttagacaaagcttttgctactcaatcttgactatctatttttaatgaggctagtttgtcaaattttgatttttcgtcctccgatcatacacccattattcttgaaactgcccctgctgttatgggtaaattggtcactgtttttttctatgaaaatgcttggtctcgtgagcctttatgtggtcaaatagtccgaaattattgggagactaatgtccacctttctcttgctgataaaacaaaactctgccttgcaaccttgattgattggggttataaccttactgggcattttaaaaagaggctgtcaactagtaaaaaaagattagcaagactaaaaataagtgacaatccgggttaaactgatgattttttgagtgaacaatgtaactattttgagattttagctcagcaagaaatctattggaagcaacggtccaaacagttttggttaaacggaggggacgagaatggcaaatactttcatgccaccgcaagctctcgaaaacgaaataataaaattgtgcagctccaagataatgatggaggctggaattctgggttagatcaggttattgttgattatttctcagctctttatgctactgatcgtgctatttgcggctctgtagtcaatggtatccgtcgctcggttacagttgaacaaaatgacaacctactctgtccaattacagccgaagaaatcaagcaagccctcttccaaatgcatctcgacaaagctcccggacctgatggtatgaaccccaatttctatcaaaaacattgggatacggttggttctgacattattcaacttgtcactgattttttcaataataagtacatgccgactggactcaatgacactcatctagtgttgataccaaagaagaagaatttctccactatgggtgatttgcgacctattactctttgcaacgtatcctacaaggttctttctaaagttcttgccaatagaatgagaggtttaattgatcttgttatctctcccactcaaagttcgtttataccaggcaggcttatctcggataacataatgattgcctttgagattatgcattatctcaagcggaaaactaagggcaagaaaggcttcatggctatgaaactagatatgagcaaagcttatgatcgagttgaatgggactacttgtatgtggtcatgcaccgtatgggctttgctggaaaatggatcaatcttattatgaaatgtgttacttctgttcgatattctatttttcatgatggccatatgttggggccgataactccttcccgtggaatccgccaaggtgatcctttatcaacttatttgttcattatttgtgctgaaggcttttcttccttgatcaaaaagtttgaagctgaccatgtcattcaagggtgtcgtgttgctaaaggagccccttccataacacacatgttgtttgctgatgatagttacctcttttgtcaagcaaatcctaatacggctgtcaacatcaagcaaatgcttcattcttttgaattagcatctggtcagaaagtgaatgtatcaaagtcctctatttacttcagctccaacaatgaagcaaatgtctgaaaccaaatatgcaatgttcttggcatgacagaagctactgatggctctctttatttgggattaccaaacattattggtagaaagaaaactgttattcttggttttctcaaaaataagataatcaatcgtcttaacagttggaatggcaaatttctatcctgtgctggaaaggaagttcttcttaaatctgtcattcaatctctacctacttatgctatgagcgtctttcttattcccttggaaacttgccaagagattgagaagattatggctaatttctggtggaaaacatctagtgcgaaagtgttgcaaaaattattaaatactacgcaagtgcacacaatcaagtagtatactcacacaagtgaggtcgaaccacatggaattggattaattactactaaattatacttataattctatttggcaaatcaaaagtttttatgattgaaacagaatgaaagtaattcagaaaactttaaataacacaagtgaaagttgaacaagatgagataatagggaggagaat

SEQ ID NO: 229250 - DNA, 1583 bp, Cannabis indica
atatatacatatcatatcatagtgtatatatatgggagttgagcaagctgcaaattgaaaggcaaatagttggcgatgcaatccacttgatttgtgcaatgtctttcagagaaaaggatcaagcaacaagcaaagaaagaattactagaggctaatttcagataataattcttctttttattgatctgtagccatctttcttttttaaagaatgttgctttctctttttttagaaaaatttgaactattcattttttttagaattttggtgtcataaaacacaatttattttctattttcttgctgaaaatatagaaaaaacaaaagtagtgtagattatttagattgctgaacgaaaaatttgtttacaagaaaaattatgtctcagaaattcttaaattactttaaatagatatgaacttggtcttcaatccattataatgttaatttaaaattttaggcattttattagtgttgaattgttctttctctttgtcatcttcttcttatttgttgttgtataaaggttttaatagaaagaagaaaaatttgaatctgaaatggattatatattctagaaaaagaaaggagtttaggactatttaagtccatttatattgctcttaaagccaatattccaaactggggaaaagatacaataaagaaaatgtctgtggtgcatagtgtgtaggaaatagtaatacctcaagtttcttagttctaaagaaagagaatttattaagaaaggtattcatcaaatgcattcgttgtattaattttggaacgattaatcagcaaagtcttcaacaatttgtaatttgtaaatttaagaaatttgtgtgcattaaagctctggtgtaagttagacgaaatattttgggctataatcatcacaaagagatacctctattgatttgagtttgggagacgaaacatgtagctctctaaaatcaaaacaagcttctatgcctttaacactcaacgcaagcttctttacagaataaaatagtacttgtagtgtgattattgaaataattttataaacaaaacatcgagtgattatttagagacaaagagcaatgactatataaaatcattataaaagatgatatgataatttttagagtagtcataaagtaaattaaataatttttatcatatgattttgtagtgaaagtatataaatttagtcgagaaaaatctaaaattatttaataaaaaatagaaaaatattaagcacatcagttagtaggaagctaaagtttttttttctttagtaaggtattaggaagctaaaatcaaactaacctaaagttaaatataattatgcaaatgttgcattatctcatggtatattacaagaatttatatattgcacagtagaagttgaagtggcactttatgtatattcactctattacttttttattgttttgtgaaaaatttatatttttattattttatattgatatttattaaaaatataattagtaataataataattcaatgttacaatttttttaacttcttcataacatcttttattactgcatatttattattactagcaaaaactacgtgc

SEQ ID NO: 229251 - DNA, 1485 bp, Cannabis indica
caatatagaaaatagtgttgaaacaatttatttcacaagtatatatataaaataaaatagtcatgtgtgtaacacactgtttgaatcctattttcggtgtgttaaatttttctaaatttcttaaaattttacaggttgtcttaaataactacaatgtacatgaccatgagaaaaaaattgacgaaaaaattatttcagataccaaaacaaataaaggtacatcagtgcatcttttttaagatggtggattatagaattttccttaagttttttatatcactatctaagtaatactaacatatgataattttataatgtaccccttaaaagggatccatcgatgcacccctatctatttcgacatctaagagaatttttttcgacatctaagagaaattttttcgcctagttattttcatagtcgtatatgttgtagttatttaagacatcctaaaaatttgaagaggtttggaaaaatataatatgccgaaaacagggttgaaatagcctgttgcacgtgagactcttttattttatacttgtgtgaaatatcgactatttaaaccctatttttaccgtgttaaattttttagaatctacactaaaaaattcttctaaatgataaaatagataagggtgcatcggtggaccccttttcaaagggtacattaattgtagattttttccataatatttatccaaatcactactttttttttgaaaaattctacaatgcacttcctaaaaggaatgtatatcggtacatccttatctattttggcattcgggtgaattgtttatatagtctaatttttttcatggtcgtgttgtaatatgtaagacattctacaaaaatttaaaaaattcgaaaaaaaattaatacgtcgaaaatatagttcaaaaaatctgttgcacgcgtgattttttttttattttatacgcgtgtgaaatatattcactacaaaaaatatctacctttagtgacaaaatcatagtataaattttttgtgactaaatgtgacttttagtcacaataaaaagttacttctaactaaaatatagtatttagatacacgttgtcattaatttagttttagtcacaacaaattgtgactataaaaatagttttagtcagtaatttttgtgactaatatatctttagccataaaatttttagtcacaacataggaataatgatttataattagtcacaactttcttatttttagttacaagttttgttgtgactaaaaataggattttttatagtgattattttgaacactattttttatattgtaaattattctgaatttatcaaaattttacaagatgtcttaaataattgtaatatacacgactataaaaaaataaactaaaaattcatctaaatgttgagatatataagaggcgcattaatgtaaattttttaaggagttcattgtagaagcacatttttttaagagtaatttgcggcataaacac

SEQ ID NO: 229252 - DNA, 3880 bp, Cannabis indica
ataaagcccaagtcatctcgagatcgacctttccaggtcgaaccatcttgacatgtacaatcattcctgagctctggactcactggtgcttagccttatctattcctttacctacacatacaaacaataattgtgagtcaacagactcagtaagaaaaatatataacatataatatattaccgacttaaattttaggcacccatacatctatccacaaggcttaacatataatcaagaacgttcttaatagaaggacgacctttgtaccacatgcactaagtactcgtcccttctagtgtatgtagggctgaatcgtaccccgagtactattgagtattgtaccacaagcactacgtacttaaccatactagcgttggtaatattggatcgaaccctttaaacatcatatactataccaatgcactaaatactactatcgtactggtgttggtagtatatgaattacatacacattatgtaatttacatacctacacacatatacatacatattctgtgctagtcttatctcgtttccaaatttaagtgtgccaatcgacctgaatagaaaatcacgtgctaaacggaggccctagatcacaatcacataaattgggtaaacaatttgctaaaccttttttggagacctaaactcaaaaccagaagttttcctattaatagatggcatggaaatgccctaaatattgagaaaacacgagaaaactacgagaaaatagcctgaaaaacggcaagccatttctataaaaacggtaagccatttttttgggttctctgccagtaaaaatggtagaccatttccacaaaaatgccttgccgttttctatcgtagaaaacaacaaagcctcaaatcttgctcaaaacaatcccaaacttaaaaccaagctctagatcacctaataacattataatagaccaataccaagtgataaaaccaaaaataaactcaacatgcaaattccacaattgttgagccaagtttgagttcttgaactcaaacttgctcaaatcaacaatcaaccatcaaattaacatcaaacaaacaccaaacaaccttaaactaacccaaaaaacaacctcaaaaggtctagggttctaacagcaacaaaccaccaaagctataagctaaaaccaagctaaattctacaaaaccaaagagaggagaagaagggccttaccttggcttgagccaacccacaaattcttgcaaaaaatcccagaaattaaaaataaaccctggatttcccctttcttcccttggttcaaaaagagagagagaagttgaaatggataagcattggcttttcttgtgacagttaaggccctgtgatccgaagggaaaagactggaagcttacaatcccacatcgcctggggaatgtcatgtgtgatgattctgagactgtataggtatgggactacatagttgaagaaggtttaaatggattgattggtactacctatatcaacaaggtgcattttatttttcggtagcccatcacgaaagaactcaataattaagtgtgcttgacctggggtaatttcaggatgggtgacttcttggaaatttttctcatgaagtgtgcaagtgaggacaaagcacatcggaaacacacgtgttagtttgtaaggtcaatcgacattccatgaagcagccagagtgagttactcgtgtataaaaaccatcattccgtaaatgtaaggctcaatggaggcttgaagcgagaatgttacacaactagtttctgccttcaggtttttttacaactatccatgtcatgttcttcaacaatgacaacttttcttcattaataacctgtaaccagaactctctatctttagctctgatagcttattggtagctagttggttttgagttttcaatctacttagcagttaggagagcaaatgttgtaaagtcagccaaatccaatctgtctggtagtttgatgtctcttctcttcctatccctagaaagttgataagtacttaaatcatctccattgtcactaagatcactactaggttggagtgcttctcttgtattccttccgtatgatgactcatctgattccacctcaagattgactctttgatcactctcattttgttttgatacatttggttctaaacccttatagccataactttttcattgaagactacatctcagctaatgagacacttcttgtgtcttggttctaaataccacaacttgtatcctttaaaatctcaagcctaacttgacccatcatattcacgtgttgacttatcgtgtacatgtgactatacttattttacattacatgtcgattaatatgattaatatcatatatttgatttttatacatgtatttttaattatatcaatttgtttgactcatatacttaataaaaatatataaaattgtaaataaataagattaattaaataaataatttatcacaaattatcaatacaatgaacaaaattcttagaaccaagtataaataagctaccttatattcttgtaagaaagtttctttctaattaagaataatttgactacaaatactacaaattacttatttttagtcacaataaaatttgtgattaaaaatacaaatgttacgaataattataaattaattactatttctatgttgtgattaaaaggtctatgtagggatgtaaacggggcggggcggatgcgaaaattgctccccgacccccatacccgccccaatacccgtttaaattaaagcggggacaaggtgaggattacctgacaggggaaggattctcattgggtacccactacatatatattttcaaaaaaataatgtcttaaagagaattaaataaataatcataaaaattcagtaaaataataaacttaagtggaatagtgtgtatagtaaaaaaaataatatataattaataaaaagcctaaagtataaagttattttaattgtagtagttatgattttaaaacttaaatatatatatatcatgtcgcggcaagtttggggcgggtgatcatgcccccaaaagtcaaccctcgttctcgctcccataggagcaggacctgcgggtacccgaacctgcgggtataattgtcatccctaagtatatgactaaaggtatttttttgtgactaactatttttagtcactttgactaaaattaaagtaatgacaattttttattgtggctaaaactcacatttagttacaaaaaattatgttatgattaaaatgttatctctaaaactagactatttttgtagtgaagttaacaattttaataatatattaaatataaataggttaatatgtttcgattttatgtcatacgatttaattctaatccaactcaaataattatcgtgtcattggagttcaacccatatctatttttatgatcaataattcgtattgatttcatatcatgatttaaattgtcactcctaactaaatcctaataggttgacacttgacaacatgttcttgttgcttaatgtgcttaatgaattagttgcatgaattgatttaaaaaaaatatattatattacaactttaattttaaaatattaccaaatagatgatatttttgtcaaataaatgataaaaaatgaattgagaaattaacatatcacagttaattgtatagtaagtgataatgatatttggataagaacttttacattatatcattatcacacacgtaagaaaataaaacttaattaggagagtgggagtgatgtggtatgagataaagagagaataccaatatttttaccaataaaaaaggttaagatgtccatctatttttgaaaaaaaattagtcggtagattggtaatatttttattttttaattttt

SEQ ID NO: 229253 - DNA, 1313 bp, Cannabis indica
aaatataatatttttatataatacacttaataatttatttttaattttaattatttatatgttatttttttgttattgtttggatactattttatgattactttaatgtaatttttttattatttttgtattgtttctattaaaaattggaaaagtataaaataaaaaatctttaaacataaaaatatacttatactataataaaatagatttttttttcttttttgggaatcaatatgtttcatgtgttgtgtagatatttgaaatatatatttttaaaataggcagatatgaataatagtgtattcttttgcatgtgggatccatatctttgaaatatattcattaattttctttatttatcaatttattgtaaaaaaaaaaaagaataaagtaatattgtaaaaaaaaaatactaaattcattgtcaaaaagagccaaaattgtaagttggtattaatttggtcacttaccacacaagataattggttaatgagtgattatggatatataatagataaaaaataactaatatatacaatattattaaatattccatctccttctgagttccgagtatacaaccatatattaagaaacactttattaatgttccctaataaaacatacatatacaaacatatatagtatgacagttttactactacaacctccctccaacaatgaccatattccagttttatttgaccatatatatatttttaaaaagcatattgttattagttaattaatagcagtacaaagttttcgaatttcaccctgagtaccagtcaagacaccaactttactcatcttaaccatggacttagcaaactcaaagttgaaagaggtggcactcctcaaatattggaggacaaagcccttggttgagggatcagtccacagcagctgatccgaggtgagaatgcctcgtctcttgctcaagttgttgaagtaactgttgtcaaaacgagacccgcttcccgtgtcgagatcaactcggttcgaaccgccgccattttgtgggcagagagctcttagtgtagggacaaaggtagggtcgatggatggatcagcaccattgcttgaattcacgttgtatagcctccctgtcactaaaccgcatgctgctgttccaattgtatgcccacctatatataacatcaaatttcaatccataatcaatctcaaatttcctgcatagagtttttctttattgttaaagatgtgaattatgttttcaaattgttaaaatttcacttgaattattgccatgtaatattgtgttcatgctccttaaattattaacatgg

SEQ ID NO: 229254 - DNA, 1120 bp, Cannabis indica
atatatatatatgcactacaataattaatgtacctatgtatatataataaatgaaaaaggccctaatataaccatattaaactattatttaatgagaccaattcaaaaaattaataacatgctaaactatagaaaagataaataaataaatacagttaaaacattttgagaagtgcaatttctcattttcattgtttgagaaaagtcatgataacattatggatcatatatatatgacatataatactaatatatataaaataaaaataaataaataatgttgacttatatatgtttgcttttaaataattggcattaaaatggtaataatcaaatatatatatagtgtactactacacctatagctatatatatgtgtgtgtgaaaaaccaaccaaaatgcaaggacaagatattacaacatgatgaccatgtaataaaatagtacatgacaagaaataacatcattattaccatggttaataatttggagtaaataaaaaaaacactcatataatcaacctactcatcagtgtacaatttcactttgtacttgattaacttaatcttatatatattattaattaattccattaattaatgcttcatgccactatacaaatatttatatgtggtagttgatgaaattctattgagacttggagtattgttcttcaaaatattttataatagttattaaattaaaatatatgagattatatatttaatttattattgcagtatgatatttagcaataaaatgcttgtaaattttaactttactaaaataatatattgtaataattagtgatttatataataataattaatgaaaatattagaaacttaatacatatttaattataacatgtaatattatgcatattttatggtaaagaaatgttagaagatactaagaatatatattgcattcttatatatatatattaataacgttatagatgaaattaattatcatatttcataaaatttaataaaataatttttaaaaaatattactaattaattgtaaaataacacgtctaaaatattgtagacactaatgatggtaatactcaaaacctgcaatagtgcatttctaacatttatatatatatata

SEQ ID NO: 229255 - DNA, 848 bp, Cannabis indica
ggcaacactcatatcctggatttgatagacggggttagaggaagcgcaggccacatacctctttgtgggaagttgggtcaagtcatctacaaagtgacttaccatctcggaggcgaacgatgccaggcttgggcccacaaaatgctgaaaatagtcggtcatgggatcgagactcaagtcctatatctccctggtatactcacctcagaagggcccaccttgagcctcccttacccacttcttcaaggcctcatcctcagcatcacccttggacagttcatccaccgcgtaattttatttggcgatacgaagctggaccctctcctcgtcaggatgagcgggggtcaaaagaatgctaggaggggcaggaaagtcaccaggcttagctgggatcccgaagtcagtgctgggaccggggatggcaactcgcttaagcttcttagaagactcaaactcagatacaacacccttttgttttcggtcgagtggaagaactttttcttcctcttcttcaatgagaaccacctccttgttcctaggaacttccttggcaggtgcccctgaagtcacatttgctcgaggatgctctggcatctccaactctaggctatggttgcgggccagaatggcaagcaggtcttccatgggttttattgttcaaagtaaatagaaagttagaatagcactaaagaattacaaatgaaagtataatgcaacaaggctaatcctaccctagcaaattcataaattaaagagttggtgtcgtcatcccctaaaaagttatctggcgacaaaaaccaacttgaggtcatgtaagaggagtgttccaaagggattggaataggagg

SEQ ID NO: 229256 - DNA, 816 bp, Cannabis indica
cttgcaaattttcaataaattaaacatttcatctggaaactttgcaatgattagtttcctagcgctaaggtgttgaataaaagaaaaactagagatggtggttgttgctggtgtgagatgaatggggataaagaggattgttatcatgctatatggggttttgggaagatcaaacaactattgaaagatggggggtttagaaaagttataaaaggagagcgggaggaggatgctatggcctttctcatgagaattacagcaggtttgtctaatgacagaacaaatttttttatgactatggcttggcaggcttggttccttaggaattgcaagctccataaaaagtttgttctaggaatccaagccgctttgaattggattgcttctaatctacaaaaattttgggataagaatggctcaaagaagctttcaaaggagaatgtttgggagccccaaagatgaaaaccacgtgagacatcttagctactcatcaatgttgatgcgactgttagctgatcgaattatggctgctgaagtgttggagcagttgtacgggatcatttgggacatgtgaaggctatcgggatgggggcaagatgtagttgagatgggccttacaacttgttagttacactcggattatgctgaaacaatggctatataggggagaccacatgatatgagtggtgctttgggattactggtagttgcggtgtcctatggtgtttcgcatgctggaatttcaggggttcacttcaatccaagagctactagctcatgaaattgctaagtatactcttcataataagagcgctt

SEQ ID NO: 229257 - DNA, 2269 bp, Cannabis indica
tgtgcaagcatagttggatcaaatatgagacatgcttaagggcttggctggcctaaaaccattagaccttgagctggacaggtcaaggggctcacgtttatcggcatacatcaatttcttgtccttaccgaaatttaagataccaacttggaagatgtacatgggaaaagaagatcccttagtatacctgaagtactttgagatccaaagaaatctccaacaagtaactggagatgtgcaatgctaaatcttttcaaaaccctggctgaaatagcccaagagttatatttcaagatgccccaaggaagatttaattcttgggaataattctctcgagagttctatattcaattctctacctcaagacaaataccttaacgtctggaggatcttttcaaaataaagcaaagacaatacaaacctttaaaagactacattcaacgattcatggttgagacaatcatggtaaaagacctgacaaagaaggtcgatatgcgaccatactcggaggcatcttactgttgagtcaattctagaaagatatcagaaggatctcaacgagccacatgaaggagttccttgagtgagatgatggcttcataaaaatgaaagaagctgtttggtaagcccaaacaagagagcaaataatgtcgaacaaacactgggcatcatagtgccctaagtactatctaacatgtcgaccagcgtggacgatctctgtcaattctccaacaatgaaaatggtggaggcaagcataacaatgaaggctctgaccaacataatggccaaagaggaaaattcaacgattcctttacgccatgaagtctaacggagaaggaggagaagtgcacacgcttcattctcctaccaaaactcccaatacaatgcatgccaataagccacggcgacaggtgtcactaaaacctgaagcacctggctgaccactcaagtaaaccaccgagactcgaccaatataaggccacctgtcaactaaacatggccatcaaaggccaagctctcgcgagtttcatggctaaataaaaaagcatatgtccctaaatctctcaaggtttgggagaaaaccaggagccaaagaagaagcgagagcaggagcaaaaataactcaagtagtataaggtgcattgactacctgcatgatgcaggaatggccctcagaacacttgggggaaatggctgctcgaggtaataaaggtcaaaatcaaagcttttaataacaaggctgaatatgaagctccgattgctggcctcaagctagcacacgcttaaaagctccttgcttttgttcaattataaatatataataaccactttaatggagattcatagcatcattcaagtaaatacaaattaagatcgtaaaaacataagcttgtaatatagctacacctaattctagaccggttaatgtaagaactatgaataaaggatcaagatcccctacaaaaaaaactataccattcatacatagcataatccaagcgaactcacttaaattcttctttataatacgtaagagactcccaaagcgaattcaacattccccaaaatagtaacataaagataaaataccactttattcatctgcacaggaaaagtgctaagcccgaaagtcacttcactctcttctctttcaatggtagcagctagttcaagttcaatgtcagccagattgttaaatactagcactaaagcccttctcaaaagcatgggttgaacacctagacatacaccacgactcttaactagtcgtaggtcatgtcctgggtgaatatgcagctcattgtaaaaagatgatggcctacttgagctaatatcaatacttgttaagttagctcaaaggttgtactaaaatgaaagtccccaaagatgatgcagcagtcgacgcactcgcttgactaggcaaacttagtacccgcttagttcttcaaagaactaagtatctttgtttcaaaaagaatagacatgctgagcaaccaacatggatacacttacaacagcataccttcaaacaaaaatcttgtcgaaatgtagggattagggagatggttgtagagtgtccaatcctgcacagcataatgcaaagatgtggtatcccaatgccacctctaaaaagtgttaccaagaaagaagcttaatagctattgataggactgcataaaggctctacgatagtcatgccaggggtaaagtcaatcaagtgcagaagggatcaaattgcagcattgacctgggctttaaagggttggc

SEQ ID NO: 229258 - DNA, 3161 bp, Cannabis indica
aaaagataatgccgccaaactctcaaacaacggatgatggcagtcatctctttttcttggactgtataccttctctctgtctcattcaatttctgactttcgaatgccacagggtggccatctagcataggcaccccgcctatagcaaaattagacacataagtatgcacttcaaatggcttcaaacaatcaggaagaaccatcacaggttctttggcaaccgcagccttcacgtcttcgaatgccctatggcaagaagcatcccaatcccatcttttattctttttcagcagttcagtaagaggggctgctcttgcagagtagctctcaatgaaccgtcgatagtaattcactagaccaagaaatgattgtaactcgggtacctttgttggcgctttccagtcttggacaacccgaactttcttctcctccatcatcagaagtccgtctcttattttgtggccaaggaacatcacttcttttttggcaaatgtgcacttctcccgcttcacatagagggaattctttctcagggcagtgaacaccattttcaagtgttccacatgctcagcaagggtgttgctatagatcactatatcgtcgagatataccaccacaaacacatcaatgaatgcatgaaatacttcattcatcaaagtgcaaaaagttgcaggggcattcgtgagtccaaaaggcatcaccaagaactgataagagtcataccgagtcacactggtagtttttggctcatccccctcccaaattctcactttggtaatagcctgaccttaagtccagcttggtaaagaattgagcatttcccaactgatcaaacaagtcagcaataagtggaatggggtatcggttcttgatagtgatccgattcaaggcacggtagtctatgcacattcttaggctaccatccttctttttctgaaacaacaccgaggcaccaaagggcactttggaggcttccatgattccagcatcaatcatctccttcaactggattcgaagctcactaagctccaaaggtgacatacgataaggacacatagttggtggcttcgcaccaggctccagttcaatctcgtggtccacaccacgtcgaggcggcaacccttttggcaaagcatcaggcatcacatcctcgaactcattgagaacagcttgtatctcattgagttccactactggaggggcaagtggctcattgtcaaattcactcagtatagccaggaaggaagttgatttgtttgttcatccccctcccatactgtagtgcggataaagatctcgtctcaatatcctgggccttcacagtcggcactatgacaggttgtgcaccgtccgttatgcacactgaattggagtgtggaatgagtatcgccttcacttggttcagaaactccattcctaggacaacttcatagtcatccatattgacaacagtccaattcgttcgaccaacccatgcaccaaggctggtcttgacattgtttgtaaccccatcgatcggtaccggccccgagtttactgtcttcagaaccccaccttcgttagcagttggcactccaactttagttgcacccaatctcgacaaaaaattatgggaagctccagtgtcaacaagggccgtcatcctcgatccgttgagggtgagctctacgaacatctgaccattctcatgcgttcgtggacacgctttgagagctttcaataactttatagaacccaaggacgcaccaggcccttgtttcttctcgttttccaacacaacttcattggcagcaaccattgctgtcaatgccttcttcttcgggcattcccgagcccagtgaggtccatcacaaataaagcatttcacattagctttgtcgaatggcacctttgattttcctttctgagcagcagtggcaccaccactactcttgtatcctcccccactcttactcgaacccactgttttattatccttgggcctctcagcacccttcgaagtagtataatcagtcaaactctcagcaaccgagatggcagtggagagatcagtcacattccttcttctcagttctgttctagcccatggcagcatgccatcaataaaataaaacaacgaatcctcttgagacaggttcagaatttccaatatcagattagtgaactctttcacatactcacgaatcccaccagtttgtttcaactttctcagaaaactcttagcatcatcctcagcatgttcgggatagaactgaatcttcagctccttggtgaaatcatcaaaagaattcatcacacaaaaattcttctcaattttagcatgccttcggcgccaccattgcatcgctgtatcagttaaatacatagcagaggtacaaattttaacctcctcttcagtaatacatgtagcttcaaaaaaacgggttaaaccccacaagaaattatccacctctttggcgtttctagaacccgcaaatgttttaggcttgggaatctcgagtctctgaattgttgggatgcctcctcccatccccgcagcagctcgcttgcacatcgcccaatccgcttggactttgtcgagccatgctgtaaaggccgccaactcatctctgtggcgcctctctatttcctcattcttgtcctgaagttccttgttcaacccacgcaaacactcaacttcagtcatcaacaagtcgcagacagtagcaacttccgctcgaagaacagcagcatgctcctggacctttcccgggatcagcgagtggatagtggcgagttcttccgtcaactcgttctgcttcttctccacattttcaacccgagtatctaggtctttagcaagcacaacactcttctttagagtcttttccaaatctgtaacagtctccctcaaatctctttctttttctttggtctccttcgtcttcttcgaagactttaaacctgtttcaatggcgcttagatccgtcatgttttttttctgggtactctacctttaaccagctatgataccacttgacacgctccgaacgatccgtcgaaggagtgtgcggcaccccacaggtccgcttgcgaggttcagccaaccaacagagtgcaacaacaatcgaaacaacaaaggcagcagaaaaatatgaagaacaacaagaacaaatgaagaa

SEQ ID NO: 229259 - DNA, 2643 bp, Cannabis indica
atagatttcattggataactaacaaaacaaaatagacaggcaggcaggcaggcaataagttgaataatcactgtaaggaatcatgtattctcacctagcattgcacgaactttttcaaggctttcttctgaaacagggccattcggggaaaacgaagctttgcaagtgttaaagagtctctgaatataatatggcatggtgcaaagacggtaccaacttaactgaatggacagcagccctgatatcagtaagctggtaacgccttcgctaaaagaaactgttttgatttcgcagacaatccaaaacacagttggctaaggctatatctatttatactgcataaccatttctttgtttcgaaaaagtaatccaatgacaacagatctgcatcgaaagttacatgttcacactctccctcctaagctcattaacaagcaactgcatagaaaaacacaataaactaagttaaacgtattcctcacaagatcaaatttttaacataatccaaatatagaatataacaacatgtttcttcatgtgaaggttaaacataatggcatagtttagtctccgtataacacaacaacgatgtgagttcattaattttgacaaaatcccattagagaaacaacgtatacagtaagacccatttcagatgcagaattgaaaagattccatacggagacaaaaatcccaaaatgttagatatagaaaaattaatcataaaaattggggggagaatttacgaataaaaagaagacccaaattggatcagaacctgaaatggtgatggatgaattataaacccaacaaggaggagagatggagatagaggtggattaggctaaatatacaactgtggagaaacaagaagaagatcttgcctacgtcattacctgtcttgggtttttgagttttggggttttggtacagctcctctcctcttgagcacccaccaattgggactcgcagagctcttaggccctgcgctgtctgcatatacctctcacggctcacagtgccttcataacaactaaattattttttaattatttttttcctcaaataaatggaaattagtatattttaaattttatcttaaaaataaaaaataaaaaaatgagacaaaagaaaaaaagaagaatagtatgaaaattggggtaccagtaaaaaaaagaagttaaaagtaaaaggcatcttaagtgaaaaaatagacatcataaaatttgatgtcgttcatgttgcaaacgacatgtttttgtttttcgggtaaaatgtagtgagtgagaatgagattgttactgttttaatattagtttggtttttttttgcttaatttagtttggtcttcttcaaacaaatacattttttatttttatttttaattttgggttgagtagttgaagatacttgctgctattttggttgagaaccaatcatatttttagtaaaaagaaagggaaaattgtctattttcagaagaactatgttcttttttcagaggaagtagtaaaaaattgtctcctatagcatttaagaggatcattggttacttttcaaaagaagaaaagatagaacagtggtaaagaggacctttgcttctagcaactattattgtttttttttttttttttttttttgagttaattatgatttttactcttaaattttgacatatattaaattatattccttaagcttttttagttattaaaaaattttcttaaactattgagattgttgcatttaaggatatttgtctagtttcattaaatttaactaattctgtgattgattatgtactaaatcatgctctctagactttgagatgtaccaaatcatatccttcaaactttgagatgtaccaaatcaaattatttaaactttaatccatgttagacttttcttactaaaatataaaaaaaaattacaaaatcagttcttaaatccaacaattttaataatttagagaaatttttaatagtcttaaaaatttaagagatataatttaatatatgttaaaattcacaaaacaaaaaatcttaattaactttttcttttttacgaaagtaactattatctttaaatacttatttaaaacaaagtagaacaatattagtgaaaaaaaaaatattattattttttatgaatacaaattaatgctataaattttaattaagcaagggaataatcagaacatatacttttttgctgaataataataatttataaaccaaacaaaaaatctataataattcttttagaataattgactaattctatggtcatttcatcattaataaagtaatttgaaaaaagcactttccgtgtaataagtgatgtgtggaataaaatttgtgttcatattccacgaatttaatgatcgaattatggttccaaaccactttgcatagttagaaaaaggtcagaacataaatttatacatataattaggtgaatgttaagtaatattaagtaataatattaaatgtaatattagttttttaaatgtaatatatgtatattaatttttttaattagataatgtatttttatttttaatttttaaaataaaataaaattttgatttttgagaattttttttaattattgtggctacattgggtgctcttagatgtaatt

SEQ ID NO: 229260 - DNA, 1481 bp, Cannabis indica
ttttcttttcttttgtagtgacttaacaattataatttttttttgaaacataaaaatctattacaacatatattcagccatccatatacagaaaattagaggttttttttcaaaaaagttgatatgataagctaggtgcgttggattggggacccaattatacgaatgaataataatgaaaccatttaagatcctccaatgtaaatatgaagctgagttggatcttacgcatgaaggcatatcagaattggactactgccaaaataaacaacaataattccttttctttttttcttattattcttttttaaaatgttaataattgaagtactactactatacatagtactccaaagaccaaaactattcatcttgcaacttgtttttctttcaacttgggtttcttctatcgttttcccacttgtagagaacagttgttttcttattattactttcttttaagagaaaccctattcatcatattcatatctagatgttttgcataaggaagtttaattattgatatctagatgttttgcataaggaaatttaatgttacaaaatttattatgttcaaaaaaataaaaaaacaaaaacaaaaaatcaatatccaaggattaatactgttatgtaggaaatactattgtgcaaagaagaatttcctatatttgtaaaaggtatttttgttgttatggttcttgtagaattttgttatatgaacagaaattttgtttttatgattatgaagtaaaatttaacaaacaatttgattaatacgaaattattataaaattgtttgaacagtacttgtgaaatatgttctatcaaaaattgaattttacagaacaaaataatagttcataaattaaaatgacacagtttacgggaccacacccagataagattcatagttaaattttacaagtacaaagtaatatacttaaacaaaacttatagaattcctctaatgatttgtcgcaagcttaatgtactcatatttactgaatgaatctccttaagacaccaatgtttgaactcctttcaaatacctgatgaatgcttgttttctctcgatgcgagatttgtagaaatcttctcccaaagatagcagtgcttgcttctaatgcaagacttgtagaaatcttctcccgacgatagcagtatttgtttcctctcgatgcaagacttagatgaaccttctccacaaggttgttcttcacgttcttcactttgaaatgtacttcacacaaaagtaatcataaagactcacaaatcaccaaggaatagtaaaacaactgtcatttacaaaaaaatatatattttttctaaaaatataagaaattaaggagtggaagctactagtttaggtgatatttatagggataaatgatatccaaaactaagctctaaaggtttgaaaacaaagagaatgcattaaatgtttccttacaaaaattcattaaatgatgaaattttttatg

SEQ ID NO: 229261 - DNA, 946 bp, Cannabis indica
aggagagtcatgagaaattgaacaatcagggagggtgatattacgaatgaaattattcttcctgcggatggaagcttttcgatgaaaaattttcgtgttcttgtcgccagcacgaagccagtcaagtctagctctttgcttccagtagacttaatccttgtggagcaatccatctaactcagattgaagataagcagcatgatttaaagattgggaagtaggctggttatcgtttaagaccttgtggagctcagcttgagtttgagagatttgaagctggagaggatactgagatctactccaagacttaatatccgggagacagatggattgcctatccaggatattttgaagaggagatcaaaccgaagaagtaggaagagtccaagacgattggataaggttgacaaaagaagggtcagtgagccagtggttttccatatgaaaacgagatgacttacggttatgtgaaccgatatcattgaatttaactttaagggctctatggtgagagccataaaaacccaaatggaagagagcggcctgagggaaaagattctaccaaagttgattagaagtacaccagtcaagacggtctaaagattagccatgtctctaagtaaatttaggaccagaatgatggagatggatggggattaaacttatccataaacgagtgaaaatgatgcatagcatgaggaggtggagaattagtcgaattcctatcactaacagaaagatagtcattaaagtcaccaataaccaaccaaggcaaaaaaggaccagtatcaaataaacggttaagaagagtaaaagtgactgctttttgattagaataaggataaccatcatacccagaaaagtgccagttcatatcattaaaattatttataatacaatctgttgggttttgtgccctaaataaaacccatttcaatataattag

SEQ ID NO: 229262 - DNA, 2050 bp, Cannabis indica
ttttttatttttacacttaataaaaggactgtatatatttatccacgctgggctgatccaaacctattcaattaattggctatgttaaagtacataacattaatgaacttgagatcaattggttcaaggaaggaaattaaggaatgaaaaagtaatacaatatatctatgtaatcttattttggaattcaatatatgctatttgatcaagttgggttatgtgggccaatttaaagcaataaagtcaatatctaaaatggatatatatattacgaatttatattaagttgcacactaaatatataattaatagaactacttttccagagaatattatatttggtacataaaaaagaattgtcccatgacaaaaagacctaataattatggcaggcagcagcagcatcattttgcagtttgcactatacctaactctcgtgtattagtcttttgaagtttgatggttttgacagcaaaaactagggatcgatcgtgtattcaagtagttttcataacttatattgcaagccaatctttccatctaatattgcaacaaattttaactactatagtttctactaattagaattaaaccttcatatatacatatatactactactgttatcattattaagcataattaaaaagcaatcattatccactaattattacttatagtttttcttatgtctaattatatatccactaattataactataattacttatagttaactgtatatgtacagatagtgtatagatttagagtactcccaatcttttaaaatatattataaaaattctattttttttattttatagtacacttttacactacatcatacatcacattttataatattttatttattaaaaatatataatattaatatatatacatatccctatacaaaaataattattaaaccccaaaataatttataaaatatgttaaattaatttacaaaaattttaggaagccttcttcaaatacaaagtgtaaaaatcagtattttctgtagtgacaaataaggttgagttgaatctagaatggttgatgtgtacaatttgtgctgttagtgttgtccacgtcagcaaaaatattttgggtgtttaattgcccaactgtctacttcgaatttctttatttagctgggtataaatattttttattgttacttttttgactaaccttcttattcgaagattagagattcgtttctttcttcttattttttcgtctttgtatttcattgcaggtactaacaagaaactctattattgtgggttgaagtttcaaaaaaagtcctgaagtcaagtagtaagagctgaagggatttcagttaatacttggggtgatacaaatctgaaggtgttcatatctagagctttgttaaagggatttcaatgaaacaagaagcaaggagatcttgcttattttgccaaggaatttggcagattggagtaaatactgctgtaaggaatttggcagatttgtatgaactggatgttgtacttttgcaaatcatttagtgaagttacttatcctggtttagggaacccaagcaatacccgagattggaatgtgtttttcaatggtaagggaagcttgtaaattgattgtctattattgtcgtttcttcatctctttgatacttgaactcgttagtcgaattggtaatagtattaaagtgaaacttggtaatcaaacttagtaactaggctttttcgaacttacatttggtatcagagcaggctttttctattaaaatattgatccttagggttctttcaagttgtgttgtactaaagtttattattgcagtaattcttgatttttgttgcattttgtttcctttctgcaacacccagttggaactaatcccctctccagacacgactttgggagtatacggctctctatctttgttttgtttttccttgttcatacaagaatagggatgttcagagaaggagggtccacatctcgacccccaatgttgggatgtcaacctgggtgctggatatcaacttggtcgctgggttgtca

SEQ ID NO: 229263 - DNA, 1785 bp, Cannabis indica
cgggctccctttctctacaaaaataaaaaaaaaaaacatgtgtgacacaataattaattatatttaatttttgagtagttgggaaaattgctttgttgttttcttcttgtctttctctctgtttttttcttccctaggataataaataattgagtgtaattattgtgtaaaaagggcgagaattgaagtaaagaaaattatagaaacaagaattaggagaaagaaagaatgatcatctttattgaatatacaaaattttgaaaattctatttaaattttttgtttaaatatttttctaaaaaaagaaatattttattctttttctgagatatgcctttattgcctggctttgctattgctttgtggtcctcttctcaactcaagtccaaagagccttctttatcaaattgattcatggtatttttgctagttaaaaataaaaattaattagaataaaagaaagagataaaaaacaatcttcattaatgtaattcaaacataaaaacaatcccaaaaatgagttggattcttccttttccaccttttatttatttttttaattaacaaaaaaataaaataaaatctactcaataaaaagatgttttaactttcatagcataagacaatgtatcatgcatagggtattatatttacacccgaaaaaataagagttttatttgtacctcacaaaatgattacacactcaatatttttttttaaaaaaataagctgaaaattatttttaaaaatcactctcaatatttttaagaattttttttcgcacaatattttgtgttaatttaaatacttattttaattttatttttatatatatttttcaattttttctaaaataaatttcatataatttattattttaatttttttattataatatttacatataatttatttttgtttcatttagaatattttttaagaacattgagtcagaaaaaaaaattaatataattaaaaatattattttatgtcaaattttaataataataatattttgtgctaatttaaataattatatatattattttgcttttcataaatatatatatatattttaattgtttactctaataaaatttcatatacatttttttatactacaattttaatttaagaaaaagataataaaaaagtgagtataaattaaaatatacattttatataaaatgaaaaaaaaaaatagtgtatttatttatatgttagagtaactaataaaaaactcctcttacttatttattttactagtctaaaaaataattgagtacaattataataattgaagtattatagacagagataaaattaagaaagaaaaggacataatgaattatatatgtgactcataaatattacgtaaaattgtaattaaaacaaaagtaaaagtaaatatttaattatagcattcaagtatatctggtatgtaatattattttattgtattttcaagtatatatacgattagctttcattatttgaaacatagaataaaattaaaatgtagtggatctttaatatatttaaggctaattagtaattttcctcctgaatttgaatatctattaaatcgtactctctgaatttttttgaccgttaaaaattcccccgaactattgagattgttaattagtaattttcctcctgaatttgaatatctattaaatcgtactctctgaatttttttgaccgttaaaaattcccccgaactattgagattgttaaatttaaggacttttgtctaatgtcattcaattttattgtttcagt

SEQ ID NO: 229264 - DNA, 1384 bp, Cannabis indica
tccttaactttattaccattagatcaacaatcaagggctagaaaagtatccctaccatagggacaaaaccaaggtctccactatagacatttcttatatatatatatatatatatatacattataagcttcaactaacaacttgtgctgcaatattttcatgcaatatattaaacaaaattttatatattatattttgttccacatatataatataaatttatttttttggggcctccaaaattgtggggcctagggcctcggtcccggttgcaccaccctatggtcggccctgctcttaacctcaaaattttcttgaaataccagttgttatcatgttaaagagggatagaccaaaaatctcaaccccttaagtagatggaattattcatctaacccaaaagttatcttgtttactcgcaatgacccaaatatacttggccatcaaagctatattctactttttctcctctcggaatctaatgccactgtattttttaggaagaattttttttccaagtaggtaaatagaatttactatgatttccattcacccccaaaaaaaaatctctacaacttttatcgatgcttgttgtcactttttgagtaaaatgaataagcccatccaatagttcctaatccccaagagaatcgaatgcatgagttgcgcacatcctgtaaaagataagtttctgatggccaagttgttgagatttttatgaatcttgttaaggatgataccaaaatccaaagctttccacttggttggtataagattaactcccaagtatttaagcagaaaagctccttcctcaatctaaactaagctcaagatagcccttttgcaactatcattgacacccccagatttgattgaagactttgccatgttagctttcaaaccagaggaatcataaaaaggattaaaagcttcatgaatatacctcacatgcttttcattacctttgaaaaagatgattaagtcatcaacaaaacaaaggttgataaggttgaggtgtttacaaagtgggtgaaaaccaaagccatccttgcaagcatagtggcccaagattctggtcaaataatccatgataagaacaaagagaagagaggaaataggatcaccttgaagcaaccctttttctcccttgaaagagccttgcagttgcccattcatcaccaagttgtaggaggtaccttgtaaacaaaccaagatccatttaataaattttgtaggaaaaaaaggcccttcaataagtcagctacaaacagccatataactgtgtaataagccttgcttaggtctatcttcatgatgcatctagccgagacattcttccttatatatcttttaagaaggtcttggaaattaagaatgttgtgag

SEQ ID NO: 229265 - DNA, 1247 bp, Cannabis indica
atataaatcaaaggatcatttataagtgctcttttccaacaaagctcaaaatgtaatctttgactactcaagttatgaatattacatatttgtcatggtctaaggtttgggtaaattattttctcttatttattttacggtttatttttgataaccactagtctcaatccagtccctttcttttaacgaccttctaaggttaggttgacaaaaaatcacatcaacaacatcaaaatattgtgttggacacattaaagttcctcataacaatgcttgttaagggaatgaatagttaaaaataaagttagagttatggactcttttagttggctggactcttttagttggctggactgcaaaatggacaggaatcctagcaagagtaccaaacaagaaatttccaaaattttatttagttacttcattatcagtagagaagataattaatgtgttgcaacgctaaaatttgaaacgttatcacctttgattgcaaaagaaaaataaaattgaatgaagtacatgtaactttatttatataataataggcccaagaggtcactatagcagctcttcccctccaaatagggtttgactatatgataaaaacgcattaaaggtcctgcttactaactatcctttaaaagggcttttaactaaatgatgacaacgacttctaaaacgacatgcatgtgggattaatgtttacattcttctattctaacaagaccagtggaaaatggagcattgtacattaactaattaagaaattgaaggttgaccatcgattaagaaaggttatattttcccagcagccaaacagcttcagactttagttgtaatgatctgagagggcatatatatatatggtgttttgatcaagtctgacggctctgttgaaaattagagagtattcactactgggaaatactgagctggaacacttattattgctcatcttctgaaagcttaagcttggttcttttggaattgtcaaaggcctgtttgatctgcatcgaatttattgatggaattcatcagaagtaaaacattaattagaagcactcacaaacatgaatatatatattatatatatataattagcatattgaataaatatatttatataagctgttagtacctttgtggtaagaaaggtcggtcaaaaaaaggcataagttgagctctaggaaccatgtcctttctcaagaaacggacctcctcgtcttctatcaactgttttacatttt

SEQ ID NO: 229266 - DNA, 1418 bp, Cannabis indica
ttggtaataggactattacaagcataactttttatccaacaatcaaattttgtgccttacaataatcttgaatcttgattggttactgtggctagacccactcataaattgtaatcgttcattgtggtccctaccttgacaattacaactcttaaacgatagtgaggagagagaggctcttttaagagatcagcatttctattgagtattaggtacagtggtatcctaacaccttctattctgtagctagtttttatcgattggttagcgatattctattaaagttattttcttaaattataatctcttttaacatgtttctcttaagaaattgtctattacaaaagattatggcttgtactcttatgaattttggaaagaagaagggaaacatcaagcttagcgtaggtggtgtgtgaacgtgtttcgaggtttggcttgtacagttgacgatgcatgtgatgtgttctattctgattccaaatatgtgtgtttttttttcttttatcaaaagtatggtccacgctggaaaaggtatttctaaaaaggtggtccagacaattgagttttaaaagttggctgtgtttgactccttataattgaattagtcaaaagggtgagccccactggtttctagacttctttcttcgtttgacacgtgtaggtaccagatctcattctttctgaataaaaattcctggttcttttcatgtttcaaaatgacgggcactttggggaagacttcacttgaatgttaactgtaactatatatccattgggatgatttgaaaattagttatccacatgacatggctataatatatattatagatatattgtgtaattgtgttatacgactccacgatgaagttgaagaataatctttttcttttttttttgaaagtaaatcgaggaactccattaaaaggcatcaaactaaaaaagcagtatataaaagatagacaaatataaacatctaaatcagtgggcaagcctggccaccacacccaagccttatttaaatttaacgctcgttttgttaaagaatgagcaacatagttttttaacgattacaatgcgatagtgttgaggaaaagaatgacaactgtgattaactaccaactgtcaagaattaggtagttagttagagttgttgtatctgttattctgttaagtactttctgttctaccagttatatatactggtattgttagaggtgtattcattcaataaagatcttcattttgtttcactttctttctctcttttctctctgtgtttttctctctttacctaaatcaatttggtatcagcgcagtcgacaatagtgacctctgtcaacaactcgatgagttctgtaatggttcccaccaccatgttcttaccacctctacgattagatcgaagcaactatttt

SEQ ID NO: 229267 - DNA, 836 bp, Cannabis indica
ttaagaacttaaaataccatttgaagttcttgtaattttgttaacgagttcatatcgtcaacaattatatatatacatgtacacttatgtgagatcttacaagttcatgaagttattgaagatagtttttaattgcacttaccttgtactataggtaggaacaagagtataattcttggctttttgaaaggagatgatgattaaacgtatccatagttgggatacgaagctcatatttggtgtgagaaaggaaattttattgaaaattgtggttgaatctttaccattgtatgtgatgagtgtcttcttgcttctggtggggatatgtaaagatcttgagtggttgatggcatgattttggtgaaaaacgtcttctagcaacagtaaaggaaaagtttggaaaagttaggaccgaatggtgattcataaacattcaggtgatatggggtttcaatctttgcgtgattataatctatctatgcttggaaggcaaggttgacatttgttgttgcgaccctaaatctttggttacaaaagttcttaaagcttgctatttccctacttgtgagttcctacatgttgagttgggttatactcttggttttatttagagaaatgcgtggtttccttttttttcataaaaaaaggtggcttagatgtcgggttgggtctgggacctctattttatatgttgggacccgtggttggcagtggctttaaatctgtatgtcgtctcttcttctatggggttggaaggtcgtagagtgtgtgattaattagttttgagaggagagccaagagtaggatgtggatttggttagggacatattcaatga

SEQ ID NO: 229268 - DNA, 1276 bp, Cannabis indica
tgaaatgggttttatttagggaacaaaacccaacaattaataccttgtttttgagtatacccttagcaactaagcaggctttgaatctattaaccgagccatctgggttatatttaattttacaaacccatttgttgccagtgactggtttggtggtagataaatgacatcccaggtatgattggcttctaatgcctctatttcagcatctattgcgtgaagccacacttagtgttggatggcttcatcatatgaagtaggtttagataatgtgtaaatggcgagtatggcaaccctgaaaaaattagaaaaactatcgtaagatatgtaattagcaatgggataggtttttgatgtagtaaccttatcacaaatgtaattttggagatacaacaactttgttatatttctacaagacttggtagaaatagttgtatcgctccaagactttggagaaattggagatggtgctacaaggtctggttgtttagcacctaaaaaattagcagtatgtggataacccgaagaggaaggtatatcaaatttataagtggaaaaaaggaatcaatattcgtattggcaataccattatgtaagggatatattgattcataaaaaatgacatctctagaattaaaaatatgattagtttgaatatcaagtaaggtgtatgccttcaaattatctgggtaccatatgaatatgcaggctttggcttgaggaaacaatttgtggccattgttataggatgatgcatatgccaaacaacaaaaattacaaagatgatcataggatggggatttgttgtgcaaaagcttataagaggttttgtctttaagtaagatagtatgtgttctatttaaaagataaaccaaagttctcaccatgtaactccaatatataaggagaatgttggattggaaagccaatgcccgagccactttgagaatatgttggtgtttcctttcaacaatagcattttattgtggcatgttcacacaagtattataatgaaaactatctttgttagcaaaaaaaacttgttaaagtaagctcctttgcattgtctgtccttacagataggggtgggcatccgatccaatccaacttttttttcctcatccgatccaatccaattagtaattggatttagaaaatcatcatccgatccaatccaattagacctcaaaatccaatccaatccaatccaattactaattggattggatcggttttttaatttggatatccaattacacacctaaatttcaatatt

SEQ ID NO: 229269 - DNA, 939 bp, Cannabis indica
tctctactatttattccatgtggacattgtcacataacagaaaaagtgacggttgagcatatcgggatgggcagtgagattgttccttgacctctccatcaatacagtttctatagccatggatgggtctatcctatgaagaagaagaacaaagagagatatgtgaaatgagagaaaacaaataataataaaaaatattaaagtacattttttaggaaatattaattttttatttatttatttttagtaaattttaatatttaaattatttttaattaaaattattatttggaccaataaaccttcaacgcgtgacatttttgttagcacttaacagatcaattaacttggagactaacgggcttacaagaaacatgaccttgggaaatggagactattactgccattttttaggttgagaatttatttgcatcaaagtgcagtttttgaggacttatgccacactttttcttaaattgtattaagttttcacatattatcaatgtaagactcttgaggtcatgccttctagctccagcgacaagagcgatttttgcatggaaaaaaattataattgaatcatgtttatatgaatgtatgtatgttatagttattaaggatctattatacgtttttgtaaaattttgaataatttacgatgtcaaaaataagtttgaaaaaaattaatttaactcgcatacaaacatcaaaacaacttatgtttgtgttttcaatgtatggataggtttcaatccaaaaaatttatatatcgcacgttatgattatttgaaatctctcataaatttttgaaattttttaaatattgtataatgttgaaaatacaaaatatgttgttttgaagtctattttatacaaatgtgtgaaataatttgttctgaaactaattttggacatggtaatatatttataatttcacaa

SEQ ID NO: 229270 - DNA, 1064 bp, Cannabis indica
atattcctcttcaagttttaactcaaagtaagtttacttgaaaatattttcttgaaattgagccttgccaatagcattagttttcacatgagagaaattaaaatatacaagccttttgaaaccttaatttcggataatcactaagtttattagcagcatattggcaataattagaagtggcagtcaacttcatctatctctacttataagattaatttactcttaatagggtaaaattctaatgtcccctaaaagttatagcaacattaattcaatcatcaaaacttgaaacatcgtactgatatgttaatttactccttagttatttttctagtttaaagttatgatcaaacaacaaacactgaaattgagtattagatcagataccattaatatatagaccaccaaaaaaacagaggtgtaatggattcacatacaagaaaaagtattcttaaaaatcaatatcaaacacaaaataaaataaacagaacaatgagtatttcttctatattttagaacaaacaaacacaatatcaacattaacccctttaaaccttaccagcgatgatcaatttaaagacagtccaaaagaaatcaaataatataagagcatttgaaagaaaacaacaacaacagcaaatgggtgaacaaaacccatgttgttgtaacagtaagaacaaaaaaaaaactgtgggaaaagtgatgagggaagcaaaagagctgcaatatcaattagaaatgagagagagtacctttggttgaacctgagaacgttgaaaggcggcaccgttagttctctttctgaggaagttggcttaagttgtgacctgatcagagacagaacgcgggacctgctcaagccgagatgggatgcaacggtaagagaagtggcataacaatggtaatgatgaagaaatgggttgttttagaggagagagtgacagaaaaaaagagataggttttgaatgagatgagatgggagagtgatggggaagaagataaaatcagatctaaatcaataataataataaaacaattatgtataatgtagagagagatacata

SEQ ID NO: 229271 - DNA, 909 bp, Cannabis indica
actcctttataatacgtattacgtaggtagttcaaacttgatatgatctcctaacgtaaacttggtcataatttttgcattgaaaaggtttggtagagatgagtttgttcttaacctaaaagacattgaacataatattaatattatgcaaaccattaattaatttgaaaaaattaaaattaattaatcgttgatcaaatattgattaattcataatatatttattgatagttattatatatttttttatatgcgtaaaaaatatatatacataattaatttaagtgtgtacaaaacaattcaacccttttagtaaacacttaactttgttatttagaaggaggtagtcttatatattgagaaattaccaactaagcatgctaataatgtaataagaatattatagttgtccaacattaaaaatacatatatattatttttagtatgatttagttagtattgagtattatatattatagatatatatatatatatattaatgaaattcatttactttaaagtagaggaaatcgctcagaaggataacataaaatttaaaagggacatcattctttttaaatatacaatcaacgttatatcgagactattatatcccaaaacgtacaactcgattaacaatcacaaaataatttcacggttacgcgtgcttgacctgagataatttcaggatggatgacctcttgaaaaattttctcaggaagtgtgcgagtgaggacgaagcacactgaaaacactcgtgttggtttgtaaagtcagtcgtcaatctatgaagcaatcagagtgacgtactcgtgtataagcaggccggccctaggcataggcgggctaggcccacgcctagggcccactcattttaggagcccaaataaaaaaaattaaaaaatatac

SEQ ID NO: 229272 - DNA, 948 bp, Cannabis indica
gtgctataattctcacttcctgtgagaatttttggaaccaagacagcacctgaattgtcaccattagaacgaaaatatggaatagataggtcatttgcatttgtagatctcgaattctcaccaagaacagaaaattatttcgagtcattcgagttgtcatcaagatcacggctacttcgagtttgaacaccttctcctctagccatgaacaggaaccagaagtggaagcagcaagaagagaagaggaaggagaagagagctcactcgaagttcagctctaattatacaccaaaaaatcaaaaaacagagaaacaagaaagagaaaagcaaaggactaaaagtttcatttcattgaatcgtcattaatgtttacaagaaggaagcaagttatttacagctgctaaaagtcagttacaatcataattaactaagcaaaaccaactaactaaagtgataactagacttactaactaacttctaaaataaccaatatgacagcaagaataacttgatatatacctataaatatacactagatatgtatacaagcaaacaaaacatacaaatcaaaactagatgtgttattgttttgcatgacctcaatataaacaaagattcaatttttgtgactaagaaaagaaaatgagacaaatgattctagatgagaatgctgattgaatcaaaacttcaaaacaaagcgactaattataaacgtagtggtatcatctattctctaataatttttgggttggaacccatgctaatcaactaattatgtaggtagttaagttatagaaaaacttaatgtatattgtcgaaggtaaatttgttaaaacatatttaaaaatttagactattcttttaatataccacatttaaacaaatactttaaatattctccaaatatcctaaaatcgaaaagcatccttacaattcaaaaactctttt

SEQ ID NO: 229273 - DNA, 2401 bp, Cannabis indica
aaaaaaatcaatttttcatgtttttaaaatgaaattttttgttgaatgatttttttgatctatattattatttccatactagaaattgattttttttcctacattttacttacctctttcttttttaaccaaaatctaacttaagaacatacactaaaaataaaaatggttaaaaaaaaacgtttagtcacaactcataatgtagtttaagtactttttcggtgataatatagatttaatgatatggttttttattcacaaattttattgctattaaaagtaagaattttgtttttagcaaaacagtgtaaattaaagctcgattatttaataatttagagcatctcaatagtggagtataaatatagtgtatgtgcaaattttagctgatgttgataaaaatgaattctaatagtgtataatctggtctaaatttgatatatattaaaaattgtgttaaatttaatacaaaatataacatgagctaaattttacaccacaataacattattttttttatttactcttttaccacttgttaatataattactaactttttgtatttttatttatatatttaatatggttattatatactttcaataattatttaatgtttttattgattctttacacatttttattaaaataaaatttattttacttctaccgcattgaaatataattgtatttaagctaattataatattgactcattttttttagttaaatttagcacaaaatttacaatatagtaaatttagattttttatcttaacttcattaatgtatagaagtcttactctattaatcacagtgtttatttattattagcaggaagatggttgggtagtttgtcgggtattcaagaagaagaatcataacagaagcttccaaccagaacttggcaataataataataacaatcaagaagaactatcctatcatccacaaatgaaagcaagtataaatggtaattctaccccattagtattagatcatcatcaccatcaacatctccatcatcaacatcatcagccaaaacatttccaacaactatatgataattacacttttgatcatcacggttccatgcaactcccacaactcttcagtccagagtctggagcagctgcagccgcagctgccgccgcttatgtctcacccgcttctggtgggatttcgttgaaccccattgaccttgaatgttctcacaacttgttgaggttgacctccaatggttgtgggggaatgcaagttccggctgtgccagagcggttcaacggaggcgattggacatttttggacaagcttcttgccaattccaatcatcagcatcagcaacaacaacaacaacaacaacatcaccatctagctcatcaagccaagtgtcacccttcttcatcgtctgatcatcatcaagttactcatgatcatgatcatgtggcaggaaatactacaactcaaagattattcccatttcagtacctaggttgcgacagtgatatattgaaattttctaagtagtgaccacacataacattatatttattataacataaatataatgttatgtaaaaggttgggttagaaattaatgaaatttatgtgacaatctgttaaagttgtgagagttgtagtcatttcaattaatattgatcatgtaatgttataggaattaatttctaccttttttagttttatattatcatcaagtgctatattttatttgttcttttactcgatatcaaaatgtataaatacacatctatggctaaacactagattagattttttttaagtgaaaatttacatgaaacgaaaatagagcccagagtttttgagcttgagacgtcaagaattgttgacctttaattctccatggaaacgagatggcgtcaaatttaatgtaaaagtaaagaagagagatcaaatacataataaattagtattttgttatgagtttagctttttattgttagttaaatcctcttatactgctcttctgggataaactcaacaagtatcaaccaaacactccttgcacttgtaatgtcatgcaaaaagttcaagattactatgctagagaacatggtcttaatgaatcttactggggaatacaagctcagatcatcctctttgatcctcttctaccactatccaaggttttctccatggttgttcaacaagagcgccaacgttgtcttggcaacaccagtattgttgctgctgcccctgccaaaccgaaaccaaatcagcattctcggaacgaaaagcctcgccctagatgttctcaggggcggacccacatagaggcgaggtggggcagtcgcccaccctgaaaaaaaaatcggtaaaaaaatatatatgcattttagttagttacaacatatatttata

SEQ ID NO: 229274 - DNA, 4499 bp, Cannabis indica
catatagagtgactatataattaagagtgcaattttgaatctataacggcacaatgaggaattaataagttagagaatttacttggtaaattctagagctacttattggaagcttgattatataggcccatatggtccccacactagttgagacaatactgcttgtaagactcaattaattggtagaaaccgaactactacaaaggtactacaaaatgggttcttctggccgactctatttaaaggcgctcatgaatttgtcaaggcatgtgatcgttgtcaaagaatttgaaatatttcaagaaggagcgagatgcctttgataggtattttgaaagtcagattgtttaatgtttggggtattgactttatgggcccttttccaccatcatacaataattcttatattttgctagttgtggactatgcatcgaagtgggtggaagcagcagcaatacgctcaaatgacaataaaatagttttgaattttctacagaagcacatatttaattggtttggaactcctagagcaatcattagcgttgaagggagttatttttgcaacaaatagtttgaagcattacttacaaggtatggagtccatcacagaacaacactaccctaccatcctcaaagcaatggccaagctaaagtttttaaccgagaaatcaagctaattttggagaaaacagtgtagcgctctcagaaagattgggcaaagaagctacatgatgcagtgtgggcctcaaacacctattagtatgtctccatatagattggtatatgggaaagcctgtcatctcctgataataagagcacaaggcattgtgggcaatgaataccttgaacgtggatttggcagcagcaggagaaaagagactattacaactgaatgatcaagaaaaatttaaaaacaaagcatactataatgcaaagatctacaaagagacgaccaaaaagtggcatgacagaaacttggtcagaaataagtctcaacccgaataataagttctattttttaacttaaggttgaagctttttcttggcaaatggaagtcaaggtggtctggaccgtgcacagtggttagagtattcccatatagagcggtagatctatagggcgagaaatcaaaaactttcaaagtcaatggataaatattaaagctctacttgggtggtctaattgaccaaccaagtctgccatcctattggcacatctttgaaaggaagtttagcatccagctatatgacgataatggcagtgctcttgggaggcactccaagttattatttactttaattactttcaagacatttgtatttttattcatttttggcattttaaattttgctctttagatttatagatgttttttttgtataaactcaaaactgtgcaaagcgtaaaaaataaaaaaataaataatttttccagtggaccactacagtggtcacaactagaaaaaaccatagtcacaaccaattgcatggtcacgacaccaaaagttacagaaaagatcatgaatttttcctgccatagtactcacaactaaggaagatcactgtaacgtcctgatacgtaggcgcactaaagtgatgttctaattaacgtgccacctttgctaatcaaaggattttcttcgaaaattgtgccaaaataatttttttaatttaaactattaaactttataaacatatatatttacgtaaatcgagatcccgtgtttaaacttttacatttatcacaaaatactttaatagacttgttgcataacgactacaaaatacagcccaagttgtcctgagaccaaacactccaggttgcaccgtctcggatgtacaattatcccctgagctcagaactcactcttgttcaaccttcgcctttcctttacctacacacggaaataatatctgctggtcaaaagactcagtaagaaaagcacatagcatataatataatactgacttatatttaggcgcacatacacctatccacaaggattattagataagtaagaatgttctttattaaggtacgaccactgtaccacatgcactacgtaccgctactgtacaactgttggtagggtttttttcgtacctcgaataccgtcatgtactctttaaacatcatacactgtaccaattgactcagtactgctactgtacttatgttggtagtgtatgaatcacatagcatgaatatatcactcatacacatattcatatataaatacatatcctagtcataccttatttgcgaattcaagtgtactggtcgacctgaacagaaaatcacatgctagatgaatgccctatgtcacattcacgcaaaataagtaaacaaccttctaattaaaaccttttcagggatctaaactcgaaattaaaagtttctctatcgataaatagcatggaaaaaccctaaatatcgaggaaacacgagaaaaccctaaaacaaggaaactacccaaaaaatagaggcaatttttctaggttttgcaccagtaaaaatggtaggtcatttccgtagaaatggcctgctatttttcactgcaaaaaaccaaaagacccccattttggaccaaaacaaccccaaacatcctcataagctctagaacacctaatatcatcaatataaacaaaaaccaagcaacaaaaccagataaaacttgaaattacaaaatccaccatagttgagccaagtttgagttcttaaactcaaacttgctcaaaaccaactacaaccattaaatctaacacatctaagcctaacccaacttagtttaacccgagattagggtttgaacagaactgaaacacaacaattgcatgcatttttatcaaaaggaaaattttattgatcaaggaacaaaataactttacaacccgaaaaccacttgagaaagctagccaaaatagccagttaactcacaagtaacctgtcatctataaactttttatataaacattgatctttaatgtttagcttctttttagctaagttgtacaatctacatctcaatatactcaatatttctttaactaaatacagaggagttccggtaaatccttcatggatgcacctgttttgatttttccacaaagtgtaaactgtagcagcaattaaaaggttacttatagcagctgccacacctattcttggagtattaatccaactcctccaatcttcgaactgcctaggccataagttgcagccactctacctgaaaatgaagttcagcacctgaaaagagacattacaatcaaagaatagatggcagtgactctctccatcaaggccacaaacggggcaattagtgctatcaaaagggataccgaacctcagaaggatatcttgggtaagtagttaagagttcaaggcttaccaaataataaaccgatgtttagggaggctcttcctattccaaacattctttaaatactccactactagggtatttattttgctgttataaagcttgacagcctttaaattttttcccttgtagctagcttcctttatgttttcttcactgaaaatatgccttaagttgcaaagttttctccaataccaacttgtattttgctttagtgtgtagtgctaaaattcgttacctataaggtgtatagcattgatccatttgacccataagctctcatgattctccataatagcccatatgtacttggacaaagttgctttgttccataaaggcccttctctaaaactaagaccaccaaactctttagggaggcagactttccccaaaggacagatatgctcatagttcctgaaccccaaaagaaccgaatggataagttagaccctaccagcaaaagaaagatattttgtagcccaagtttggagtttaagtttgatcttccttaagatgatgtcacaatcttccattctccacttagtaggccttagaggaactccaaggtactttagagggaagctaccttcttcaatttgaatttcttgcaaaatagctcttttaacatcattagacacccctgccatatatatgtgagagttagctttgttaatctctaaactcgaagccttactgaagtcacttaaggcattttttagatgttttactgcttgaatagtacccttacagaataggataaggtcatcggtaacaaacgctagtaagcttcaagtgcttacataaagagtggtacaacaattgcatgcttgaaactaaagaaaatcaacaaaacttaaagagataagttctagggttcttacctttgatccgaactccttcaattactgctaagaatctctgaaaatcaatgagaaatgcaccaacactctttttatccaccaacactctttttattctcttgttgacgagctgatctgtaatgacaagaggaccgacatgtggatacctcacatgctttgtatcttcctccgagaatataatcggaggttcttctgtttttgcttttttcagtggttctagagcaaacactgattg

SEQ ID NO: 229275 - DNA, 601 bp, Cannabis indica
gggaatgggaatgggaatggccaaaaatttcaatccattcaataaatagattagacataaaatccatattagtaatgctactatgtgaaatttatgtacctataagtcgaagaattgaacaatgttttgccaatgccaatcctttcgacattctaagattttcatttgaaactactcatttttgataaaaagcatgtacttagagagtatatgaaactaaaattggtcgacatattcattctcatgtaataaaacatcacaaaatacgagaatcagaattaagtaaaattcaacatacctctctctaggggtgttcataaaaattgataaattaaaatcgaatttggcggtcagttacagttttcgtaaaataaaaatcgtaacataccagttggctataaaattataaaaattgaccataactgaccgattttcactcctctcatggtgataataaaataaaccactttcataatgacaaatataaaggatagtctaaaattttgtaagaaataccaataagaaacccaaactctagaaattacttgaatttagttgaacaaagatggattttgcgcaaggaaaaatgtttcattaacat

SEQ ID NO: 229276 - DNA, 1426 bp, Cannabis indica
cctctggtaaggagacaagaatccaagtcccatttctgactaaggctaagatttcatctctcatagcacaattccaatgctcttgttgcagagcttcaagtagagaagaaagaacttttgtaactatgtagactttggtttatgaatgcctgacttggatcttatctacatattgtgatcaaggtaggcgagctgtgtgtgcctcggtccctgcatcgctcagggccctaaaattgtgaaaaaagaaattattaatgtttagataaaatattaaataagaaaaaaaatataacaaatattatttggtgtagtggtaaaagattttactttaagccaagagatcaaggatcaatccttaatttctacttttttatttcttttaaatatatttaatgtgcagttatgaatgattgaaccttggagctcttaagagtttttttaaagccttaccattacactaaagtattagaactatcattttgataataattaaactatatataggggttccgaaatttgattttgtcttaggccccatataccttaggaccagccctgattgtgattgcttactagagagttacaggaaaaactctcttggattgagttgcaggagtataagcagatgcatgcaatgttctggtaaaattgggagtagaattagtgtggctcaaatggaactggttgaggctcagacgacacattctaaactagatggactagataaggtgtttgttgatgaagaacagttgcactagttccagtgctgctaatttcctatggccaaaacagaattagcagtatttgaactagcggtgttagaatcagtatgagcaagcacttgagtatatatttgagtatgagtgacttgaggaagataagtcattgggaaacacaagttcgaaggttgaactggtaggagacaaaagacgggtgtgttaggttccagtaaaagaaagaggaagaagaaaacaaaaagaaagggaaaaaagaattttttaaaaattatcagtcttcatttttttaaattttaaaacatttttaattattttttggtaatatttaatttactaatattaggtgaattaatgaaaatttattacgtgtacacttgtgtatacaatgacagtcaatcttgacacttaacaaaccaaagtggatactaaaacggaattgaaatttggagagttttactcccaaaattttagtacaaaactcaaaatttaaagagttttgaacgcaaattacctaatttcttaatatatatatttaaggtgggttttataatactttatttaaattagttcttttttatttgaaaagagaaaatatttaaaatatatatatattctataaatctatttttatttttttactttttaaatttaaaagttttgaaaaataaaatcacttttaaaattttttt

SEQ ID NO: 229277 - DNA, 782 bp, Cannabis indica
cgggtagagctattcatgataatgttatggtggggtttgaactgttacattcacttttcaagaagaacaatggtgttagggggtttatggctttgaagttggatatgagcaaagcttatgataaagtcgagtggtgcttcttacgtcaaatcatgtgcaaattcagatttccaagacgttgggtggaccttataatggattgtgttacaacaccagagtatgattttttggtaaatggtaagcctagggtgtgtgtggttcctactagagggttgcgacaggggtctccgctttcgccatatttattttcttctgtgcggaggctgtatcatctcttcttagacaatctgagttgaatggcgagttgatgggctttcggtgttcttggtctaagccccgggtgtctcatcttttctttgcgaacgacagtttaatcttcggtcgtgccaatggtaaggaggcataatccatccgtcagattctttagtgttatgaacgtgcctctggtcaacaagttaattttgataaatctgcaatcacattcagcccgaatgttcaacatgcagatcgtacaactgtattgggtattttaggcttggggtctgtggcgactcatgataagtatttgggcttgccaacggttattgggaaaaattagaagcgcacttttactagtatttgtgacaaagttcagaaaagggttcggggttggaaacagatcttcttctcagctggtggccgagagattcctattaaggtaattctgtaagcagttctaaatt

SEQ ID NO: 229278 - DNA, 1330 bp, Cannabis indica
atatcaaataccaaaaaaactaaatgtgaaaaaatgccatagaaaagtggcaaacctaaaaatgccatatttttctaactttgttatgaaatcccatatttcatgtaattttcacatatagggaccctaaatctcaaaactaaaaaaaaatgtttttctttaaatattaagtaaaatgaccaaactgttaaaaatttgacaagtacaattataatcttgaaagatttaccttaactttctacctcttctcggtcttttgtctcgtttgtggtatatcgatttatttgctatggtataacatataggaaagagaaaagaaaaaataagaaggttaaaatttatttgtttttagtatatttattttttactatgatagatttgtggtatattaagtttgcactatggtatgtctatttatgtttgtagtatatgaattttgtatgctatgttatatattgtggaatttttttaatagaatattagtttatttttgccgatccacgtgctttaagatcaagggttaagatctctctagaaaaagcacaaatcgcgatccaacggatgaggaaccgaagggacgacattaaatgcttttgctaagattgaggtattattttatcatttatattcacctcagagcccacgttgatagtaaatggctgtcattctactgttttgcacaaaaagcgtcttcccaaagcgcgtagcactcacgaacccaagaaagtagagacacgtatgagatgccagttgtcctccacaccaattcctaactcttcgactgtcgagtgccggaaagagaaatgtacttctgttacttacagatttacccacgtgtctgatgactctaagattatctaggaggaagactgcaagcttctatcactcttaagtcacaaaagcacggagataaatattatttgtgttttggagaagagacatgtggcgaaacaggagggtaatcatcatccaacaatgggcctaaaccttctcgtttgtggaataccaagtcaaatttaggacagacccaagcctagtgacaactcagaagctttgcctccggggcatagggttctttcgagacccggaggtctccctagtctttcgagattggaagtaatgaagaccttcgaatgaggataagggagcacctagaagcagaccgcacgggaaactcctggacgcctactataggatgacaccggatgcttatcgtgagaggggaggcgaaaatactaccttaaaaatgatcgtttcaccttctgacacaggatcaaatattgttctctgtgtcagatctatgggtagtgtcgacgcaccgaccactgcc

SEQ ID NO: 229279 - DNA, 2179 bp, Cannabis indica
aaattcttgaagactttggaaaacttggatccaaacccgtgactacccctatggaaccaaaccagaaattgcatcaggaatcaggagagctcttggatagttctcaaagttacagaaaaattattggcaagcttcaatatttgacaataaccagaccagatctttcctactctgtcaacaagcttagtcagtatctcaacagtccaagaactctccatatgaaggctgcagaaagaatattgcagtatgtgaaaagttgtcctagtttggggttattttttcctgcagaaaacgatgtgcagcttagggcatacactgatgctgattggggagcatgccaagactcaaggagatcgactacaggctactgtgttttcattggaaaatctctgatatcttggaaaagcaaaaagcagcacaccgtttccagatcatctgccgaggccgaatacagagccatggcaacaacagtttgtgaagttgtttggctcatttctgttctaaaggaattaggacagagtcatggcaaatctgttgaactgttttgtgacaatcaagctgcattacacattggggctaaccctgtgtaccatgagagaactaagcatatagaaattgattgtcatttagttagagaaaagatacaatctggtttgattaagacagctcatgttgcttccaaagaacaagttgctgacatccttactaaggcattgtttcctaaccaattcaactacttaaaggacaaattgcaaaatatctttactccatcttgagggggagttttagagttagttggagttagttaggatgagctatcaaaaatctgttttgttagttgttattgtatctgttttgccatgtgtatataaaggcctcaattgtactgtttcattattcaatgaaaattctgttgaattaattttctttctctcttttattttcttttctttgttttctgaaataaagatatctttgtctgtaatttcttgttcaaatcaaaaatagagagaaagctaacggtggtgagatactaacgatggtctttgcgcgaaggacaataagcggagcattccgcccctgattcgtaggccaccgagaagagaaggaagacagaagcggggctgtggtcatctcgggatgctacgttagggctggtggccggtgaagacccaagtgagctgagcaggacggatacgcgaagaaggagagcgagagagtgagaacaagagagacaaaaacagtgagaacaaacaaaaagttataacctagagattgattttctgggtttggttttttgagtttgccgtgagaaagatttgattagtgtttcgggtagaagaagagcaagaaaaccctagaaatgttgtgaccgtaaataaaggaagaagaagagaaagggaatgtcgcagttctgagagagagaaagagaaaatttgaaaagttttgaattttttcaaattttgaaaatagatggctgccgtaggtgttgtagtgatactcacctcttcttgggctgaattgttattggaccaaactttgttgaagagaggaaggcagaacagaacccaaggggagagagaaaggggacttcattttttacaaactctaatcttttaaattaagtttttttttaacaatagtacttttaaatattaattttttgaagtattttaaatatttaattttttaaattatttataattataatttatattttgtttaattattattaatgaataaaatattttaaaaataatgaaataaaaattaaaacttaaaattttaaaaataatgaaataacaaattgttgaatatttttagtcaatatttattataaaattcaaattatataccataaatattttaaataatatctattaaatctagttaattttaaaaaaaatatattttatatgtaaatttataaaaataaaaattaaacttaaataaaagtttaatttttaaattcgtgtaaatgtttaaaattaaaaaattttataactaacaaaaataaaaaaaattcataattcttggatgtgtttatcaaaaatgtgttaaatactgtaaattacaaatttttatctcatgtgataagttacaacatatttaaggcaaaaactatattttagttatatatataaattgaagcacaacaaaaaaaaaattaagcatatat

SEQ ID NO: 229280 - DNA, 755 bp, Cannabis indica
taaacaactgctaatttccaaattaactaagcgggctttacagtaacactttataaaacttaccacagcaaccgtacacaaattcactctccaaaactaataatttcatagaaaactaaggagaaaagatgcttagaaccttaccttagtttaacttccacttgtagagattcctagttgctgcttagggtgaggaaaaattgattttaggctagaaaactcaagtgagttttttttttttttggctttggtttggtattttggccgagagaaaacaaagaaaaagaagaatgtcttctttgactttgttgacttctaactttaaaaaaaatctaacttatctaacttattctcacatcttcttttagcttctaacttaaaaataattaacaaaaaataaaggattaacttaactaaccaaaaatgactattttgccctttcttagcccttaagaaaaggaaaatttgaatttctatgcttgcattcagtgaaattttttcctcaaaactcataatacccaatatttaaaatatatgaccacttttttattatgcccaaaataccctctttatttacttcaccccctctcacttcttctctctttccctctctcttctctgcccaaagctacaccacaagggaagctcaaatttttgctttctctattctcattcttttcagctcactacactcactagcaggctagcagctactacactacaagactcactacataatttctctcattttggac

SEQ ID NO: 229281 - DNA, 2496 bp, Cannabis indica
gctgcaagctctgttatcagtgttcctctatcaccaccaccaggtctgtgaacttttctgctagcttgtttatatcacctgatgaaatacctctagaagaaaagaaaaacataataatattatttttagaataaaaaaactacaggatatgcgaatctcttaatgtcaatcttttaattttaggcttaaaactgcgccgttttcagtaaattttacgtttgattactatcattgtactgagttgtttgtgttttgaccatggtgagaacagtgggatgtgggggacgaagtaagcttatggaatctggtttaggaagagcctgctttcggtttcaaccattgccaacaaaatgtttacaagctaagagtcttcagttaggaccagctcagcctggaacaagtaaatcagccaagctttctactcgaaggcagtctagttcggtcatatgctctgctgcttctgtaagcttttgcatttcatatctcttttacgtgttcaatcatcagtctcgtgaattacatgactgtctcaacgataactgcttatctttttacagagtgctcggtgtgcttcagagcaaactcagacggttactaggcaagctccaacaatgacacacatgccaagtaataaccctttcctgtatttagctttaaccatttggtaagaaaattacaatgataaatttgttggagatacacttcatgcatctgttttccttaaaattatgaaattgattgaaattgtaatcttaactcctcattgcaatgttcagcaaaggagaagctaccagatctcgatgatggtgggactggacttccaccacgtgatgatggtgatggtggaggtgggggtggcggtggtggaggcaactggtctggtggattcttcttcttcggtttccttcttttcctcggattcttgaaggataaagagagtgagggaccataccaagaagacaggagaagataagagaaactattagtaattttgtgataattttagctcaagctcaagtgctacttcagcatcattgtttctgtaccagtgaatagctttctggctttttattggtgcaatttttgggggggtcgatcttgtttagttattattctatgaaatttcaatattaaagacttgaactctctatatataaagcttagaataattactatatttttagtacctcattcctactatcaatagttaaattttattctgttcaattttggtcttttttctttggaattatgcttctgttgtacaaaccacattttaactatgtaattaaacaatatggacttcttttgtaatttttttttttgaaattaattcatctttattaaatgccacaatgagcaaaattctccgttaacatatgatcaggcgatcaactaacaaacgaaagtttctgataacaaaatgcacagttcaattcgcagattgcttaacaaaaaataaagaaacattatgaagtaaacgtagtcactccttgcaatctttaataatcaacccaaccagagagcccactgacaaagggcttcgaatagactccacgaccaagccatcggtttttaccgtggctcaggaatatttgcccaattttagccaacttaaaacctctttaatagccatggcttcagctagcactggttccacccctcctcactttatactaaccttgagccaccaccatcttcccagccatgtcccgaacaataaagccgaaaccaaacttctcttctttaaatagagtcacatcaacatttatcttgatacctgaaactggtttcgtccaaaacttttttttatcacctaccgctagcaaacgcaacaaataaatatttcccctacctttagctttaacccattgatcaagactaaaatcagcaaactccacaacctccaacttaccccttcttcgctagttccaattcatgtcattcttggccgaccaaatcgcgcacaacaccattaaaactcgacataatctactcccatcaaccctcttaaccacttcttcaaaccaagccaacacaaaactaaaattccttccaaccctccacacccacaattttccaagcaaattgacaaaaaaatcaaataataaaaattcgtttggaaaggaaaacatctagtcaatgctcgccaagctaaatctttaacttttgaaggttgccacaaacatttccaaaaaacttcttttgtattttaaaattttaggatatcaaaaataaaattcaaatattactatttcacacgttactactttaattattaggcagaaattgaaaattcgccaataataattaccttggtttaagtaatttttctattgaacatgattttcttaaaagaaaacttaatatgcattaataacttgaatgaaactacaatgctatgttagcaagtagaaactatatatgtatatatgaaaacaagtgagactttatcattggtcaaaaacatagaatctacttctcaatgttggtgaa

SEQ ID NO: 229282 - DNA, 2089 bp, Cannabis indica
tgttagattctcagcatagataagctccttcatataccactaagttaattttaataggtgtatatatatatggtgtatttttaatgagtattatctatttatgggtaatattatgaaaatttgagtttttatgcttaatgttttatctaattaaaataatttcttatttttacattaagaaaaaatgcttttacggaaaaaaaataagttaagtttgacttaattattttgtatataaatatattttgatataatataaaaagtaatattttttaattaagcatatagtatttaattttttttattatttgtcaataaattaaaattgaatagtttaatatttttaaaattaatatttataattaaattatttaataattatacgagtaatacttattaaaaagtgttccatatatattaatttgtgtagttttcaaaacgtgtgtcgatttagtctacacagaatgctaactacatgtaacaatatagcttccagctagttgacattttggtgggttctagttgagtattaattggtccaatttaatattcatgtcctctttaattatataatattatatctatacttttatatataaatttaatgaattgattaaatatgcttactctcattggtgccatgtggaagcaaatttggtctcatgaagtaatttataatatattatttttttgacaaattatttataatattattgtttgtagacattattatgtatagaagtttcccttgctggtatttggtttttattttaattttacaatacatggcacgatttttttttttcacacaccaaaattgaaaaattttactatcttcatggtgacatatcagtctgagtaggtaagttccaataatttaattattataataatgttatattatatataataatttacccaaaaaaaaaaacactactttaatttttatgaagagaaaaattaaaaattattgagaaagggaagcatgttaaatgaaggggtttgggatttaggaagctattgcaactcttgaaaaatatagatgggcagtagctactaaacaagatacattatgaattaaataggcacaatgtgtacatcaaaggtgggaatttggtgggactagtacaaggctatccccacatagtagttggtattggcatcaaacagtacaagtgaaggagaaattcaaacaaatttttagcctccaacaattcgtgatgtgtagatatgcaattaaaaaagaatgtaatgctttggttcctgaacaataggtaaatacatggtatggtgaagttttgggggtgtgttttagtatttccaaacatttgtttggttggactgtaataaacaggactttaaaatatagtttgtttatttcaatttcaatattattgattatgaagaatgcttgatatgtgcgctgttggattgaaatcctattgtggatggacccagaatttttactttgtgaggcttatttatcattaaaaaatatttatacatacattataatcactgttactagatttatttaattttatgggggcttttctattattttggcctataattatcaaattaaaaaaattatatttaattttttaaaagacaatatttttgttagtgggggatatagctcccgtattgttacttgtgggttcgtccctgcatatgtataatgtatatgtttttataaaatgtgatataaaattaggtgaccaattatgttatggatatcaaaagggtattaaattgtcatagaaataatgtgtagataccataagttaatttataatttgttcaggggccaaattataaatacccaaaactcattatataatgagcctataaataggtagtgatccttaagaaacactaggtttctgtattctctccttccccatcagagataatactttagaaaatagtgtattcttagaagatcaaaacattctctgtaatctccaataatgacttcaggttagtgcttccgctcatcttttatcatcttcttcttctttaatttagcaaaggttacataaatttatgatttagggttttctatattcaagcacttttagtaata

SEQ ID NO: 229283 - DNA, 985 bp, Cannabis indica
cagttgtttggtacgtactagcatattaatgtattctaagctactgatttagtgttttgcaaaataaatttaaaagtgttttttttttataagagaagaattatattaatcaaaaataccaattacaaacaccaatcacaaaattaaaagaaaagccttacaaaaataaattatccatccactctatatcatccttatctgttttctttgcattcaaatgctttattctattgcaaacattaatattaatatttctaataacagtaaaaatcaaaagaagttaaaaattccaaaaaatattattgcgagccctccaaatatatattagacacaaactgtaatggtgtaagtaaaaacttttcttttggtcctgttgtatttgcttcttctaacactacaacagtttctgtagtaccctgcggacacatccgccggtattaattgcccagatcgccgataataattaataattggtcactataaatgactattagcggccaaaatgattttccgttggtaataatattaataccggcggattaatagcggtgggatccgccggtattaatgtctgtacttttacacgcagacacattaataccgacggaccacaatcagtgtttcgccggtattaatatttttaaatataaaagaattattaattttaatatttatacaataaaattaattataattatatatatataataattattttataaatatattattaattagaaataaaacattaatattaagaaattaaacattaatattaatttgtctattacaatataaactatattatcttaaataaaattagaaaattgtctttacataaactttaaaacataaaaattgacataattaaaaaatctaactatcattgttcaaatcagtaaattctaaaaattcatctgcattcgaactaagtcttgaaccgtcgagattatcacgggattgagccggcggggtagggtaataa

SEQ ID NO: 229284 - DNA, 1733 bp, Cannabis indica
tctatctgaaccctataggttgtggtgggatgtttttttagaggttaatttaagttgtttaaagttcgtttgagttaattttgttggctataatcacttggctcaacacgattacatcaagaactcaaactgggcttaacaatgtcgtgtttcattttcgtagatgttagttactgtaatcacttgaaatatgactgtcgggatgtaattaggttttctagagagttatatgaagtttgggatataatggagatagaatcgaagctctttgaggtttctgcaaaaaagcagtccaccattttcccaaataagattcccaaaaaatagtttaccatttttggaatccagttcaccaattttggcagttttgggagcctcagattttatatttccttaatatttagcgtattaccacgttatttatcgttaaggaaacttccatttttctgtttaagttcccaagaagattttagcaagttatttacccgttttgcgtaatgtgacattaggcctccattcagcgagtgactttccatccaggttgaccaatgcacttgaattgagaaacgagataagacacaagttaccaagactagtaggacgagtacagagtgcatgtggtacaatacttgaggtgcgattcagccctaccaacattagtataggacgagtacttagtgcatgtggtatagaagtcgtacttctgttaagaacgttcttgattcacatgaagcgttgtttgtaacgctctaacctctaggaacgctacgagtgtgtttttagaagagagtttagtaataatagattaactatttcatcaaatccgtaataatagtaaaacctcactataataaaacaatagcaatgagcatgatgacatcgttaaaaatttgtttcggcgatctcctattacaaaagatttacaaaatggctatatacaaaagtaaatccaaatatacattaggttcagtccaaaacaactcctgacaactcgatcacacaagccggataagtccttaaggtggcgtttggttggagagaatagaatagaaagaaaacaatttttattttattcttttatttggttttattttaatgtattagaatgtaattcttattctaactatgatttcattcattttaaccaaacgctacttaatggagtgtttgttatgtgagtttaagttggagagagtagagttggagggagtagatttggagagaatatgaaactcatacatatgagagaattaacataccaatattttaatttaaaaagtaaaatctaattagaaacacaaacatgttttaagtgattcatatttcaatttaaatttaatagtaatgttttaatttgtgcctaacaagtaacaacaacactactagtacttgtagtgcctagtcttgtctagtggataatggggccatttgtgtacatccataaccataaccgtggtccatagtacactctcaagtctcaactgagccttgaatttgggtccaaatccaataattaaagggaaattttcagttaaaaaggcctacgtacaaaccaaaccataggccacggctccctatgacccccactaaattcaactcaaccgtgggctatataaatatcattacttctttgactcatttcaattcttgtaactttcatttcactatgaatatgacttcaaaaatcaacccttcttttattcaaaattttaaaataatagtataaattactt

SEQ ID NO: 229285 - DNA, 1423 bp, Cannabis indica
aaattatataattttaaaatgattttttacgtaaaagtaattaattaattttttatcagcatcataagtaaccaaaatgttacttttgaaaactcgggaaaataattaaaaaaaatgaaatttgggattaattttgtttcaggcatattattttaaaattaaggtattttttaatgacgtggcaagatattattgtaattgagatttataaaggtatttttgtaaataatttatatttcaagtatattattgaaaaaatccctaatttttttatgatgattcggtcaaacaaaattcccattacctataatctcagttctttttgtcttcttcatgcatgtcctatgtcttggtttcaaaaagtcttttgaaacaaaaacagatgagaaagtaataaaggattgagagatagatagaaaggggtgaatgagaaactcaaatgaaaaataaataatatttatagagatatttacatgtcttgagagatgttaattaacttaaaagtgagaagttgtaaggtctttaattatgggaataatctttacttattattatattaatgaataatattattattaattaaatagcatgagatgattacaaagaaaccaatagcacaaacgttattaaaagaagtataagtaaatttgtaacagtttatttgatttccaaaggtcatataattattatttatctatatatagatatgtaataaaaaaagagttaattaaataaataattaattaaaaaaaaaatctatatatctatataaaagagaagtataagatggcgatgtggcgctaacttaaaacttgtttatttattttcttattttttctaattatttaaatatttatctaatttttaattttttcttattattaaaatctatttatttattttctcattttttttaattatatatatttttatttttctaattttttaaataaaaatacagtgaatttttttctaaaactttataaatatctaacaactaagtttcttctcatttttttaattatattttttttattttcctaatttttaaataaaaatataataaatttttttctaaaactttaaaatatctaataactaagtttcaaaaaaattaaaattaaaaaatctatctatctatatacaatctgtatatctaataattaattacattaaatgtgaaataaagaaataaaatgaaaatttgatcaagtttaaaaaattgagaaaaaaagaattaagagaaaacactcatataaactgccaccaaagcagttattatgcattcctttattaatatatattgatttagtttcaattgttggttcgagattttatttcctatttcatatttatgcagaaaattcaaaaaaataacattttttgagattataaataaaattttctctttaagaggttttca

SEQ ID NO: 229286 - DNA, 1335 bp, Cannabis indica
aaaaaaaaaaaattaaatagtaacaatgtaatatcctctttatcaaaaaataaaataaaatgactttatacatttttgttgagaaaaaaattaccttatacttgctatagattcaaattcgacaaataaaaagtcatactaattagacaaataatagtttgacatatatttatatgctatattactttaattaattatttttatttaaaaaattactaaaaaatattattgatacctattgcagtcaccaactgttagttttgttgtaacagttaactgttttcagttaaccttttctttaccttgtatccttgtaatctcacatctgtaaataaatgcttttcactctttagtctacagctttatagacttttgagtttgttgtattcatcactctgttttaagtttatattgataagtttatacatggtatcaaaaagtcattgacgaaagttatctatggatcctccaagcatcgaaaatccaccacgtacagatgctccagctcgcaaacaacgaccgcgaatcgttcctcaacctcctctgattgctcctcaacaatcttggaatccctttcagaactctcttagttcttctcttattgtgaaactcgattgatccaacttcttggcttggagatctcaagtgattcctatagttattggccatggtctcgacgagatcttactcaccagagttgctccactggctcaactcgtcaatggtgatgtcaatccagaatctgtcacctagaaaagaaaggaccaactcttgctcagttggctccaatcatcaatgtctgaaactgtattgggctccttggcttagtacaatacatcttacacggcatggaaggccctggaacaaagatttgcatctcaatctaaggcacagatcttgcaaatcaaatctcaactctccacaattcagaaaggtaatctttctatctccgattactatgataaagtaaagattttaaatcatgattttggaagaatgtggtcaaaattaatgacattttgagagaaggagcttgtaaagtggtgaatgatggcagggatactaatatttgggaggattcatgggtggctcatggtaaatctttttaccctaagtctagtgggcacctagagtttggtatgagaaaggtggctgacctcctgactgccacaggagactgggacattcagaaactgaattgcctctttgatagagatactatttttgctatcctgaaagggggaagaccattgggtcaaggaaaagataaatggatttggacaaaagagcgtaatggaattttctcatgcaagtcagtgttgggttttgtgccct

SEQ ID NO: 229287 - DNA, 2276 bp, Cannabis indica
ttagtttttttttttttaattaggtgatgttaagtgcaatacatgtatgtttaattttcttttaattaggtgatgtattttttttttaatttttaaatggggtttgagatttgatctttaaggaaaaaaaattagctattgctacattggagtgtcatttggatataattatacatacgtatttttaaaattttcttaattaggtaacgtatctgataatgcatacattgtaatttactatattcttaaccaaaactcacataatcaaatttgagtgtgtttatatatagattggattcgtaaatttgatataaaggttttttatttctaaactttacgaaaaaatatattttttatttcaatttaaaatataaaataaataataataaagttaaaaatatggttgaaaatatttataatattttaaatttaaatttctttatataaaatagttacatatttttttttattttaatttaaagttaaaccaataaatttaaaaatatgattaaaaatatctataacattttaagtattctaaatttaaattaaaatttctttataaaatatctatataatttttatttttaaatatatataatagtattataaaattaataaagaatattatgttaactaataggatattctgttaaagttaacgtagaaattcaaaaagtatcgttaaaccaagaattttattacatagccacactttatatagaataaatattacactatgataggttagatttaattttataaattagaaatagaagaaaaatactaaaatagttaaacaggaagagatgtattatttgagaatgtcattttaccagtttaatgttttgctttatacaaatagatataaatatatataccatggtgttgaggacgtgccacaggcacgcaatcatcgttaaaattttgtgggttacatcttactttcatcaattatgtttaaacaattgctaaaaaaaaagttatgtttaaacaataacatagtgtactgatatatataggattacttaatgaaattaatattattagtcgtcttatttaaatgtaaatctatgtgatttgttctactattatttactagtaccaaagtttagaagaaaaataaaataataaattaacaaaaaatttaattgaaaaaaaaagaaagaaataagacaataaaaaattaattaataatcgtatgtatgctcgtatagtcttctacactattatatatttattaagaaatgttaacgcagattttcgttaaccaataataagcctttttcgtcaatatacaattgaacgtatttttgtttttctctctaaaattctgcatccctttttttgtgggatttgcccctatttataagaatataggttggaagttatttatatttaaattcaattataatcatttaatgaaacgtgagaattgatcacgtttcatttaaatcgtatgttggataatactagataatcgcttaactgcatattattcttatccttaaagatggtcaatgctgatttggacaatagcatctcgcttaactcgtcgatgattaatgttgatttggacaatcatctcttgcctatttccaagttattatccttagctattataatgtagaaaatacgctaaagtgttaacaaatgatccgcctagtccagtttcttatgaatagcgaggtggatgtctcgttatatgtaacctgaggtcgccttgggtaactacgttttattcctttgaataaatgaattatttctttgggtatgtgtgctttgagactggtatatgtctcgtcgatataggttataatagttttctatccttgtctttcttaagactacatagtcagcgagttataaatattttctattaattccttatataacgagttattcttttccttcgcattaaatgatataacttcattatattaggtgattcatattctactatctgacacgtgtcatcctttgaagcgtaaccgaatttcgggtataacaataaataaataagaaaaaataaaaaaaaaagaagaagaagaagaagtacaaattttgaaaaaagaaaccggagaaaaaaatgataaaaaatgtaaaataagaacttaaaaaaatattttaaaagcgaaaatagagaaaaaaaatagaaaaaaaaaagaaaaaaaattgaggttttaaaaaaaaggaaaatgacaaaagcattaataattggtacaaacaaaacaaaacacacaactctaaacattacaaaaaaatacaaattacta

SEQ ID NO: 229288 - DNA, 1121 bp, Cannabis indica
actggcacttaataataatgctcatattttaaatggtaaaatattgagatcctatagataaatatcattctaaaaatttatatagatattatacaataagattgatatcataaaatatttttattagagatgctttcagtaaacatgcaataaatatatacttaattgtattttattagctctaattgtctaatttaatgggacaattattaatatattaattataaaattattgtcaaaattatgctttaatgactacgacacaaaacaaaaaagggtacgacaacatatacgaagcaaaacggcaccgttttaatatttgaataaatggacagattgaagccaccacgtggttgagtggaagttaccattagctccacttgtacaattttcttatacataacaacagttggcactcgccaatggcattttcgtaattaaacacaaatacaaggctatttatatcacccctacttcacctcgttaccatcgatcaaaaatagactaaatacgccaaaaaaaataaattaattaattatttaaaattttattattaaaaagaaaaaaatataaataaaataaagttggaacctttctctgtcacacactctcttctgagtctctctctctctagagaaactagaaaaccagtattttgattttctagagagagaaagtttcgatctttttctaatttttttttattattttggggaagacacagaggaatgatgttgaaggtttcgtgcaatgcggcggaacaaattcactccttagcccaatgccgattctttgggccgccaaagtcaaagcccaggcccatttttactcgccggagagttggggtctcgttctgtaatccgacgacgaaaagttccgttcttgctgtggtttctgaccggagtagcggtggtgttgttgcttctgaaggtgttgatactggattggggagtttggctgaccggttgagacttggaagcttaactgaagatgggttatcgtataaggagaagtttattgtgcgttgttatgaagttgggattaacaagactgctacagttgagaccattgctaatctcttacaggttctccattgatctgaaatttagtttttttttttt

SEQ ID NO: 229289 - DNA, 2704 bp, Cannabis indica
agtaataagttaagacttggaaagtgagtcgaactggaacacaaaaataacatatatatatttgtggctggcactgccactgtcacattgattcaacattatatatatatatatatattgacgtacgtaataatattaataattaattaattaaaaccacatgcatattattatttcatataggaattaaaatgaaaatgattgaccctatcatatcaccaaaaggtttagacttatctgaattcaaattcaattcaatatttggaaatgggaatagggaatatataagaaataattaaagtctttttaaattaatatttacattataaaaaagtggttttttgctaaactaggacaggctctggttttggttttggttttggttttgggtttgggcccatagaatattatatataagaaatccactgccagttgcatattatatactatcacatgtttgacatatatatatatatatatgcattaattgagggatctacttgcttctatttccaaattccaagtactatatagtacgtattactactgtttatatataaatatattatacaagatgatcaggattaattagctttattaattaattaataccccatgtctaccggaaaaccataatttcttccatcaaaacatacaaatttaattaattaattaacttaatccctctcaaattctcattatatatatacaaatatatagtatatgtctcctataggctatagctataggttgtttacatatatataacgtgtgtgaatgattcattatatataagtacgttaaggtacaaaactaagctaaattttatgggtaatgcaatgctcttacacgtgactatgttaattttttttcaagtattacaaggtaaagtattgggctttttttgaattgggttctttttaatagtaattgaggaatattttttatttatttattaataaaaaatattctcatattatatttcattaaaatatacttatttttgtgaaggttgcttaatatatcctcatcctttacttaagtttagcatataatttttattaacttaaggggtataatagagatatcatccgtgagtatatctcaaaaaatatagaaataaaaataaaaataaaaacatataaagtggatatacaatgtaatttcttttttttttgataagggttgattgagtttttccataactaatttaataaatataattaccaatagtaaaatttgtttagaagatgagattttttacatgatttggacgtagtgagacattagtcgcactactagaaaattgggttttagtgacacacattgaataactctaaaagtctatagtgacacttcaacgcgtgtcactaatgaggctgactggaaaagcagtttttagtgacgctccaatcgtgtcactgaatgcttttgcactcatagtctgcacgtcactataggggtacagtgtcaggttttgtcagactagaaaaacacagccacttacatggagtgtcactatatcccatttttttttttttttttctttttttattaatatttttaaagatatagtgacacacaaaaagtgccactatattaaatatttttctaaaaaaaataatatttaatttaatttaatttaatttaaattgtatatattataaataataatttatattaattatatataaatacaattaaatataacaataataattttaattaactaaatataaaatataatcacattcaatttaaaaggaatatctagtttttaatttttaataaaacaataaacttcaataaaaaaatatattagtaacaaaaaaatcaaaataatataaaaaaaaaaaattaaacttacccactaaaattttacaaataaatacattaatagccaaaatcagatcaataattcaataacaacaatacaaaattttaaattaagcataaattttaataaacaaaaattacacaaacaatactgattatgaacaaaacgtaagaaaaaaaaaacaaagttggaaacttttgaatcatgggttggttcgatctttggacaatgcccatttccattaaccagtacaagatttcgttgtcccagttcatcaacaacagcttcaaagttggaaacttttgaatcatgggctggttgaggaggtttatatatcaagagcagcagtgtttgctgagcttcgaaaaaagctttcttcctgagccactgagcctgctggttgagagaacctctcagcctctaggttgaccatcatcaactccaaacactgcgacttctccaaaaatggtggaacgagatctctgcacagaatagagagagagagagagaaacaaaaataaaacagagatgagagagagatgacgagcgagagagatgaccgagtatcagtggagccagtggatgccattcgcgtggaagaaaaccgcccctggaggacgccattagctggaggagacgtcgtcgttcgctggaggagacgacgccgttcgctggaggggacgacgcagaccaccctagttggaggagacgacgccgttcgctggaggagacgacgccgttcgctggaggagacgaagccgttcgctggaggagacgaagctgttcgccggaggagacgacgcagaccacgccgttccctgaagaagaagaggagcagtcagtcgagagggagaagaaagagaaatg

SEQ ID NO: 229290 - DNA, 1656 bp, Cannabis indica
agagagagagagatcagagtactgagtgagagagaagaagcaaattatatatgtgctgtttttataagaaaaagatacgtacaatatatgtggctataattgtcttttgattaattaattcactgagatatcattcctattatatattgatcaaccctgttttggtaaaacagtaatatcagtatccaaacttaattaactttaaaaagaaaaaaaaatccaagcttaattgctaacattttgaatgaaatgagttatttttaaagttgaactagaacattcaagtaagtacacattaaatttcttcttttcctgtcaggtatatacagatcagaaattgacaattagctaagaataggagtgaatttctcctcaacaatatggttaaatgcattttattttatttttttggcaggaagtattaaaattaatgatgttagtctcagtgcgtatagaaaattaatgaggtgaaataatataattaaaaaaaagaattatataaatgttagaaaatatataaaaagaaattcaagtgaataaatgaaagttaatattctactaagtcttaacctcataacctcatcatattcatatggttttggtaattaataagtaaataatgtatttggtgtatttatataaaatacaatgaaaattattattatcatatgaaaattaattttgatttaaatgaacttaacaatagtttgatttctataatttgttttggaacaaattaaaaattaacattattatttaataaagtaatagtctgtgcattcaaattatgttctacaatactaaacttattttttttatttctttttttttttgctaaagtctagacttgagactgtatttttttttttttttaatgagtcaatataaatattaaaaaaacagtgtatgtatattagtacagatagactaataaagattaggacagttttctatgattattttttttagtaataacttcatttaaaaaagaaattataatgtcatacaaactttaagttttaagaaattccaaaaatgaaggaatctcatcaaaccatactagttctttatccacccgaaaaacatgtcaaactaattcatgtgcaatctcattggctgtccaacgaacatagatgatattacgggaaaattggacatcaaactagctaaaacctctaagaaggaactaagtttattgatttagcctgattgaatgataaagcaatataatgtctagaaaaagggagcaatatacaatgttggaatataacactcaaacgaatgattaggtgacaaccaaattaacacaaaaggtacataataaataaccaagattattacacaaaagaaggaaggaagatgagaagagatttataaactcaacacagtttacaagtaaattaatatgacatcccttaattcagtattgtcactagcttcatgtttagttgatttaatttaatgagtataaccctctaatagtggtaaatctttcatccaataatgcagtccctcctttgtttctaccaacagcagagaaagtaagaaactactagagatacaaacatggtcatccttctaaggaggcttcataaacataacaagattctttaaacagtttatttacatggttattgaaaaacaaatgattgtcag

SEQ ID NO: 229291 - DNA, 1334 bp, Cannabis indica
atcatctccaagccatgtcttcggagtatgtagttggaggaaccaagccaaatcgtgtctatcagagtaaaactccctcgggtacttgttcccaatctagtcgagaacccaactgtgaaaagtcgagagcaactttcgatcaacgactctaagtgggtccacattcacacgtgccttcgatgccccagacttcttcttcatttcagtatactcatcaaatcacctaagtcattttctctgtctctggatctccactagttctggagctgtctccaagacttgtatctcaaaatcctgagtatcctcgatgctggtgatcttcgtgttgtcaggtgtacaaaacatatcatcatcatctggtctataatcatttgggagaataatttcatttttcggtgattggggctcttgttgtggttgtggttgtggttgtgcatctggtgtcggccttccaggatcttgcaggagtctcattattgtcttcaaatgacccatagtcttgttctgtcctttcaaaagagcagcctgaccttgctttagagcaagttgttccctttccacaatcaccaaccttgccatcatgacagaggatactgattcccaaggctctgaagtgatgggaatagatgcataagggacaacactagactcatatggtagtgaagatagtgcaagtggtggagacggtgcaggttgtgtagattctctaaagagtcgggttgcatccgctcgttcttccaatgtcgaggcaagcttttgggcctagcttcacaaagcatcatgtgtcgattgcccatcgtcacctaacaccagttcctccaagtcaataaataaaggcgcctcaccgccagtgatgcaactcacaaactcagtctaattcgctcagggacataacatagagtacattgtcaattgaaaataaaaaaatatattaatagatggaaattaacattaaataaatgtaaagtgtaagaaacttacatttctagcaaacaatcgtatcaccttggccttgccgagtgtcgtttttggcttactctcccagttcagcattcttgaaaagtgatgcgacatctctgcatcctcgttgcccagctctaggatgacctcatatgctcaataatgcaacactgcagtataaccataagatgagtatttaacctccttctgactaactccattttcaatcttcttatgcatcctattcttcacatctatgaagtgtttattacaagttttcatcaacttgttgtacaaattctttccccacatgtactcgtagaagaatagaaggttgtcaaccattcttatgacaaaaggaggaacgacagtct

SEQ ID NO: 229292 - DNA, 1286 bp, Cannabis indica
atttttaaaatgggatatattaataacatcagcttaattttagtcaaaatagaacataataatacattgagttgtgatgttatgactagtttgtttacatttttttgtatttttacatactaaaaattggctttgagttggtatattttagtgttattatttatttttactaaaattgggcttagggtttcacccagactccaaacttggccttgaccggaccccatatcttgatcttgagttggactaagcatcaacctagacccttagcctgacctggaccctagtccttattcaggctcctagcccgactcgaatcccgacccagaccttgagcttggccacgacgtcaactcgaaccttggacccttggccccaagcccaaacccccagttcggactcaaattcgcacctcgacctagaccttgtaccctcgttccctgacttgcaccccaacttaggccctaacccctggcataatcttaactcgaacgttgaccttaaccccaatctcacctttgtctcacatcatttaaaataaattaataaaataaaagttacgaaacacattattttattttaaaatagaaaataaaatagctatcaaatatattatttatttttcaaaaataaagaataaaaactaaaaattgtattttcatttttctagtttaaaaaactcaaaaacaaaaactttaccaatccctccttgacttgttttgccaaaggcagtaattccccatatatagtatcaatcaagtcttttttttttttttttgagataaacaatcctcaaagttgatcttcctatttttgtggataatttcgtttgttatataattttttgggtaagttgaaaaataccatttttattaatcaattaatcaaatttacctctaattttatatttaattgaaacatacttctttttatatgtattgtactcaaaataccctgacataagagagttacatggagaatatcttgaagtgataggggtaaaattagtataatgtttaaaaaaataggtaaatatgataaactttaaaaaaaaaaaataataacagtagacaatataaaaaagatatagagtctaatttcctccatatattttttttgggatattttcaaaaatatgggaaaaatgagccatcttatgataaatatggcaacaaaactaaatgccacaaaatatggcattaactaaggaagcaaactacaaatatggtttttttaaaaaaaaaaaaccatataataagttaaaacagaaactaatttaaatgaat

SEQ ID NO: 229293 - DNA, 2236 bp, Cannabis indica
ataaataaataaataaaatacttaaaactcattaaaatacaacactgaaaatttgggtacaaattgtgatgatcgtgctcttttgcacctgcataatgtaataatagaatagagagagggcgtcagtacctaatttgtccgttctaagggtttattaagtggcaccaatacaatagggtagtattgctatataacatctactatatatttatattgttgggacgtgtaatgtaaggtcattgagcatctaaggtattctaattaattcaatgagagcatttctattaatcacttccagctaccatcggttacatattgctaatataagagtttgtaacaattttttaattaattttttattttcttaattaaaaaagtaaacatatttttaaaaaacatgcatgttttataaagttatatttattttttatttcttaattttttaattttttttgaacacattaatttttttaattgagaatcaaaattttataaataaaaaataatcacttttaaaatttttttaaacagtttttttttcttaatcaatattttagacttcaacttgaaccttaggactcggacttcggccccgaccctagtcccggactcggaccatggcccctgccctagacctggacctaaactcgacttaaataaaattaaaaataaaaataaaattgtgtgaacacattttttaaaaaaaaaacttaattttaaaatattaccaaatatctcttaattatttgtttgttttttctaataaaaatgaatcattaaatgacaactgctaaataatacgagcgaaatgtcaagtatgtaacggtgatccaatccatgaaatcatagtaccatttagagaaagagaaaatttagtcaaattatgagttataaattaatggacctattacaatattgctattttgtaatttaagggctcgtatgatatgtcgtataaaggtcatattatattaaataattaatagcactatgtttgaataaaacaattgtattaattattactaccaatatttttaatacaatgtaagttgtattatttaatacataataaattgtctgtattagcttatattataatatttacataagatctggtgtcaaccccaatctccgacatagatccaggacctagaacccaatccccggacccgtacccaaactcgagacccaaatttggacgcggacgcaaacgcagacccgaatgtggacctgggtacaatcccagacccagactcggacccagtccccgaaccttggacccggatccaggacctcaacccgaacctgggagtttaaacatcagcatattcaactatcatgctactaacatgcttcatatcaagcttttcttatcacatactaataaagcataaataaaaggcttactgaaccgtgagtagaacttatctcttatgatgattgtgctatatcgtgaagatctcgtaaagagaactttttcataccaaattgtaacacgcgccctactaaattaggcacattactgtattttttaattacgctgtgcacttctttgctagtcaaagagtttattgaaaaacgcaaataattaaaattttaaaaaattaaatcaaactaaaataaatgtatacaacatatattttgagatcccattttaaaaagttacaactattttccaaaatgcgtgtatacaaaagttatcgcttagtgactatcaaaatgaagttctactttcctaaagatctgaacactctgggtctaaccgtccaatatgtacaatcttcatctagttcgagctcactgctgctcagcctttgcttttcctatacctatacatatatacaatatatgtgagtcaacatactcagtaagaaaagcataaacataaacataattacataaccagattgtaggggtgcacacgggtcgggttttcggctttttggggtttcgggttcgggttttcgggtttcggaagtgcacaaccgaactcggtattccggtgtgcgggtgcaccgggtatcgggtcgggttttttcgagttgggtgtagtcgggttcgggtcctattggtattctattaaatctattttttttttgctgaacctattaaatctatttattacatacagatagtaatgattatttttttttgtttttttgaataatagttatgatattaattattagggcctatcatagcatctaaatatctgtgataataaattagtaattat

SEQ ID NO: 229294 - DNA, 1195 bp, Cannabis indica
agtctaataaaaataaaataaaaaataatactttattaaaaaataaaataatactattgacaatattttattttattttgttatcagttatttttattagttttgacttaatatttattcaagtcctcactcaactaaatttctggcttcgtcactgactctaaccaattaattgctaataattatgtgttattattattattattatttttcttaacaattatgtgccaatatgctcttttcttcttcttcttcttctttctataacaaagtatagccttctttagttaggtagatagtaaaaaatttaaagtttaaaagcaaatgttttcttgaacgttattaaagttcataatcaaatcgaaaactccatgtatatatgtattcacaattcattaaataacaccgatcgactgaaacaaacgaataaaatataaaactatgaagaatgtttgaaaatgactaacgaattcaatttgtaaaaaattattaattgttcgtatacagagcaaatatgtggcaatgatacttaaatttattttttggttgcagattattacatatgtcaaaagaaattacggctaaaatatcttctctattacatgtttatctagttgttaaatgctaagtatgtagtttacatagtaatttgtcattggtttagataatttttttattttattttataatttaaaaaatcatttcacttatttaaaaatttaaaaataattaaatttataaaatcattacaaattatataaaatagatattaagaaagaattattacataaattaatattttatttacaaaaatacttctacaaagtgtagataataattataccttttatgtaattttaattatcaaaatacctcttatactatcacttacacaatcagacgatgattacagggcggctgttgcgttgttgcgtggtggttgaatcagacgatagttgtagagtggttgctaggtggttggccgaaggttgcatcagacgaaagttttaatcaaacgaaaatttcttggtggttacaaggtggttgaccgaaagttgcatcagacgaatgtttcaatcaaacgaaataactatgatttaatatgaacaaatttaccattagaaatttgaaaaataacgaaaatacaccaggataaatattttactatagtattgatgtaatttttttttgaatt

SEQ ID NO: 229295 - DNA, 1155 bp, Cannabis indica
aatagatataataaaaaaaatatttttattttaatttttcacaataatatatataagattcctgtactcaaccaaacagtgtaatttaattaacagtaatatgattacatattaccctacacagccaaacacagtttacacatttctctataatcatattctccttcataatattccctataatcagattattttaaacacctcatatcaaacgccccctaaaagaaatgaagattaaaataatttgtatgaatacatgtaagatgaaattaggttccttaacacaagcaaaagtcaactttgtgtgttgttaaagtggataaacattagatgcatgggatggcttttctgcttccttattgagagtcaaaagtcacgaaagctttttggaaatccagtagggactccaatatatatattctcaacaaatttattcaattatattaacctcccctctcatgcttaattcttatcatttcatccaatcacattattatttctttctcttttattaaattgattttgtcgggttttaagacagccgaggaggcaataatatatattaggatctttcaaaatcatcattattttttaaaattacagtgcatgaacaatattttagttccttttttttaaaaaaaaaacaaatattagttcctgattgggtgattattcactttggattaaatatttttattgatgttgaaaaaacttatgcatcattattagctattttggataagctagaaaaattacactgagccaactcattaaaaattaaaagaaatcaacactaaattaaaaactattagaccatctccgtaaaaattgtgttatatttggtacaaaaaataatttatgatacattaaaatttagcattgtgcttcaatacacaattgtaaaactttgatgtaaaatttaatatataattaacatttttattaaaaatgttgtattttgtgtgtcctgtaatatagttaaatcggttaatgtcataactgtcttgacagttatgacagttggttagttagttagttgtccacttaggactgttataaataccaatgtacaggttgtaattcaggttaatggttttagtgcatagacttgtatattcgatttatcaatagcaataaagatcaattcattctact

SEQ ID NO: 229296 - DNA, 1233 bp, Cannabis indica
taattaaaatacatatacatttttttttcgatttttttttcaaggggggcgactgcccccccctcgctacaatgtgggtccgcccctgctaactcgtggtattaaaacctcatgagaatgctttattaaattagttgagggaccaactcaaactcaaacccgaaatagtaatatgtattttgcaatatgaatagatataataaatgaatattaaacaaaaacacacagaagtggaatcacatttcactacaactactctacaatctactccttatgttggtcaacgttcaagagtgaagtggtcctattccaacaccatttctaaaaataataatttatcatttcactattcatcatttttattatgattttttatttttgttttttaagtaggtttaaataaataaaatatcaatttcaaaaataagtaaaaaatccacgtagtataaaactaaacaatgatattttatttatatttttttaaatgagaaaactacacaatataatgatagtgtacaaacaaaacaaaacatttttcttcttaatagtaaatgaggatagatactcttttccaaaaagagaaaaaggaaaggaactaaatagtaaatactgccaataagtaagtggtgtcaactgtcatcacacacaaccataaataaaaagcgctttattattttctcttaaccatttcgtttcataaaatgctagatagtaaaatttaattcgcattattcaatctaatctaattggtaaagcatagatattcgtatttgtgtagattaaattgaattaaaaaaattaaaaaataggcacttgtgcaaattaaatattgattgatatgtaaaaataatcaatccatacatatttacaaaaaaaatttaaaaattatatatacaattaaaattttgatataataaaaatagtaacttaaaaatctaatacacataatacacatatattttaaaatttaataaattaaatgtatatttcattcttatatataatattacttaaacaaaattaaatatttttttatacatacaatttttttttctttctttaaatttgttattttatttattttattttattcctatttgtgtgaaaaaatatatttttcataaatattaaataatttaatattaaaaaataatcgatctaattcgcactttacggattgaattagattgaatttgagctattgtgtggattgaattggatctaaatataaaa

SEQ ID NO: 229297 - DNA, 1993 bp, Cannabis indica
acgaggattctactaataataacttttttgaatttagataacaacttacaagtataggaaaggtatttcgccaagtgtcctcccctagccatatattctccattgatctgactaaccccaatttgggaatcactaaatgcttcgaggtactcgactttcatttgaagagcaagccttaatcctacgattagtgcttcatactcagcttcattgtttgaggtagggaattccaactttaaggtggcgtgcactttgaatttattaggacttgatccttcattatttgatgccccatcaacatacaaagtccatccttctatcgatcgtaattttggatcaactcgttcttctgtaatgattgcacctcgtcgcttagaaattcgagaatcaaatcagtaagggcttggccttttattgccgaccgtggtttgtattttatgtccaattggcttagctctatcgaccatttaagcagtcgccctgatacttctggttttgccgattcttgtcgcaaaggataatttgtcagtacttcaatgttgtgtgcttcaaaatatggtcgcaactttcgagaagcaaccactagtgcaaatgctagtcgctctatttgtggatagcgagtttcaacatctagtaggcatttacttacatagtaaaccagatgttgtctaccttggtctttggggattaacactgagctaattgcgtattttaacaccgtcaggtagattgaaaaaacttctccagacatcggcttggatagtattaggggtcgccccaggtgcatttttagtgcctaaaaagcttctccgcatttatcagtccactgaaacatcttatcaccttttagaatcttaatgaattctttacatttgtcagaagaatgagatacaaaacgatttagtgcatcgatttcaccaacaatttggtttggctgggggtcgcatctccactactgcctttagttttgctggattggcctcgattcctcattggtttacgatgaaatagagaaatttccctaagcctaccacgaaaatgcactttagaggattaagtcaaattttataatgtcataggattctgaacatggaatctagctgagcgacatggtcctctatgtgttgagattttacgagcatataatcaatatacacttccatggtcttacttagtaaatctacaaacatcatgttaactaatctttgatatgttgctcctgcatttatcaaacaataaggaattaccttataatagtacaaacctcgattagcaatgaaggaggtgtgttcctgattaggctcatacatcgggatttgattgtatcccgagtatgcatccataaaactaagaagtttatgacctgtggtagcatagacaagttggtcaatgatttgtaaaggaaagctgtcattgggacatgctttatttaaatccttaaaatcgacgcatgtgagccatgagccattggtcttttgtacaagaacagggttagctaacaagtttgggtaaaataactcccttatgaaggtgaatgccaaaagacggtctacctcatttttgagcgcctagtatctcgtggggtccattttacaggacttttgtcgtactccttgcacttcaggatcaatgttcaaccagtgacacatgacctctggtgatattccgaccatgtctgaatgtttccatgtgaaaacatccaagttttgtttgagaaaagtgacaagcttttctcgctgctaaaaagttagtatggaacaaatttttaatactttagtattatcaaatgaatcaataggtacctcgattgtttcttcagcgacttgtgctgtattggtatagtcgaggattttaggatccaagtcaggtttttcaacacgcaatattttctcaattctgaaaacttcatgtcaaggaagagaagtgtaacaccctactagttaaggcgtgttaacgtaatttttaacttaatcgtgcagctcgttgctaatca

SEQ ID NO: 229298 - DNA, 1430 bp, Cannabis indica
attggccttggctcaacaggaccctttgaaagatcaaggttattcatgcgctccccttttaaccttgtctgttcagctaatttagaagcagccatcaaccactggtgatcttctgaaacttttgactgacctctaagctgatctcctaattgccaaaagctttgcatgttgttctccatcttgtgatacctatttgagtttcaaataaaagacaaaccctttaacaacaaaagcaaggaaagtatagagattaatgtttgaaactaaataagagtgagaaaatactttaaaatatatacaaatccaagactcgtttcgtttaacaaagtcttacccttttcaaggaaaaaatatgtaatagaaaacaaaattaaactaaatttaaattttaaactgtttcccttaaacattcaacccaataaaggaaattagtcaataaccaaaaatatatataaagatcatccatttcctttattttcttccatattctgaccaaccaaacagcctaagaaaataagaaagagagagagagagtaaagtcaacccaattaacaagcaaaatttagttttaaatttttcgaaagggaaaatttagttataatatctaaaaacacaccaaaacatcccaaatctcagcctaaaatgagcaaatcagccttaataatacaagaaattttcaaacaaatctactcaataaaacatccagtcatgcattttcattcataaaccaaatcagaattataattaaccaaaacataagagtaattaaggaaaaaaaaaagcacaagtaagatcttggactaaaagaaacctcggaaacgaaagttaaggtccgataaaccctttagattggtgatgaagtagccctagatttggggatcagagagagagagaagtgtaccttttatctgcttggctgtaaaacccagagccagaagacacgacagagaagaagggcagttggattttgaagtgtatttatagatccatttacccaaaataccttaccatgttctctcatttacattattgccattcaataaagattaaatttttaaaaacaaaaataaagttttgatttttaatacaaaaaaacaaaataaagttttgatttttatttcttatttcttgtgacaggcggtgttgcattagggacggttggcaaaaatattaattaattaattaaaaaacatagctatagtttataaaattacataattttgtcacttaaagatggaaagaatgattttttttgataaaattttgaaatgggttttaagataagctttgtacttttaagaagtgatttttttaatgaagaaaagaatatcattgttggaaaatttttaaataggtttagaggaatataatatggcactaatctcatctcacaaacgagaatagataaattaaaaaaatttagataacgt

SEQ ID NO: 229299 - DNA, 1097 bp, Cannabis indica
agcactaatgggcctggactacctaaacctttagcgacttctaccctactgaactaagagactaagaaggggaaggagatgcttcaaatctatcaagatcgagtgcttcccgaagtgaacgactagctagccaaagaggaggacatgtctgtgtagattcttatgggcaatttgctgaaggaatccacctgaattagtaattttcctttggttttctttcacattcttttatccatgcatgttttaattttgctttattgtgcaacttaacataaaggtggcatacacgtactcccgagctaagtctgcagccttgaaaactacaacgaccacaatcaaattaaaaaaggaggtggaggaaactaagaaggatcgagcataagagctttcaactaggcaaggttaataaacagctcccagttaccaacaaacttgttgaagagttgaggaaggagatcaacgatatgccgtctgctgcccagctcgaggcggataataaggctctggccaaggatgttaactctctgaaggatgagagggaaggcttccggacccttctttcaagcttgaccgaggagaagaaggttttgtaggagactcctgactttgaacaaacaagatttagtgctaagcggaaggtgcttcagaaggaggtggaaagcttggcgacggtcgccctggacatcttttatgaattttggaaggctaacctagaagcaaactttgattacctcaatgaaaataaagagacatatcttaggttttgtgaagcctaaaaagacaaggaagaatctgaggcagccaacagcgatgctctgaccaaccaaaacaatgaaacctcagttgctgatgacacaaacccgacctgtagaaaaaactaaggactctaaccatttgaattattttttatcaatttggaacatgggcccttttttaatacaatgtggccgaccacggggcttttaaacttggttaatagtttattttgtttcaagacaactggctggccgagcagcttttaatcttggagttagcatgctttgttatcttttaaaatgaatattttctcttacttttaaataattgcacatgcaaat

SEQ ID NO: 229300 - DNA, 1553 bp, Cannabis indica
ttacaaaaatacccctagtaagtacactaacgaggtcttaaaatactatattttattagtatactttcacatattaaattatataataatataatataatataatcaaactagttagagttaatgctaatacagtttctaaatcttagggtattacccaaccttttctagctcatccaacttatacccttactttgttttgacttagattgctactagtggccactcattaaactttcaatttcatgacaggtcaggttcctatagggagaagaaatactgacattgcaaagtatggaagtacttgggtaaccgttttgagcataatctttttttttttttaaagaagttttgagcataatctattttcttgcttttgagagatatctaccttcccaacttaaaatcttttttttgagcttatctttaatataccactcattatgtatgtttagtatataagacataggaaaaatttattattatatatagattgtataaaaaattaaaattatatttatgtataaattaaatatataattatatgtaaataagttattttgtattatatagtgtaataaaattatataatgtatgaaaattataaatttcccaaattataatcaatgtcacctgacaataataatacaaagaagcaccctacccaaaaattgcttctgttgaactagatgagctttagatgagcgaaattatatgattaataaatagtaccctcatgaacaaagctcgaatacataattatttgaacaaaaagatagaataaaaaagaagctagagttttactcaattacaaagtcactaaagtaaataacacaaataataattaagggttatttataacttatataggctattaacataaaagaataagaaaagactaaagcaaccctaattaattttttaagaattactacttataaaatgaaaaatcaatatagcaactagttactaataaacattttttttttgtagaaatatagtatttttttccttgaagattgaaaaatatggggtaaaaacaattccataaccataaagataaattataaggcaaaaacaaaagcacaaataaaaactccatatctatcaaacttatggagaaaaaaaaagcatctttcatgtaatccacttattataaaaaataatgcagtttagactttagagaaaaaacgtaaaagttaaatacattgattacaaatcccttcccacatattagttttatttatgataataacagcaaacaaatagtgaagataagataagataaccaatttgaaaaaaaaaatgaaaggtgatcctaatcctaggctttttggatgtatcttgatagttggatgaatttaaaaatcatgaaaatgaaaactgtttctaaaacattaaaggtaagttgtactgatcatcctttatcacaaacggctaaaatagttgcataacttgtctttttgaagctgtgtttgttggccttaaagtcctaaacaaaatttggatgcatatatctccctagctatagctaacgttaaagttttaatgcaa

SEQ ID NO: 229301 - DNA, 607 bp, Cannabis indica
ctaaattatttgcataagtatattaaataaataatagtagcataacatgcatggaagattcttgcttcttagtttattgaattaaaattaaatacttaattaaggaaagactccaaagttagtacatctaattcttttactttattccattatattatatacttaatccaaactactaaaaatgtctcattctcccccacttgtctccacagtactacttttatattaataattattattatataaatttatttaagtatttaattttgtaaagagtatgggatatggagtttttaaattgttttttgctttgccatggctggctgaattaataataaataaaccctaatattactcgacttagttcttttatcttatttttgagagggaatagttcttgttatcttgaagtttggtaattgaacaatatgatttgtacacccatatataaaataaaggattttacattatatattaaaatttataactttttttctttttattatggggtagaatttttttcttctaaaaactattgtatattgtattaagttttcattgttgtttctacggttatttttagttattctattgttatttttaattg

SEQ ID NO: 229302 - DNA, 1266 bp, Cannabis indica
taaccacttgagactagctcaagcggttataaggtacgtgtgtgttggagggcatgtttcgagtctcaattagttatacattgtaatatataagtgttttcataaaaaaatagtatcgttattaataaattttaatattagataatctcactattattataaaaaaaatcttattttgagtggtaacaaaaattgtgacttattataaataattatttttatgtttttacttgtcatcaaacatatggctgaaggtactatagactatagttacaaaaattatactttattaggattaattatatatttaatgataatattatgactaaaattaaattaggaacaatttgtatatcaatattatattttagtcacaaataatttttattgtgactaaaaattatatttaatcacaaaaatatatgttatgactaaaaaattattactaaaactaatttttttatgtagtttttcttttaattgtagtgtattctattataataactattatatgcagctaattataatgatggtgctcatatattattactgatgtcttttagtatttaaaaatgctatacatcatcaaaatttataatgaaaatttatcaatatggcatgttataattttttattttatcaatttagttatatttttattttttgaattatgttttaataaatatattatcaaatcactcaaaagctatccatgacaatttgtggaaacatgtttctaaagttaaaagataaagaaaaaagcccgttatttaaatagaggacaagtggttgtgagcaatacgatatatggtcaaattatatattaattagggttagggtttgggttagtgtattaatgtatgtgaaattatatatgcatataggtttcggggtgataataataatatatataacggggacaacggagacttttcagaaacaaacaaaattactttaatttattattgaacaattttgtgatgcttttgtctctttttgagctcccaaacgtatcccagaagcaacattcgtcaaacagtcacgtattatatatattaatattatatttaatatttatattatatagatttttttttttttttacatttgcttagaggtaattaaattgaatagaatggaaaaaaaataagttttatttcaatcttttatttagttatattttaaaatattagaatatcattcaaatagaatgacttttctattatttttgtagaatgactattctattttgaaatgaaaggaaaa

SEQ ID NO: 229303 - DNA, 2285 bp, Cannabis indica
tgcatggcactagcattagtattaattagtggcatacacaccacacgaatctcaaatctatatatgctttggttggagcttccatcactcacctatcatcacataatattaattatatattattattaaagtcaaaaattatatatatattgtgtcacaataagataacaacactagttctcaaattaaatttttgccatactatataacaaaatcgactaattaattaatttatttttcttattaattacattacgtacgtgtatatagaaattaaactgttatattaattaattagtgcgaatatattcttattttacgtatctaataaatttgtgaggtgaatatatatatatataaaaatataataaatatagttaagatggaaaaggtataaagagatggggatgaggctagggtttttggtttagggaagaaaacaaattagaatataataagataagataataatcttttttatataatatatactaaataaaattaattgatatatatatataaatgtgaattagatctgactatctgaggtgaggagagaaccaccacgattgatcgatctgcagtatgggtccttatataaatattaaaatctgtcagtctctcctgatctgcattagaacactatgcatgcatggttcatcaatctgtaaactgttgaccaaatatagagttcatagataacaaagttgaactatttttacaaagtaagttaagataatcggtgtagatattttactaagttgtttacaattcaaaaaattattaatcccaatataatagctaattattaattaccatatgactccacaaattttatttctatggacacgaatattgacacaacataatctagtactcctaccaaagaagatatagcatgaaaaataactcaaattaatttctaaaatgcacgattttagggaactactatttttacaccttcggtttctcactgaagagggttcctacccttagtttagattttaatattgcaaataagtgtcgtctccctctttacactttaggattttgtttttccttttgtttgacatatactgatatcttgtttttcgcatctcttagactgccttttccagtcgcttctgattcaggagctggaggagagggtaactttttacaagtgatcatttttatccaaggagttgcaagtagagaagcttgtgaccaagaagtaggtctcattgccccacaccaggacgtggctcacctttccgtgaaggacatagtctaggacactctatgaggggacccaaacgaggttagggaggtcatcgcaattattactgctgaagaacactacaaaaaaagactgcttttagtgacaaccttttagtcacaacagaaaaattttgtgacaaaatgtgacttttagtcacaacaaaaaaatttcttgtgactaaacatatagtatttagatacaagttctcactaatttagctttggtcacaacaagtattgtgactaaaaacacatttagtcacaacaaagtaattttttgactaatacttttagccacgaactttttagtcacaatgtaggagaaaaatttataattagtcacaacttttttacatttagtcacaagttttgttgtgactaaaagtaaaaaaatttgtaagtggaagctttgaaggcaatgaaggtcgatgagcaatggttggtagattggaggagacaattcccaaaaagcctaagcaaggctgaagaacttactatctgattcaaggaggtagtgtgtaatgagggtgctctgggagcgagcacctccagtagtagtgaacacccttccatataattacgggctcccactataattgattttgaaactgtcatattcaatgtggatttacactacaacaatttgcattaataccagcggacacaataccggcgggccacatccgtccctaataatgggattaataccggcggatgtaggggtccgccggtattattatgtatttatttattatttttttaataaataaatataaaattcattagcggcgggcatttattaataccggcggatagcccgccgctaatagtgtaggggattttatttcaaaaattaaccgggaaaattcgcgggctttaattttaaaaattattagcggcggacataaaacatattaccagcggaccttccgccgctattacagttaattttttttttttattgttgttttagaattagcggcgggaaagactaatagcagcggactccgccgctaatccatttt

SEQ ID NO: 229304 - DNA, 1147 bp, Cannabis indica
aattttaacaagttttttccttactcttgcactcgttagtgttttcttaaaatctcaccgtacacatctgaaaaatcataaaatttctcaaggaggaggccaggaccgttgtctataacttccctattgtacttgtggagagaaaatgtagtttttgagcactaaaaatcatttttatcaaaataataaaaatctcacttttctaatagtagtacccctttgtgaaatatgacccgcacctatcttagaatatttttccctaccaggcacaatgaattcgcactactaaaggtgaatgtgtagataggtttcgcattaaatttgtttaaaatggtcccttttaaaaaatttaaaatgttcttctttttagtgtaaattttaataagctttttccttactctgacactcgttagtgttctcttaaaatctcactctaaacattttaagaagtcgtgaaatttcatagagaggaagccaagagcgttatccatcacttttctattcaacacgtggagagaaaatgtagttttcaagcactaataatcatttttatggaaatagtaaaaatatcactttttgtatagtggtacccctttgtgaaatgtgacacatacctatctcggaatattttttcctgctaagcaaaatgaattcttactactaagatgtgaatatgtagatatattttgcgttaagtttatttaaaatgaccccctaattcaaatatttaaaaatgttcttcttttcagggtaaattttaataaattttttccttactcttacactcgttagtgttctcttataatctcaccttacacatctcaaaaaactatcaaatttcatagagaggaagccaagactattttccatcacttttttattgaacgagtggagaaaaactgtagttttcaagcactaataattatttttttggaaacagtaaaaatctcatttctttaatagtggtattgctttgcgaaatgtggctcaatcccatctccaaatatttttctctgctaggcacaataaattgtactactaagacatgaatatgtagatatgttacatgttaattatgtttaaaatggcccccctaattcaaaaattgaaaatattttctttaaatggtaaattttaataagttttt

SEQ ID NO: 229305 - DNA, 894 bp, Cannabis indica
ttttttattattatttttttttccctcttgaactctaatttatcagttcccgatcgagggcagtgcagtcgcgaggtttcaaaagatccgaagcggagaacaggaggaggagagcaggggctttctggtaaaatcgaatcttttttcttttctttttaaattatgtctatctagtaagtttctttttttttttttaatctagtacgttttttttttcggaatttagtaagttcttttaccaaataactaccgagacattcagaactcaatagcaaaaatatctcaaaatagacattattttttttttttagtacattattgggttaacgtatatttttcttttttttaataaaaattaatatatagtaggttcattttgttggtaatttttgacaagttagcgtagcatactcacaatcaagtattttagctcacaatcaagtcttttagctcgaatcaagtttgagtccagaatttatgaactttgtggttagaacaataatataaaatatatatgactgcaccttgcgagcgttataataattgatttaaaataaaatagtttaattataattatttaattttaaagtattttatattgttagtgtaaaaaagtatgcctaatatagttgttgttaattttatgaagaaatgttatgataaaatataatttaaaataatattttaaaatacttctttgtaaacaatatttttttatgaaggttctatcttccatctcatcatcatcgtttagtatgatcaatctttctcttgtagtgactcgagagacaacaacatataattgatcatgggtaatacttgcttagggagatataatcaacatgtttaagagattgtacttgactttatatattgtcatagcaaaacatggtg

SEQ ID NO: 229306 - DNA, 901 bp, Cannabis indica
tatatttttagccacaatacttgttgtgactaaaactaaattagtgaaaacttgtaactaaagactatattttagtcacaagtaatattttgttgtgactaaaagtcacatttagtcacaaaaaatttatgttgtgactaaaaagttgtgactaaaagtagcagttttttgtagtgtaaatcttctatatatattataataaatattagtataataaaaaacgcacctaacactcataataaaatatactcaaaataactagagaactcccctaaattttatacaatatatattaaaaatataaaaacttctataatcataattgatttttcatcctagaaaagtaacgagtaacgacttagagaaataagcaaccacccttcccgtggcattacgaactatagcaccaataccgatggtgttagtatgaacatcaattgaagcatcaacattcagtttgaactagctcagtaatggagtaatccaagtagaagtagaagtgcatacactctctcttttagcattattagtatttcaacccttattgaattcttcaacaagcttgtaaatgcaattagctatgacttctagagaataagatcgacgaccatgaacaacctgagtacgttgtccccaaatataccaagttgccactaagaatagtttaaatttagattgagaaagcacttcggacgccatgaggatagtttgttgaaaagaaatctccaaagaaatattttttaagaaactaaattgaaatagtttctagacttttctaaaaccccgacattagaaaatagcatgtccattggaatcaacactaaatccacacataggacaattagaatgaagaagcacaacccatttttgaagacccgccgaagttggaagaatgtcatga

SEQ ID NO: 229307 - DNA, 1062 bp, Cannabis indica
agtgggatgattatgtattttttattatgtggattttcaaaattttaatagaaattgtagaattacatttaataaaatgtaaaataaagcataatgatgttaaagtaattgttatgcaatggtatttacaattttctctttacacatagtttttaggtggtttgaatcttaacaatatattttttttgaaaaaaaaaagtgtggagtgttgaacttgtaacctccttgaaatttaaaaatacttccaccactacaccaatagagaatataactttatataaatatatttaattgatttatataaatatatttaataaaataatttaaattcatgttcgtttatgtttattggtataactttatcaaaaatattatggatatgtatttataataagtttcatgaatatatacatgtaaaaaataaattaaaacggttacagagtcagtgaaatcaatagagaatgtataatttaaaaatctttctaataattttagttaaaataataatatttattacatagtttgcaaaactatatggtataacataatatttttaacaagtcaaaaaaaaaggtagagcataacattttaaacagtcaagaaaaatggtagactatgtcattttattagtcataacaatatctacaacaacattgagcatgatattaaaacattgtggtttaaagtactagactttccacgccacactatttaaccacattttaaaaatattattaaatcattattaaaacatatttgaaaagacattgaaacatatttttgctgcagtagatcctactattataattaaggataaagattcttacatatataattatggataaagaatatttagtgttttgttatttcaaagttgatttaaaacaatgattattgaatccgcgtttagtaatattatcaacacatacattatgtacacttttaatttgtcaacatacttggaaaaattcaaagttgaattgatatacctagggcgaagatggaaataaaattaaagtggagtgattatgtatttttctattatgtggatatttcaaaatt

SEQ ID NO: 229308 - DNA, 2525 bp, Cannabis indica
ttttttttttttttgcttattatcataaatacgtgtagcttataaatacgaaagtgctcgaattgttgataaaaaaaggaaaaaaagaagagtgaacatattttttagatattagaatgtgttgtaaactgttttaaaatatgcatttgttgtactatttgatacactattgatccaatccaatacaatacttgaatcaattagaaaataggtattttattgatatcaaagagaaattacaaagtttcaaacttttcaagacagtttggtatcttcatttacaaacaaacaattcccacgctcttacaattaatcaaccctctatttatagttatataatcttcgttaacttttttttaacaccttaggactaataggatagctcactaaaagccacttagaatttgacaactcagcctctaaaatcataatcaattatactggtgaaactaatcaactttatgagcatctttctttacttgggtcaagggtttgaatcccaccacagtctcttattgggcgggattatgtttggctatttgggaggctagcttgctgaggcggtgccatccttaatgggatgggaaccctcgaggtgtatactgatgacccaattaaggcaggatgaggtataaggcccctatagttagcacatggtccccgaaattgtcaaagctattgaaggggtggggaagggacttgcaccatgtgatcccttttattttcagcaaaaaaaaaaactataccgatgagactaatattaaggtgtaacatcatttcaaaaagattcctatgtttgaaataattaaattttcataagagtaattatgatgcatttaccaacatgtctatttgacttagtggaacaaaagaaacagaagttgagggaacacattcatccataggataaaaacttttactttacatatatgaataaatggttttgtttaaactgtggtctatttgaacatgagctatgttcttacagatgaaaactcatggtggagaagtgtatgttgtttttaataagaagtcctctacctttgctgtatacaatggaaatgacagtgaagggcttcttccttatcaaatttactcaataattatccagagagacgtagacaagaaactcgtaacacacctgagaaaatagtttattaatcttcggtttgatgaaggtagatcaattttgtggtacacaactataaaattagccatctttatattttagtatctaaattatttaactttgttatgaaaaattcatgatagagacatattaatagttgaaactgaattctaaacttgtaacattataaaagttagtagaaaaagaacttgagggagttggcttcctttaggagctttctttaaaatttgcatttaaggagaaacatggattcaaggtaaacttgttaacttggtatttttcttttagttatgtagaaggggcaaatgtgtggttgaatctcttaaacaaaccacgcatgctcttacataagtctagtagtctactagattctcgggggcgttcaagaggtatctaaatatgtttacatataaagtaaagttcttatacgacatcgaagaaccttcatattagctaccttttttattcgtagatgttcaagcttagttttgctaacaaaagtataacaaaaattatgggacaatatgaaaatagaagaaaagaaaaatagtgtaggtatctaaaactatgtattctaaatttttgtacctgtctgccttatgtgattttactaattaaataatagatatttaaagctgtaatattcataaatgcgatgtatacatgatagattcaaataacttttcattgattagagaattcaaggaaggtagatttgctaatttggcttgcaaggtaattttctttactctgcttaaaactgtactttacttaatacttttaatttaacttattattgtaaaatttgtatgtaactaagtttttgatcaactttcacctttcatattctctatcaaggtaattcatgtccaagagtttaaaggcgaatggatgggtggcttcctctgggatggaactgatgcccatccgagtagtatttcttcgaggttagtgagtgttacttaactttttttgttgttgctcttaaattcgggtcatagttagctgtattatcatgtgtatgttgaattgttatttttcttcatttattatatataaaaatatataggtaaataaaaaaaaaagagaaggactcgttaaagaagaaaaaagaagaaaaaaaaaatatgtattattaattaatgatgtatccccaattttttctccactctttgagaacattgtaaaaatgagtttatataaagggagaagcaaatgagacgagcaaaaaataaaagagaagaaaattctagcaaaatttacagaaaagatagtacaatatattctcatcttcaagaaatttctatagagtacacaaactcaattatcgaaatgtgcctaagtatttcgatttgagtatatctgaatgaatgtt

SEQ ID NO: 229309 - DNA, 1318 bp, Cannabis indica
acatatattgtcttcgtaaataaatatacatgtattttccaaataaaaaaccatcattcagatgtatatttttgtttgtttgggacattaatacatgtagtattttgcacacattttgttacattaaatatattaatataatataaaaaaaaagtactatattactatgtaaacggttgatgatcacactttttacacaaactgttatagaatttatatacaatagcctatttccttcgcaatagttttcgtgaaactgaaaagcgctaaattattttaagaaagataagaaattcttatgtaatttcattagaatagcaaaaagctcagttaccaccaaataaaaatagattacctctagtgacctcaaatttagtccactaatcacaacagagcattatctatgatcggaatcatgactacgtgtaaataattaaaacaagtaaataaaataaacacaacaatattagaaaggtttggcccccttggttaacgggtaacaacctactctccttttacttgtattgatttaagagatactaccactcagataacaaactttgttatatatagagtagctccctatgaattacatgttggagattgttttactatgatctaaatttactatcatgtatattgttaacatcctaaatatgaatttttaaaacaataaaatttagacacaaataaagtttaagaaacatttggttgcagtggaattaaatgactccttccactctaataatttctaacccttgtatcctttctgtcgcagagtattatcaagatctgagctcgattctccttcaggtgttgaattcttcacagtcttacacactatgattgagtaccaacttgctatgtgtgggcatgtattctatcactataagactcgaaattttttgaagaacaatgaaaggaggtttgaatatagaagaaggaagaaaaagaagtctcaagaactctctagttctgtaacaaattttaaactaggttaagagtcattagttggattatgagaccatcttattccttttatactatttcacttagggttaaatttaaattatatgacattaaaaaattgatcaaaattgggcaaaaatgaccttaagtggccggccacatagtgggccccactaaatttgaattttgccattttatacgactatttatctttttctttcacaaatgccatatttttcaatttcaatgatttaaatgtcaaaactatttatttaataattaaaattaattaccaaataaaattgtcatttaatttatttattaattagacttaataaagtctcttaat

SEQ ID NO: 229310 - DNA, 2523 bp, Cannabis indica
agaatgatcaattgtgcaaagtcaaaaaaatagaggagataaggactgtcgttttcaaaatgcacccgctaaaatcacctggcccagatggtttcccaggtgttttcttccaaaaatactggggaacagttggatcgcaggtctggaaaatggttcaagaatttttcactcatggaattctcccaaagtcgtgcaaccatacctttatctgcctaatccctaaggaggctcaagcaaaaacttttgataaatttcaccctatcagtctatgtaactttggttacaagatcatctctcgaatccttacagatagactgaagagcatcattgatcgtctagtctggcctttccaagctgccttcatacctggaagatggattgtcgaatgttatgtgctcgcccaagaagtgctgcatgctgttaaaaataaaaaagggaagactggaatcatggctatcaaaactaacatgagcaaagcctacgataggctggaatggaatttcttatcgagagttcttaaagcaaacggattcagccccaaggctatccttcttatcatgagttgtgttacttcggtcagctactctatcctacttaatggagcaccactcgctcccttcaatcctaaccgaggcctgagacagggagatcccctctcccccttccttttcatcatgtgtagtgaagtcctatcaaagttaattcttaaagctgagaaagaaaacatggttcgtggtatcaaggtatcgcgcaaagctccttccattactcatcttttttatgcagatgatgcaattttctttagtcaagccacagaagacaatgctaatactctgctgaaaatctttgaaaaatatgaagcttggtctggacaacgtattaacagggagaaaagtggagttgtcttctctccaaatactcacaacagcaagaaaatggctattctccaacttctccaaatgcagactctaaaagctaaggagaagtacctgggaaacccgtttttcttcacgggtcgaagaaaagatgactttcagttcctaaagcagaaaatcatgaacagaattgatggttggaaggcaaaatgcctctctcttgcaggcagaactactctagtcagctcagtccttcaaagcattccaacctacttcatgtcaacaactatgattcctctttccacctgtgaggaattggacaggatggtggcaaaattctggtggctcggggcaaaccagaaaaagaataaatattgtgttttaaattcctggggagatctttgccaaccaaaaaactgtggaggtcttggtttcagaaagtttcatgccataaattttgcccttattgcaaagcttttttggatggtgctgcagaagaaagataaaccgtggatcaatactctgtgtgctaaatactgcagtacttttgatgcttggacagtggagaagcatgattccgactctcgggtctggaaggatatccttagcaccagaaaactttgcactgagggggcaggggtcatcatagcagatggggacatagacatttggacaaaaccttggattccatggaaatcaatccaagacatcagagagggctttcactacaataggatacatgctttcaacaaagtttcagacctgttcattgatggaaccaggacttggaatgtgcccctaatacaatcctgcttcgatagagatctagctgaggcaatcatcaacatcaagcctattcaagacgggagtgatctcctcttctggaatccggccaaagaagcaaaattttctgtcaaaagtgcccattggttataccaacatcaaaggtttagcaatccaaacagtgtgtggaaagaattatggaagaaaaagattcacccaagactaaccatgatgatatggaaaatactgggggattgtcttccaacttctggaaagatgtatttcctaaacaatcctgacagacattgcctcttatgcaacagtgagactgaagatgccttccaccttatagccaaatgtaatgtcaccagaggattatggttcaaaagtaaatggggattaagacttgactcaatgggctggaacaatgtcatggactttggaaaatggtggactaatctctctgaccatgaattgttgattttcttggcctgtttgtatgataccatatggttttggcgcaacaacatctttcacaatcactgctcctgggacactcagctaatttataatgactgcctcaaatgttttgtggaattctcctcgagtgatgtggtgatcgaagcaaacgaggaagacagacatcttttggaaaagaaggattggactacagctatgcccaaaaacactactacattcacagttgatgcttccgtagctgaaggctgggttgggattgctgctattaactctatggggactctgctgtggattactgcctagccagcagcgctctagaaggtgaacttgctgctatttccttagcgctctcttttgcttctgaggcggggtttaagagaatcaa

SEQ ID NO: 229311 - DNA, 644 bp, Cannabis indica
ggtttaaaatatgatgttgtactgttttgattttggtggtgaaaaaagtaacctaatagttgaatttggatctttgtcttaataaaataacagtaataataaatttgaatttagtcaaatatgttaagccttaatagatttttgcaaagagtaactagaagaaatataatttttgaggtattcgtttgtcattattcattatgaagtaagtgataattatttctgaagaaagaataaaaataaccaataaaaaaaaaaaagagaaattaagatttcattcaattagaaaataaaaagtaaaagaggttctagcgctagtggtggacgtctgagtcgtaaattcatgtgattctaattactttgtcaaaaaaataaatcaaaagtaaaagaatataactaataaaaatattatataaaaaactaagactaaaataattcttaaaaattatttaactgtaacttcatacttaaaaatttaaatttagtcgaatatgttaagtcttaaaagatttttgcaaaaagtaacctagtagtgggagatttaacttgatatttgagtcttcgtatgtaatacccggaatttagaaatggattagcaaaaccctaactagataattatgtataatagaggaattatattatta

SEQ ID NO: 229312 - DNA, 3585 bp, Cannabis indica
atagaggagaaattcttcttttttggaatcaagacaaggttagtttcattaatcccagcaggaaaatgaccagagatgaaaaaatcattagcaaacttgataacattcttaccaacagttgcctagtgagtttggtagaaacctggacccatgccatcaagacctggcgctttgtcaggatgcatttgaaacagagcgtttaacttcctcatcttggattggctgtagaagatcgttattttgagcaatatcaaccgaaccattgaccccattgacaaccgaaagatactgagaagcattagcagtgtaaagatcagaaaaataatttgagatgacagtttcaagccccgaatcccaatccttcagaaccccacgactatcttgcaaaacatgaatttgattattgcattttcgagtgcttgcataagcatgaaaatatttgttatttttatcccctccatgtaaccagttttgtttggaccgctgcttccaataaagttcttgttgggcaaggatttcaaaataattagtttgctcagtaatgaaattctgcacatcagtagcatcagtactacttttcaaacgagacaatttctgcttacttttggaaatacgagtcttgaaattacctgtaagagtgcggccccaggcatccaaagcaatgccgcaagctttgattctttcagcaagagaaaggtaatgattatttttccagcaatcgtctaccaattgggagcaaaaaggctcacggcttcagcaattttcataccgaaagtggtatattttctttggcagccacggtggttttggttcaaggaagataggggtgtggtctgatgatgagaaatctccattggtaagagtagcttggggaaaagattggagccaaagatgggatacgagagctttatcaagcctaatctcaacactagagggagtacctttgctgcgttcccaagtaaaagggtaccccgaaggtcaagatcaattaaatcacaactctgaagaacctcttgaaaaccggcaataagagaagagggataaggacgaccacctttcttctctgaaggactaccaatattgttgagatcaccaattaaacaccaaggtagttgagaaaaaatagcaagatcatgaattagtttccaagtgttgaatcccaagcttctattgggttcaccgtatatgcccgtaagacgccatggaatcgtgttttgtatcagtatttctgcatcaatgaagttgtgtgcatttgaagtaaacgaacctcctcttgggctttccaaagaagagcaatccctcctttatgaccttgggcctcaacacaaaagctgcctccaaaacttagttggactcttaatctttcaatcacatcttttttgcataaagtttcacacaagaaaataaagttgggtttcttttgaacaacaatgtccttaaggaattggcaagcccgcgggttcccaagcccacgacaattccaactgatacaactcataatgcttggtgggcctgggatccaggacccaccacattcacattttttgacccaatttccacattaacatccattaggcccatgaacacttcagtgtcacttatcacagactcattcccacgcaataaggaatcattgataacagaattatttttgtcaatagcaaatcttttcctttttaattcagcatttgtcaactcttcatcttcttcctgggtgtcataaatcacaatctctttttgattgggatgtgattttgcaagagtaaatggtggaattcccattgaatccgtggctgatttggtggcagggatatctccacgatttgtgggatgtgtagctgatggtggggaatccatggatctgccaggtcggagaaatggtgatgcagaaacttgttggtgccgtcgaggtgtttccttcatgccaactcaataaggctacacataaatactttggaggaatgggattatatggatgtcttgagagagaatggctacacataaacactttaggggagtgggatttcgtcacttaagtgatttcaaccttgctatgcttgctaaacaaggttggcgtctcttatgcaatcctaactctcttgtcagtcgggtctataaagcaaaatactttcccacttcagacttcctcagtgctgaccttggctccaaccccagcttcgtgtggcgcagcatttggagcgcccaaaagcttctcaaacttggagtccgacgcactattcgtactggtatgcacactagaatccttgatgctccgtggcttcctgacaaggacaatccatatgttacaaccaacaatcctgggctcttgaatcagaatgtttcggcattgttctcgattgattcaccgtgttgggattatgatttagtcatggatatgttcaatccccgagatgctgctctcatccttggcctcccgctgagtcatactcttgatgatgactgttggtactggaatggcgaaccaaatgggagtttcagtgtaagtagtgcgtactctctgctgcaacaaagcaggtcctctagacctgtatctaacaacttcgggttctagaaagagctgtggcagctgaaaataccatcaaaagttaaaaacatgttgtggcatgccttgactaattgcctcccaacttgcctaaatctcgtcaccaaacatgtaaatgtgtctatcctttgccccatgtgtgctacacaacccgaaaacacctctcatgccttgattgagtgttctttggctactgcatgttggtagtatcttggtgttcattgcccgactcccccaggtacttttgcatcttggtttgaactcacatttacttcttctacaaccgaagatatgtgtaaaattgctatggtttgttgggcattgtggaaagtgcggaataaaaaagtgtggaagaatcaaacttcctctttgaatgaggttatggtatcggcaaatacttctcttgatcattggagaaaagctcaggatattacttctctctcatctatattttttaacaatttaggtgataggaatgagctttgggtcaaaccggtgttggaaaccatcaagattaatgttgatgcagcttcatttgagcaggaaaattcctacgggttcgggatggtggcccgtgaccatcttggttcccctcttcacattcatgttaagtatcatggcggttactttccatctgaagtggttgaagcaatgggcatcaaagaagcacttagttggatcaaggcaaaccactgaaagggagttacgattgagagtgacagcatgctcgccgttcaggctattcattctactcagttaatgacttctgtgtttggtttagttattaatgattgtagaactttattatcctctcttcctgatatttatttacgttttgttagacaatcagcaaatcgtgctgcccactatgttgctaggcatgcacgatcactaattggttgtagcattctggggccttctatccctcgtgatcttcagattactttgtattcagaatgctaaattaatgaagttgtaatttcatgtaaaaaaaaaaaaaatataccaattagttacttttt

SEQ ID NO: 229313 - DNA, 1699 bp, Cannabis indica
gtatttatgtatcaattattatatagaattatccggtgatgagttaatttagggtcttaaacaaataatttcttttaggactacttagttataataataaatagatattttaaaattattaaaaatatatatatatatatttactaaagatttttttatttggatcttaataagattaagttctaagcgcgagcctaatccatcttaacttaaggccaactaaaaatttttattaagtacttagtcatttgcaaatagttaataaattttatagtagttatggaattaaaatatatgatactttttgttaaaatatataaagtattaattaatatttaattgtaatagtataattatgagaacggttcaaaagtattattggtgcttaatacttttcttaatatcgtattaatattagtgtaattaagtattgagttttatataatttaagaaaataatttttaaaaaacatcattaacaacacaatacaagtgtctctttagtatttataaggcacataacctaaataaattatgattaatcatttggaaagataacttattaagacagtaatatttcgagaactttcgaaatacaatattataaataatccaattaaccgaaaataaaatataaatcctttataatttgtacatggccttaaaattgtttaaaaaaatgaagagaaaattaacactacctaatctccttttctccataaaaatatataaaataaatggcacgtagccaagaaattacatgtatattttcttttcttggtactttttctcgagaaccaaacatcggggacaaatttttatatgttgaagagaaaataagctaattgcctaagaagaaaaaacgaaagaggacgaaaacgacatcgtatataagaatataagtgttacgaacaaagtacatcgttcattacggaatgactttttttttttttaattcttttataatgaaacaattgtacaataataataataataataataataataatttttttaatgatatctttgttccccattattctttatgctactcttaaaataacaaaaaaaatactataatagtcttattttttattaatttatattaaactatcaataataaataatttataccgtatctattagataagaactagatttggattcctttcatttttattttttttattgtgttctatcttttgtgacctttttttttaattattattatatgtaatcttgtccagaatttctcttgttcagaatcattagctgatctttctcactacatataaaataaagaagaaaaagaaaaattcatgtacgtgtgatatatatatatataacaaaagaattttaaaataataatatgacaaaaaagtagttaaattaggaagatatatttgtaatttgtaaatggtatatatgaaagtctataaatatctaattgtacgagagaaatttgttaaaacatacataaaaatttagactattcttttaatatatcacctttaaatatattctccaatcacctaaaacccaaattacccttacaattcaaaaattctcttctcccactccctctgtctaacttcccccttctctttgttattcccagccccaaacatttcaagccccgattgttcacgagctccaactgaccaagactgtaaagcccgcttagtttaatttagaaatta

SEQ ID NO: 229314 - DNA, 1406 bp, Cannabis indica
atggatatgcagagaggtatacatacgattatttgagggaaactaattgagaaaattttgatttgagtaattgctgctccaccagctagggttcgagctgattatgattaagcttatttattaatctgtgtaatgctagttttactatcaaattaggatcactatcggtttctaaagattcttaactttatttctatttagaataaataattgtagtgacaagcaatagaattgtaattaattataagacaatgcggtaaacctgtagataatctttaaaacgatttgtctttgtaattttgatcgactaagaatcactccgttgatccttcaaatgatttgtctgtataatacacaatcatagatgtctttcattggtgtttcttctcattttctattctgtcatttcataaattcatacaatagtattagtagcatatgatatacatatcaatatactaagtgatttgtttgttgtctgtatttcatttatcttatgaacattatagttttcataaatgtatagttttcatatggataatcttaatgtgtgttgtttaattgtttgacttgttgatagatgatttggtcactattatagggaaaatgttttccgattttatctagaattatgtattttttgttttgttaaattcataaattgtgatgtgcttgtttgtttggtttgattataaatttttatttgccaatatagattaggtatcaaagattaaactagttaaaagtttgtacaaacttatatcatgaatttaacaaacttatatttcttttttttatttaatgtaggtttaatatttccaattgggttggaatttttggtatatggattttgctggaacatcatattggtgctatcgatgcagtcgattcattagcgtaggaactcgggttctggtccaagataacgtactttgcccccattgtggtggcggattcgttgaagaaatgcagaacccaaccccaactagatctcctatccgtaatcagtttccggcggctgctatgtacctcgaccatgcccctaatccagagattcgtagttatggccaaaggctccgccgtagccaaagaagtagccgtgaccgctcgccttttaaccctgttattgtccttcgtggcaccgccgatggtggtgggggtggcggtgatgacagagaacaaagcaacggtactgatcgaagtaactttgagctgtattacgatgatggtattggaacgagtcttcagcccctacctcctagcatttctgaattttttatgggttcaggatttgaccgcctcttggatcaattgtcacaattagagatcaatggggttgggagaatggatcatcctccagcttccaaagcggccattgattccatgcccattataaagattgtggc

SEQ ID NO: 229315 - DNA, 941 bp, Cannabis indica
aatttagatgacaattctaaaaaagaaaatcgttcatttgctacttatccaaatccaagatttgatgatctctctcatggagatcatccaagtgtaatgcttgtagctaaaattctcactagatctgaaaattacaggtcgtggaaaatatcgatgcttgctgctttagttgcgagaaacaaaatcaagtttttggatggaagattgccacaacctgaagaagatgatgaagactgtgattcttggtgcaaatgcaatagtctgatcatttctttgattctgcgtgttgtctcgactaagatcggagatagtataatgtatctcaaaaatgcttcatcgatctgggcacagttgtaggagaggtttagtcaaaaaaatgctccatgaatttttgaagctaaatgtgctatggaactccttcagcaaggatcgaacaatgttacaccagactcaagtctctttgggatatgatctaggaatataggcccacacctatttgcaattgtggagccatgaaaataattcaacagtatcaagaagagaatcgtgttcttgagttcgttgttggattaaatgaatcctatagtcaagctcgatctcaagttttgatgcaagatcctctcccaagcatcaacaaagcttttgcttccattattcaggaggaaagacaaagaggaatcactgttgttcatgttgatgttgagaaacatgtttcccctccaactggtgagtttgctggagatgttcaatctcaaagaccaaagcttgtttgtactcattgtggactcaatggtcacactatggcaaagtgttattgcctcaatggctatccaccttgtttgtactcattgtggactcaatggtcacactatggcaaagtgttattgcctcaatagctatccaacttgtcacagactccatagcatattcccagacaaagg

SEQ ID NO: 229316 - DNA, 1351 bp, Cannabis indica
tttccagtctaagaatatactttaagtcacaaagatccttttattttgaacctattattcaacctgtttttcaaatttctaactgatgtaaatcatttagaaataaataagacttagtcagtaggatgaagctgttaccaaaaaacttcataaagagagagtggtcagtagcaaaatggtgaaaaccttcttcaattaaagcattggaaaaattttcaaactattgcttaaaggcttgtttcaagccatataaagacttgttcaacttgcaaattgcattaggtgaaatctcccccttaggactatacccaagaggtagagtcataaaaacattctcatgtaaatcaccatgtaaaaaagtattgtttacataaaattgatgtaatatccaaccattaatagatgctaaggctaaaaccaacttaactacaataagcttagtaactggtgcaaaggtctcaaaataatcaatattttcttgttgattatatctcttagtaacttattgagctttaaatctatccacactaccatatgcattaaacttgattttatagacccacttacatctattgcatgttgatgaggaggaagagaaaccactatccaagtgtcattagcttcaagtgctacaatttcatggtccatggcattatcccattctggtatgccatgagcttgagtaaaggactcaggttaagtatagcttgaaatagataatatcagggctcaaaattgtggggaaagcccttaaagctcttaaagctctcatcctcccactcttcattagaaaatacattttaaagctccaacaaaatctctcttcaagggtaactcctttgatctctctaattccattccttttgaggaaatgtctcttcttactgtcaatttagatcaaactttggctactattgttaacgagtttcttactactactgataataatgctagtccttcagtaggacgctctctttctactcctaaaactagagttattgatgatagctctagaggctttgtgtaatttcttggttctactatcagtatgaattaaaccttaggtatacactctatttctcaagacatggtttttcattctgttaatactactaagcctgcttctggtggtgaggtgcatttaggggtcacttgtaatatcttagttgtctctcctcctactatggcagtcgttatacattcgaccagtgttgccaatcctactaatggcctgtttggcacaacttttagaaaagctaaaaggtgctttttgaaaaagctgtgataaaaatgtgtttggcaaacagtcaaaaaatagctttttgaaaaatttttggagaagctacagcta

SEQ ID NO: 229317 - DNA, 1276 bp, Cannabis indica
attaatttacaagttaatcacaatagatatgaacaaattcttctataacaccatacaaacaatataatcaaattagagataaattattagtatactaacatatacatcatcattatccatttaacattagaaaaagttacaatattactatacaatcagaaataaacaaatctcaaaatgtagaaaaaatggtgaagatttttagaaccattaataaatcagaatcaaatttataaaacccaaaataaatgtgataaaatttttactttagcgagctcctaatcccatccaaacgcccaagacagaaccagccacttgtgaagaacaatttctgccaaaagagaaagaatacattattaaacaatcactcgttgtttttagttattctttaaagtcacactacaaagagtgtataatatatgtatattttacacatcttcccttcaaagtattaagtttatatctaattatgtgtcgtactagaacttcatactcgatgcttgattaattattttattaaaagcgaaaaagagtataaaagattatacctttatgaccttgactgggagcaatatgtaagggatcaaagcctgaatgattcttgatgaaaataccctctttagtaacatattgcattagctctttcacgacctcaagatgacctttctctgtagcaatgaacagagtcgtctcactcggctcattcttctcattcacaatcgaggaccttatatcggccacctcttcatcaaactctgacccactcaacgtagtttcgccatttacacctcaatatcaccaaaaatttgcgaacccccaacctcgacgacgcaagcacagctaggtgcaaagcaaagccccaaccgccggcaaccagaaacacagatctgttataaaacaaaataaaaacaagaacagaagaggagatcgacgatctcaaagaagtcaaagaggggggaagcgaaccgatgatggagtaacggagaggccgttcgtggcctctgtatgactcaccgtcatcgagaaacggccgttcatggccattgaacccactgattcagaccatcttgcattttacgttgagagcttgagatattttcaaagagagagaaggaggcggtaagagagcgtgagagagaatgagatgttatcttagggtttcatttctttttttttttgaaacaaaaggataattttattcaaaagaacagaacaatacacatcaaaggccgaaagggaaaccaaccgccaggaaagagaaaaagaggctaccaac

SEQ ID NO: 229318 - DNA, 1366 bp, Cannabis indica
cttctttcctctctccctaatgtatctatttgtcatgttaagcgtcatgctaatatggctgcccacgggttagctagatatgctttagggttggaagaagcttgcttttggatgggtattatccctcctccgatttacgatgttattgtaaacgatatcactttggttttataataacatagtatttcttctaaaaaaaaaaaaaaacattaaaaattatatttttattattatattattttattaacttataaataaacataaataatatgtatacaaaagtttaattataagtatattatttaaatattaaaaactaataaaaaaaaaaaatttagtataatctgtagtgctactattattaatgagataatgtaaacacccacataattaggatggcttttgaagtctacttagagcattttagtggaaaaacttcaccaattttaagtttatctcgtgccattagagatgatctagtaggagagattcttttgataaaaaatgttaacaattagagagatttaaataaacccaaaaaaaatagcatcataagtgtccaaaatgttatgtttgtaagtgacataaactcaatatttttttagcgacataacataagtactcaaaatttataaaattgtaatttttctttaattttatcaatattattgtcttaaataataagacacataaagttaagattctagatcattgagtataacaaaaatttatagtattagttacttcaaaatcttcttttaatgacaaagatacaaaacttatattgagtattcccttgtgttcaagtcgtcatgaggatttgtggtactggtgttttgagaacttataattttttttttcagtaaaaagttcatacaaacacttgcaacaacttaaagagaacgatttgcatttgaatgaaacagacttttggagtaaaatgtggtgccgctttggactatcttcttacaaaatctcaattgaggcatcatcatgttaatgtggatacgctatgtcttatgtgtgaaactggtcgggaaatcattgctcactacttggtggagtgttcttttgttcaatcatgttggtgtcgcactaatttagaagttagcacgagtattgcatgtactttttcaaattggcttcaccctacgttgtgctcttttgatggggagaacaagaagttaataacgatgatatgttgggcgatttggaaggtgtgtaatgactgcgtttagaagaagaaaagaggtacggttgctgcagttatttttttggctcactctatccttgagcaatgggctcgtgcacaagacaagtttctttagcctattgctgtattttttacaacaactgatggagcaga

SEQ ID NO: 229319 - DNA, 1361 bp, Cannabis indica
aaataccaaaaaattataaaaaaaactaaaaaaagtcaaaaattcaacatattcgacaaactattgacattccatcgatatccccttgataaggcctgtcaggatttcaagtggcatcatcatcgacaaagagttgaaatatcatcgatataatgtcaatatcgtatcgaaaatgcaaatttcatgtcatacacatgtacaattagacattgaatgctaattaatttttcccacctttccaacatctattttatctgttgagcatatcgacaagctatggacataacatcgatattatgtggcctcaattttctcctatccacaaattgtcgacaacctatcgacattatatcgataaatgcatattgcattccatacacgtgtacaattggacatttaatgctaattaaatttttctaccttcccaacaactattctgctctataaaatcaaatttctacttcataaattacatatgtttcttattctttaaccctagagtgctcttctcttataagttctaaatgtctagtaaagagaacaaacacaaacttctatctgttgaagagatcaaacagaatctagtgatgaaattactccagaaatgcaagaatatatagattggtttaaaagttttgaaaatgaaaggctagcgaacgaatggagcgaacgaatgaggtaccgtacacttaaaaaaaaaaaaaaaaaatagaatggctgccctccacaaccagggttccgcaaagggtgtcgtcattgcagattaggttattttaatggcgaaccagtgaaacctggatctttatgcccctattgcgagtctcaccgacacaataaagacctttaaattgttatgttatgattgtttagtggtaagttttaatgtttgtttagtctttacttaggtttaaaaattttcacttgtttcttatcaactgtttaaaagtttttcatttttttgtcttaaagtcgacaatatatcaacattctatcaacatattgtcgacaaacataagttgaataaatgtcgacataatatcgacaaactatcgatacattgccaaataaatgaaattatttaaattactttttcatcgacatgatattgacaaactgttgatatcatgttgataatggtcatccctgacattccttcacatattatcgacatggcatcgatattctatcgacaaactgtcgataacctctggaaaacctaaatttcaacagaaaaccagatctacaatttcggaccaaaaaacaccagttccaacaaataccacggatataacgaaagcaaattacatattattactaatgtctaataaatgcttaaaacacaacttacccattataatggt

SEQ ID NO: 229320 - DNA, 1158 bp, Cannabis indica
cccctcaagagatccaaaaaaaccactgcacataagatgcgtgcctcacagtctacagccctcgagactcctgaagatcaaattcaggttcatactctagccattccacatgtcgaggagccagttccaaaaactcaccaagccaccacttcttcaagtaaggcacctgagactttgcccatcaaggctggaggcactggtttagagtatttctcgcaatttgctgcatcctgcttgcaccatttccaatctttccagtctggtgattgggattcagtcaataatggcaacctaacagagatgcttgagaggactcttaccttcaatctctcagttagtttccttcttcttctctttgtttttcaacatttctttcaagaatccacaagaattcatgtgcattttttttgtaggccaccttcttatctcatgtctcctagagtcgagttctccataaactaaagcaattagacactgaactttgtaaaaccattgagcaacgaaaggctgttgccaaacaatggaacgattcccaaaaggagatttcgcgtctgagcaaagaggttgaggacatgaagaggacttataaaactaaacttgaggcagcccaaaaagaagccaaggaaaaatctgaggcttgtcaaacactctaagaggaacttaatgcagccagtgtgaagctcaatggcgctgatgccaatgctaaagaatggtgcaatgttgttgctaagagatcaatttacagagcttggatggcaaatcctgaaatggatttaagtttcttgggagagggtgccaaagaagtcttagcttattgcgagaaagctaaaaaagaagaagaggcagttgagtctgaagaagatgaagacccatccaagtctcctcctatgtaagcttggtttttaatttcaaaccttttttatttagaaaaatggccttttggctgagacaatggtttgccccttgtggcaatatttttgtaaggacaaatttgcattgttggatgtccaactttgctttttatttattgcctcggatctttatatttgaacttgatatgtttgttcatttgcgtgtttaattacaacttaaacaattatattttgatcaaacttaagatactttaagtaagcatttccattgatctcgtttttcctt

SEQ ID NO: 229321 - DNA, 2502 bp, Cannabis indica
cgatgttcccagagcttgagagcgtgctacccctgcggaggatttacaacgctttgttatcctagaactatcacatgttcgtgtaccaccccctgtttgggataaataattaagatacagacccactgtcccaaatgtcccgctcagaataatatttcaatctcatcctttaaataatcacactaatttgtggtgtgacctttctctccatggtactcacactctttactatagtcacatctgcttcttcctccatgcgacatacgtggaggtttcttgtagtatactatgttataggtaactttatagacatttttcgtgagtctattaagcttgtgtattcaggtcatattctttcctccatttcttcgaagaatcattgcagttatgactctttccccctcgcttattctgggagtggcttgcattagacttcaggacctgagtcttcgcctgtcttagggctacgttacatccggtctatgccgccatgtacctgaaaaaatgggtctgcataggggcaagacaaaaaatggtaggtccgtaaatagttggagtaaactgagctctaggtattggtaaagatggagtcagaacctgaggtgtctaattcggaacagttatggaaggagttggagcaggaggaactctgaaggcttgtatgtattcatcttccaagttgatgataccttgggccttggccatgaattcactcagagttttagctctttttctttgcatttctcctcatagcagggagcctacggccaatcccgactggagggccatcaacttcatatcatcattgacttttgtgtttggaagctgcctccatcattctttgaataaaagcctttaggatttcattgtgttgctatttaacgttggtaagtgaactaacttccatatccgtgtctcgtgcaacgatgaattgtttacggaaggctgattacaggtgtttccagctatcaatcgatcctagagctaatcgttttcaccaatcctctgcggacttagtaaaggtcaaggagaaacataaacatttggcgtcatcactgacgtgagcgacttgcatcattttgttgtattttgctagatgcgcttgcaaatcggttctccctacgtataactcgatgtgaggcatcttgaagtttttcgggagtggagtttctgcaattctccttgcgcaagcttccagatcctcagcttccgaatccgataacgctccactttgttttttgaccaacttggtaaaagtagcaatttattcctccaaccttttagtgtcgctctaaaggaggttctgccctctcatcttatcgctcatatggtttctaaggtcacctctacatggccttgctttctcacttttgtatttttcatatttggcatctaatcgtcgttgaaggtctgtagtagaccagttgtcttcgaattatcccacgactattctaccatctttgttaaccgagtcgctggggtggtaccttcaacctttatgtgtggggtgtccttttggcgtggctttgcctctagggttagaagggcacccgggctcaaaagcaccggtggccttctgcaccattgagagctgatcgggcgtagttgtatcctttctaagaggcctaggtgcaagtttttgtgagggctcgcctaccttgcttttgcccttatccttgcgagaattcgaggtctcagcctctattttcttttgggcatgtttctcgaccaccatttccatcgaggtttcatcgtcaaattttacaaaatctctaaatttactctgtagatgctccatcatcttcttcatttttgcgatgagccttttctgttcagtcaactccgcctgagttgtctctaagtctttggtcaatcgcaacatgtttgggtcatggtcatagtgatatacgtctttgtaatacccatctctacatggccatcgtcttcaccttattcatctctccttcttcaagattttggccatcatcaaggccgtcaaacacgttttcagtatcttcccctcggttctcagcgcgggccatacattcttttctgacgccacttgtttggaggttagaggtgtgggagtgggcctcctctgtgactgtgtcgaacagagttatcttactggtgttcttttgtgtattcaccatagttgaagtgaagcaacaactaactaactttcctctactctcaatgagagcgccaaaaaatttatcgatatttttagaaatcgattaataagagcttaaggaaatgcaaaatattaaataatagacaaatagattttttacatggtttatgcgttaataatcctttgtccacgagtcagtagtattagcctctgtgggcaaatatttgagtattacaagtgtttacaaatggcattctcggtattccttttgtttctctctaagaagaaagctctctaggaattttagcagagattttgtaagtaaaaattgtgtacctcctattcataaaaaatggaggtatttatag

SEQ ID NO: 229322 - DNA, 1283 bp, Cannabis indica
tcatgatcatacaactcatatcaaacaacttgattaatctaccttaatcatttccgttgagaaatctccattgatcgagaacacgatagtaaactaacagtcaaaaaaatataataatgaagggttctttttcagagcttaccaaagtcaagcaagtgttacataatttcaaaacccacacatatatgacatagtgttgtgttgctataataattagaggcaaaatgaaatgaatcatcatctttttataaaattgagggcaaatatggtaattcatatatttatggcatcttcatctgattgttgtacaccgaaagcatggccaatctcaaaactattctcatcccagaataaacgaataaaagaacaaaacgacatcaaaagcaacccacttttaatttctttcctctaaagacacatatatattattagtattatgggaccctcttttctccttttttgactcgtattgtattaaactcaaatggtgacacgagcattgtcaatttatacacttaatttgatgaaatcgactgcgatcaataatagaagttaactaccaaaagcatatataaatgccactttcaaaccctaatcatggtcttcatcacaatagaaaatgatgcctaccctagtcttatccctacaatacaaaccaacactattggaattgtttatacataaaattttaaaaaagggctaataaagtgggatgtttgatcattcatatcatcatatggtgtagattacttagctttatgggattcgtattccctcttttaaggagttgagaagaccttattctaacccacttttttccattttcttgtatgtagtgttatatatacactttactttggctcttttttacttcttcttcttctaacttcaacttcaacttcatataatcaaatcaaagtagattttattattttagaatgagagattgggctgctccgctcattgccactgcgttgtttgcatttttgtcaccgggatcgctctttcaaatgccgggcaaagaataccctttccaatttatgaacatgaagactagtgtggcctccatgtttgttcataccgttatttatggtttgtttcttattttgtttcttgttgttcttgatctacacctctatgcataacaatattaatttgtacaagatcgatcatagttaataaagttgtgaatcatcatttcttttttagctttgattaattagttttttgtgttctatgtatgatcttattctttttgctattaattagttgggattatttct

SEQ ID NO: 229323 - DNA, 844 bp, Cannabis indica
ctaagattgaagtaagatttgagaatttgtcaattgaaggagatgcttatgttgggagtagagcacttccaactctactcaataccaccttaaatgctattgaggtacttttcttgtgttcttttaaatgctattggtagtttttatctataaaaacaaaagaaaaaataccaatttggaatgcgaatacgtatttagttaatgtattttgttaaatgacaattcagaccctctatttcgcaaaatagattaaactgatatcgtgacctcaattttgattaaacaatttcaatatgatgaactccaaagtctgttgaaaatttgacttcaggatatcaatttactgaaaatttgtttagattaaattgagctcagggtatatcaatttgattcattttgcgaaacccatgatctgaattatcatttaacaaaatacaatggccgactgtgcattctcgctaaatacagaggccaaataggtatattccctaaaaaaaacacacacttttgtagatttcattgaccaaatgagaacttttatgttgcatgtaatgttatccaaaatgaactcatattatagagtaagccttatctcttttccactattgatcttcatcatgtaactcaaataggatgttcttgagctagttaaactttttccttcaaagaaaaggactattaagatactcaaagatgtgagtggaatagtgaggccttcaaggtatatatccttaatgaattttccattacatactatttttggactattctatattagctctatggttggtttttatttctaaatctcacaaatgaatttttattattgttaggttgactctac

SEQ ID NO: 229324 - DNA, 2268 bp, Cannabis indica
cctgattctctcttctcccttttttttttgccacccctcaagctatgaagacaataccaatcctatagagagaacccgtattcaaaagttgtcacaacaagactcgatagtgtctctatagactctattggcttcattcaggggcgagaagactcgcaagggaagaggctgggtatagactatagagatcgacctcttcaactttttattttcttttccttttcaaccctccaagtattttggtcattgattatcaaatttcaatactttcccttcatgtttaccaaaatattaaagagagtaattaataaaaaaattgagaaagataaactctttatcatacaaatttttcattcttttattaaccagacacacaacgaagcattccgaaaaaaaagaacttacacaagaaactattaaaattcaactcaatcataacaagagttatgtttacagttgagtgcaccaaatttcagcaattctcttttctctatatatatttaattttttgttctttcttctctacaccatcttctcttcagcaaaactcagagcttgacaaaacgacgatggtccttcaatcttatcatcggagcaaaagtaggatttcttcccaatcaactcaactacccttttcgccggacctgagtctcttgggctctctttaacacatcggaaaattttgatcttgggaagcacatctgcagtcagagtctcaggcaatggtgacttctggcactcctcctcatccaagcctttaaaaacaacaacttcgtgtgggatttcccacttcttcttcattctgttctccgttccttgactcctacacaactctctccctcccccacgttgttttcctgtgaacgacattcgtttcttgttgtcgtttctcctgctttcgtctttgtcatcatccggtagagaccttttccggccatcattccccggcgtctgattataccggctcgccacaactctccccgtcttgacgggctttttcgccgccaccgatttttctccctctttgaatagcttcttaggttgaatcgatgaaataacagcttcttctttcttcaccgcccttttagaacccacagtcgtagcggcttgtttcggtggaggttgagttttggttgtggtttttcgagatttaggactgagacttaaactcttacctctttccttagttaccctcaattcgtcgatatcttgaagcttccaaaagcaagatttcctgcgattctggattgtctgaacaggggtaatttcaattttgctcaatcgtcggaatccggctccggaaataatctcagacggacccaaactaagacctctgcgattcgatttcggtttggtactttcttcgatcttaacactcggtttgggctccaagaacttggctggaattattcttcctcgcctctcgatcgtcttcttgtttcgttcagccttttcaattcgaagcgcttccagtctcgacgataagcgactaatctcgatctcgatctcttcaatctccgaatcaatcttcttctcatcacgctccttttgcccttctttcgaaaaatgctcaaacttcaatggccttgcatgagagtttaagatggcactattgggctgaagcggcttaatgggcacagaagatttgacagtgacaggggttttcataaacccgggactgagattctctttgctgtaatcagattcaaatgattcaaacgaacggttcaccaaatctgaatgcagagtagaccaagaagctttaatggtagaggcagagcattcaaaatcatcatcgtcgaacgcagcattattccatacctgaaggtctggcccatccatggtgtctgggtactgaagaatactactcatttctaaacgaactaaatgggtataaacgatttctacaatgtcgaaaggttatataaacgatttgcttaatggttttttacgggcgataatgctggaaagtgagagtgacttgattgtgtgagaaaaaataaaaccagagcggtttctttgcattgaagacaattttgtattttgagattttctgaccgttgggagaaattagtcgttgcgtagagcttggtgcaatattagccgttggattcgaaaccgctccttgtagacgctccgttttgatttaaagctcttattaaattttaagtaaagtgtatttcgttttaattggacttcaaaccacgattgggcccatattgggccatccaccgccgctccacaatccataaaacggtgcgtttgaag

SEQ ID NO: 229325 - DNA, 1491 bp, Cannabis indica
tagttaatttctaaattaatcacttttaattataatgatccaaaacaaaagataaatgtaataatcaaatttggtaatgtaaccattgaaacactattatttatatataatagattaaattaatatacatataaaggtacgtaccataagaatcatcgacaatcccatcacgtatcatttttggtatattcattattgtgcagagattagcaaccgaacaaggacaaaacattgcaccttcaatacccatcttagctgcaacttccatgccaatacccatataaacatcagaaacgacacaactaatcttgtcgttcgaattactactatttccatttatagataataggagcttttcaaggtgcacagccatattttctatcactgctttagctaaaacagtcacatcatttctattggcctcaggactcagcccatctgggattgacacaaactcgatgttctctgatcttgtcttatcaaaatcattaatattattattattattattattattcatggcatgatgatgatcagtactagtactactcaagatcctgttatggttgaaatcagtgtaaacgaaagtgattctaaagccatgttgggcaagcttgtgagcaaagaagagaaggggtttcacatgaccttgggctggaaaaggtaccaccatcactcgaggttttctggtgctcatcatcatcattttcttttttggtggtacacaaaattatattatgtgtgaatatataccactaattatattaaaatattttcaattaattctcatatatataactccgttaataaagctataccagtaacaataaccaataaccaacattacaattatttgaaaaagctatggcttgtccaaaacgccaagtaattaattaatacttgcctaaatttggggtccatattgctcatatatatatcaaacatattattgacaaccttcccgattggatcagttattttaaatttgttactttttaatattaaattatttaacatttatttaaaaactatttttttttcgcataactaataataaaataaaataaattattattgttttatgtctccaacaacaaattaaaataaataaaacaaaaaattaaaaaaataaaaacaagaaaaaaaattacatttataaagaaatgttgaattttgttttaaattatatttttcttgtaaataataataaaatagacatttgatctactatattttgaaatatatttctatcatatgtattaaatttttaaattattattttttatattaaaatattaattgtatatataattcattttcaaatatatataatatgtgtatgtcaatcaacatccagtccgcacgagtatagattttagaatattcgcacttgtgcaaattagattggattggatcatgcgaattggattggattagatcgtacagattagattatattagcaatactatcaactaagtcttcctccctag

SEQ ID NO: 229326 - DNA, 2488 bp, Cannabis indica
atatatatgttctcgacttaatagaatttatacattaaatataatcatgaaataaatcatgtgatgcaacataaattaatttctgatctttattattaattagtaaatctaattatattgagataggttttatttagggcagataacccaacacactaggccaaaacttttgtattgagtgttttgtattacgattgtaaatattttaaatatagtatcctagttatgtaaaagatatttatcttcaattaaagagtaattaagtaaatgttttaataaataataatttttaataaatccgttgattagcaacagattttataattaatataaaatcaggataacatacctaaactagtagggtgctacataagtcccattcaagtgagaactaaaccactaagtcattattctgatactagcctacacactactacaatttggccttttagtgacactctttagtgacccacgtaaaagtgcgtgtcactaaagagctaggagtgatttttagtctgatagaacctgacactatacgcctatagtgacacgcagaaaatgaatgcaaaaagtttcagtgacacgtgtgaagtgtcactaaaaattgtctttccagtcaccctcattagtgacgcgcgctgaagtgtcactatatacttttagtgttactcaatgtgtgtcactaaaacccaattttctagtagtgacaggctctaagtctatgtctaataactctcttcttcactctctctcacacgcctattcaagagctctcaacacttgagatttgtcaatccaaattcctactttgtatccataagggtaatatatcacatcccacctatagtgattttaatagtattaaccctcgttattaatacaactaaaaggggtgtaagtcattacccactatcaaaggcgaccgaacctttataataattttgtgtgttctttacattttcattctatttgtgtaacacgtggaaagcaccaaatccctacgacctcgctgtcggttgatcactttttgaggtaaacacttttattagtacgtaattattaatcatagatatctatcactctattttccacgaatatttgatatctagtaattactaatttattatattatttgaatttaatctcatcgaaattcaaacctaaatataataaattaagtttctatcctgtgaagtcaattaccaagtcatccttgttatcatggatatttaactaaaatatctcatatagcattatattgattactataatcaataccattttaataaggttaaagtctctctcatattaaaattgaacattcaataacatcttaatgtactgaataattcaatgacagtattaatgtaatattattgaataataatatttcgactctaaagtttgaaatttgaaagtgttaacttttctattaatttctttcttattaggctttgatattcaatatgttaaaacattcacttatttaaattagttggatattcaaaaaattccttggtatatcttgtatttaattaaatctctcatttattgacatatgaatagttctatagaaaatcatgatttagaaacactaattattgttatgaagaacaatttagttttctcaaaatgatcttgtattttaatgagtagtatactcctactaaaatacgttataaccactgaattttattgatggacatgactattaaaatttaattttagctcttcaaaattatcatccttttaattgttttctttattcagttttaattgtatgatcactttctatcaattattctgaatatcgatatagtcctactacatttattaaaaatcttttaatttattcaaatcatatctcatatcaatttaaattgttagttataatctattaatcttaatagattcaactattgaatgtttaaatgtgagttcgtttcaattagactattcgattgaatgtatatgtttctgctaatgattcctaaatgaatcattgattatacattattgaaatggaattccatatctaggtatatgtttgaatagtaattcaaatctctcaattaaatcttattgaattttaagtttaatcatatgaaattaaaatcatattttaactcgtcttaaaattacatgtagaaacattgataagttactattgaatatagttatttattatttaataaaaattaattaaaacatttaaacttaattatagaattatactatgtgaatttaaacaaaaacgaaactgcttaaattaatggggcaccccttgaggcattaaagagttgttctttcatgggaaagtcaataaaaaaaggaataggccctacttatgtaggtggagtcgaggtgcccgtggtaggcgatgaatggagcagtcgattaaggcaagagggtggtctacgatcaggcttagtctactatccctgctcttcctgttgggttttatacgctaaataaaactcatttcaat

SEQ ID NO: 229327 - DNA, 806 bp, Cannabis indica
cctttttccctgatcgcaagagcaagagcctccaaagaaaggaaccagtttttgaagctaagctaccccactttcccccaagttatcgcaacttggcatcacagttgataaaaatgtaatcctttggagggaggagggcaccaactaactgcatcatcgctcgtgattttcaggaattgaaagcaaaaactatggtctgaaaatcagtcccgcttcttttaattgtcggtgtccctacctaccatcagatatcttaaaccaaaaacaccaaattaaggacagaaaatcttacatagcctgcttcagaaagatggcattattattagagcacgattatgacctataagcttagttaaaagtcaaataaacaattcacctaagggaactgtgaatgactcaaacgtaagatcttgtgggagcaatccacacccctgagtcctgaccctcttttgggtgcgaaatgaaactactactactaaccaaaataaaagagcattgctattagagcatctcttaggtattataatgttcaacaccaatgaggtggcgccctataaatggttagtggttttctataatcattataaagtaaaacgagtgacctttagcatttctctaaatgagcctaaataaatacatttttctaatctaagcatgaatctctatttttcttttgaaaggatcccacccaccatctaaggaaaatataattttccacatctttcaataaggtcataactctttactagcttaaatttttcaacaaagaaaaaatatttaacagacaagtacagggtgtaataagt

SEQ ID NO: 229328 - DNA, 2004 bp, Cannabis indica
atacgcctaagttagttagggtgttacaccttccatcaaggtctctgccacaattaatgtcataatattttgacaattaattctagaaattaaatcgggtaactaaaatatttggtaattaaatctgactataattagaatattttaattgattagtaaatagttaactatattttataaatcaattcaaataaagtatttaatttattaccatataaaaaatattctcacatatagtacaaaagccaaggaatgaaataaatattaaaaaaaaacaaaaaataactaacaaaactaactaatttccctaactaatcctaataggagcacaacttaatagtataaaaaattcataaggtaaaaatactaattattcaatttactttaaacgtagaagtagtacaacctaatagataataagattaataattaatcaccaaaacatgacaaatgatattatataaattgtaatctattttattttttttttttttgaaaataaaacttgtattattaaacaacactaggcacctgtgcttttaaaagagcagcagcacaagagggtaacacattagtcattacaatagacttttgagtcttaagactcaacttagctaagctattagctacttgattacacatcctaggaaaataaacaaatgacaaatcctgaaaaagagactttaaatggtttatatccatcaccacttgcccccaatccgaatgcattctcaaatttgagttaatagctttgacaatggtttgacaatccgagcctaaccgagccttttgaataaaccacgttgaagccaactggattccaagtttgattgcagcagcttctgctaattggactgacaagcagcccggaatgtaagtcacttcagccaccaccatccgccccgtattatctcaaataacagcactcagaccacagccaagcacccccggatttagagctgcatctgtgttaatttgaaggacatctgaaggagttttagaccaggtgacaatcggctttgaagggagagaaggaggctgctgctggtttaacaccacctgctgatctagatattccaaagcccaatcaatccacacacggtcaggagggtgctttttattaaatataaagttgttcattcttagccaaattaaccaagaaaagcctataaaccttaagagtttatccttctcaaaatgatcccaacaccaccataaaatgtcagctggccgagtcacctttgggggaagaaaattagagaaacccaccttttcccaaatttgaagaacttgaggacatctccataaagcatggctagtgtcttccttatgagctttacaccaatcgcaataagtatccaaagagatacctcttttctccaattccacctttgaggggagccaattattgaacactttccaaatgaagttcttcattttaggggtaagtctagatccccaaacaaccttccaccaagctttggtttttgagttgtttgaacaattcgctaaatccgggttttgaaagcgaagtttatagccactagcaaccgagtaatttccattagcatttagactccaagttatccaatccgatcgtctagtgttgggaagaataccaagaacccaaggaatatcgtccttgtggaaccagctgcccacttcatgaattttccaatttccactttctgtcaacaaggaattaagagttacatccttaggaatagggaccttagttcggagagtaaaaggccgacttctaggaagccaaggatctttatttatttgaatagttctcccatctcccacacaccaacggtatccttccattaacaactctctcccccataaaatacttctccaaattgaagaaccaaaatgacccaactttgcttctaagaaactttcattgggaaaatagagcgcttttaagacccgagctagtaaacaatcgggattggtgaggattttccatccttgattggctaagagggctttattaaa

SEQ ID NO: 229329 - DNA, 1183 bp, Cannabis indica
aaaaattaagttttaacaatacaataatagtagactttaagttgaacattcacatattagacctaaataaatattaaaatatgtatttttataatgtgctgtgcggtttgatccgcatattatcaattcaaaaccgcaaactgcaccacgcattttaagaaaaaatcaaaccgcaaccgtactgtaaaaattttttcaaactgtatttttttgacggtgtgggcggtttgatgaacacccataaaataatgtaaaaaccccatataccaatttaatgaattgtgctttattggagatgcaacctacaatttttcttatatcataccaaacctaaaaaattgtttttttttttcttccatttttctttttcccatcaaaatccattttccgaacatcagtaataaaaaaaaaaccaattaatatttaagaattatatataaactcccaattaaatataataatgatcatatctattctgcatgtataaggataatatgtattaacttctttaactaattattacaaggatcatatatgattagattttctatctctatatatatcttaatcactgtatatagttcccgttcttttaattcttctcatattttcttccatatctctttttgtttttattagtaattaaacaggataagcatgagggaaaacaaacagtaactaaaatttcacttcttgttgggatatgattgatcttataatatattgggtgtttctacaatgcattctactaaaatgggtacaatctttaattatatttctttatctataagaattttttagtctaaatattttgatagtcgcgtatattataattatttaagatattttataaaattttaaaaaattcataataatttacaatataaaaaacaaatgttcaaacatctatttcacacgcacaaaaatttaaaaaaaaaaaaacaacctgcaatagactctttgaaccttatctttaacatgctaaacttttttgaattttttaaaattttcaaatacgtgcatcaatatatctattttaaagagacgtattattataaaattttatatatttataaatattaattttcaacaaattatcattaataattatactttttaaattgacgtgtggctcataatattgttaattgatgaaagataacacatatctattctatataaa

SEQ ID NO: 229330 - DNA, 1127 bp, Cannabis indica
tttttttccctttatgtggttgggttggttattttctcgtttttctgcagtaaaaattacaatactgagctaaaggagcttattatcgttaacttttggaccaaaattatgtgaatgtgaaatgcgaagctacatatcttacatttcttattgttttggttctgcactatcttttttttttttttttgaaatgggactctcggcactattcaaatgaatcaaatttattcattctttcacgataagctaaattgggagaaagtgcttttttgttttaatgtacaccggaatgaatttcttctttagaattatgaggatttatgtgacgaaaataagagaaggtggaatgcactttttgtttattaccatatatctttatttagttattgatgttatgttttgtaatgttattcttatttgttcaatttaattgtgttacttttaaacaaagaatagagttatctacatattcgtgttaaatcttttaactattatagcttatttaatgaaaatatttttaactccgtgatagaattttggtaattggataaatgttatgtttggtgtgatttattggaaagaaaaagacttttttaactactttattgtataaatattatgtttggtaattagataaatgctatgtttgggaaagattatagggatgttcatccgatctaatctcatcccataactcatgtcataataatatgtatatataaaaatatataattaacacaaaatcaatgtactaatcaagctagttgaggcataccagtttaaggtgaatttggaagggattaaaccctattaatcaactatgttttcctttatatatttaactgaactcaacttaagttccagcaaaacaaactgatttccaaacattactaagagactcgaaacttaaaaacttcaattactactgctattttttaaaatagattttttttaatattactaaaaattaatgtaatattatatatattataattttttaaaggaaaatttatggcaaaagtcttcgaaaaggtcattttgatgtagattagtccacaatctctaaaatagcggcaatacctcaaggtcacgcttcttatttgcccgttagtcttaattttaactga

SEQ ID NO: 229331 - DNA, 2269 bp, Cannabis indica
attatatgttgttagtaaatagggaatcccaagcaccagtttaacaatccaccagaaacacaagatttggttactaaagatgcagcagtagttggcacactttgataacagtatgatagttgcctacatatgcaaaatcaagagtcaagacttactcgtatgtatcaccacacaacacacattataacgtcaaagaaataagctgtagtgttaaaagcttacccacactgcaaaatgagaacatctgaaaaaccattcatgatatgctataaactctccctgcattgctttctttgaaagtaaaactatgtccagaaaggtcaaagatacttcaatggcaggaagtaagtacaataaaagcttctctgaaaggttcatctgagaaatttaaaagtccattattatactgagcaatgcctatacaagtacatgtaaatatatattatgtcttcaaatatcatactacaaacacaccctccaacgtcttctgccgttcctttgcgttatcccaagcacagcgagcaaaacgacggtaacaaagtttgccccaaatcctaaaacagtatggattgcataggaaaaccaaatcatactgaaaatgaatgtagttttctatgaacttacacaatttactacgtatctatacaatgtcaaacccaaaaggatatatatgttcgaaacatttggagaagaatccggccttattccacacctgaaatccaaaattacacaacaaagcatcaatctaacatcaggaaaaaaaaacagaaacagaaactccataatctctgcaatcatagaaaattattttgtgtgatctcgtaactctcgttcatacataaatgtcttacttcttcatgtgtagtgtaaggaatagagcagttgaacagagacaagtacaagaaacagtatgaaaagcgttctttagagttttctctgctttcaaaggagaaaatatagcgttcatctccatggacagagaaataaagagaaaattttgcagagaaataaagcgggaaaaatgaaaatgaaaaacaggaaaatagaagagaagatacgtacggaaggagaattagggcaaaacaggttgctgaaagcgttgatctccatggcagaggttgcttcgtttggttggtgtttgtgagggtgagagtgaaagagagagagagacagaagagtaacggtctgggcagagagagtgtgagtgggaagtatttatatataaccgtgtaaaagcttgtcgcaaaaagtgcaagagaattccagcttggatatatttcttatattttattatctggaaataatcagctgtaacatgttgtttcgtctgaaccaattatattttgacagttgtccttatagcaaatgtattgggctatttaggaaaaaaaaaatatatagcatgcaaacttaattgcacaaaatatattatttttaagataaaataaaaaatataggataaatcaatcctaaataaaaaatttaaaaactcatatataaatgaaaccaattttatgataaaaaaactaatttcttgatgagaaattactttttttatgtaaaatttttaaaaactttagtcttttctctcttgagcaaaattctattcatcaagtgaaattcttgctgaagcaacgatgttggtagcaatccaacttttctgttaccaaatgaaatcattgcggtgccctccaaatcgcccaactcaccacggttgcttgctccatttcaccacctctgtccctattctgcaaaaccagtagccaattacagaattcttcatccatgctgctatcgatatccaccatagacctactctaaatgaacagccaaccaaagcgtggtaaattatctcgtcatgtgaaagacacaaagggtagtgtgtaccaatgggaacatgtcgtttttttaattttaacgcatattggaaaagaacctgatgcagctctccacaggaagtttcgaaccttacgtggtattttaatgttccaaagatctctccaaaaatcagtagagttatccaaggaccaagttcctttgaccagctgcaaatgcttacaagcacttcaaattgtatactacctttgttttattatttattaaaataatatgatattgcaaaattatgcgataatttttataatttttcttattcatgttatatttatattatatatatataataacaatgcttatgaaaaataaatatatagtttagttttttttcagtttgcacgatagaaaacgaagcttcatttcatgtactttg

SEQ ID NO: 229332 - DNA, 1008 bp, Cannabis indica
aacatacatgatagtaaatagatcctggtaaaataatatccaacaaagaccacctaccacacccatacaggatacacgaagagacaaaacacacaacactaaacagcagaagccaaagaacaatcacaaatccgcaaaaagcaagaggaaagctaaagacaagaaaggaaaaagattaggaaaatcaagaacaaaaaaaaaaacaaagacaaaaacacccagggcaaactgaatctaaaaccaaacaagagaaaacacaagctaaaataagaagaaagacaacattaagcaagaagaaaaataataggagggagagcagtagatgaccaactctcccatcgagatgacccaaaatcagtttgtttctttttcttcattttcttcactgtagcattataagcagccgcctccttctcttctctctcatctaacaactattgtatctctttctctatcatcatccgcgaggaaccatcctcaatttatttattaattaataagaaattattctaaaaaaatatatttaatctcttcaagaaatatctatatatatcatccacattaaaataaattaaatatgtaattacgatgattatattaattttagccctaaaattattattctacaattgtgattaatttaaaaataatcaataaattatttttaatttaaaattaactttatattactttatttattaatattttttatttccttataaaatattatttaagattaattttattttaaaataaaatttaattaaaactactaatttgtgttatcttaatttttgcactataatgtggcatctaaataagtgacacatgtctcacattctatatcctgggcagatgattatactcctagcaagctatgcagattgatatagtactcaaggtcacacatacatagcaggatgcccgaacaagctcacgacatccgaccaacctaatcacgtaagtaatttgcatgtagcgactaggagatgtgagttggcaatttca

SEQ ID NO: 229333 - DNA, 2526 bp, Cannabis indica
gatctttagggtttcatttaattgggctgctttttctcttgtgtaggccaaacctactattgtgacaagatgagtcgtgtttgactcattcttctacttgaccgaacatatattaaaggaaaatgagagacttgagtggagagagagtaagagtctttgactcttgtgagatttacattgatacttgatttgttgttgggctctttatttttgggcctgaaataaatattgaaaattgcgagttaatataatattatctttctagtatggacgcatgttagaaagcaaatttaaaaaataccaatttcaattcttgtattaatttgtgtctttgaagttgtgttgggataaaaagctgtagattttgtaaaaatccaacactgacaaagtgcatgtctattttactatgctttcatctagcatggaagacagggtttgttgcaagagttattgcactctgattatccactcaagtgacagggcaatgagacatttcgacatggagttcattaagtagtgaggagattgatgagagaagattgccctggttgtattagtttgagtctgttccaaattgttagtaacaggatgaggattaatattggatgtagaaagaagaggatggtgtaatgttggagttaaatttgagtgaggtagaggtacatttaggtaggctatttttgggtcaatagggttagtatttgggtgaagtgtttggtttgggagctgattgatgtttggattaggaatatcaggaggatttatggataagcaacatcaatttgtatggatatataatgagtgtggaggagctggaacattttgagaaataacacgatcagtagtaacattgatatacacaggagaagcaatagtgttagaacctgaacaagttaaaaaacttgcagtaggaaaataactagtggaagaaacaaattgtacctgaggtgttgatgattgaggacagacatctgggtaattatattcattgaacactacattcctggcaatgtaaactctcccttcagcattctcacataggtatcctttgtgaaatggagaataccctagaaatagacattgttgtgatttgaaatcaatttaatgagaattatagggtctcaagtgtgaaaaacaagcacagtcaaagggctttaagattgggtaatcaggttttgtaccaaataaacattcacatgggctcatattattcaaaacaggtgtaggcaaccgatttgtagtgaaagtagcatagtgaaaagaacgccacacgtacttaagatctaaccctactttagccaaaagagttagatcggttttagttacatgtctatgtttcctttcagaccttccattttgctcatgtgtatgaggacaatgatgaatgccttgattagtttaaaacctagcaaaaggtttgtactcacctctaccatcaacttgtacacatttaatgggtaagataaactgatattcaaccgtgcttttaaaatggacaaacatttcaaatgcttgagacttcacatataaagggtaaatccatgtaaacctactataatcatccatgaataaaatgtaatacttatagccatctctcgattgaacatgtgaaggaccccatagggatgtatgaatgagttcaagaggttggttagctctataaatggatacagaaaagggtactctatgacttttatcttattgacaagtattgtaaaataatagtattttcagagaacctgagtgtggtagaatgggaagcaattttctaagtgtacagtgagaatgatgaccaagtttgcaatgccaagtattaacatcataagacttttttgtatagtaaacagaagggaaacaataagtttattgattgatgaatcaatataagaatcattatgatcttcacttttatgttcagatgtaaatgaagaattacaagaatattgattttaacatttatagcagtagcaaggtgacactgaagagacaacttggggctgaccaagttcatcaccacgtaggtaaagactatccttaagcttctccttgaccaaaaaaactcatgtttccttgtccttaataaaacaccagtgtttatgaaattccaagaaaatattattatcattggtttgttaagatttttagtgactgatggaactggtaaaactgattcaatatgcaagggacaagaatttaaagaagatgatatagtagcagaacctatgtgagagattaagagcttcttaccatccccaacaacaaagggtttcttgacctaggtaaggagaaaaagtgtcaagattggaattgtcaatgtgatgtgatttgtagcactagtatcaacataccaagaatgatcatcaccaaaatcttgaaccagagtagaggagtagccatgtgcatcataatcgaactccaattctatgagatatgcatgattatgtgaaccacctagttttggagtgatccaatttttatcaaatctatagtgacacactggagttgtgtgatctgttctcatacaga

SEQ ID NO: 229334 - DNA, 2775 bp, Cannabis indica
tctacaaaacatgtcaaattcattgttgcaaaattccacaccattatatgtccttaggttttttatttttctgttagcaagattttcaacaagtgttttccagtgtgtaaatctatgaaaagcatcatttttattcttaagtagaaatacccatacttttctagaaaaatcatcaacaattgacataaaataagtgttatatctatgagtaggtgtctttttcagagccccataaatctgagtgcatacaatctaatatacctttagatttgtgtgtacctattttgaacttcaatctgtgatattttccaagtacgcagtgctcacaaaattctactttgcttactttgtctttgcccaacaattgttgctcattgacaatatgtagtcccttttctactatgtacccaagtctattagccatagtattgctttagcatcttttggactttggaatatgttgttttgtccaactgtgttgttgcttctagctataggttctcctatcatatagtacagtccttccttcttgactcctttgatgattgtcattgagcccttgcaaatcttcatttttccatccttgatcttgctttctattttcaaatcatcaagcacacttagtgaaattaggtttctggacaaatcaagaacatatcttacaccaattagtgatctagtgaccccatcatgcattttgaatgccattatccctgctcctttgatttcacagctttggtcatttcgtagtatcaccttaccttttgtagaatccctgaaatcagtaaaaatagatttattgttattcatatgaaaagtataactagagtctatatccaatcatctttaaaagatgatccaacaacataaacttctttattttcataacaatcactcaaatttgcattttgatgatttgttctatgcttggggtttttggattctgagttgtagtcatttctttgcccattgaacttgttctttctgttcttgttcaagaaataacaatctttcttgaaatgtctaggcttcccacagttgaagcacccttctgtgtcttgtgacccttttggattagatctccgtttattgatgtgtcctttacttggtcctctgctatgactataactttgatcactccttccttttccatgtcatggctttctttgtgtatgtctacctctacttatgcttatttccctattagagccaccatttctctctattttcatctccaagtcttttgactttaaggcagatataacctcatcaagagtgatagaggttctcccatacttgattgttgtcttcacttctctatatgtttatggcaatgaatttagtatgatgatggcctggttttcatcactaagtgcttcatgttcccctgagtttgcaagttcaatatgcattctcaagaactcatcaagattttgatttaaagttttggattgattcattttgaaaccaaagatcctttccttaagatagaccttatttgtcaaggatttttgttgaaattgctcctctaacttcttccatatctttgatggtgtttctttattatctaccaatctgattattgcatctgatagattgaatatcaagattccagtagcagtttctagggattcttcttgctgaatctttgtagttccttctggccattcaatagtctcatctaacacccttagtagcttttgttaagctatgagtgatctgattttcctcctccaaattttataatcaccagtgccatcaaatttatcaatatcaacctttatgttactcatattaataaaattgaaatcaagcagagttttagaactctaagtctgattgatatttgtgatgtttctacaaccccttttggataagaatctgatccagaattgttctcctccttctcagtatcaatttctaattctgagctttgattttcctcaaggtttgagtgtgttcttgattcttgataatccgtctttcaagatttcttgcccaactccttcctgataatttcttcttgattttgttgatcttcttaaccaaactaggctcggataccactgtaggaatttttacttttaaccctacaccaacaaacactaattatcagtatgcaaggtcaattttgaaatttcatttgtctaaatgaatttagaccaaaacgacaacacctgaccaaaatgaccacaattcttatgtcgtttaacctaaggcgaaagagacttttcaagaaaagtctagaaaccctaattcagcaaacacaacacacacacacaaacacatttgtactgaaactcaaaatcctagcagcgcaagttcttgagaagaacttactcgatccaaagttagaaccctatgatcttactcacacacacatagaaattagtagaatgaaaaacaaagagagaaaaggagagaaaacaccataaattatttcaaagttcaacccaaaacaattagggctacatctctatcaagctcatcttagagattaggcttgagatccactatcaacaattgcgatttacaacttttggagcttcctgtcacaaaatttgattaggtgaggctcggttgcttctcttttacagttttgcttttttttttcttctcttttcaactactcgatctaactttgtttttctctttgtgcatgtacttccttccttcaactctcctcaccacgagagctttactctctgcctggacctttctctttagattttggagttgaagcctcgaactagggtgtactctctctctctctct

SEQ ID NO: 229335 - DNA, 1419 bp, Cannabis indica
ggtactataattttctattatttgattggagggagtttatccgtggaccgttgacccttttgagaaggttcgcctggcgttagtgcttcccacggccacgaatgtcgctgcccttcaagcaagctgttcaattttattcatatatgtgcacattattataaacataattttaaataattaaattaattaattacgtggtgaatgaattaattattaaagtaattaatgtttgttcatagtcatgatgtacttaaattaatttattgacagggaatttcccaagtcattccaaaggctgacaagtgatgttataattgtaatattatatcattgttatgacactgttgcaacttttagaagtagtgctcagataacgttctttaaaagttattgcattaaatttaataattatattaaattttatactaatagcgatttaacaacgaagtccgtattaatcaccacagtcatttttacaattttctaatatataatagtacaccttttgtgttttattgttaatattttcttttacaagtgtttgatgaattttgcaaaaggatgtgtttggacaaagaggtagattaaattaaagtgttatctagaggtgttttcttttattgtgatcgagatttgatcttgatgattttcacaaagaatatactaaaatagtttttatttggattcaaattgctaatttagattttaattattgggaagaaaagtcattgttgaagatatatagttgggaagtccaattaaattggatgtggtgactaaaagaagagataaattgaattttgtgcgagtgatgattgaagtctccattattgattaatcctttccgagtatcatttccttcattaatgagaaagatcaagaaatagatgtgttggtgaattatgaatggaagcccactatatctggaatgtgtaaatgtatatgccatacaaactcaatatgtaaaaatagcaaaggaaaacaagtttgggtgcctaaacgagccaagcagcaagtggcttcagctcgagttgtggatgtcaatggttttcaacaatggggaataagaataaaataaccaaaggggagaatatgagcactggcataaaagcatgtcactgtagtaactgtaaatacttttcaagctcttgatgattttgacaacagaaagattgatcctttctaacatgttagattgaagtgtcaaactatattgagtttatcaaccacaaattcaatacctgtctcgaccatgtttatcgctaattgaagaaaaattattttagtactgaaaatctactcgggacctttcctactctaggcctctggtaccatattggctttcttgggataatacaaaatctcgaattcataatctttaactaacttcaaccatcgtctttgtctcatattcaaatc

SEQ ID NO: 229336 - DNA, 2534 bp, Cannabis indica
agatccatcactggttatgcgtttatagtcctaggtggatgtattagttagaaatctaatctataaaaggtagtggctttgtcatccattgaggcagcgtatatggcagctactgaggccattaaagaagctgtctggctcaaagggttcacaagagaactagggttcaagtcagagaacatgaaagtacactgtgataaccaaagtgcactgcacataatgaaaaatactatgttccatgagaggtccaaacatatagatattaaactgcatttcataagggacatcatagtagaagaaaagtcaatgtgaagaaaattggaaccaaagagaaccttgcaacatgatgacaaaatatgtgtgtttagctaagtttaggctttacctaaacttactaaacattctcaaatgctagatgaggattgaagaccagtttagccacaatcattaactccttcctctcttaatgacgaaggtggataattgttgtgtttggtcactaagtgaggaaacatatgtttattggctcaaccccattcataccaacggttttacctaactgtcagttatgacagttaggatcgagctccacaactccagactatatatagccattcattactgctatgttggacagagttgagagagattttcagaggttttatgagctaatttagtgtgcaagaaaaagagaaagagagtttgttgtattggcctatgctaagattaatcatagtgtcactagtgaggttgattgtaattgaagctatgcttcttgagtaattgtgtcaagtacacatttgtgatcaacatttgtaattctttcttctagctcaataaagattggagccattgggactgttctggccgaggagtaggcaagtgattcatcatcactttgtttgaacctcataatctcttgtgtttaattccctgtaatttcttgtctaaattgttcttgttcattagttttacttctgattttcttactggtttgctattggtttgatcacctggttttttgcattcttgatattatattgttcttgatcaattgtttgtgtttgtttatgtatgaggtacatgatcaagcattgatcacatcatataatataatacagcaaatatattattaaatcatattatatacttttttttataccttatttggatgagagtattaattatatatcccaatttgatgaggcaaactcatatgatttttttgaaagcttaaaataacaaatagtgacaagaagataaaagtaacaaacaggaactaagtaaatcaataataaactgtcacctttaataaaataaaattttacacttccttactaacaaaaaaagaaaagaaagtaaaataacactttccttatttaataactcttttacaaatcaaaataaaataaataagaaaggaaatacatatatataaaattactttatataaaaaaaatgcatttcaattaaaataatatgtttataactaaatatataataaattataaatatgtgtcatttatattatttctattaaaatttggatgtattaaactatgacattccctaaaaaatgataaatgagtaattaatttctatatatatatgtttgtgttgtgatgtatattttccatgtctaaacacatgaaagtgaaagtcacgtcttctagactctcattaataattcagtagctcaaaaatgtaagaaactaaaaccatagaaatactatttaaaaataataataataataataataataataataataataataataaaaagaaaaaccgcagaaaacaaaactctacgttccaattacattcatttaatccatggtactagaatttttgaacagattagaataataattttttgataatatttcaaggcatggggccacaatgcaaatcaaaattagtacaaatggataaaacatcattgtctccattaatccacgttcttttcatactgaaacatttccaaaaccaaatcatattaattacaaattattcaagcaacctctcacagttatttcgtaattatatgaacaaatccaatcttagattatttataagtcaagtcttttgagtgacacttatcattaatattgtctatgctttatcatggtttgtctccatttcaagtctacttatgtagtaacgattaagtccactttggtgcaagaaaaattaatcatccattatgactgtaaaatcaaccacatataccacttcaaaaaatgtttatttaaaacaaaaaagggttctacaaaatgttggatatgttcttctacattgttaatcatatctttgataaaaaaatgtataaattgtgcaatatttagtacaaaaaataaaattatgatatatttccaccactttttagtattgtactctcatacacaattacaaattttatgcaaatttaataattttttaattttgttgataaaaatatataaaaaaaacaataactttatcattaattttaggctaattaggatttttgccaaactttgacatgtaccgaa

SEQ ID NO: 229337 - DNA, 718 bp, Cannabis indica
aatttatgttttgaaaagtttgtctgtgtcaaagttggagttggattttatcagaacaactgaacaagattgggtttcttgagaacaaggcacataataaggtttttgtgttattttttgttttttttttccaccaagttatatttttattattaatatatttttttttcatttttagatttttttgaatatattctattttagaaaaaactatttccaaaaaaaaaaaacattttattttaaattttaatatatattcttaaataattttttaaaataccaaaataaaaatctacctaaacgaatcacaaagtgccacgtaggtacttacctatcacttaacggttaggtacctacggatgttctataaccctaaaaaaggttatgtttaccgctaaaaaaaaaacataggtatttatctgccaccaagagtataacttaagtatttacgtcgcaaattaattatttttcttagaaaaattactccatataccactttttaattttttttctcaaatttacgatttgagttgcttcagatgttgctctgttggttgttatgtgtattgctatgtgaatttccataaaattacaaagaaaaaaaaaatattttgaagtgtaaaaataaaaataatcaatttttatttattataagaattattccattaatttaaacatgcatttcatatatatcctgatcatcctctggcaaaagctg

SEQ ID NO: 229338 - DNA, 1822 bp, Cannabis indica
tttttgaccgcgaggaaactctcaccctcaccattcatttttttttaattttcagctaaaaatctagtgattcaagccctattagcggctggatagtgaaccactgaagagggacaacttgaggtaaggattggtttttattttttaagttgaaaaagtctggttctatatgttggctttttttagagtagttgtgggatttgtgacttcatagtttagtttctaggttgctacgagattgattttgatgtttacttgctgaatttgagatggttttgaagtggaacttaagttttagcttttaaagctcaatgctcgtgctttaatggcatttttttcgtttaaggactcatttttaatttctgttacattggaactattatatggatgatatatatatgtatcttgtgaagtttggaataatttggttaggtatggagctatttcgaaggatttaaagttgagaaaaatcgtgtttctgactgttcaaaactggaattctaaatggtaccaacaagaattctgtttggttagtttttgagaaacgccaaattttgtattttggccataactttttactcgggtgttcgttttagacgttctatataccgtttcgaagcttgcaataatctctacaaaagggtctatgttttagagcgaaaatatgtatattattttagagtatgttttaccacgaggttcgattgaaaaccttagattattttatgcgagtattaggcaatgttttggaatagatacttatcggtttatcgttgttgtgacataggacctgggatcattgatcgctctccatacatgtcagccaacatacctgaaccgagacttaaggcaagaaaagtatatttgtaccacatggtatgataggatatatgggcttgcctgattaggcaatgcgatatatgtgaatgccaggttatggcatgggcttacctgattaggctatgcgatatatgtgaatgctaggttatgtcatgggcttgcctgattaggcaatgcgatagatttgaatgtcaggttgtggaatgtgcttgtctgattaggcattacgatatatgtaaatgccaggttatggcatgggcttacctgattaggcaatgtaatatatgtgggtgccaggttatggcatgggcttgcctgattaggcaataagatatatatgagtgtcagattgtggcatggacttgcttgattaggcaatgcgatatatgaataccaggttcaagcatcgtcttgcctaattaggcgatgtggtgtaacagagatgattactattcagtttaataaatatgattggttatattatataattattggagtattaatatttaattatgttatgatattaatatagctaattaattatcatatgtaattttctttattacttttcttgttgagtccttgtgacccatgggtgctctatggtgcaggtaagggtaaggaaaagttagagcatccatgaggcgacaatcttctccagcggatgtacatattgagccttccagcttgtgtggctgagttgctagaagttgttttgggctgcatctattttgtattttgacttactactatatatagtctttttgtaaaacttttgtaacaaggatccctagaataaatttttactgtcgttatgttgttcattactagggttttattttagtgaattttttttatattatcacgaattttaataactaattaatctattattactaaactagtttataaaatcacacatgtggattaaagcgatacaccatacctatgtgaaagaaatcttctccttgtcttttcaaat

SEQ ID NO: 229339 - DNA, 1644 bp, Cannabis indica
acaacagaacacagctaacaactaatctaacagaattgtcgtaacagacaaactgttacaactgtcactaacggtcacaactgtatacctctaacaaaagctaatggaataataaaatcacaacaaaagtgaagtttgaaaaatttgtacccaaaaaatcaaattgtgtgttaactataacaaaataaataattcagataatactaccgataatatccattaaattaaacgtcactgtatatgtacatgtaaacatatgaaagacaatcatcatcacaattgggctcatttttaggggtgttcattggatcacatccaatgtttttaggcctatccagatccgatccaatcatatattggatgttagattttaccatccgatccgatccaattaatttcgtcatccaatcgatccaacatccattggatgttggattggatcggttctatccattggatgtatttcatatatatttatttgtttaatttgggtttatctaatattttagacctagtattttttggatcggatcggatccatccaatattttagatccagtatgtattggattggactggatccatccaatccaagaaaaaaaagtaaaactttaatgttaattttcatatatacatatagatttgacgtataacaatataaaatctaattactcatccaaactaaatgaaaatactaattagttcgattggatgttggatgtattggatttttagacaccccatccaccatccgatccgatccaattggatatttaaaaataacatccaatccgatccgatcacaattggatatccaatgtttggcggtcggttgtaattggatcggtcggttctcattggattggatcgatttatgcacacccctacccactttattaaactttaatttcacgccaattccacgttatagtagtgtgttatttccacgtcagtttctattgtgcaaattaattttttattagacatgtaggataaaaataacacaatcttcataattcataccaggaataatttgtaacaatgaaaaaaaatattgaagaggcattatgttccaaatttctcatatttttatttagaactaaataaataattcattaagcaaaataagttaaaatagttgttagaaattacatgaggattaggtattgcatggtagctacgtgccacaccgtcgctaagcctaaactagtaaggatgtttccaatctcattttaattaattagtatttattaattgagcattgctataaaacacaagtggtgcctagcactttttttacatgttgtgttacgattggctagcaatatttcctaaaatttattatattaaattatatgggaatcgatacttagttggaccaataataatattgacacgtaagagagtgctagacactactggtaccatgtagcatttctcttattaattacttataaaataaagaaattaattaattgaaaaaatttcaaacattatatatacaacataatacgacatagtcggcatagtattttctacattctaaaaaacccaaagcaaatctcttaactattaagactcctaaacaagtaatttgagtctctttctacaaaaatgggccttttttctttgattttttttctt

SEQ ID NO: 229340 - DNA, 811 bp, Cannabis indica
gattagtaaaaaacagctgactttgtaattctgatatctaacttaattttgtttgaatggttgttctccaagccatgtgcgagtcgagttataggtgtgtgtatatataggatgttatgacaattaagagatacacttaaccaacttgttgaactgttaaaacagttagttgattttttgaaagtggtcaaaacaccaacaaatttgttgagtggtaacctattttttcttgagtcaaataaatttagatcttaatcagtccttattctccttaacaaagaaaattgacaaatttaataatgtatataacattcactaaatgtttttttatttaaaattgtaataataataattttattgtaatatttagcaattacacgcgttacaacaacatataaggtcggctctaggcataggtggactagggcctgggcctaggacccactcattttaggggtctaaataaaaaaataccttttaaaaattatacatatattttttaataatttttaaaaatatcatttatctttatattaagggccaaaaaaaattattttgttacactatatgaatttaaaagttaaattgattttgtaaaataataaaagattaaaattgattgattttttcatattattcaaacaatatgtgcgtctgtcctttattttccaacacatatgttcaataaatcatattttaatttaaatcatctaaaaaattcatgtgtcattaatatagaaaacagaaaaccatggtcattaatatagaaaaacaataaaaaaaaaaaaaaaacaaaaaaacaaaaaataga

SEQ ID NO: 229341 - DNA, 1754 bp, Cannabis indica
gtaaatattataatacaagctaatacgaactatttattatgtattaaataatacaacatacattgtattaataaatttggtcgtaataattaatacagtacattacttaatccaaacatagtgttatttattattaatacaatacgacccttatacgacgtaccaaacgagcccttagaggcttgaataggcactctgaaaggtttgatttaatttggggtcgaattgagttgtttaaaaggtttttggggattcctatactgaaccagtcgaccggttcagtatggacctgtaggaatcagaatttcgattcatcccttggcagaccccacataaccagttttccggttgggaaccggtctaccggttggggcattttagggcaccctaaatttttctatttttatgatatttagggtattgccatattatccattgatagggaaacttttagtttgattttaagtccccgaaaagtcatttagtgtgtcactcatcaattttacgaatattgtggcttagggtcttgtaaatcgttgagcaactattcccctcaggttgaccgacacacttgaatttggaaatgaagtaagattagtatgatgatatgcctatgtgattacatgtttaccgtgcatgtttataaagcctattagattacattgatagcggtttcaatatacttagagttgtattggataccgataaatgtatgtttggctcaagtactgattggcgctatcacaccggtatgactagagtactgagtataggctgatattatagtcaataatactgttgtacgaacattttaaacttagtaccgcgtaggatgtcgggataggattatggttgggagtatgggggcctaattgtaatccgggttatatttatgattatacttttcttgctgagtatgtcgactcaaagttattatttgcatgtgtaggtaatggcaaagctaaagctgagcagccgtgagtgcgagcggatgcaaattgtacatattgaggcaattaggcctagagtgtatgatctttgggacagtagactgtattttgtatagtcactaggcgacaaattttgtatcaaatattttgtaactcatttgtaaatatttaaaatacgggatccctattatatatatgttatttactctgagatttaagagtaattaataaaaggtttaataaatcacaatttttaataaacttgttgattagtagtagattgcacaattaatataaaatcacgataacatgcctaacctagtacggtgttacaattaagtatcagagccgctaggttgtctttcgaagatcgtcacgacatgtacaatcatcattggagataagatgaactcacggtttagtaagcctttattgttttagtagtttattttattagtatgttttaaggaaagcctgatagaaagcatgttagtagcctgatagctaaaaaggcgcatattttaaattttgaaataagaggtaattagtaaattattcttgatcgcgatctgaccaggctagctcttggtttcgcaggctgttctattagaatggatgccaaggggaacacgagaagtcagggtaactcggtcagatctagtggcaatcagggagtttagcttcccctgaatatacgtggccgaggtagaggtccaagaggtagggtacgcggtcgggacccaggattgggaaaataggttttcgcaatgcaagctagaatcaatgaacaagatgaagagacca

SEQ ID NO: 229342 - DNA, 1505 bp, Cannabis indica
ttgaataaattaggttcaattagtttacatcataattttgacatcttaaataatttagattcttaaccaaaaaaagaatataaaaaacttgttaaagcacttaaatattaaattcacgctccatcaaattatgtattttagagagtgtttttccacatataggaagtactatttattttttaattataagtgcttctgctaaaaaaaagttctttgaatttaattttgatgcttcagatatatttgtggtatgtctaatatatgtcccaatacaaaatttgactcattttgcactaaaatggtctcagaaactaaaactttaactagttgggattatgaactcgagcgttggctgaaattctaggtgtccatgttaattttaagttgttgattcatatattttcaactctcgaattatttaaattatgttttattctatgtattatatatattaaaaaatatatgttatctaaatttcaacagagaaaatatgttcttatagaaagaataaagaaaaagttacaatttaaacgtgtgaatataatattaaaatagcctatatatattaaatgaaaaaagaaataaaaaaataaactcaataattttcatatatatgtatttattatgctatcatattttaataaatacccttccatttgtacattgtaaaatataattaaataatactttttgacctataaattattatagtaatgtaagatttttttagtacaacacatactaatattgtaatgtaagattaatgcattgaaaataaagagcaataataattgctaatgtgacattacactttacacataatgaatttaaaatgatctcactcttcctatattacagacctaaattcgaatctaattaaacttcgagacccaaactcagaccccaactctgctcccaaacttgaacctagacctagatctggaacccagaccccgatccggacttagacatggacacaagatctggactcagacccggactcagacccagaccccgaacccttaactcagacccagccccgatcccaaatctcaggatttaagtctgagtccaggtccaagtctagggttcgggtttgggtccagtatcgggtctaggtccatggtcaggtctgggttcgagttttgagtccgggtctagagttcggtacgaggtgggatgggttcatgttatggaatagtatggtgtaaaatatatatataaaaaaaatctaaaaatagttttacaaaatttgagtcaaacaccattaaatttttaaaatgaccaaaaattattttctattcttattttagaaaatacaattctaaaaactgaaaaccagccaaatctaaatacaaatttatatttttagttgaaaaacaatatgaaattttatgttttagcttttaatcattattttcaaaagttctccaaatattttacactttaataaataacaaattcaatttttttagaactttcttttttccatatttttatcagtt

SEQ ID NO: 229343 - DNA, 1533 bp, Cannabis indica
tgggcccaaatcaaatgggaggaagacaagtccaacatgcatactcctacatcatacccatactcaagagaaaataggagcataaggagagtggaacgcaagtacaatacgcatcatgagccatacccaacttctaggaacaataggcaaggaacgaggcccatgcgtaggtttccttcaccaagaccaagagaacaagagaaggcacccatcccagaatataacctaaatgtagaaccagcaaagatcgtggctataatgaaaggaatggggaacaaggtcaagtggcccgaaaagaccaagaagccagcggatcagagagataaaaccaaatggtgtgaattccacgacgatcatggtcacacaacggcagaatgcatagctctggattttgaagttgctgggctccttcgacagggacatcttaaagaattcttatctaataaggggaagagtatcatagctggaaggaataccaagcccgttacaccaccagaaccttcacaacagactagaacttgtagtgtaatatctggagggtccgaagttagcagggtgacatattcagtagctaagaggcatgtaagagaagtcgtaggaacggacggaaggccacggagaccagcaatgagttacaccggacaaaccataagtttcgtagacgatgaagcctatttgctcaatccccatcatgatgctttagtcatttcttcgcttatttcaaattgtttaactaaatgtatattgatagacaattgaaggtctgctaacatattgtttttgcatgctctcaagggaatggggattgatgaatccaccatcatccgtaagtcaactgtattgtggggttcagtggtgaacagaagcattctattggtgaggtcacattgcacgtatatgcagaaggagtcaacctccagaccagattcttggtaatctactcaccctcagcctacaacgccatcctaggccatccttggatccatgctatgaaagttgtgccatcaacataccctcgggttattcgttttccaactaagtagggagtaaaagagatctaaggagccccaaagatggcgcgagattgttatcaaacaacattgaaagataaacaagcctcagcatagcaactacagcaccccacatcgtcaagggcacctacagagcctaaaatggaagatctcgatgatgtgtgtatcagcaaagacttttcggaacatctagagaagatcaaagctaacacctgagttctgtgttcggctcatcgagttcctaaagaagtaccatcacatctttacgtggtctcatgaggacatgacgggtattgatcctaacattattgttcataagttgcaggtagaccctaaccatccttcgttcaaacaaaaaaggagaaagtttgctccagaacgcaaccgagtaattaacgaagagatccaaaagttgatagacataggatttgtgagagaagtagaataccccgactggttggccaacgttgttgtggtgaaaaagaaaaatggtaagtggcgt

SEQ ID NO: 229344 - DNA, 1151 bp, Cannabis indica
ttttttttttttctttcttttgcaaattttgttttgttatttacttcaccagcaactttgaagaaagaattaagaacacaatattacttgtatgatatgacagaattaagaacacaactttgaagagttatactattggaaatacataggtgtcatttttttaagacaaatttacccttactttacccttacttaaactctaaagctaggggtaaaatgatcataactaattaccccacactaccccagtaaaaccaataccaactaaaacctctcgacaccaaaaccacacatactaatactgttgtgatatttctagccaaccaatcgagtttctactgttgtcagacgttaaaatattttatttcataaataatatttatattgcatgtataatctaataaaatctccgtaattaataaattacgcttaatgtgctcattttatgaaaaagtctattttctcatagtaacttagtaagattataatttcactcattttattctcctaaaatctatattacttcatatttcataaaatatactttaattaattataattaattcttgaaatattacaactactttcataataattactcctttttttaatattttgtgtaatcaaatcaaattagcttatataatttatacatccttgtataattgcatactactttcttaatgaccatacttcttcatttaaattacttgaggctagctcaaatggtcataagtgggtgtgggtgtgtcttggaggtcctgagttcgagacccaaataaaacatggttgtaatatataaacgcttaaataaaaaaaaaatacttcttcatttgaatttctatatacttatctttccttgatgtagtgatacatatgagtgtttcacatgagaccatcagtgaaaaatagtaggtaaagcatctaatgatactcatatatatttgtgtcttgtttgttttctgttataataaggtggacatgtgactcttgaagaagtcagtttgttgttaagtttactaaaactacgtaactatctacagaccaacaaagattactacccaaaactaaatgacagctaagaacaaggaattcaacagacgacaaagactcctctgaccagctaaaatgtgtataattaaaattaaaaa

SEQ ID NO: 229345 - DNA, 1844 bp, Cannabis indica
attacatataaatgcagtggttatctatcgacatatttgatattgatgtgtaccacgtttaaaaatatttatagtgcagtggttacatattttatttttatttttaaaaagaaagtatttcaatataaatattatatctatatatcaaaattacattgtatattattataataatacactataaaatggttgtcaataaaaatattatattatattttagtacaggtttttttttcttaagcagaaaataatcaatttcattaacactaccaataaaatgacaatgaactcaacagggacaaatcactcaatgataatacgatcaggactagaatatgaagagcgagctaaccaataagttacctcattcccagaaagaaacaacaacatcgatcagagaagttttcaagtaatcgtttacaatctgaaattattaaaccatttggagaaaataaatcaatagaacaagctaatgcttgcatcagttgaaggcagtccgactccaccaaaaatttgatagcatattgctggtgaaatcttcctggcacaagatcagttaccagatcttcccactgttgcagcttccagaagttgaccagaatggtcttgggcaatccatccaaatccgaacaagttttctgaactaaaaatggcgagacatcgatcacaattaattttaatagaaccaacttctagtttagtctaacgctcattcgcatcactagaggctactaaatttgaatggagatctccttcattagattgagctaacattcaactaccaataagtaattgcattaacaaccaccctttctaccacaggctctttctcattccaaacacgatcatttctctggctttccatattgcccaataaaccaccgagaccctcccaatgatatctgcagaattatttgcacaaaagtccatgaaccaacttgtaaatttcagccatccactctgaaaaaaaccagcaactacctgagataaacattgtttaataaaagggcattccaccaaacaatggaaggtagtttcctttccctctcgacacatatgacagatatcttccaaaggaacaaacttagccttcaggttgttattaatgggcaaacaatgagtaagagagctctccacatgaaattttttatttttggtggaatcttgagatgccaaaatttgcgccaaaaactcactatctcatctgcaatttgaatcctgaataagattatagtcactcttacttaagcaccaaacgattctttcaaaaaataccaagagtctatatcttcgtacactataaaaatttttacttctagtcacaataattataaattattattcttatattgcgacttgataaccaactaagtgatggtgggttaaaagttagttagtttttgttagttttctgtttttcagttctgttaagtttgttaagtttgttttccctttaatccttgtgtatataaacaattcattcagtaatacaataagaagagttttctccaattctggttcttaaacatactctgttttctctctcgctctcctctggtttatttcttcatggtatcagagccactgactggcgtcaatggcttcctccggtgaccactcatctcaagctggagcctccgatcctgttgatgtgccggctcagtcctcctcgacggcacaaaattggaatcctttctcaaattctctcactgcgtctctaactctaaagcttaatcgttcaaattttctctcatggaagtcacaggtcatacctacggtgataggtcatgatcttgatgatcttctctttggtgattcagctcctcctgcgaaactcctcaacg

SEQ ID NO: 229346 - DNA, 2354 bp, Cannabis indica
gagccacttggttcaattcacagtgatagagcaattggggttcctcatccacctcatgcaatgtcaaccccggaaagccaaatgtttctgccaagtccacagggtcaaactttttgttcatgagcatttggtagtgtggttcattcgccgtttccaacccaaatagtctatagatggttctaatgttcatagttacatctgttttgcggactctgactctttcgtttgtttgctcaggccaatttgctagaaattcaagagccaaagtttgattaacttgctttggaacattcacaaacttctcccactggtggactttaatttgttgcctcatattctcaaacaatggttgattcggtatgggatcttcatcatattcgataactcgatccacaatgaaagctttcttttgcaattcaaagtatctctcttgtgcttttagattgacaaatctatctttttcaaaagtgaacttcgacgccggtgttggtggatttgatgatgaagcacccgatggcccagttctagtacgcttggaacccatgacaagcttcaaaattaccactcaaaagttctcgggaaaattcggcaacacctccccttaatttcttcacttcccaaaatttcaattgtgcaccaaaatcatacaacaatattccaataacaataataatccacaatattcaacaattcctcaaaataaatccacaaattcccaaatactatagaaaactagtcaaacttgcaggaaactcgctcaattaatcaaaatcttgaaaagaaagagacttactaagtgagaatgccgtcaatccacctccattgttgaatatccatgaaaagcttgaggttgaagatgatgaatagtagtaatttcagatttgtgtgaaaagtggtgagttttggtgtgattttttgaagaaaaaggaagattgatgagaaaaaattagattttaagtgatgtagatggaagaattgaagaaacaatgaaggaaattgagcttggatgataggaaaaggttttgggggttgagaaaagggaagaactcgggtgggatttttattttagggtttatgggctttttttgcgatttgggggttttttttattgatgttgaaggggcttcgctgcggtgggaaggatgctttgccgcgacgaaggatgcgagcccgactttaagattctcaccaccaactcccgtcgcgacgggcaatgggcttcgccgcgactgctgggaggaacctcttttttttttcgagttttttttcgttgtgtggtcccgtcgcgatgggcaatgtgccccgccgcgaccactgtagcggaccacttatttttttcatgttttaaaattttttttaacgattttcacgattctaattacaattaaaattgtacaaatctaaacaaaatgcaatgaaacaaattaaaaagctacaaaatatttgcaattgtctttaaaaattcaaaagaataaataaaataaaataaattgggttgcctctcaatagcactgtctttatcatcatatagccggacgctgatttctatcttcaaagaggcgccagaattatggcggacttggtttggtcaatatgacctcccaagtagagcttcaatcgttgcccattaactttgaaagtttctggattcttgccttttagttcaacaactccacatggaaataccttgaccaccgtaaacggtccagaccatcttgactttaatttttcaggaaaaagtttcaaccttgaattaaaaagtaagacttgctgctcgagttgaaattccttcctaactaaatttctgtcatgccatttctttgtcctctttgtgtaaatctttgcattctcgtatgcctcgttcctgaattcttcaagctcatttaactgtagcagtctcttttctcctgcaactgctaaatccatgtttaaagttttcattgcccagaatgccttatgctccaattccaccggcagatgacaggcttttccatacaccgacctatagggtgacatcctgattggtgttttaaacgcagttcagtaagcccacaatgcatcgtctagttttcttgaccaatccttcttcgatcgttgcactattttctctaatatcagcttaatttcctagttggaaatctcaacttgaccattgccctgcgaatggtaaggtaaagcagacctatggtggactccatatcttgctagcaatgtttcaaaatgtttattacaaaagtgactcacttcatcgttgatgattcctcggagagttccaaaccgagtgaaaatgtacttttgaagaaaagacaaaactgttttaccgtcattggcgtgtgtgttgggttttgtgccct

SEQ ID NO: 229347 - DNA, 739 bp, Cannabis indica
ttttttaaatatatttggattactttggtagttgctccagtaatttgtaggtggattcttacgttaattttggttgcgatttagattattatattggttgttaagtgaattaatacctcaacagtaggggtggaaaaatcttagagttattactgatcgcaatcctaagaaagtttcagagttgaaggatgccgtgatgtggattgcacctttgttaaaaaacattatctattaataaaaaggtcatattttagctgctttacattattgtaactctgaaatttggatctaaaagattagcacaacaagagctgactacgattatggatataactgtatttcatcatttgctaaatggaactttagtccgttttgaaattgttatttacttaatttattagtagctttatcaaagtgtattgtattgttaggttaatgttgttgttgttgttgttgttgttgttgtgatctcttctagatttctagatatggttttgaggtatgttaattggttttctttctcatgtgttcgtacaattaggtttatgggattggtgaatggttgttttatgaggagcttatttggaaaaactattgtgaggattagtcaagcaagtaattggacttccatcggacaactatcggatcctacatcaatcctattgggactaacgcaaatacataaaaaatggaacccaataagaccactatctgaccctacatcggacctatcgcaaaa

SEQ ID NO: 229348 - DNA, 1416 bp, Cannabis indica
caaataaaaataacacactaagaagattaatacgagtggagatccaattaaaagccaatgagcaacataaatttccaaagatagagaagaaaataacactgaagctgaaaaataccaacaaccctagcgaaattgaaaatagtgtaggaatcaacatgacccgacctgacaagaaacagcgatgagctctggtcaggcaaaaaaacaagcgcagcagctaaaaactcttaagagagaaattgtagagagatttttttaaagaagaaaaagcattcttttacaaaaagttgtgtaattagcatttattagggtctctgaggcacttcttgatgatgtgtctgctcattcggttgctcatcttcaagggcatcctcagtttcctcaggttgttcttcctgagcgttctgagggtcctcctgagctgtctcctgcctcctggttcatgaactgcgagacctgcctcgtagccttctcactctaagatcaggttggttttgagcactgtcttcctgtgccgccctggctaaggctgccttccgctccaactcagcgtttcattggtttgcctcttccaaacgccgtctgagttgacgattttctaactccaccaatggcacgtatctagtgggttcataggcatcctcctgcctatgtacataaccaccagcttcggtatgagtttcctcatttccagtttctgggtgttggtcaccttcacgttgacttctcctcgaatatattgatcgtgtagatcgtgttgttcgtgaattgggaagccttcgtgagcccgccggctcttttctagtgtgatgagtagtctcttcaggttgattattgtcattttccccatcatcagccatggagaaaaaaaattcttttggttaggagggattttttctgagcttttttcacgtaggctctcaatgaaagcatcaaactgttaacgcagatttttgttaacgataatgagcctaatttcgttataggtttagcacaaagaattatagaaaataaaagaagcaaaaataacaccaaattttttacgtggttttgcagttaactctgcatagtccatgattcaatcttattcagacttctctaatacagaactagggttcttatttttctctcaaggatttttcgtccattttttcgtacattctgcccttatttataataacataggttggcagttaattacattcaaattcgaatcccacaatattattttcctgaaattgtgggctataatcatgctccacgtaaataaatacagttattatcttcaaatcacatagctgtaattaaaactgcttttaacgggtcaatgctgacgtggattaaggcacgctgcaaagtgtatctcgctggggtatctcgcttggtatcaatagcaacaataaccctgacagcgag

SEQ ID NO: 229349 - DNA, 2235 bp, Cannabis indica
ttataaaaggccatttactttatttttttaaaaaatagacattaactttcatcagtgtgtgatttaagatcatttattacaatttctcatattttactgagagcaaatttgttgtgacatggtattttaaatgaattctttagtttcattcgatgttctatgagttgaaatttttatttgttttttcaggtttatggaagaagtatattacaatttcatgaagaaatttgctaagagaggcgtgaaaaaaatttgataagaatagaaaatttgtatatacataatacatctttgtatttttttttttttttatatatatttggagaattaagagagaacattttaacttgtaattttagtattgcagtatatttaaatttgatcaatttttaatttaatgtaaagacaattctatattttaatataaattaattactttatatttatttaaatgtttaaatcatttttaaatttgtttctaattttcaattaaataaatatttatattttaaataaaataaattttagtatttttaattaaaataaatattagtagtataagttgaaaataagcacgacacttaaacgataggtatgttatgtgtgtcgttagttgtcgtgccaaagtacacttttttggcaccaactcataggcatgtcatatcgtgccaatatgacgacgagcacaaatcgcgcaagtagaatctttttcttgtaatgatttttctaatttattttacacaggtaaatatttttcaagattcttctatttcacttgattaattactcaggttctaactagaattaatttttcttctacctacaatgtttagtattttaaccactaattgtgctgttagttacagacataagctaataattaatgttcacgtgatcatgaatatcttttggatcaaaacattatatatgtaacctttatctagtttctgacaatgcttaagaattattaataaataatcataatttagcatgaatcacaaatccaaacatataagagaggataaaacaaagcaagaaaaatccagacttgtgagcctaatgcttacttatttaatgatgttaattaatataaataccatatataatcacttttccttttcattgcttagacccatctcaacaacttggctcatagtgggtctcacatctttgtcttcctcaacacatctaagaaccccttcgatcaaaatttccacttctcttaagttataattaccttccatcaaggggtctacaatttcatcaatacactctacttagctgaccacttgcataattaatcttatctcttaccacgtaacaagcattttgggtctagcctcaccaacatcttctccatcagaacctcttgttgggccattgccaatcaccattccaagcaaaataattccatagctataaacatctactttggatgtgatcggaagattataaacccattcaggagccatattgacacgctccgaacgatccgtcgaaggagtatgcggcaccccacaggtccgcttgcgaggttcagccaaccaaccgagtgcaacaacaatcgaaacaacaaaggcagcagaaaaatatgaagaacagcaagaacaaatgaagaacacttggctaaccaaagaaactctctctgtattaaaaatggggttcctttacaaatgaaatgcaactaaaactttacaagagtaatgccttaattaaataggcagccaacaaatatctttaaagcataaagcataaagcaaaaccaaggaaatttttttcctccaagtagctcagcccacttgggcgtatgggaagtgtcccatcaatttggggtgaccctttgtccacttggggtgacatcaacatgacaaaacaaggcagtttgctaacttgcaccaaatccatgttgcatgcaccccgatgcttcccgaacgcccatactcagcgtgctacaatcaggtgcataatctcgagaattactttccaagcagctcaagcaccttgccaccagctgcttgtcccgataaaatactcgggacgtagcccccactcaagcctgcgacgtccccgtctcttcaccatccttaaaccgaaggatgtgatccttgaattgccataattgtgactcaagttcccaacttgcctctgcatcaggcaagttcttccactttaccaagtactcagtataccgaggaattctcttctttctgacttcccgtgaagacagtatgcaat

SEQ ID NO: 229350 - DNA, 2278 bp, Cannabis indica
tcgttaaattttctcagagaagacaattcgtacaacttctgtttcaggagcttaataacataagtggctgggaacatgttatacaataattcaatccaagctttcttaacgtgatctgtcttgtttttagttaccttttaaaacttgtgaggagttggaagggttaatagaaaaatattggtgtgagttttgtgatcaactttatctcatacagtatctcatgatttaagaatatattgtgacacacattatactcatcatatagttactaatagcccactagtctattcctggatgttgagactgacttggaagattttggtgcgaacttgtcagtaaagttcttggattgaatgtttgattacaatactgaaagatagtgaggatcccctgataggctacaagaggtattctctctctattcattagtctagatttaaactatatacattatgttgagattcttggattatggttcatattggataaaattatttttcatcaaatctactttcacttttctaactctgatataattaaccataaaaaccaacactccgattgttttcttagtcgcacacgggatttccaatcatctttctattttttctatgtatttataatatataaatatatatttgtatttgtaacgaatatatatctatatatttgttgtattttttttttttttttttttttttggtgaaagggaggtgcaaagcaccaattcaatactgaagagaaaacttacaaagcaggaaacaagttcgaataaaaataaagacaagcagttgagacatgaaattaactaaactaaggcaacaaggcagaaaattaaagggacaaacggcagggaacacagggaaggacttagccagggtttgggaaccattcctggaagtcagataagacctcgccatcgaaattggaaatggcaatttcaccaaaggacctgttgaggcgcgcccatttagcagagttgtgagccatgaagttatcctttctttggatatgaaggagtttgtagcaatggagggtgagacaggacttggagaatcgataggcggcaccttccagattgtaattgtttctttcggttggaggagcattgaagaaggagacaactgtagtattgtcacagtggaagatgatattacggtactgcttgttgcctgcatagcaggctgcacttaccagcatctgagcttctgcaagggaaggatcggttgcagcaaaccgatccgaaaaaatatcaatgatgcaattttgagagtttctgaaaacagccgccccaacagagtggtctgtgcttatgctaacgtcagtggtacaacaaatccagcccatgggtggggtaagattagttgagaagccaggatctggagaagtggcagcggatgagtgatctttaaatcgaagacgaactgtcttggttgcctcatctaaagacattttttggactccatgaacaagatcattcctcactttccagatgacttcgaaaatgcacagagcacccaacatgaagtcgtggaaagtgagacttcgaggtctgttgaggccaatttgaaaccacgacatccaatcttcccaggatgagcaattgacacactcggttctgataccccataagcttccaaaccagacagctttggcaaaaggacactgccaaaaataggtggtaggaggattctacttctgataagcatagagggcagtccatggtagggattggaatgactcttcctagcttctctctggttggaagggagttagaaaggatttgccaccatagaagtttaaatcttgcatgaagaggggagttccagatggtcttccaaatcccgttaggatggtaatcattggagtgattagcagcgaggtggaaagctgatttagttgagaaaaccccacttttatctaataaccaacaccaagagtctttttggggaagggcggggagaccaatgtttagaatattagcagcatcctggggcctgaaccaatttctaatcttagtttcattccagctgttattttcgctgatgaagtcgcttactagttagccccctgagtagcatcttgaagaggtggcggttgatgatctccagttgggacccacttatcgaaccaaatagaagttgatttaccatctccaattctcctgcaagtggcttggctgagcagaggtctacaatttagaatcgctttccaaagcttagagtctgtcgatttaagctcaatgtcaaagaagttgtttcttttgaggtatttctcg

SEQ ID NO: 229351 - DNA, 1204 bp, Cannabis indica
caagagccagaggagacaccggttgtttcctcgctagtggttgcttggatagctattttattgttttttatatttgttaatgtttctcaatttttgatcatttatttctcatagctcattaggagtgatgccaataaattaatagtagcccataaattaaacaaatttgctttttatttccaaaattatgtttggtttctattttcatatagtttaatgtaataatttttaaagagaatatctctaactaatctgaagacaatatatagtttgtagcttaaaagtcttggttcgaatccatgacatttctattttcccatccctccctcaccactaaactaattttgccttagtgacttaacatagtaattacttaattatactcatggtggtttcgaaacacacaataatatgatttgagaaatataaggggtattaccccactagtgatgcctgatattaccttataatattagtataatttattatgaggtctttaaagcaaaatttaaatgatgtatatattatgttcagaattttataaaaatactaataaatgtatccatatttagagcataattgtaaacttcaaatttgtgaaggataaataacatttgctctaaattttttatattaattattaataatataacaaaaatgaagaggcatttgccttctcgtccaaatgtggctcctttccacaaaaggctcatcatcaagttgatcgattttcaacttctatcacgaaaatgaagtttattttgaacttgtacttttgtgaccacttttatttcataaaaacggaaatacattaataaactatttcatgttatattattggcacaacgcacatggatacactataaaacatttgtcagctggtcataacttaagttctaacctcgttaagtactagcctatttcaaaagcccataccatacataccatataaattcagttaagacacatagctcatatgctcttacgtatattaatggtttggtgccaaccaaattcaataatttcacattagtacgcaccgtccccaaatcattcctgtctgattttagtttttgaaaatggaacccagtcactctcgtttgattatgagtcatcactaatcagatggggtatggccccatgaaccagctcataggttgatgagtttggattgggccccacccggtcttctgagtactctaca

SEQ ID NO: 229352 - DNA, 1729 bp, Cannabis indica
ttatatagagtcgtgttcttttgttcactgtttcattacttcttttcattatggcgtccgatcatcaactggtttggagcagcagtggaaagacatttgtctagaagaagaagaagaaaatgaagtggcttacgaggaggaggacattaaagagattgaatttgatgaccgttggtgtctcgttggccgattattaactgggaaagtttctgattttcagatattccaaaacatgatagcggatctatggaaatcggggaaaggcatgtatgttaagattctcgaacaaaaccggtttttatttcagttttaccatgaaattgatattcagcgtgttattacgggcagtccgtggacttatgatcgcaagcaacttatcattgaacgactcaaacaaagagaaaacccgagaactatttctttaaataaacttgatatatgggtgaaagtccatgatctacaaattggattcaaaacagaaagggttgttcgtcaagcaagtaactacattggaatgtttctcgaatcagatcctaacaattttcaaggtatttggcgtgaatatttacgtgttcgtgttcaattgaatgttgaaaaaacactaaagagacgaatgaagttcaagaagaagaatggagaagtgttctatgccaacttcaaatatgagagagttcccaccttctgtttcatctgcggcatcatgggacattcggaaagattctgcagcatgggacattcagaaagattctgcagcatgggacattcagaaagattctgcagcaagctgtttgacacacccccagaggcgatcacgaaaccgtacaataatgatatgcatgctccttcaaaacgttagagtttcctcacagcatccccttggcttcgcaccggaaaacctgatcctccttctgccggtagccttaatttgccacaatcttctgccttcaatgccatgcctcaatcccaggcgaaaatcgtgagtcccaccagacaaagcaatcacacacctataacaaaagtaattttccaacaatctctccttgattttaggcacacgagccaatcaaaattgaaaaatattgatgagccaacattgactattcatgagaatgagttcacatttatgtctgaagatgatgtatgtctttatgatttgaagaggaaaagagttgatattctctctaataaagaggcgcctatattagtggaagatgatttagataatatctctgagccaaataattttcatagtattgatgttattgggcttccaaaaaacggggataggtgggtcctggtgtccaggcccaccaatcaatataaatactattagttggaattgccgcgggcttgggaacccacgggccattcaattcctagttgatatatgcagtcaaaagaagcccaattttatattcttttgtgaaactttatgcaacaatgatattgtggataggcttaaagttcggttgggctttgaaaattgttttactgtgccagcccaaggtagaaaaggaggactagcttttttatggaagacatcttctgatgctcatttactcaagtactcggcccaccatattgatttggaagtccatattcctggatatgatcgatggcaccttactggattttatggcgaaccgaatcgcactctacgccatacaacttgggcgcttctgcgtgacctggccgatgactcgaagttgccatggtgtatcattggtga

SEQ ID NO: 229353 - DNA, 1673 bp, Cannabis indica
gcttctttcactacatccttacaagcaggatcccgattccaggcttccagaaaccgaaacgggcgatagaaaccttctctcaccagtaagagatctaacaagacaggcgcgtgatcagaatccttaatgggaaggaccttgaccccagccttaggaaaatcaataatctaatcctagctactaaccacacgatcgagacgttccttgacgagattagagaatttcctcttattagaccaggtaaaaaattccccaccgaacccagatcaattcctccagagatcataaggaaatcagacaaatcagagaagtcaccttgagaacacaccactcccccgaatttctcctgagaattagccaagcaattgagatcaccaatcagcgcccacggtcaaccacctcaatatcaataccagccttccagcacaaacaaaggccaccagccgaccccagaggatcatacacaataggattgaaaaaaaccaagcgtctccaaataccacctaggttagaactattaaccttagtttccattaagaacaacacatcaggatcctccctgataacccaaccctgcaaggcattaactacccgggcttgccccaagccctgacagtgccaagataagagcttcatggggatttggggggcatgataaggcccgcctcctcggccgtctgaaaatcctcattccgaaccacactatagtgtgtcactcgtcccttctgaacattagcatctgaaataagagaagtagaacccgagatttccaccaggacctcccctgtgacttgatcagaattttccataaaggaattgtcattagacacccccactgaaacctcatagagaccatcatcatgttccaaggccaataagctctcagatttaccagggttcttcttgattttcctcggacaagcaagttcttggaactttagactatcatcactcttcctttcctgacttttctcgccaaaatccctcgagccataagaggtgggatcataggtacccccttgcttactaggactcccaataatactcacttcggcaaaagcatccgggacgcccacctggttcaccactgcaatatcggatggagcaatagaattgtctcctaaaaacggatagcctccatccaaagtcccagttttcttgtgtttagatccaacctgctcaatgagttgttccgagttaaccccaaacacaggattttttggaataccacggggccccgtcatctttagaggaccaaatctggtcttgttgcgggcctgagtagacccagagaaaagtttacgcttatccccctttgcccgagaatggcccataatcgaagcccccttagattcagattgaacattagacaaaggcccattaccaaacaacccaaacaatctctcatcccccgtggaaacacaagcatgattactactaacattaggaggcccattaccattcagaatactataggaattatcaccaccatgtatgaccaaagtcggagcatcagacgacccaccagaaccctctccatgctcaacaccagcaactacttcctctttttccatttgaatacgtttctggaagtcttcagctttcaaaacatcaaacccgttctctaagcgggatctgactttaagccatggaccaaaaagaggcacacttct

SEQ ID NO: 229354 - DNA, 1046 bp, Cannabis indica
tcttccagtgaaggagctattgagtttagatccagaactttccttccagctgctcaaccatttacgaaatcttctcttccagaatcctgggtagaactggctaaaaatgcccccacacttccagacacatctatcaagcactgagctaacttatctttattgtttctttccttgaatttgggggataaagatccccctttttatttgggtggagacaatattataatacccttgtcatgggggtttctttgatatgaatattttgcctccatattattaaagatttgaacaacttttatttatcatatcattatcgtttaaattcatttagcatattactacttaaatgaattttcatttgctaagttagcttacttctaaattccttgaggttccggttttaacgattggaccttaggatttcaatttttatacttaaggtttaactttttgcttttaataagttgtttacttccaggttccttaggatcctagttccaatggcctggaccttgggatttcaacatctttattatttttgaaaaaaataacaaaaattgcttaattctggattccctaaggtaggggtgagcaaaaaatccaagaaactgaccaaaccgagtacaccgaccgtccaaacaccgaaaaaaccgaaaaaaccaccttcagttaaaaccgtcttaacatggtcggttttagtgtcaatggcaaatcgaccgattaaaccgagaaccgaccgaacatatatattatataatatatattatttttatacatatttaatatacaattttattaaactaattttactttatcttttatatttaaagtttcaattattcattgctttattttactataatttgatgcatttacgtattatatacacatattcataaaataatacgagttttttaatataactcattaccatattagtagcacaaataatttgaacaaatttttaaaaaatattttacattatttatttaactaagaaagttttatttttaaattatatgatatttgatacaatactctaattt

SEQ ID NO: 229355 - DNA, 2061 bp, Cannabis indica
gaccctagcccactagaaaattctctaacataaatcttcaatcggcctaggaatttccatttctgtaactacagaatcgcaggcagtaagtacaactttccttttatagaaaaagagaatttagctccggttttctcctcaagaaatctgatctaacaaaatgggaaactcacacaagattagattataccagctacttagataaattgtttaatcaaacttaacatttttacctcaatttctataaataggaaagttaaacaactttccttccaaatttagatacacaaaatatggacaccaatttaaacactccagcccaaaaaatatacaataaataataaaatatttttgtcaattaaatataccaaaaataaaattaacaattataaattttttataatttttaaatatttataaaaatatcatcaccatcatgaccatcaccatcatcatatcacatttttcaaatattctattttgtcgtaacactttaatcatacttatccacataaccaatattttcacatctattttttttttttaaatggattttcacatctagctcacatccataattccatctattattataccacaaaatggaacaaggaaaggaccacctcacaaaaaatgtttcttgcacttttgtcactaattaataagaaaaattatcctttagaagaaaatactaaaaccttctcatgattggtaaaattgtgcacatgatcttgtttaattattttattattataaaataattatatatctaaggatatagttgagataagatcaaactctagctaatattatttatattaataattatgtttttgagaaagtataacgtagaggactggcatatatacctttgaaaagtatcaagtgttatatagattggagtgtattgtgtacatcttcataattgtacatacaacttatacaaaatacaattattaaaagttagactaatttttaatataaatatttaaatttaatttttattataataaaatattcatatttaatttttcagtgtaataatatttaaattatatttttaaaatttttgtaaatacttaactgttatgtgtaagtcaataaccacatgacagttcttaattaattcggattattaaattttatattatttcaaaactcattcaaatataccaataataaaatgacagagtggatattaaccttacacttagtggtcaagtacatacgaaagtttcaaaaatataaattactattaacgttaaaagtaaaacttatgtatttatttgtaactgaaaattaaactgaagtaattacaccacaaattactttaaaagctggccgacatttaattaagagtattatattgaatgataatcatgggtcggatcattggtattggtttaaagagacttcagggatttattcggtgaagagtgcttacaagcttctctaggtgcttcatggtaggtggtcggaagataatcattcaggcctttagagggtattatggaaactcaaaattcctcctaaggttaaagacttactctggagggcatgttctgagtgcttaacaacactgcccaattaaaaggtcggcatgttgatgaggtcgttatttgctcagtgtgccaaggtatgaatgagttaatcctccacattttggttgagtgtcctttagtcaaagctttttggcagcgggttgatgggattatttgcaacctttcaaccacagattttttttggatagttttatcaactggtcataggaatttcgaagacattggaaagcaagaaatgagcttgtttggcaaagtaaaaattcataccacattatcatgattgatctatgtcatttagctatgctgatatatgtgactattgatggaattagttgtgattgatacaacgaaaaccactttaaccctatgttgatatgattaatggacgagattgcacatgcctacgattatgatgacaaagttatgagctcaataagattagcacatttatatgtatacatatgtggcccagttgtagattgttagaaatttattgagg

SEQ ID NO: 229356 - DNA, 1207 bp, Cannabis indica
tttttattttttatttataaaaagattaagataaaaacgaataatgagaaatgaggaaatttcgtaccctaatagagttagaacgaatacaaacaaatcatccaaacagatcacagcaacacctcagtaaaatataaataaatataaaaatgtctaataataatattaattatttaatttaattaattaaattattgaaagagagagaaagaggagagagaaggacgtggagcgaagcttgtggattgtggcgactgatttccccaaacgccaaatctctctctctctctccattcacttctctcatcgtcatcatcagagctctcccacactcatttttattcatctctctgtgttattctagagagagagagagagacagagacagagacagagaaagcctaacaatggcagaaggaggaggaggctgttgtcccccgatggatctgttcaggtccgagccgatgcaactcgttcaactcatcattccaatcgagtctgctcacctcactgtctcttacctcggcgacctcggtcttctccagttcaaagatgtatgctttctctctatatatgaatacccttcttttttcttacaaaacccttctttcttacttgttcgatttcaattatggagttttattgtagtcttagctttggaggtttctgctttgactggttttagctttttgaaatcgcgatcgggtttttatttttgatttagggttttagcttagctattttgtgttgccgattgattgataatgtggtttttgattgatggattgagttaaaggggattcaatttgggaggaattagttgagaatttgctttcgtagatcgtggattgatatgatcttgttgttaatttcaaatcaatgttgctgcgatttgatatttggttcattaggtgtttcaagttttgattagtcagatttggggtccgttgcatctttggctctgcttgtagtaatataactgtatgaatgtggaaggagctagctttttcggtttgccagtagtcaattgtagtttttctttgtgaatcgatgagttacactatttgaaatggcatattactacttgtcttgtatttaggaaaagttcacatttttaagtgagtacttatatttagttttaccaaacaatacttgcttggagctgctgctgaagtaaaagaagctaatttaatatttaatttaaaaa

SEQ ID NO: 229357 - DNA, 4006 bp, Cannabis indica
caaaccgtaaattttttttaaaaaggttaaaaaagtagtatatggaataattcccctaataaatttataaaaaaataaatacaaaatagtaaaattattatatgataataaattaaatatttaatccataatatgtaattaattatgcatttatagtcatataatatcttaaatatttatactattaatatatttgtataaataaaataaatatacaaattagtataatataattatatgaatatatacttaatggaaaattattaattaattcaatgtaataaatcacttaattaataaataaatataattgcacacgtaattgtagaatactcaaatattcacattcttaaaatattaaaatattaaaattattataattacgtgtccaaaaataatcatgtaattatttcaccaattaaaaattttccattttaaattattaccaaataacatataattactaaatatactaaatatatgttgaataaaaatgaaaaaatttcaaaaaacatataaattttattgtctaaattaaccaaaaataattaaaatatgcatttccaaaaataaatgaaaatacttaattttcataatttttcttttgataatttgttgtgggaaaacgacgaggaaaacactaggaaaacgacgtgttgtttgttatggtttatgctctgaaaagtctataaagacatttctaattattaataaagagttgaacattatgatatatgctaaaatgttaaattaaatatttattattgaataattgatattaaatatagtaaattccttattcatatatgaggcagtgacttgtagctatacagagaactaaaattaattagttgtgaataaaacattcagcaacattttttttttcgatgaatcaggtgaacttcattgcacaaactcttatttacatcttataagcaccaataatggcctcaataatttctatacagttatctacaaactgtcaaaccattctctatcattactttttactttttttggcattactaccaatatcattctagttttaacattcttcttcagctgctgcagaagctcggctggttgctgagactttccattccatatcagattatttctccttctccatatcaggtacacaagtgttgttatgcatgcagctttgatccccttcttgaatttagattgccttgctttgcgtatgatctttatcaaattcctcaaggtatctgcctgagtgtgccactgaagccattccttcaacagttgaaagcattgctgagaaaattgacactgaaaaaacacgtgatctatgttttcttctgcaatattgcagcaggggcatatgttcgaatcaatcaccttgtattttcataacctgtctttagtcttcaaccagttcaacatagctaaccaggttagaaaagtatgtttcgggatgttgagccgtgaccacacttcattactccatttcactctttcatgttcttgtgccatgcttctataaccagcaactactttaaaattagctcttgtaaattcctctctctctctcttgtacttcctgtaatcacaggcccctcttcaatcaccactactttaatcttcttcctctcctgcattttgtgccccaacaggtctttatagtactgaagaaaagctgcagtgatcttatcatgatcctcaactctttcccctctcgcattaacaatagagagaatcctattttgtcttcttctttctctaacacttgagtggaacaaagcagtgttagaatcaccttcctttaaccaattagccttagctttttgttgcagaaaagatgataacaccttatgtttttctgcatataattcccgagcctctctctcttgatttttccattcaggattgagaggatcacttgccaggttttgttgacattcaatcatccaatgtttttccttcaattcatcactatatacattagaaaatccctgtttgttgattgcattcagcaccggtttaaggcttcgtaacttcttaactacttgaaacattttggtaccaatgactagtttgcaccatgcttcaacaatttgctcatgatattgagggtaactagaccacattcgaaaatatttaaacggtttcctaccacttggaggcgaaggatacaccgtcaatattgccggagtgtgatcaaataacccttctgcagtaaaaattgcttcagcatatggatacattcccagccagctttgattcgccaagactctatctatctttggaaaaatcctatcatccccttgttgctttttactccatgtgaagtagctcccaccaaatttcacatcctccaatttacaattcagtacacagtttttaaaagcagtaggactataatgtgcccttttgccaatcctttcacccttctctaaaatatcattaaaatcgccaagcacaatcaaaggttcattcgttttcagcccaactagttcatcccaaagtcttctcctctcttcttccttattacaaccatagacaaaagtgacaagaaacttattccttttgtccacagtagtaatagacagatgtattaattggctagagcaccacaaaatatccaccataaaactcagcggattccaagccacaattatttgacctcctttatgccaagcattattcgctgtaaaacaccaattagaaaacattcgaacatataaagctccaagacttggagccttaactctcgtctcgaggagaccaaccaaaccaacattatttttcgcaatgaattgcttaacttcattttgtttatgttgattgttgattccccggacgttccaacttagaattttatccattgcattgaggaggttctccccctcctccagttattaccactgcaagcctttcttcatgatcccgaacttcaaattcctgtagcttttgtggtattatcattctgaagtacaacaaactgattcggtgatgatggatcagcaggagctgtctgctctttaggtctccaacccttcacaacctgcttaaatccctcttcatccactactgtcttcacctcatcgttaccctgcctttgcttacctttgacaacccattcttgcttctttgcttccttctttctgcactcctcagtagaatgccccattcctttacaatgcttgcaaagaataggcttccattcatatttaacaatcactgatgcatcctccccatactcattttcaaagtagatcaggccaggaaattcttgttccagtgaaacctctatgaggattcatggaaaaagaagtttatccctttcccttgtaacctcatccaccattattggttttcctaactgacctattatcttaaacaatgatttttgaccccaatatttgagttccaaatcctctaattggatccaaatgggaatagttctaatatcttcttttttgagattaagattgggatcccaagccttcataatgacagaccttttattaaagaagatatatccaccagctagaatctcatccctatccttaatacttgtaaaacgaatgagaaaaatgccataagaaatcatacctatcttgtccaccttgtccctctagatccttcttgcaaagccttcaagaacagatagtggtggattagcaccaaggacatagcacacaattgctgattgccaatatgacacttcctcctctatatcatccatagtaatcttcactttctcatccttcttcgaatgaacaaatgctgattccaagctctgcattactggttcagctcgcagaatcggaggggttgtgttaatgccttttgagatagaattctggcattccctgtttgcagcaaggaaataaccaaaatcagcaactatctcatcctgttgtttgatcaatttcagtgatgaatctggagataacgtttgcaccagatccacctctgttctgtcttcatcttcatccgagaattccatgggttccacaccaagaatttcttccattga

SEQ ID NO: 229358 - DNA, 1097 bp, Cannabis indica
ttattttttaaattttttttcatagcggtatttgttatatctacaacattatccctgttaatttttgaaaatttttaaataatttatagtgtcaaaaatacgttaggcacccgataattggttagcactttccatatgtggcactcgataattggtagtgatattgcctaaaagctatattcttaaattatataaaatctgatacttaattacactaataatctatgataccaaaaatatgttaggcaacagaacagtagtactttttaaccattctctttatatactatcaaatttgaagatcatggagcggctttagggatactttgaaaattagataacaaactttgatatcgtgagagctaaatccaaccattatatatcaaaggtcttctacttaattaataacttattaataaccgtgacacaccctcaaccaaccaatattgtttggagaagaaaaaccaaccaacaaaataaataaccaaaaaaatcattaaccacgtgtagtttgaattaataatatttagaaaacaataagataattgggctattaataaaatcattgaaattaatataattataaaaaatttgttatctagaagattatgaaaaaaaaattattagagataatttatgagaaaatttgactaaaatcattcaattatttgaaagaagaataatttattttaaatatgaataattacattatgttatgataaacaaaatgataaataataataataataatgacttttttatttttacattttaaaatagttttattttgatatttttatagaatttcacataaaaatatctataacaactaacagagcaatttaagttgtaactaaaatttacatagcaattataagagtaacccaaactataaattttaaaaaaaaattaaaaaatagtatataaaataatttctataataataataacaacatgtaatgagtccaaacaaagccacttaaaagaaagtctaaagctagcacaagtattacatagtacatactaaaaaatatataaataaaaaagactatcaagttttaaccctacaatatatagaattttaataattttttttt

SEQ ID NO: 229359 - DNA, 3203 bp, Cannabis indica
aaactaacctatatggtgacatagcaataggggttttcaaagcagtcctataagcctataaagcatcatctaatttctttgcccaatcttttctggaacgttgcactgttttctccaaaatcaacttgatttcatggttagaaatctcatcttggccattactttgtggatgatacagtagtgctatcctatgatagaatccatacctcgcaagtaattcctcaaattgcttgttacaaaagtgactcccttcgtcactgatgataactctaggagtaccaaaccgagtaagaatgtgcttttgtagaaaagtttaaactattttgccatcattagaacatgttgttattgctcccacacactttgacacgtagtccacgactaacaaaatgtacgaactgttgtaagatggtggaaaaggacccatgaagtcgataccccacacataaaatagttctacctccaaaataccagttaacgacatctcgtttcttcttgaaatgctaccagttctttgacaatgatcacacacattgacaaattcatgagaatctttgaatagaataggccaaaaaaacccactttgtaagacctttgcatcagttcgattctcactaaaattgcctccacattgtagactgtggcaatgagtcgggatagagaacatttcctctgcaggcacacatcttctaattatttgatcaacacagtgcttgtagaagattggctcttcccaattgtagtgcttctcttcggaaaagaacttctttgtctattgtctattcatgtctgaaagtgtaatgttagtagccaaaaaattcacattctgtaaaccatgagactgttaagctttctttcaaactaaagacttcatcaagaaactcttcatttatttgcacctccttcgtgttctagctctcctctaattctaatattgaaaaatgatcaaccactagattctttgtgcccttcttgtgttttatttttaagtcaaattattgaagaagaagaacccatcaaattagcctcggctttgcatctttcttggtcatcaagtacttgattgtagaatggtctttataaactatcaccttgttcccaatcaagtaaggccggaacttacaacatgcaaacacaatagccaacatcgccttctcagtattggcataattcaactgcgcatcattcaaggtttaaccttgtcaacacattctcgcaacacaactccaatggtataatcacttgcatcacacataatatcgaatgacaactcccaatttggtttagtgacaataggtgctgaacttagtttctccttgagagtatgaaaagactccaagcaatccttcccaaactcaaaaggcactccattaacaagaaaattggacaaaggttttgtaatcttggagaagtccttgataaaccttcggtagaagccaccatgacccagaaaacttcggactccttttatcgaaaccggagggggtaagttctcaattgtagacaccttgtctttatcaacctcattgccttcttttgagattttatgccccaatactatcccctccttaatatctaatcaaaaccagctctatgttactcaaacaactatcaaatgaagacccaaacactgagaaatcatccataaagacctcgatgaaattcacaatcaaattagagaatacatccatcatacaccattggaatgttgcaggagtgttacacaacccaaagggcattcttcagaaagaaaaagtgccatatgggaaagtaaacgttgtcttctctttgatccttaggtgcaatagttattttatgatacccagaatagccatctaaaaaatagtaataatcttgacttgccaatctatccaacatctgatcaatgaatgggtgagggaagtggtctccttgtgtccttgtttaagggtgtccataaaactgctcaaatcgctccaatcacccacactgcaaaaaagaaaatgcaatttgaaattctttgcggtgcggtcacggtttgaatttttcctaaaccgcatggtgtggtgcagtttgcagttttgaattgttaatatgcgattcaaaccgcaccgcactgcacattataaaaatactaatgtttatatttatttaggtccaatatgtgaatgtccaacccaaagtctactaattattgtattattgaaacttaattttttttccatatttattttcaagccttatggtatttttgataagtgttgctcaagctttgttgtatttgtgatagtttaattattggtgatagtccaaaccgcaaaaaccacaaaaaccataccatactacaccattttttgcggtgcggtttttgcggtttttcaatttcgcggtacgggtgcggtttgggaaattagaaaaaatgcatgtgttggttggtttggaaaaattgtcaaaaaccgcaccacccacaccgcgaacacccctagccttgttgatctttcgataatcaatgtaaattttccacccagtaacagttcttgtgggaattaattcattcttcttattcttgactaccgtcattcctcctatctttggcaccacatggattggactcacccacttactatctgaaattggataagccactccagcatctaaccatttgaccacctcctttctcactagttccttcataagcggattcagtctcctttgtgcttcaatagtcagtttgattccttcctccattaaaattcgatgcattacagttgaggggctgatccccttgatgtcagccaatgtccacccaatggctctcatgtgcttcatcaatacccttaacaacttttttgtctctaccatagaaagggaagcaaacacaataactgggagtgtcttgttcacacctaagaactcatacctcaagtgatcaagaaggacttttaactccaattctagtggtttctcaatggatggcattaaatttattggaatcactccaagctcttcaaaacactttaggttcaatggcccataagaatccagccccaaagcgaattccctcgcatcctttccatcttggtcaacaaaatcctctcgcactaaagttgattgagagggtcttcattaggcttcctggtttccaccacatcaatcgagaaacatcatcactaggagtacattgaacactactttatctccttatactctcagctttaactcac

SEQ ID NO: 229360 - DNA, 2347 bp, Cannabis indica
ttggcataaaagaagctttaagctggattgaccgtcatttgtgaggacgattgattttggaaactgatgatagccaaattacattgtcatcctcttttggtctattagtttatgatgttcgtactcttctcttatctttaaataatgttgagttgtgttttgtcaaacgatctgcaaataagcagctggctcatgttttagtcaaggattcttgtttctctccaggtcgtgtgctttaattggagaattgttccaacgaagtgcgttctattgttattaacgattgctaactaataaagttgctaaatttattcgaaaaaaaaatagaagactatgccccatataatatattatacagtattattgtgtatataatattgtaatattaaatgtataaatatattatataaataaaaatgggaataaaatgtgtatagtacgttttttaacaatgctaagtacatagtaggcacaatgcatagtacgtttcttttgtttaatctatacatatatacaaattattaattttttatacaataatatcatattatatattaaaagaaaatgctcacagtcacaatatgtcttcatatgtacacatacaatttataaataaggggaataaaacgtacacagtacgttttttaatctatacatgtacatacatttttcttttcttaggagtcaatcatttttaatattattattaattagtgacataatgcttgaataatttaaaaattaaaaattgggatatattttagagaaagatggctaataatattgatttattttttaataaatcatagaataactttactaatactaataagttaaacacataaactgcaattcaatccggacatctcaattaactttaagaacatctatattcaatttcctccatcattcacactataaaaaatagctcttttaatgataacattttatttttttgatgaatcaagtatgtgtattgctcaaaaactttttatataacctagtaagattctccaagtaaagagaatctaaatatctataaactttgcaagacatcaaatcattctttctcacttgtagttgtttttttgtattcttcttttcactatgtttttcactttagcaattacaatctctacacttgtattagaatttgccaaaaaatattgtttcttgtgcgccatacttcgtatacgagggctgctatgacagcaactaaaattgacttctttaccttgcttaattttgccttccctaaccaccttacaattctttctaaggtagtagttgccattactcaattcttaacataaattttttatgactaaatgtgatttttagtcacagcaaaaaattattacttgcgactaaaacatagtatttagttacaaattttcactaatttacttttagtcacaacaagtatggtgactaaaagcacatttagtcacaataaattgtgatttttgtgactaatacatatagtcacggatcttttagtcacaacataaaaataatgatttataattagtcacaatttttttacttttagttacaagttttgttgtaactaaaaataagatttttcgtagtgtcagaagacacagtataaactgttacagcaggttcattcatcccaactcgagcgctcaactattgtatgcaaagaacgtaactgtactattaaaaccttcttcagccgcaaagaacgcgttatttccaactactaacagtaatttgatggcgaatcatcgaagaaccaaaaagataaaccaacaaaacaaaataaaattatgtcacagacaagactagtcgtagtaacctaaataaaagacacttaaaactatatcataaagaaaaaactaatcacagtaataaaaacctaatcgcactaacaaaacaataaatcctgacctacgcctatgtctaggaaggacaggctggtctgatcagaaaaaaaaaaaaatacaacctctgataactaaaaatataagaatgagaaaacttaaaaataaaggaataaaaatagaatgagaatgccaatataagtactccacctaataaaaaatggtatatcatatcattttaactactatatcattccagttaaaaaaaactatattataaaatgtacaatattaataatataggataatgtgtcgacatatatccaaacataagtccacttacattcgttttgtgaacaacaacatgttgttatggagaatatgttacatcatcaatttgtcaaacacaacttatgattattaatatatatatttgtcaaaatttgtgaattataatcacaccttttaattttatcgattatatttaaataattattaaa

SEQ ID NO: 229361 - DNA, 1753 bp, Cannabis indica
catctatgttcttgcacttggaactcgtactctgctaattttcaactttttaaaatagaacttccaggctagtatctttaggtttagttaaccactatttcatctaaatcttgtcactttgtctagttgctcaccttcccttgtcttttatatgtagatgaatctacgtgactttggggaggggaaaatcgaatagacgaagattttctcagtctttctttcaaggccaccatccagctggttcttcgagtagttcctcgagtgatcttgaggttagcagtgcttccacagagcctaaagtccagcatcactgctattcgaagcgaataggcaatgaattttactggagattcgtttgggagttgaaccaagagtggaggccattactccctagttcatggacctatgttgtttaagaaggagtacccgatacattgcccactggtcgggaaacttcactagctagagatctccctaccatagagattgtggatactgttactagaaactctgagtttatgatggcaaggaccaaatagacatgccataaggcaccccctcacgaccctcacatcgttgagctaatgacaagaggcaggatcagtattgttgaggaggcagaatagcctcaaaatgttcagccaagggtcacccaggttaaggaactgatggtcgagctaactgtggctagtcaagaagaagatgttcgactgggacaaatagtgcatctgaagtcaaaaaggttgtacccgttgggaggcggtaaaagacttgtaccgtattttgaataaccctttgggttcttatgatgaggcttggcggcctttgaatgctcttggttgcccgtcaaaggtcaagatagaccatgtcttggaggaggctcccaagccttggattcttgagctggggaagaagtgaagatggatatcccttccatcatcgctgccgaccgagataattgatgagatcagtagtggataactcatgagaggagtctactatgacaagcctactagggacccattggcacacaacttagcatttaagttaaggagtggtaaacaaatcgagcaacctgtgttacaaaaaaaagagggttaaagtaaagatgtacctaaaaaaattttggtacaattgaagaagagctaactgaagatagtaaaaacttaagagtccacctattatgtttgattagcatgtgcatgtgccataccctcaaaggcttaagaaaactacacttgatagacatttttctaagtttttcggaggtgtttaaaaagcaacatatcaacactccctttgctgaagccttggaacaaatgccctactgtaacaccctaatagctagggcacgttatggtgtttttcttaattattgtgctaacttttgttaattaaatggtttcaacatataaagtatatttaataatttttttgagataattacaactttactaaacaaaaccacttttataaaatattacaatctagaatcctgaaatctagttacgaaacacatatgtaatataaagtatcaaaagttgtcatctaacgacttaaccaaaaagatgttagtgttgtctcgaagtttgcaaatctctaggcttagactactggatatgtacaatcttcaccaagctcatctctcactgcgattcaaccttggctttgcctttttcttacacataaatatatatatatatatatatatgtgtgtgtgtgtgagtctacagactcaataagaaaagtattt

SEQ ID NO: 229362 - DNA, 1453 bp, Cannabis indica
actaagctagtcttagtagcttaacataaggtatcaattaatagcttaaaagtcttgagttcaaatctacaactttcttttttttctcatccctccctcaccactaagctagccttagtggcttagcatagggtagttgtcaaattcgctatttattacaaaattctccaaagttcacattcgaagaaaattgtccttagccgtattacacttttctttctccttctctctacccaggaaccttcaccagcaaactcaatgccattatcattttttttttttagtgatccaaaactcaagccaactaataatttatttgtttggactctttacatgatattcttgtgttgactttttttcttcttactatttttttaagggttgatctgcaaatcctttactcatttttttttcttttttggttgaagcaaaccctttactaattgagttcacaaacatcaacatcatgcatatgacttgatatattccttgatagactgactttcagtaaaaggcgtgatttgaaacagtgattgtctttattctttattgtagtttttgttttcaactaataacagtgtatgtatcacttcaagaaattataatggtataccatcatgcacaaggagagagtaacaatttacatgggagtgatcaatctatttataaagagatggtctgttaatttttattatgcccaattaaatgtgaagtataaccaactggcaatcaatctatttatataagagaaaactaaagaggtaattgctgaattgtgacatctacaccttttcatagctctgtatagaattagcaacttcagagatgtgtggtgaaaaacaaggggataaagaagaatgaacgcattggttctcttttctaatcatagttctaaaataaaaataaaaataaaacactgtggtttcattatagggatgaaaagatgatacatttgagagtttcacagctgcaatcattttcatcttgaacaaaaaaaggaaaaggaaaaaagaattgcaagcaagatcaataagaaaaacagatgatattttacacaaaataggtcatctgggaaagtatagaagaatgtagatgacctaattaaagaattagaatgtaatgtgggcatgtatgagcttaggcttatatatccgccgagtgggatttcatattctttttctttttcttggtttgagttagtagcattatcattcatttgattcatgccagcctggtcaggaatcagtattattatgtacttgaatgtgagcaagaaagtagagcttttgtggtagaagtagagaagtagtggtggtgggaacagggaacttctctcctcactcaatccacctcttttgcactcttaagcacctgtcctccagagtataacaagctcatcaggtaaacggtttgcaattttcttggtcatgtttttatgtttaatatcatgaat

SEQ ID NO: 229363 - DNA, 1301 bp, Cannabis indica
aatttggagtaggcttatatatataaaaaggtatttttctctgtaaaaaaattatgagctaagtgagtttacaatataatgaaatgtattactataatcaccaatattgcaatttgcaatttattgatgaaatgagaagagttgccatattaggatttagcttaggattttcagattgaacattcatgactggaattgattatgttttgagtttgaggggttggttggtattacagtgattgattgttgtagttaaattcttgtttgtaaaggaaaaaagggaatttgatgtcttcctttggactcaagtttttgtgttagtttatattccttgattgagtactgataccaaaacttctaaaggaatcaatttacagggaaagctgaatgaaaggcctaaaaagtgtcgttaatggcatgattatatatgtatattatatatagagagagttttctaactaattaaaatttttttgactatgttgttggtaaaaattagtaaagtcttcgtttatttgaaaacaaaataaaataattagattaattggagtttattatctggagggtttaccacattgctcagtaggtatcttttgtcttctattacattcatttggattttctgttttggttttctcaccaagttttttgtttttcattctgggattttaaaggtgggtctaatgtatgtggtttttttcctgtaatttatctaggaagtgggtctggctttacctcattagtcaatagttactacatgtcattgttcttgtttctttatagctaatagtatgaaccctgtttgaatttttgtccatgtaaatgtaatcaagcgtgttacaattattaaagtatatttcatctgaaattgatcttatcactaattgcaggaggaagggtggccacttggtctgcagccacttaatgcaagagttggtttagctagaaacagagatttttcagaatcaatatcattcaacactttaatttctggttctccaacatgttctacaaattcttcctcagatgatgatggtatgaaggagatcgcttctacgttcaaaataatgtttgaacattcaatcgagcaaatgaggttgatggtgcaagggactacatcaagtcgttgatttggttacgtgagtattaatatgtgaggattgattttgttggttgaactttggttttggttgttgaatttttatttggtcggttgaattctgatttagtcggttgaaatttagtgctacaaagtctattttaattatgtaatttttttttaaacaatttggttacttttt

SEQ ID NO: 229364 - DNA, 3109 bp, Cannabis indica
gtttaaaaatcacgtaatacgcatatgctagttagggcgttacaaaaacagttcatttagtcgagtgttatcgattgattctgtctcacttccttcaaaatccccctctttcttgaaatcgtgatcaggtacctcaaagtcctcgcccatttattcaacttcggttttaagggcatgtcttgagtgaataagataatcctgaggttacaccggagactcactgtcgtgtatttcaaccgttactggtttagcaagttcttgaaccatcctatccatctcatcaatagatagcgagccctgaaaaattctggcagtaggggcttcgtcctaaaatatcgaggtggggatgaagctatcgcttctttctatctcatcagtgaaggcacctcctctagaatcgagtctctggctatccgataagtcgctcatctaaaagatagaagatcttttcagtatggtgaaagtgcaaatttaaacaaagtgccctcacctgtataaagttcagaacacaggaaaaataaaagagctgacctaacatctcaagaaatggctgggcgtatcgcagtaacataagggtcatgtcactacatgaatattaagttactgcgatgcacccaccatttagtcacttctagcaataagtaaatcgcaaagttaaaactaactatgtgcctcaagaaatggctggggtgtcctagtatcctaaggggcatgcgcttatcgcatgaacgttgagttaataggacacacccaccatttcgaagaacctagttagtcccaataagtgactacaaagcaagaaaaatgaagactaactgcatgtctcaaatggccgggtgtatcatagtgacccaaggagcacacagagattgcatgagcattaagttactgtgacacacccaccatttcaaagactcagatagttttcataacaaaagtacaaacgccctaaaagcttaaaaaaccctaagaattagtaaattctagccaaagagggttaaaaggcttgataattggtctggtaaagttatttctgggtatttgaatattcaaaaaaattctcgaacacttgaaatactcattaaaaacttacgagtactcaaaaattcatcaggaaatctgcgaacactcaaagtgttcttactgaaactcgtgattactcaagctttaggtatatatttccaagaaaaatagggtgttttatcaaaagacaaataaccaatccaattatctcatgtattttctacccctaaaagcacagagtgcatacatattctcaaagaaagaaaaatagttacataaatggtaatccactaaccttgaaatgcagtctttctttggatgattctatgggtatcaagaacttcaaaatccttttctgatgaagaaatttcagaaaaatgcaaagagatttttaaaggttcaatgtttggagaagagaagaaggggaaaatgaaaatgagagagaaatgaatgaagaatcatttcgcatcagaaagtttaaatactgatatccctcatttattaggatgaagacacgtggcaaaggaatgcctaaggtctctcaatccaaaggttaccaataatcacgcctgcacaaaccctgaagagttttgataatgtgacacctcaatggattaaaagtaatcctaatcctttgaccagacaagcaaaagtcaccacctcgtgacaacctctcgcctgcctctctctcatagtttcccccatgacatagctgtcaatcgtgaaactaggagcatgtgttatagtatgaatttttcacctaaaaactcgagaccaagctcccataaagatgacacgtggactcacattccttgaggggtactgagctgtcagaaggagactacttgagtataaaccttgcctcaaccagactcagcgagatgatgtgaccgtgacagagtctagtcacattagtacgcctcgcacgatgcaggaccaagaaggccaggtttaagattcgcacataccacgatttaataccacgatatatgcgatgaccataaaagtcttcctgtgaattagtaaagatcgattctttactcagtgagctagtctggatgaccaaaagcactcgataacccgataaggactcgtcctaagttatcgacttttccaagatatccatatatgcgactcagataggacgcagatatcttaacacatagactcaactagtcttgtatgcatcttaggcccacaagcttatgtgaggatatgaacagacaccactatggtcgcatacgttgctatagttagtgaattgaatcgaaactattcttcatttattacatttacatttttattgatttaatgttgatattcattgtaaaaataatttgataattaattaagttttgtataatcaaaggacactttctttttatatagaggagtgatccaatatgaaatggacaagacagaaagccttgcaacagttgactaagaagaccatgatctgactgaaccactacccttttgttatttatattttccagtacgtttgagtgcccattctttaaatactttccattctaggtggactgctcgcatattttcatatataattttatttcaatatttgattttgtgttctcaaaattcctccaacaacaaccaggatggtcaactgtactgaggtagtaaggagatcgaacatcctcgtaagttagtctgtctactggattggaacgatgaacaacaggtggaggaacaacagttgttcaagaaggattttcagcgaaatttgttgatggtggaagagccatgtgagcttcgactctggaaggatcatcaaaggttgtagctaaactcgtggcccgtgtgcgcaccatgatcatagagaaaagaaggagaatcttaaagctacaatttaaattctcggagcttcaattgtgtcttctgataccatattagaaaaagaacattaatacttgactgatctaaaaagaaagttgtatctaattgtgttaatggtacaaagagaagttttacatatacatgttgggttttgtgccctaaatgaaacctatttcaatataatcagatttactaattaataaaggttagaaatcattttatgttgcat

SEQ ID NO: 229365 - DNA, 1616 bp, Cannabis indica
tttttcttttcaattatagtactaattttgtttgttttagaatcttatcttttgttttcaagtttgctagtttatgagaagtcaaggtccaactggcagattacctgttaatcctgaaatagaaaagacttgtagaaagaacagaagaatgaacaaattggaaagagctgcactaaagattgaacaagaaggagtcatggctgacaacgccaataatcgaaacaacggaggagatgtagaagactaggctaatggtcgtaacaacaatgaccatagcctgagggactatttgtttcctaacttggcaggggccagatcctgtataaggccacctactattgacgctaacaattttaaaatcaagccagccatactgcagatggtccaatcttcagtccagtttgggggactgccgtcagaagacctaaacatgtacctcgcaaacttcgaagaactgtgccagacattcaaaatgaacggagttagcggtgacactatcaggctaaggttgttcccattctcactaagggaatgagccaaaagttggtttatatctttaccaaccaactctatcaacacttgggaggaattggctctgaaattcctttccaagttctttccccctgcgaagattgccaagctgagagctgaaattaacaattttacccagcatgacaacgaatctctttatgaagcctgggagagattcaaggacttattgagaaagtgaccaaaccatgggattgaaaagtagttacaagtgcacaacttcaataatggattgataaacgacacccgaacaatcatagatgctgcaactggtgaggcttttatgaggaaaagcgcaaatgaggcctttgagttacttgaagagatggccatgactaataaacaatggtcaacagaaataggtccatctaaaaaagttgtgggtatgcgtgaagttgatgctatgaccaagctgacagcccaggtggaggccttaacaaaattggtaactctcaagcaaaacaagctcaagttgtatgtgagctgtgtggagaatcttatgcaaatgacactagccatgtagatgtagacagtttgcaattggagcaagctcaagccattagaaactatcagaataattatggttttaaccaaggaggtcgtcagtagaatttccaaaagcaatatcctaatcagtaacagcaacggttttatcctcaaaagaatcaatctcagcaaagccaacagtatcaacaacaataagactctagtggagggtctaatcctaagttagacacactgctacaattcatgactgagattaagtcttccattaaggtcttggaaacccaggtggggcaattggcttctcaaaatctaacatggttcaaagtaacttgcctatcactactgaagttaacccaaaggagaactgtaaggcgattaccttgagaagtggtaagagttatgctggtccgagccaagacaagcaagaggatgaagaagaataatagccagcacctacaccagagagaagactactgatggtcttcaacaaaaagaaatatctctccctattagtattgaccatcatataaagattccctatcctcagaggttgcgcaaga

SEQ ID NO: 229366 - DNA, 2267 bp, Cannabis indica
gcaataatattttccttttacttttttttgtcattgatgacatgttataaatccaacttactaactacaacaaatttttgtgataccgacagaaataatactcgcggaggttttttgccggtattaattggagtattactgactgatgggtaataattaataaaatttttttttaaaaaaaaaacattaataccggcagaaaaaaaagtaataccaacggaaaatccgccttttattaatgagggcgggagttttactgcccaaattttgaaaatagcaataccgacagattattagaggcgggttatgccggtatcattagagaattcttaccgttttattattatcggcggattctcaattaatgttttttatataaacccaccccataactcaaaaaacaatttttttggttgccattttttctcatccgctcatttttcctccgccccctccacccatttctcttataaaactcacaaaactaccattccaccatcatgcaccgccattctaccatcatccgatcattatgcgactgtcagataatgtttcttttaccatatttttatcatttgtcattttttgtttctttttttttcgtttttgttaaaaaaaaaaaaattccacggtttaagttttgggttgagacttggaactgctggctgaaacaataacggacattgaaactgttagaatactaattgaaatcggtgcaaaaattaacaggttcggtttttagtttcattagtcatattttccttctttaaatatttaatgattaatatattgatttatataattatgtgtatagtttataatagtgtaaattataagtgaataattgtatatataatatatatatgttatatatttacatataatacatatacaatctatataaaatttagtacatataaatttgtaaaattttaaattttaatttattagtgttagagttagttagcggttaaggtatatgttatttttctgttacaaatgtttgttactcaattctttacgttttttgattgtctaatgtaacagcgaacactatataatacaattgcagctcatcttcttcattgagctttttctcccattcactctatttcttcacttttttctttctttctcaacttttacatggtatcatacctatggctgatcctgacgatcctcgcaacaacgctccccctcgtccaccacaagctccgattgaaccataggttgccgctccacagtttcaagttctaaacccctgcttccattgaatatcagtttggatcgacataattactcctactggcggtcattaatcattcctttagttcgtgctcatggccttgaaggaattcttcgaggcactactccacggccagaaccactgcttgcaggtacaaacacgatgaaccctggttttaatcattggattcgttgtgacgctcttctaatgagttggcttatgaattccctctcagaggcaatgcttggacatgttcttcattgtgaatctgctgctgatatttggacggtctttgcaagcctctttgccactcaatccaaagccagacaactgcaacttcgtctctctattcaaaacacgaagaaaggctccctgagtattgacgagtacatcttgaagatgaagaatcttgttgattctcttgctggtgttggccataaacttttagatcaagaattcgtgatgtacattcttggaggagttggtcacgagtatgaaacggtggttattctgttgactgccagagctgatgctcttaccctgcaagaagttcaatatatgttgcagaaccaagaaatgaggattgagcaaactaattcacaaaatctcgacaatgtgcaagcaaattatgctcaattcaacaagaatgcctccatctccaatcgaaacaacaattctggtaggggacaatcacagggtcgtagtaacatgcgaaatagaggctctcaatcgaatggtcgtggtgcatctaatggccatggatgtggttctcgtcctgttttccaaatttgtggcaagattggtcatcttgcatacaaatgttatcattgatatgacattgactcacaaaccagctccaccacctctcagcctgaaggccacaatccacaagcactgatttctgattccaataccccaactaaagacaatggctagtatgtggatagtggagccacacaccacatgacttcaggtgctcagaatctcaacacagcccatgactacaaaggcaaagccaaaa

SEQ ID NO: 229367 - DNA, 1065 bp, Cannabis indica
ttttttttaaaaaaaatgttaatttcattaatttgagagttctgccacgtgtataaaaggtcaagccacgtaatgagaggagtggggcccacatctatcaatccatacaaggtggagaacagctgcttctccaaatttctgtcggtgcaaacaccaaataataataataatcaatttttattttattttattatatttattaacatctaccacgtgtcaggttcacaacgtaggtaccattctatattctgtagtctaactctctgtcttgtctacagaaataaataataaataaattttatgggattttttttgcacaataaatactaaaatgtgaaaagagttaaattaaatgaaccaattagattttagccacaagtgaattatgttaatgacgtaatgttaacatttaacaatcaatttgtgaagaattacaacactataataattaatcatattttataaaaattattatattaatttatattacacttgatacttataattctattaataaaaatatttactttttttttttacaaatcaaattcatttgatagctatgtgtgtattatgtaatcatttgtatgtatttactaaaaaaattgaaaaaaaaataaattttatgttaaaatatggtattttatagctggttgggatatatttaaatgtagtttgattgataatttatcgtataatatgatttatcccatattatataatatatatctcttttcgactttgaacaaattaactctcccattaattatatatatcatgtagtgattcaatttcactctagaacaaaatcaagagaatataatagccattaacaaacaaagattaattaaatattttgtaaaattaaactagagatgaaagacaaaatagtatatataaaaataggtgatgtaacaactatatatgaaacctttaattgtatgattgtaaatacggtacaagaagaaatttaaaccctaacgaagaaattaagcttctcctaattatactaccaaatatatacaccaactagacactaacttttttttttttctttttttttag

SEQ ID NO: 229368 - DNA, 812 bp, Cannabis indica
atattaaataaaactaacactacgtagcttggcacgtaacaatcacctaatatatagatagatgtatagatgtagctatctaagagcaaatgttgatttaacgtttttatatttttctccgttgactttaatacttacgcaactaaacatcatttaactttaacacttacgccaataaacgtaaattttaaggggaaaaatttacaaatacaaccttttcaaacgattatttgttcaagatcatgattaccgaggaattaagcgttgaaaagtccaaccatctttcgaggcatatggtatacttgaagcaatataaccatttttgggaaaattacttcaaaagctgttcgggtaagatctacttggacgataatgattttggaaagataaattgtttcttttgattctcagataagcatttcaatattcaaattttattttgtggtttgctttaaattgtgataggaagttctcagctagggttttcttttggctatgaaatgttgggttctaggctgaaaaaaatagggtaaggccatctttctcttcgaatttttctcattggggttcatttgactgtgaaacatagagaaatatctgaatatagagaagcagagagaaatagagcagagtcatttctcaatatcgtcacaatccaaattccccaaactatcttctttgaaaaggtgggtgcatgattgtgatatgtgtcttataattttgggcaatcaagtgtgtatatttatattgaattttcatcaataatacacaattgtgttgacaaaaactaactaaagatgaaaaaggtaata

SEQ ID NO: 229369 - DNA, 2131 bp, Cannabis indica
atttcgaggaggatgaagacgagcacaacaacggtggaggaggatgaagcttgtaaaggttttggagcgggtgcgacatatgcgagaagtggtttcgaggaggatgaagaaaatatttttgggggggggcaatccactatagcgatagtttaaaaccgtcggatatattataggccacggtttaaaaccgtcaactatagtatagctgactgttttaaaccgtggcatatagtatcgactatagccgacgactttaaaccgtcgagaattcttttataccgatatttttctacggtcgcctattctacctagtattcacgatgctcgtataggcaacaattttatagactgttaggaattctttactcgacggtgtaaaactgtcgggaattctaagttttttaggagtgaaataacaataataaagacaaagattattatgattcccaactatcatttattttacttcctaatgcaattacccaatttctcttattcctattcaattgacaagttgagttaattagtttctaatctagttaagacttataattaaactcaatctaggtaaaaacttcctattcaattgacaagttgagttaagtagtttataaactggttaagatttataaactcaatcaaggtaaaaacttcatacattcctatgataaagtttgatcacaaagatagcattaaacaaagcaactaataaaatcatacaaacaactactttcgtcctaaataaatttgcatctataacaattagagcatattcaaatatcacatttcagaattttgattcgaattcataaataacaataatagacgaccaataaataattgtagaattaaaatagatcgtatggaattgaattaaaagaaaaatgagaaattgaacaactacattaatccataaaataaattcaagtagttcacataataatccttaaaaaaaaaaaatagatactagaagtcattctaaaataatagaaattcaattaaaaacataaaagatagagataagagatagagcattgttgaccagtcctctaatagtgccttatgctcctaaccttccttctacactcgaaatttctctcaattttcgaatgataatagatctaaactctcaacccctttaaatacaaaattaagaaggtttctcaaaatcctccaatgcccagaattagtctctaagttcaaatgataaaagaaacctagccccaacttgttttataaacaaaatttgggaagtttcccattttttcgcaagagccacgactctcttgttttatgatttcttgtcaatgactaattgtattttggttataactctgtcgatatagctcagaattaaatttcctaaaagtgaatggatcatagctaaaaaatagcttgaagtttcaaactttattttcaattataaacggagtgtgttaaacatatccaaaacttagaatttttcacctacaactccaaaattcatattatttatcattttttctctcattttaacccacataatatatttgaccattaaaatctaaaacaaaaagaaaacaaaaacaaataaaaactactaaaacacatactaaaatagactctaaaaatgcataaaaataaacctaatagaaacttctatgacccaactccttccattgctagatctgcttccactcgcaaaggcacagatagtagctggaagaggccaaaattcatcttatttttggagtatggaaagttagaacatgagtttcgtgggaaagagagatggtcatggggaggaaagacatatatgggatctggtggaagaaaaaaaaaaagaaaaagaggggaaaaaagtaaaagattttttttttttttttaatttgaaacaaaaacaaataaaaactactaaagcacatactaaaatagactctaaaaatgcataaaaataaacctaatataaacttttatgacccaactccttccattgctaaatctgcttccactcgcaaaggtggagatagtagctggaagaggccaaaattcgttgtatttttggagtatggaaagttagaacatgatcttcgtgggaaagagagatggtcatgaggaggaaagacatagatgggatctggtggagaaaaaa

SEQ ID NO: 229370 - DNA, 1079 bp, Cannabis indica
tttatttcctacattttcttactttatttcttttctcacaaaaatcaatcttcaaacagaaagtatttgacttttgtaaaattttaaataattcacagtgtaaaaaagtgattataaaactacttaatttacgggcctataaaaaaatttcaactacttgaataaatggaagctttagttgtcgcttagggttttaaattactgttctctcttcaaccatctattgaatttattgaaatgaatttgcttttggtaattcaaggattaaagacttcaacttaataattttttgcttctcatgctatacttaatgatattaatcttctagtaatcaattttccacgagttaagtgtgaaacgattctctcatgtctttagatctgttaataatgaagcccattcgttgcctaagtgtgctcttatgttagattcagaatgtatttggttggaagaacttttgaaaaatcgaatttttacaaatgccaataattatagtaaatatcagtaaaaacactgatgtaacagtttacagcagtagaatgttattctgtcactacagagcacaatttttcaaaaacaaaccaaaaataaatagtgcagaatataaaaacttgacacaagagaattgtatgtggcatcagtgttctttcaaacactactagtccacggggtcacacctaaagaatgaaatcaactagaaaagcatcaaagtttacaaaagcagatgatttaaacaaatttagactccctgtagtgatttgcagcaaccctctgtaatccacctcgctaatatgatctttgaaacacaccaagtagtgaactcccttcagctattgaatgtgtacttacttcgtcccgaagtaattagacttaaacaaatcttctcccagagatatatgcccacttcctcccgaaatgagacttggaaaagtcttctcctgaagacccacacttgttcaaagcttctcttcaacctattctataaatagtaggagatcataataagaaaaccaaaacctagttgaacactctaggttttacaaatgaaacactcttctcacaaagaaagatatgaaaat

SEQ ID NO: 229371 - DNA, 1596 bp, Cannabis indica
ttaaggcgtaaaacccaacaagtgggtcccatttttgactctcaaataactccctttattttcttaaagcacttttttcctctttttggatgaagacaaaggaaattcttagtaaacatcttcaaatattgtggtcagaagcaccctaggttgacaacatgtcaacctaggcgttgggagcatcatcccagtgcctgggttctccaaaagggaagtgttttgattttaatttcgatgcctctagcatgtttgtgacatgtcttattcatgtataatacaaattttgagccattttcactaagacagacccaaaaactgaaaccctaggtggaatgtcaacttgggcgctaggcccctgggttgactttcgtgaggtcgttttgaatcttttcaattcccaagcctcaagcttggattcttcttgaatttttggttcataataatgaaggatggtgactttgaaaaaacttagggggatctaaatacccattttggagtccccaaagtcaacctgggtgcagggctagggacccttcctagagttaactgctatgacttggaacacttaaatccatgaatattttccttcttgtcacgtgtcaaacatttattttcacatcatcaaggttagttttcgtgcaaacattttcccccaagtcagctttgcaactatgggaggctgacttcatgacgcaaactaagcctatttcatgcaaaactaccgagtgggcatcaattttgactcctagcaattgttttctaattttcttgagtgatttcatttatttgcaagactttggaaatgtgtcaacaccaaaatatcaacaccaactttgatcttcagatgctgtcttaacattgactctcatgtctcactctgcctttaagtagatataaatgttgtctttgttctctcctaggttacagccttgggggtctttagtattccctcagctgtgttcatagtggaggtggtcttgttcatctcctcggttatacaagtgtaagtaaaccacatcattgattatgacatcagtgtgaatctaatacactaataaattatgagactaaatagtttgaagcatataatcatgattattttgtagtgtgtagacaacactataatcatgaataactataagtttgggatttatcagtagacatcgaaatgaatttgttaagtgcagccatccttcctgttagggcttggacttccttcggtgttgttggtgatggcatatctatcaaagccttgattttctcaggatttgctttaatgcccctcgcgttgactatgaatcccagaaattttcctgaggaaactccaaaggaacactttttcaggttaagcttcatattgtacttctttaatatttcgaagcactctgcgaggtccgtggtataacttccactttttactaattttaccaacatatcatcgacgtaaacctccatctttcgtccgatctgatttgcgaacatctcattcactaattattgatatgttgccccaacattcttcaacccaaacgacatgagtttataacagtaaagtctcatgttggttacaaagctcgtatgttcctaatctgggac

SEQ ID NO: 229372 - DNA, 2368 bp, Cannabis indica
taattttttaaaagacaatatttttgctagtgggggctatagcccccaaactaatacacttggtccgtccctgcttatatacaatttttttcaactcacagctattttaaaattatatttaccaaacactcagcagctttttttttcacagcacagttacaactattttttctcacaacacagttgtgccaaactggcccatagaaattttattagactatgtgggtaaaataaatgatatttgagaaataagatatttttcaagtccaacaacagtagaaatctgattgattggccagaaatatcacgatggtattagtgggtgtttaagtgatactaggtatgttaggggagtttacacttctatactaataagaataaataatatcaattttgttaaagaaaaaataatatacccaaaatgtaataataattatcatatatgacaatccaaaataaacttttcttaattaatatttcttaccaccataaaagctttctttaaattctttatatggttttattatatttatattttttttgtattaaccgaatctttaatgcattagacttttattatacatttttttatatgttttgactactaacgaaataaaatgtatatatatataaataataataataataataattaaatactaatcagtagttaatttagatctttagatactaattaataatttttttatttgaataccttagttaatccaaacgtttagactttaaagactaattagtagtttatttattagatactaatttagtagttaatctaaatatttaaatactaataatttattaattttttttatttgtataataatactttgaacaccaaaataacatcaataataataaaaatcggtttgaacggattaacttgattaaacagacaaaattattaggcaagtttattttttttttattttttaattagacaggttactaaatacttacaatctaaaatttatattggattgataaaaatatattacaatctaactaaaccggacggaggtacaccccaataggatgagtgttttgggaaacaatgaaaataatagcataaacttattatatggtaatcgtgtaaaatattttaagtgatggggtcactctaagcatagaaattcaaattttcctactactatgtttatatatatatatctgtgtttttaatgccagctttattgatataagactttacatataaaaatgttagtagaagaaattggattattgaatatattctagtagggttttaagtaaagttccaaaaatggagaggtgaagtcaaatatgtacctccataaataaagacaaagtaagaaatgcagccttaattgctcaccctctcagcccatcaaaaaagggtttgtaccaataagggtgccaatgtataaaaatagcttgattggtcaatgagggaatcactctccaactaccaagataatccaaatcatgcatattttaatttaacgtttgttttttctccactattataaacattaaataatatgataatgtgtatatacatatatatatatatatattttcaaagtgataatgtgttctatacagcatttgattgcgctttcttttttagtttttttattatttaattggtttagagaccttaacacaataaacaattaaaaacaaattaataagtattaataaataataataataataaaattaaccaattttaactaggagtagcaacatagacatggaaatgagaagaataaaaaaatgctacgaataaacatgctttcttaaggatgtttggagagagtgtgagttgtgacctatttttcaaactaaataatatatacgatttttgtaattttttaaactgtaattatatcgtgaaatcttaaaattacaaaaattatatcctgaaaaatatgtggtttaagaaatttagactattattattattattatcaaatattataataaaaattcaaaaatcaatttaataaaattttaacactacaaaaaacaaaaaataaataattttttttaatatcattacatatatactcatcttctagatatgatattaaattatctctaaaaaaaattataatatataacatatgtttgcttatatatttagaaaaataaaataaaaattaatgttaaaaaattagttactttataatatatatatatagtgcggtacggttttaacggtaactattaaatttagaaatcgcaaattgcgctgcaccgtgtagtttggcgaaaatacaaatcacaactgtatcacgaatgattttattaccattatttttatgcggtacggacttatttatacggtgtatacagtttaacgaat

SEQ ID NO: 229373 - DNA, 1900 bp, Cannabis indica
gaaagaggaagctcttctcaatctgaaaggccatccttcacagtcattatgcacgaaacttatgcaactggtcgttgttattttgtaagtttcttagtttagtatataaaaacttatcaatttctttgttttactcaaaaactataatatatatatttccattgtttcacaatatagaatgttgtattcttataattcatttcatttttggacaggtcttgccatacaagtttgtggagaaatacattaagaagaaagaatgtgaggtaagactttggcttccggatggtagatgttggtttgtccaattgaaggtgaggcaggcaaatgaatattcaagagctgaattgtgccgaggctggagagaattcgcgttggataatagtctgcaagccggtgatatctgcaagtttgaattaactattgaggatggggatgaagtttcatttaaagtttccattgataaggattatgattatgatgatgcatataacaagaaaggttagaaatgctcataacaaatatttataattgaatgcatttatggtttttagtattaacttacttacaagtcttgttttcagttgcaaataagagaaaagcaattacaccttccaagctaaagagaaatccttatgtgaaagttgaatcttcttttgctcatcacaacatgaatataaagaaagaacaagtggaaattaaagttgaacctaatatttcaggtatatgattcattcaataataatgtcaaacaaacaaatacttaagaaaagtcagcttaaatttttgtttataataaactaaatgcagacatgtctatgaaactgaaatctgacaatcaaggcagagcttctaaggcagccagcaaattcttctcaaaaaatcctcacttccaagtcgttttgcgatcaaatcacgtgtatggatatcaattggtatgtttaaaattttgcttctataaatatatggtttagttatgaatccataccactttgtatgaaagatcaatattttatactagttatgattatttattctttcagccttttccaaggaaatttgcaaggcaatatttagagggaaaggctcaagatatgagtctatgggttggtgagaaatattgggttgtgaagttattactttatacatcaaaatgtgagtttggtgctggatgggctgcatttgcagtagaaaactctctcatgccaaaagatgtgtgcatctttgagctaattaacaacaatcaagctgagatgaaagttcacatatttagagaaagtggtttggctcaagactagtagcttttgtaattatacatatagattagtttagctgaaggtttttctcttggagggttgcttttaactaacccttaatattatgacttattgtttgtgaagttaatattatgacttattgtttgtgaagttaatattatgactcttgaagtactatatttgaagtgtgttttggagtataatggtgtttgtttgtgaatttatgatactactataattccccaagttatgatttctccacatcgtttggaaatacattttacccttgttttatataagtactatttactatagggtaagcttgctttttcactttaaatattttaataaattcacaaaaaaaattgtttattggaaataggaataggggtgttcataaaataaccgatcaaatccaatgcgcacgatccaatccaatccaatccgcaaagtgtggatatccgcacttgtgcggattggattggattggaaaattcaaaatccgcacttgtacggattggatgttgattgacatgtaaaagtaaccgattcaatccaatccacacatatttataacaaaattaaaaaattatatatacaaataatattttaatgtaaagaaa

SEQ ID NO: 229374 - DNA, 1164 bp, Cannabis indica
aaactgaaaccaagcagtaaaaccaaccaatacatccagaatcaaaatccaccatgtgatagcacagtttgagctcttaagctcgaaccttgaacaaacctcacaaccagccacaaactcaactcaatctaacttaattaactttaatttaacttcagaatacaaattcaaacatcaatcaataacacagatacttaaccttagaaaaacatgcatgaactcaactatgagcataagaaatcaaagagaaaagtgctaagagttttaccttcaattggattcacgaagagctagctaaaatactcaaaatcaagttgaaaattgcctaatcccttgctagttaggggttcgaatgagagagagttgatgagaaagaaattttgtttttgtttttataatttttaatattgataaatactatacttattccataatactccctaaattcagaataataacatactaaaagtcactaaagacaaataacccattatggcaaaaagaccactttgtccacacccaccccttaaagcatacttgccacctaggggtaatttggttatttctaaatctccaactattctcaacattttcaatgtctatttaagttgccccgctactactaaaatactaaaatatgattctattggccaaatgtcgcgttccagtattgttgtgcataaaatatgaaaaatgtaaaattttatatgtagcataaatgatacacctagaattcaaataaattcataaatcataattagaaatctaatttcataattaagccctaattatcttctaatttcatatttaaattaagtagtctttacaattatcccccatgttaaaaggatttcgtcctcgaaatctaacttgaataactttggatattgagccctcaagtcagactccaactctcaggtggcttcctccaccttactatttctccagagcaccttgaccaaagctatggtcatgttccgatgaactttatcttttctgtctaaaatttaaactggttgttcttcataagtctagctaaagttctaaactttcataactcaacacatgagtgggatctaaaacgtatttccgtaacatagagacatacaacacgttgtggactgttgaaagtgttgaaggaaaggctagacgatatgctacaag

SEQ ID NO: 229375 - DNA, 784 bp, Cannabis indica
tctatgatttgaaacaagctcctctggattagtatgagagactcactcaattttttttatttctcatggatatataaaaagggtgtagttgataaaattttatttatcaaaaaatattaaatataacataattattctaaagatttatgttgataacattttgtttggttctacttctgagattgaggtgcaagtattttaaaataactgaaagaataatttgaaatggacacaggagaattaaactattacttacgattgcaagtcaaacaattagatccaggtacatttgtttctcaaagcaaatatactaagaacttaaagtttaaactcaaaagttcaaagattgccataaaaaggaattggagcaactgtgaagctatccaaagataaaaatagtgttaaagttgatcctacactatatataagcatgattggtagttttttctatcttactttagacccaacttgagctccagtgttagtgtgtctcaggtaccaagtttatcctacggaatctcatgttccagctatcaaaagaatcattggatatattcataaaacgttgtatttgaaagaaactagcattaatatagtgtgttttagtcatgctgattgggtagatattgtttcaactttggaaatatagttgttgggcacaataaaaaactgaattcaatatctctctcccaatagctaagaacgaatatattgtatcacgaagttgttgtacacaacttttgttaatgaagcaaatgatgatggattaatggtttgatcttga

SEQ ID NO: 229376 - DNA, 440 bp, Cannabis indica
tgtttgaacaatgagactgatttctttgaggtcaattccactctaactgtccttattcctaaaaagcaaagggccagcactctcaaagattataggcccataagcctttgcaccactttttataaggtcctttttaaagtgttagccaatagactgaaaatggtgcttgataaacttatctctcatttcaaagtgcttttgtggctgagagagtcatttttgataatattttgattgctcaggaggttattcatgctatcaactctcgaaagcatggtaaatgtggttgggctgccttaaagcttgatatggcaaaggcttttaatagggtcaactggcattacttgaagagcgttatgcttcattttaatatccctgtcaattttgtttcccttattatgaagtgtgtgaccacttctagcctttccctttcaatcaat

SEQ ID NO: 229377 - DNA, 1046 bp, Cannabis indica
gatattgaatcttctgcactttccttaaatcaaaagtttcttccaataggaccattaatggtaaacaaaactaataataatagtttatcagatattacaggatcacaattttgggctgaagactcatcttgtttaaattggcttgatcaacaacaaccttgctcagtcatatacattgcatttggtagcatggcaatccatgacaatgcccaagttcttgaactagctcgagccttagagctcattggtaagccctttctttgggttgttcgtccaggtttcatttcacgggaattgaatcaggatttatttgacccaaacaaatttataggcaaaaatagttttggaaaaatagttagttggacacctcaacaaaaggttttgggtcacccttctattgcttgctttgtcagtcattgtggttggaactcgactatagaaggtttaagcaatggagtgcctttcttgtgttggccttattttggtgatcaatttttggataagagctatatatgtgatgtttggaaagttgggatggagtttgaacccaaccaaaatggaatcatagtgagtgaagagataaaaaggaaagtagataaagttttaggtgatgatgatataaggaaaaggtcattggaattgaaggaattgatcctcaaaaatatagctacagatggtcaatcttcgaaaaatttgaataaatttactgaatggttaaaggtgttataataaggattttttttttctaggtacttgtattcttatttgatttagtattcatcactaaatgaacaagatccaataatattatgtcctaaggttttaatgtggggatattgttaattacattttctttatattaatgataataaacattttatatatagcaaaacctcctattgtctcatgaatttagttatacatttaactgtacaatcaaaaaatttggtgtggcaataataccagctgccaaactttattaattcctttcgcaaatttacggtgcccattaatttttgttgtttaaatgtcagcgaggaccattc

SEQ ID NO: 229378 - DNA, 1836 bp, Cannabis indica
gagtttttctttgagctttgagaactgaaatggacaaaatgtggaaggaagaagaagaacataaaacagatgaacataaaacactggaaggagaaaatgtagtttttaaatgctgaaataatatttctcaaaagaaacaaaactaccaaaataaaatgtaatcactgtgaattaggggaaatacacttcgatcctttcttattaaaaagttattcttcttcaaaaaatcactttatatggaacaattgttatgcatatattttaagcagaattatagtcacgacacgtataaattgggatggataatagctcgctcgcagttcgaagaatgtaaaatgttggttaactcgtctggaagaatattggttacagacgtgtttaaatatttctttaattaattaaggacgagtaaaaagtgaaagctgctaaaccagcaaaattaaatcattaacgggaaatgtccgtctcgagaaataccaagtacacaatgatcaagaccaaacgatatgtgagttaagcgagacaatatagagattcctaatctaaggagcacaaaagatacaatcttaagaatcttatttgaaagatttgttagggtttatgtcctaaaaaatctgtaaagatatttttgattatagataagagttgaacatttttgtatgtgcttgaacgtcaaatgattaatatttaatattgaataatttatatataaatatcaaaaaatttcttactcatacataaggttgtgacttgtattgtacggagaattaagacctcatagccatgaataaaatagtcagcaacatataaagttattgaatctttaatcaacagttgctagtatgattcacagatacctgttgttcggtgcaagtaatctcaattcagattactgatgtagtatgaaatcttattgaaggtgttgtatataatagagattatatataacaaggaccgatatgaataaagatatctttatcaaacttactgtttaccatgaagacttaattcatatcacaatgatgatcaatagtagatcgatctaaatcacgagtaatcatgaactcttgttcatgttattagtttcttcgattcacttgttaaaggttcttaaagaagatgattcgtacaacttctattttaagaatctaataatgtggatggctgggaacatggtcaaaaggtaaatattcttttcatctatttactttcggtttaatatatatatatatacatatcttaatcttgaacatatggtataataataattagatacaactcttccgctgggtaccttagtaccataaaaccaacaagcttgtatacaaaaaataccaaaatctcattctggataaccagcatgaggaataaatgaataaatcatccaatccgcgagaaaggatttgaggaatataaacacatattcaacaatgtgatttgcgaacaaccataaagtgatgaatagaagaacaacttgatgaaacaaccattttagataaggacaaaagtggttaccaacagttaatttatttatcccatatgatgtaaatatgaaacatgtggattgtccacgtttcatgagcggttatttagataaaattaagcaaagaaaataattgttattccaaaaaatttctatatataaggacaaaaccgatgatagaaagcacgaccaaaattatctaggatcaccctgcaagaaattgagattgtattagttacatttctttaattctatactctgtaacacgaaaaaaccccaaaaataatgataacttgtagattatttagatttaactacaaaaccacctagatatcttgtgtcaacctatttat

SEQ ID NO: 229379 - DNA, 1028 bp, Cannabis indica
aaagggttttatttagggcacaaaatccaacagttcaatctcaaagatccaagttattttgcaatcattgtggaattaatggacacaccatgtctagatgctctaaaattcatggctatccactgaggcataggttacatgacagatttcctagcaaaaatggtgaaaattctcagagtagaacaacacaaggaaagccagcagcaaacatgtctgaaacacataatgacatcaatgaaggaggacctggagttaatcaagatcctttagctggtctttccctcagccaatgtcagaaaattatggccatgcttgcataaaaattccacacagagaatactgcaccttccaatcagccccttgtgtcgaatttttctggtaagactgatcttattcataaaaataaatgcattattgatacaggtgccactcatcatgtttgtccaaacattgatttgtttaccaatacttgtcacaaacatattctatctactattactcttcctgatggtaccaagaaaaaaatttcttgcactggtactgttagaatttcctctaaaattgtccttgttaatgttctatatgttccagattttaaatacagcctaatgtctattgcagccttaatgtcttcagctaattgctctttcatgtttcatgatgattcttgtatcattcaggacaccaagaagaagaaggttattgggaagggtgaaagacatggagaccttttctttttaaaatcttattatagtgcctctgttttttgctttttctgattctactataagtgttgacactttgtggcattatagacttggccacccttcttgtatcaaagaatttcccttgaataaagagttgaatttttctcaacctacttctcccaattttcattgctcaaaatgtcattatgctaaacaaaagaaacttcctttcatttccaatcataatatagctaaaacatgttttgagcttattcatatagatatatgtgggccataccacactatgacacatgatggttt

SEQ ID NO: 229380 - DNA, 1120 bp, Cannabis indica
tctctctctctctctctcagtatagttcaactaaaaccaactctctctctttgatctctctctctctctctctctctctctctctctctctcactacaatgtatacttgtgtgagaaatatactcctcagtataatatgtatgtatacagctctctctctcccccatactacattcaactttgcccatatatacacaaactatattcatccaataatgtttacctatacaaaaaaatgtatagatacattcaaaactaccctctctttctcatcgaccattctcgacaaaggtactgatcataatacaatggccaataatcatgttgatcactacaaacaaacaacaacaatggccaacaatataattgacaacaatgagatttgctctgctattccagcaacggtgtcttttccgattagattcatgatagacaagggaagtagtgcaatccattaagcccagaatacgattagggagtttcattaataactctctttttgccaatggaaagaaaaagaggtcgaagtcgtattcggcctcttcttcctcaagaatattgtatcggaataagaaaaagagatgggtgcgcccatttctatcctgctttaatttaaattaataaatatttttaatttttgtttttgtatataagcaagattattaattttattataattatgttattgaagagaagagatattgtgtcacatgatttaattttttaatatttttatgactttttcttcctatttaattgtaaaattaaagttttctaataataactcactacaaattttttcactttatagtcttcgaatgttgtaattaaaaagtctcttactaaaaattttaatcacactacaagaaatatcacttttgtcaataaatttcgctattgcacatttcttaatgaattggtaactaaggaattaatttgatagtgcacataaattttgaacactcttctataaattgcaaataagtatactctaatgtcatatttgaggattattaaccctaattacccctagatcaatctcagccgtcagatcaaataactccctcatctgacggctgccgtacatcacggattacaatccgtgaaagtacaataacag

SEQ ID NO: 229381 - DNA, 948 bp, Cannabis indica
ctatggtgtggtggtggatttggtatgatcggaactcggtgttgtgtgggaatacacaatcaagcttggatgtcattgctgacctggcggctgtggctttagaggagtttcttactcctagttcttctggtgtgcagcaacaactgggggagcgagggagggtggttcggcgtgagacggtggagcatggttgctatgagtcagggtcgagggtggtcgctggtgttggtagcaagtgggttcctcctaaacccaaggtgttggtgctgtcaactgatgcggcagtaacgccttggagatgctttactggttttgaggggtagttcgtgatgcagagggcgttgtgtgggcggtgtggtcgattggttgtgttggtgaattttgtgtggtcgtggcggagttgttggctcttcatattggtctcctttaggcttctaatttgagttttaatgtggggactggagagggtggagactgatgcgtcaactaatgtacccagttttttcataacaactctagatcatattattattattaaattttatcttgacaaaaaatcagtttaaagtactattttgtactattttaaaaaatacaatcaacttagggtactattttatgctattttgaaaaatataaagtgtaatttgacatttaataatatggaaagttcaatcaatatattttacaaaatacaaagtgtaaaatggtattcacctttcatgcctatattctctttgatgctagctacaatgaaataagaacaatatatgaagaataagaaaacaatttttggttgaggtttattttttttttaagttatatgtttgatatattgttttttctttagttcatttttgatctttttcatagtttaatgtatatttatttgttttcatagtttaatgtatgtttaaattgtggattaagaagattaaaaaaaaatat

SEQ ID NO: 229382 - DNA, 1208 bp, Cannabis indica
attgtgagatacctcatagagattactgggcacacctacttcccctgggttggttggcttagttagagtatcatattgagcatggggcggtgtttccacttcatccatacttctgagacattgctgcatactttaggatgtgccgacacaagtcaccctaaaaagtatcaagtacctttcaataatgtttgtcttatacagggagctaggctggcctcagcttactccctatgggatcggatattatttaatttgaagttttctccgaagtaaaataggtttgggtacttctacttcagatagatcggtcatcaatggttgggtgacactaatagtacagccatgctgaaagttggtgagtacgctaagaagtactttattgcttatggccttcagaggattggacactaagagttccagtgggtgccattcttcaaacgctctatcctcatattgcaaattagggatagggagaaccacgtcctgtctttcttaatggagcagaggaacatacttcagttgactagtaaggccaacttccagaagtatggtttgtatcctcctacttttggagttgtgggagtcttagctgcagagggagcctatcctagagatggataagttccttaattggatgatgatgtgcctttgtcttgcattgcatagaatctggagaggaaagagagggccttccaccggtgcttggccaacaaaggtctagttgcttctctccagatcaggcttagaggctagacttttgagggacctgctcgccccttgcctacatctagaggcaaggccaaggccattatagaggattctgacagttcctcttttgaagatgatggtattttatagtttataacaccatattcttgtcttgcattgaatgcttatgattgcaatctgacttcattactttctttttgcagatatgtcttccagctgagacttctccatgggaaccttagatgagcccatgggatgagtgagggcaaaggtggcccaaacttctcatggcagagatgttgctaggtcatctctgcctcctccaccaaggcctggacttgctaggcagcctgtgatacagcctacgggacagggtgctcagaggcccgatcgaggagcaggctcaactgcggggtaaagggttgtgggggcagcccacatatgcatagagagagattttcatttcatggatgaggagc

SEQ ID NO: 229383 - DNA, 2050 bp, Cannabis indica
ttcatggtaataaataaaagatttggacattcacataattattaatatttataacaactataacattaattgaaaaactagaatcaagtaaaatcccattagaaaagagctttcaattaatttaaaattaaattggaaccataaactatttaaatttttttaaatatagagaattttaatataattaagagtgttcatttaattgaatctacattattttgttcaaaatgcatccaaacgcattaagtgtaaatttgatatccaatctaatttgccgtagtacaaattggatcatttattttagttaactttttaatatttattaaatataaattattttaacataactaagaacaaactaacataacaaataacaaatttcaaagcggaaaaaatttaataaaagtttagtttatttcaaattatatattttttatatataaatatatacatttgatacattaaatttattaatttttaaattataactttttttaaaaaaaaaatgacttatgtatttataatttttttaaatatatataaataggtgtatattagatttgatcagctactttagcatgtaaattaaggctggctttagactaaggcgggttaggtccacacctagggcccactcatcccaggggccaaaataaaaaaaatattttaataaatatacatattttttaagaatttttaaaaatactatttattcatataataagggcctaaaaatttatttttcttaaggtccgaatcaacttagggttgactgtgatgtaaatcaatatttgatcctagtttcttaatttaatcttttgcggatacctatatattactaaatgaattggattagattaagtattttatgtatagttatatatataaatatatataattttttttagaatatatataatttatttaggttaattatgatttcttctcccaaattttaacatgtaacaaatgatgtctcctgaacttttaatatcgttaaaaatctcccttgaactattgagatttaatgacttttgtccaatttagtaaggaaagtctaacatagatgaatgttccaagagtataatttgatagatatcaaaattaagggagcatgagttgatttctttctttttactagctattcaaagagtactactattgtatcacttacttggttattgaaagttttttcccaagattagactatttcatgtcttatggaaaatattacactttatgaggatttgatgtgccacaatttgttggtcttgctgtcttttaaggcttttgcgcctatttttatggtttgcccctaattatttataatagaatagttaaatgttccatgttttatgatgaattaaagcctttcaaataaaataaaagttaacattttttcaaaaatgttattgtgatatttttctattttgttaattggcttattgttactagtcaaaggataatacatttggctagttattttttaagtttcttcattagcttatgctttacttgattgaatcaagtggtagaatctaagaatttaattttttgaattatttgttttctttgtagatagacattctaatataatttatttttttggttgttgttttgagacttttcaggtagttattccatgttacaagctatatttccaacttttctggtttgttggaagacgttatagctttattgtctaaattttgggggcagttttgccctatgtctttgctcgtttactttggtaattcatggtttgacaaaacatacatttcggttagacgatgagctatcctgattcgatgagagtcttgtgcggtttgcagaaatctgcatcgtaaattcatgaatgattttaatcactatgtcaaaaaaaagttaaaaaaaagcatgatttaagtacataaacaatcactgaattactaaaattgaataaaattaggaaaaaattcttaaatctaacaatctcaataattctgaaagaatttttaatagctaaaaaattcacacataatttaaatcatgtcaaaattaaaaaaaaaaa

SEQ ID NO: 229384 - DNA, 1745 bp, Cannabis indica
gagtatcgctaaccaattgcaacatcacatgtcactaaggtgttaagcaccactagtacctaataacaatgtacttaaaatatatataaattgattaaaaaaaaatgtagcatgtgacatgtattgatcgagtataggtagttaattatagtattaattagtaattaataaatgttttggatacaaaggtctttctaatttgtctgctagtgctagtttaagtgtgtgtatgttaatacaacttgcagcaacatgatctcacagcaaattcttctgaattaattaatttttagctagtttgattcaaatataatataatgtttggagatttgtaattaattaaaaattgtttattattttagaaatagattgttttgttatattgtcctatatcaaaatctatgggtgtgtttatatgggtggatatttaggtaagagatactctgtcgaagcccggagatctcacacaacaaataagatctgtccaaaaaatatgtgtagttacattttctggccacatagttgaatttgaaaaaacaaaaccaatatgtaataagttcaataattatatcaaataattgaaaatttaaataaaataccttaaattaattctaaaatataaaaaatattttttatttaataaaaaatagttaaataagtgttgtcttggtttctcgatggacacatgttaccaccacaaaaaagggtgtcgtctccaggaggggattctccaataacgtaactaacactttgtgagttcttataaacgttgaaagagaagtcattgaagatggaactaaaggaggaagcaagcaccttgagatacgatgagagatcccaaagagaatcaaaggcatgcctagagacggatcagaaagcacgacacaacactgcaaaagctgagacaaagtagtagacgtacaaggacgtacattgagttcaagtagtggaggtgtgcttgtgtcaataccacctaacactggaccaacaatgtcgccatatcccattatcacttgtcatcggactagtacatggtccccatagagtccacttacaactcatttgtaaacaaggtcaatagaacccaactataaatacccctttactctattagaaatggagttggaaccttgtaatatggagagaatataatctgaatacaagataattcatagtttccttctcacacaatttcttttatatttcttcttgaatattacttcaccattttttcagtgcaaaatacaaggtttttagccacaatatagttgacgagtttttaccgtcaacacgttcaatttattttttatatatatttttacgctgttctatataaacaacacgaaaataacaagaaagtttttgaaaaataacatcaaaacaacgtaaaaataatatacaaataacaaaaaactaacaacaaaatagtaagcgtacaacataaaaaataacatgaaaatatcaaaagactgtattttttgtaaataaaatcttaaaaaccgtaaaatatttaaaatttcatacaaccgtaattttgtaaattttttttattgttttaatttgtgtatttttaaagtaatcttttatttcttaagctcaggtaaatctctccccattagtgggctaattataccaaattagttcactacaataaaagggaatttttatcccactgggataaaaacttttaatcccacttttacttttagagccttaaataaatttttggaacaagggccttgttt

SEQ ID NO: 229385 - DNA, 1787 bp, Cannabis indica
tatggttttaactcactctatttagtttcactaaccaataaatagacgcctaccaactagagtacctgataggccgttttaatctaaaagtcaaaatctaatgcagatttacctgaaaagagagtggatatcggcagttgtcaggtaacctcttccctgaagatcaagacatctgaacaaatacgttaatccttctggtgtgtccttattctccaatgcgaggacaaagtccaaaaagcattcaaagttcatctcccttgtctttcccccaccacttttgccacggcgaacatgttcatcaaacactattggaagcatatttaacagtattaacaaacataccaggattcatatgccaagagaaaaaaaagaaagtgtagttcttgggatagtcacatgaaacaaagaagcctcccaagttcatcaatagaattacttaaaacacttatctgtaattgtatacctctttctatgaaaatttcagtcagtgttccatctgcatattcttgaagctcttgcttgctcaatgtttggctcctatctttatcaagggcaagaaaaatgtctgcagacagaaaggatgggagtattattcaaagttccattcaaaatgatagcagaataaagctacttgagagtaaaacagaagcgtctaacttgaaatgcagtacaaacatattaaaatacataagaccatcaataagataaagcaggaatggtcgtgaaaaatgcaacaaaaagtgctgtgaaattatatgtgaagtgtacccaccacagattcgctgagcagatgtcaaagagaaccaattttcagcttgttcagtatcagtgatttcttcttcactttcctataaggagaaggacaaaaacagttcagttcaatgtatcataaaaggatgccacttggtaggttacaagcaccatttacctggtgcagctccattagttcctggagacagttacttaacaacaccttctttatacaggcctttcctgtttagacaaagtaaatgtgaataacaaatcaatgtaagcactgaatgaaacaataaccatccttaaaatcctactgcccttagaaaaggtaaattcatgaagagacttaagatgtgaggggagcagatgagaaaaagaaaaaattctacacaaaaggccaaggcgggagctcttaaaacaatctaatacaatcataaaccaataaaattaaagcacaagcacatgcctcggtttttcaagagggaaactatagattatataacaaaaacaatctacacatcattattattattttaagaaccttacatacaatgggcatatgtatgaacaacctaaaataagttgaataacaaccaacctcgtctatgagggtcacaaaagaaaaagaacttgtgtgccgctattttacagtaagtgtcaataaagccggaaggcatgtctcgtaattgtgccagattaggtataagaccatttatatagccctgcatctcctgataaagggataaaaaaaagtattgattacaccataaacagtgaagactgaaaaaagctgaagaaatgattattctaaaaagtttatacatgctgttgaaggaatccatcagaatccccgtcgagttcactcatatcaattcgggcctgtgtaagtgaaacctgaacagaaaatcacagtaagtactcctgatagcagataatgaaagtaaaaaagtacattacaaatacactattgatcagaaagaaagaaaaatcaaaactcagatacatagcgtttttttagaggcctaccgttc

SEQ ID NO: 229386 - DNA, 1188 bp, Cannabis indica
  modified_base (90)..(90): a, c, t, g, unknown or other
tatacatacatgaacatacacttaacattatttttgttttattattactagataagtgagatttgtacgtagctatagtatttactaaanattgagtatgtaccatagtgaagaagagtcgtgcatgcctagccaacctgttaaaattacatgacaagattacaacaagtttgtaaacttctaagaagtaaagtagaaaaaagttatattagcacgaaataataataaaatatatcttaatatattttacaaatcagtattattatttaaaagttatacgtatcttataataaataatattaaattagtaattaaacaacaaaaaattagcaatgatatctttcattaatagattagcttagattatattatttattaattaacttcttcaattaattatcaaaaataaaagcaagtattgcacacataatttacttttgtgaagaaaaaaaatcataattttcttctctcaaatgattgttttttttttcactataataatataattttttttttttggatataaaacgaaaaattctcattagtaaacaagtgacaaaaatcattactattactataattataatatattaaataggaagaaaatcactgaaaaaaatttaatcattcacaacacaaatttatagtatatacaatatatttaataaggtgatcatcattggttataataaaaattatacacattatatatataatcaacttgcatgtatgtttacatattggatgaatcggtacatattatttagttatatattactcctgtacataattaaaataggatatatacttatatatagggttggaatcctttcagattgaagatgtataatttaggcttgccacgttccatatttacgtgtgacatattgtaaaatttcctttattgctgcattatttaatggtatttttttattttattttttttttttaaaaaaaaacgtaggtactctatatattatattaataacaggtaataattattatatttcattgtttatatatatcgtttctataaacacgatcaaaaaagggcattatataaaaacacgtaatgaatggatattattattgcttggtgcaactagaaaaagaaggcagaccactcaatttaatcatgtaaaaaacttgacgtcatgacatacaaaaatatcaatcgattgagtcgag

SEQ ID NO: 229387 - DNA, 1446 bp, Cannabis indica
aagtatgaaaattcaaatttctcatcatataataattatgtaaatctaattttgccttcctaaaccgctacattctaattaccaaaaaaatcataacatcataatatcataatattatgtcttatatgcagacatgataatatatgtgtcatattaaagttttcgggaccctcactttcaataaatataataaaaaaaaatattgaaaaaaaaaatgccaaactattgtataatgtgcaattaatcaaccaagctaatatttattatttttaatatacttaatttaatttaaataaaagcttaataaaaatttttattttatagattttcagaatatgtagactttaagcacgagcctaattcgctcatacttaggttccaccttgtttatatgtttataaatattgcggatgaaaaaatattgatactctatatccttattttaaatagtgtaatagtgattaaagtgtagaacatatggtgattacatttgtaatgcaatgttttcaaaatcaaacttgcaccaaaccaaacatggaggtatgacttagattaaaaactcatttgtagtttggtgaaattaatcatttaaaattaaaattcagaacatgattgcttgaaaagaagaagaaaaaaaaatcaattttaagaaactaacaaatcactctttatccaagatttagtatgaattttattagaagacttaaaagaaattcacaaattgatggtatagcctatcttattcctcaagttagtattttattcaataagtaataataagttcttaagtgaaaatatagtactaaaattgtcttatctatgaattgagtatcaatattgataattagaaagttaaaaccgaaagaatttcttaatgaaacttaagtttaactaaattcacttaaaagtattaaaatctcaaagacaaatagataataagtcttcttgggtttaaaataaaacttttttatttttttggactcgaaacctccaacacacacgtaccttctatggccacttgagctaacgtcaaggtttaaaataactctaaaataagtttatgtatactcttaaatttttggacacatgaataaaagtatggctttaaaaataagaagggtatatgtgcaattataagtcattaggtagcgtttggttgtgaggaatgaaaatataggaataggaataggaataggaatgtgaatgagaatgggaataggaatggaataaaatttaaattgcataaaaaaattgatggaaaaattattaaattttttcttttgttacattagaatagtctttccttcttttttaaaataaaatagttattccaccaaaataatggaaagaacattccattagaatactattctaatattataaaatgcaaccaaacaaaaaggaataaaatgaaaattgtttcttttccattctattccatttcat

SEQ ID NO: 229388 - DNA, 1753 bp, Cannabis indica
tgtgattcgtggtgtggtggtagtaatgatgaaaaaacaagagtttgtgatcattgtttgggtttagttttgtggttagaggtgtagcagtggtggcggtgaatggtggcaggtatggtggtggtggtgggtggtggtaggtatggtggtttggtatggtggtggtgggtggtggtaggtatggtggtttggtatggtggtggtgggtaatggtgatgaggtaataaagaagagagagagaaaaataaattaagtttatttattttattattattttagttttatttaataattgagccaaaaattaataaaaaaaattaaaatgttaatttattttttaattttagataatataaattaattagaccaatctaaatgtgacacgtgtatatttgtacacatgtataatctatgttggcagccatgttggatcctaatagcgatgtgtcactagccacatgggaaaaatgataaactaacagaatttattggaggacaccttaaaaatacaaacagaatgatagtttggagggttttaccaccaaaatttaaggttggatggttaagtgcaagtgaaacgatagttgggagggtttagccgcaaattactccaatctaaatggtgaaaatggtaaaaagttgttgtgaaagattgtgaaagacctagagaaatgtaaactgaaaatggtgagaaagaaaataagagaaaaaaagaaacagaagaactccatttttcttgggagggggttcgagtactgggttgggttggatttcagggtgcttcgacttatggtcgtaggaaaagaagtagatgtataattgctaaaaaattaatgtatttctgtattaaatttgatatgaccgtataaatgaataaaaaactaattataaatgtaaaaatgtaaaaagcccaatattttttcaaagcaaaattaacttttacttgaatggttaatattaagtggatatttaataatatgacgtgtcattattttaaatggtgtgtcatgccatctggtgtccagtgtgcaggataatagcaaggtacctacagaatgtctaaaagtgtaacgaaaggtatttatgctgccaaaattttaacttaggtattaaattgcaattggaagataaacttaggtatttatgccgcaaattactcttttcgaaaataatgaagaaagaagagaagagagttatctgacattgaaaacttaggttaattactctcttctcatcactttctttatataggcttacttagggctaggttagatgagattgagcttaaaaaagagacttggattgaaatataacactctagggctgaattgcttattgggctttagagttagatttttgccatttttaatcaattaaaagaaaacaatgtgtttttttcctattttaccacttatctcttctaattatttaaattacaacttttaaatgatgtgtcatgccatctggtgtccagtgtgcaagattacagcaaggtacctatagaatgtctagaaatgtaacggaaggtatttatgccgccaaaattttaacttaggtattaaattatatctagaagataaatttaggtatttatgccgcaaattactcttttcaaaaattactaagtttctctctaaaaaatattgttatacaaatatgtttgagtatcatctcacactattcaaggtgatactcatgttggaaatattttaccaggatcaagatttactaccatgtatgtttcattaacatc

SEQ ID NO: 229389 - DNA, 877 bp, Cannabis indica
atatttcaagtgagttggaaattcgagtatgtaaaatttcattgtcatgcagcaaaagtcagataagtgaaatgaaattcattgttgtatttttggatttaatatgagtaaacatggattaataatctttcataatccatgtgcaacaaactaggaccacgactcaggccttggacttccgaccccaaacctctgcccccgatcttggaccttgatgtcgaatcatttttaaatattataatacaagcttattatgttaaaatttatggtcgtaataataaatataatacaaaactttatcaaaataaagtatttatttttatttaaatataatatgatctttatacggcctactatacaaagttttacaagcacgatgtagaacctaaaaaggacctgaattaacagagctctgaaataatcatcacataatttcgatagaggtggagacgatattcaatggctatcgcgacttaaacagagtgtaataaccatagttaagaatctataataagtgttgttctaaaaaaattattacttgaaatttcaagcatcaaggtttgatttgagcacgaatttgcttaggctttacaagaccacattggccatatcaccttaacaacttttctcataaacaccacaatgtagatgtttatttcttttatttcatctaaattgggaatataaaatataatatccgtttacagtgaaaatatttgaaaataaattgttaataatagattactaagagaaataaggtggaaaaaaaaaaaaactccacccaagatttaataattggttcattcttggcctcgatgaagtccatcttattgtgataggaatgaatatagtttacttaaactaagtaacacaaaga

SEQ ID NO: 229390 - DNA, 1417 bp, Cannabis indica
aactgaacacagttcttcaaaccaataaagaaatagatagagagaatttgttgaagaaaaaggaatgtatttattattttggtcttaatgaaatattagatacaagttactcacgagggagtgagatttcatatatatatagattgtccaaaaactaagaaaataacagaataaactaacaagctttccccttattattctaactgaataaactgaccataactaacaatttccaccttagtcgaattattcagtgtatacaaaagaatgaacaacaaataaagcaacaaaaaacaaaaaattacagatcacaaatgatagtgatcattagtagattcagacaatgtctgaaattggcagtggtaagttgcttggtaagtatgtctgaggcattgtcctctgttgaaactttcttgagcttcacttcttcctctgctatgacatctctaatgaagtgaagtcgcacatcaatgtgtttggttctttcatggaacatatggtttttggataagtgcagagcactttgactatcacagtgtacctcaatgcacctttgttttaaactaagttcccatatgattcctttcaaccacatagcttctttcattgcttcagtgcaagcaatgtattatgcctcagaagtagatagggcaacaatgtttgggaggtttgctttctaactgattatgaaattacctagttgaaaaacccaaccagtttgtgatattttggtgtccatatcaccttcataatcagagtctacatagcctttgacctctggtgcttgagattttgagccatacataagtcccatatcaaatgtgccctttaagtaccttaccacccactttgctgccttccaatgttctatccctaggtttcccataaacgtgcttatgacactcactgcttggcttaaattaggtctggtacagaccatgatgtacatcaggcttcccaccaatttagagtagggtatgttctccatgtagttgtgatcagattctgtagtgggggcttgtgagtgagacaattttgtcatgtgagtcataggtgtcctaactagttttacctctgaaaaaccaaatttttgcagcacttttgaaatgtaatctttttgagatagcattagtctctttccctgcctatctctgagtatctcaatgcccaaaatcttcttggcatgcccgagatccttcatttcaaattcagaactcggtatatctttcactttttttatctcactcataagtttgcttgctattagcatatcatcaacatataggagtaagaagactgtactcctggtgttggatgttttgacatacacacaaatgtcgtaggcactctcttgaagcctgatttggtgatgaaatcagcaaatcttttatactattgcctaggtgactgttttagg

SEQ ID NO: 229391 - DNA, 767 bp, Cannabis indica
taaaaatgtaaaaaatttataaaaattagtgtttatataattatcccatgaaaaccaaagaaatatgttttacactaatatgattggacaatgtataaataaacaaataatttatttgaatatatgtttcaattgttgattgttttttatcataaatataacacttttttttatggatcaataaatataatttatttgcataattaaaaaaatattttataaaattgtaaagttaaaaaaatgaatgtagtttttctctatgaaaattaagagaatgttttgttgagagaatcaaataaaatatttaaatagttattaaaatataagaatgtatataactagacaaaactaataaatactttcttaaaataaattaaaaaaagaattaaataattaaagaaaacaaactacggtacccaaaataaaataataaattacttacattttcaaagctgtgataattttatttttttttttgactaacaattccaaaactaacagaaattctttagttaacgtgaaataaataaaatggacaaatgtcaaattttgattgttaggacaataataggatagggagtttgggacaaaaattctttactaaatctccaaccatttacacttgaccggataatggtaatcatgtctataggcagtggagaagttagaggtaattcgaaacatcttcttcgtccatttagaagattatgaacttcaggacttcaacttcaaactcaagatgcatgagattggttcttagagttgct

SEQ ID NO: 229392 - DNA, 817 bp, Cannabis indica
gaatgtgcttcaccactgcctgtatgtgcctcatctttggttccataagacatcgtttctagcctcccaaatgtggtaaatcagccttgctataacaaccttcagcatacttcttctagttgctgaaatgatcttgttgttttttatattcgtcagtatgccttgcaccgattctgcatttgatctccactgcaaccaagttttgacttcctggaggcacttcctgctgtagtcacaagcaaaaaataagtgcctaattgattccttctccttcccacataagagacaagtctcatctatactcatatcatacttggctagcctttcttttgtgtttaatcttccccacatgactaaccaaggaatgaatttatgttttggaatgataagtctatcccatacatgtttatgccaagaaaccttctcattgttggagaataataagttgtatccttgctgaattttgtacttccgtagtaaaaaaccagcagcatcagttttctctttcaagcgatttttgactccaacaattttcttccaataccagctacaatcggtgggagtatcatactcccaccattgttggtccttcaagtatactgcatgtatccatctcacaaataagcaatcttttttgcttgctatatcccaaacgtacctaccaagagcagcagtgttccaattctgaatatttctgaagcctagtccccccgatttctttgaattacatacactctcccatgctatcaaaccaggtcctgctcctccttgaatgtctttccataagaaggattggcaaatggcttctatatcttta

SEQ ID NO: 229393 - DNA, 1241 bp, Cannabis indica
taaaaatatatattatataaaatttaagttaatataatactataatactatatattatacggtataatatgacttaccaaaataagtgaactaatgttaactatttttggtattcatgaatatatatttttagttccaaataactaaaactatataatcctaatccatatgatggtatccatttcatcaataaaagatagaacccactaaactgaatttgagtgggtttgcaaaagaattggagtgcaacagctcactaaaccacttgtactttggaagtaaaaagaaaaaagagtatggaagtcaaaggcttagcaaatgataaagttaagagaagtggatgcaaaacaagaggcttatattatatttgagcaacaaatgaaacgattgatttggtctatatcataataatatatgactaaaagtataaaagactaatgttccaagaggataggtattaggtagtcctctttctaagctagaatgttgtggagatagagcctagacggaataaggaaaaattaataattatatgatgagatacagattatcttaaattggactatgggtggctttggacagatactctgctcatgtaatcattgggattgaaccaacattacttttatccttactccaatatttgtatgtataaatgtatattctaattatcacatacatcttattattttaaaattctaaataatttataatattaaacataaaatttacaatattaaacataatttataagagacagactgatgcagtatagaaaatttgagaattctaaatgttttttttgtaaaattgaagatgaagtcgtgacacatttattctttgattgtctcttctccttgaactgcttgaagaagatcaaatcatagctgaattagaaaatgactgccacttccctagacagaattgtaaagtaaataaaaaaaaaagtaaaaataaacaaggtgaagaagtcaattttcgctgctctcatagcaaaccttgtctatgaaatatggcgcacaagaaattcaattttgtggtagaaatattcctatacaaatgtagagaatgtagttgtcaaagtcgaaaacataatgaaaaaaaaaaaattacatgtacacatggccaaaaaaagcaactagaaatgagaaagaatggtttaataccttgtttggagaatgctattagtttgtacaaaaaaaaattaagtaatgaaacatacttaatttatcaaaaaaaaa

SEQ ID NO: 229394 - DNA, 700 bp, Cannabis indica
agggacggggtcaaacaaagtggcaatcttgattttttttttcttgttgaaggctgtcgaaaagaaaatagaaggcagaagagaatgaagctctaagggggagccttagggttttaatatgatgaacttttaggggcgacaaaagtcacccctaaaagtcgcccctaataaataggctatgtttaatgacacttttaggagtaacaaatgtcgcccctaatgccattagctggaaaaatcccgcctaaatgaatgggaaattttcaattttatttggggcgacattatcgtctctatttattaaaaagttatgctcctaattggttacaaattaaaaaataaataaaccagatttctttaggggcgacacaattttgtcgcccctattacccctattattagaggcgactttttgtcgcttctaaattggtcgcccctaaaacttcaatttattgtagtgtaatctctaacccttgatcctttctatcacagagtatgatcaagatctaatcaattggatactcttctgctgttggaattctatactataggcgacggttttaaaccgtcgggtataagggcccaataaaaaattgttacctacttctcgccacatttcctacgttcccacctacttcttttctatttcccacatgcctacctattttttctcacctatttcttcttcatttcctacacc

SEQ ID NO: 229395 - DNA, 1700 bp, Cannabis indica
caataattcattaaactaagaagaaaaaagtagcttgattaaattaaaggtcaacaaggttgctgagctttgaggaaatgtaaagaagcttgaggagccaagcttgaattttctcccgaacgatgtgacactcgatctccacatgcttcgtgcattcgtcaattataggatattcgaagagatgaattgctgcaacattatcacagcataatgcaacaagtggttgatgagatataaggatgtcatttaagagggcaatgagcaatgtaatctcaagtggcattagcaataacacggtatcttgcctttacgaaggagctagacacagtgggtaatttttttttaattttcagggtataagagaatcatcacctaaagatgcagtagccaatgaccgatctgcaagtgtctacgcaggtaccccaattagcatcagagaagactttgcgagagacattgatatcaaagaggctggaagcaatataggtagggagttgtgatggtgaggtatagatcaattttcctatgatgcttctttaagtggttggacgagagagaacatcacatgaatccttactaagtttgttattaggctccattagccgagtaggagcaagttcagcacccaaaaaaatatttttcaatcaaaaaatgcaaggcaaaatgtgttaaggtacaaaaatgccactgttagatcgaacaatttcattgccaagaaatttttaggggaaacagaatggagaatccaagacatgatcatgttgttttgcaagtaatccaagaactaaggtttggatcagtaggaggaggtcgaggtaacgtactgtcaatgaatcactattttattctttgctctaatggagatagaagaaggacgtttccaagacagaaaattttcttggcgagtgagaggtgatggaacaattaaattaacaaggatgattgccattgttatgatgataggggtttttgtgatcaacaggttgagatcgtttgatggggggggataatgagtttgattagcatcgaatcccaatccaggacaatttagaggttgtgagtggaagtcttagtttacttctgataccataaaaaatgattctatttctggtaattggaatctattacataggaaagaaagaatattttatatacatactttgtaactaactaactaatcaagaagcctataactagatttagttttcaatataaagtaattaatgtattcttttagggatgttggcggcaaaaccacttgaactttacattttttaatactttaccacaaaaacccaaattttaacggcaaaacctactgaatttaagttttgttttgctcactacacttctatcaaaaaacttcagttaagtgacacagcggagtgccccccacgtgtacatgtagaaaattttagtggtccacgtaatattaattattaaacattataaaaagagttaaatatataaaaaaaattataagaaatattttctttgttttgtcattttttttcttttttttttctttttattttttccctgaaacctaatcctaacctatatcttccttaattttccttcttcttctttattattacaaccaccacattcactaccactaaagccaccaccagaaccatcaatatcaaattaacacaattacataagattgatattgatacagacccaattaagaaaaa

SEQ ID NO: 229396 - DNA, 1521 bp, Cannabis indica
aaaaaaataaaataaaattgaaaggtcattatgatactgaaaaattaggcagaaaaaagaagaccatccaaaaatttggcagatatatacatagtgaatccaatggatgaagttgttgtattgactttaatttataaagatgtgtgatcaatatttgaaagttcaaaatcatatagattgtgttcttgattattctttatataaatatatatatataaccaagttgggttgttgggaattgagatgtgtcaaattctatgtatcataatatatataagatcaattttattgcattatatatttaagatatttccaaaacttgggctgattagtatgatgtttagggtttgaaaatgggtccattttggggtatatgatgtgagtgttgagttttggaccatcaatgtaaacccaccctttaaacccatatgcccaattcaaccaaaatagagctttcattgttgaaaaaacttcttatatttttaattttttttttcttgtaaaaaacaatcaatgaatttatacataattacaaggactaacatgccaaagaaggtgacttttcaaaaagaaagattgacaaagcttgagttagattgtttagttgcaattcaagtggtgattagttctaatttttatgccttctctttttagataattacctaatatcgtcttatataaaaaaaactttaaagtctgttaagattctttttgttaaacattttgtaaataaggttgtttattgtactgctcttcgttcttgtttctattcatgaaattgttgttttttttaaataaaagtactatttttactgaacttttatctattgtaataatttagattcattgattaataaaattattattctttttcaaaatatatatataccaaagaaattataaaagttcttctaatcaaataagttattcattatatttgcaactaattttatataattttttatttgacaaatatgaattagaggcacttagaaaaatctgagtaacaaacttgttaaatccttacccattgatccaagatcaaagaaacttctcttacactaaaaaaatatgtttaataaaaaaaaaagcacaaaagcatgcatgtatattaccaaattatccttcatgaagaaaactttacgaaagttattttgagcttttatctaaaaaaagtttaaagaaaaaattactacttgatcacatatgagatagttataataagttaaaagcttaattaagctatcaaaattacattaagatatgtacatgaattgggtcccttcactaattatgtgtacatgttcctaagtgatctacaagcaacactaataattaactaaacaaattatttagtagtaattaatgtatcacaattatccacttttaatattatgttaatgttgtaaaactagaggatacaacaatatttgaactagatgcaactagtatttaaagatggtcactttaaaaataatggaattacacataccatttaaaaaaaaataaaattaaacttac

SEQ ID NO: 229397 - DNA, 1632 bp, Cannabis indica
ccccgtccccgccccattaggggattccccgccccgtccccgatggagaataagcggggatggggattaaaatccttaacggggacggggacgggaagagcactcgccgctaattccccaccctgtgtgcatccctattccaaagtcattattgtcttcaatttttttattaaaactacataaaataattatttaaatgaataaataaaatattaaaaaggttttaattaacataaattattaactatttaatatgtagaataaatctgacttttgtaccaaatttaataatatgtactaaatttagtaaaccttttacactatcattaaagcttcatttttattttaaatgagctaaaatataaacaatacaccatgctcttgtatcttacgtttttaaaaaaacactaacacttttattacaatgtaacctttataaattaagagaaatgctaaaacctaatgctagtataatatgattagtgtaattatgtattgagtgtcatataattaatgtaatattaatatttagagaaaaatcactaactaattaaaaggtactactgttggtgttcaataacaatactcataattaatattaataattaatattttttttttttttgaaaagaaacatcaatattattaaattaataatattgttatatattataataataaattagaaaaatggtggtgtaggttttgtatgatagagacacagggagaagcagaggctttgcatttgtaacaatgagcacaattgaagattgtaatgcagttatccaaaatcttgatggaagtgtaagcatcattagctaatctatctctcatttcccttttaactgattaattaataattaaaattcaatgcactattaatcattttaaaaaaaaaaaatctaatcttatttaatttgtaataaaatttaaattaaatataacatgcagcaatacatgggtaggatgctgagagtgaacttttcagacaaaccgaaaccgaaagagcctttatatcccgaaacagagtacaagctttttgtagggaacctttcatggtcagtgacatcggagagcttgaccaatgcatttcaagagtatggaaatgtggtcggagctcgagttttgtacgacggtgacaccggaaagtctcgaggttatggcttcgtctgctttgctaccaaagctgagatggacactgccttagaatctctcaatggaatggtaagtacttaagagtttatagttaattttcaataaattctctccctttacttcaatttttaacagattcaacagatttatacatagaattatgaaaaaaataaatttaattgaattagtttgttgcaactatattatactaaaacgttttttaagtgatttaaattaataaatgtagagaaatattaaattacatcaataataatatattatataattttaggataatactattgtacccacattaaattttaattgataataaattgaatactgctattggacattagtgatgcttaacactttctaggcgtgtcaccttgcgatgggctagcgatactctctaaaagttattacattaaactatatagaaccaatacttaattgcaccaatatcgatattgacac

SEQ ID NO: 229398 - DNA, 2978 bp, Cannabis indica
cagtctgcaatattccctctagctctagcaaaaggagggtcaagttaattgagctttccaagcaacacaaccctcacctagcagcaagaaactctactcacacttagattgaatccaatccatagggttgtcccattcgagacaccgtcatcatgaccagaagtacttatgttaatcttacactaatcatccagtgggaagtttcaaaaccattgaagcatgaaatttttgacttaataatatgcagaataaatcaaaaccattgaagtatcatgagatttaaatgagagcagtagaaccaaattctattagcaggatgacagacgaggacattatgtgagaggaatcacagaaaggttttgcggtgaagacaatgaagtttttagcccaaatatccttccagcaagaataagaaagaggaaagatattttgaatcccctgacattttatgatctccaagaaactgttcagtaaacagcattacaagaaaaaagccaggaaggagaaatggcaaaattctccaatgatcattgtacttgtctagttttgaaggattacagcttaatgcttattacgtatttttacctttactgctactaactccaacaatagaaggctaattttgtcctttgttgtcgcataaataaggttggtagttgcagtggataaaaggttaaactcaaaatgttactctgaaacatgatacaaaagctattttggcaaaatagtaataattgaaggaatgattttgcaaaatgagggcatgaaacaggagagtgaaaataacataaaatgtacagtgcaaataaagctcataaaactcatgtttcctccaaaaacttcaaattcttaatattgcagaaaagctctctaaagaatcactgaaactaatttgagtcaatgtctggagcataaaagtgactgatgataaaaccacctacacaattgcttcagatatcagagtaacaagcactaccaacaaactactgatgccgtacatttttcatcattcaagttgtacaaaaactgaactaaggaaaatgggaaccggagagtttgagacattcactctggcatcttcggaggcagatatcgttccaatttggtacttgatgttgattaacgcaaacagtgcgagcacatgcatcagcacaagcttcaagctcagatactccacagacagtgacacaggtatcagggattggatcctttgagaatgccccaacctttttcagcattctctttgatgtacacaccctctcacatacaaaaatctcatcagaattcttctccctaccccgggcactctgcaatctctgctcttcagcatgctttttcttcattctaaaagcttgccctgcaacaacagcggggatggcagctaaaagggaccaccacacttctaccatcactgcttgaaaagatcaaaatctacttccctctctacctatctttagtccttcacaaaagatttgaactattaagaactctataatttgctttaaacatcattttcatgcatacttgataaaaagtttacaaattcaatttggcataaatgcagcagtgaggcttataatgaatagaaccatgtagtgtgcaagtgtgaatatcctatgaatgacactgatttaatatatccatgtaggatacctgcttgatattgtttctctgttcttgttttcaaagttatgttctcaaaaaattgaaggtgtttggctaatgttttctaaaaaagaaacccagaatacaagaaagaattcagacttttataatacttgacaaaaaaagaaaaggacagaaggaaaatcaggaaatgtcgtttaaaactttccatgagcaaccagtcctagttataaaagttatacgaatacatatcatataaagttgttattattaaataattttaggaaaattataactctatctctatctctatcataacgaaacagtttgtcagacatagcgatggtgataaaacaaataaagaaaatcatgctcacttaattatcagcaagacaatgtgaaacacccattttccactgcaacaataccaataaggtgcctacattataaattactaacagaaaataattaatagtaataataataattaaaaaaaaaaaccttatctaatccactcccaccattttcgaacccaacccagataaaagtaagaaaagaataataaacttcaataaaaaaaaaaaaactaatacaataataaccggaaaaacggatacctacaaacaagaacaaggaaattatcatagagatactcacccagagcgaaattaggagggctctgatggagtcggggactaagagtaacaggcagtgggcgagtgatagtaagtggtttttgaacgcagtgtgcaaaaatgcgaatcgaggcaggaaggtagagagagaagccgcgccggagttctgctgccgtgctgaacaaggattttggggttaggtttccttttgttagtaatttatttatgttttaatttttatttggaaatttgtattgttagggtccctttgtcaccatttttttgaaaagtgaaaagctagaaaaagaaaaagtttctgaataaaaaaaaaaaaaaaaaaaggttaggtaagcacttcaaaaataatctattaaggaatttataactaaaaaataagattaaagaatttataaaaaaactataactaaaaattaaagttagtataacttagttttataaaaaaaaaatattttgataaaaagattttataataaattattttttattaaaaacgtatttaattatttattatatattatagaaatttttacatgaaaaatccattttgcacaatttattacaaaaatactcatacacgcctatatcaacttttttacttacaatgtttgttttattacacaaataccacatagtcatcatttcatgcacatacacgtgtgctttccccatccctcatcaatcaaatcctactctctt

SEQ ID NO: 229399 - DNA, 2715 bp, Cannabis indica
tagggcacaaagcccaacaaattcctcttggtgccaagagctggctgtttgtgctatacgatctatctggcaagatttgaccgttgtcaggcagggaagtgtttgtccatgttcgaggaacatgtttggactatttgtccattgtatacctgcatgtagaccttgtctgatctatttataagccttctttgcaaaggatctcttatcagatcctaacctcttctagcacttctctcgttgagctaccttatcaggtcattagcctttctagtgcggcagtttaactctactcggtgggctcagaggatggcctcttagtcatccatctaccttaggaatttatgtctctgctgggcaaaagaatcacaaccagtagcgcgtggttcttcttgttctttctgagtgacctggcctatccagctcaatatcatctcctagggccaagtgaggctcaccaataactagtttgctaattcctggccctgtttcacctgtgtagcattgtggaacaaccacaattgtgttctgtggaggttgttccatgttgatctgctcttctgcacgagcacctgtgtgttttcccgaccatggaagaatggcaggattaacatgatttgtaagtgttatccaaattagtaggaccttttgtggtgggaggaacacaaacattgagatctgtcatcatgggatcctacggaggatacgaggggggagttcttatggtttgaaccatagtgattgatcataacgagataaaagaattaaaaaaggctctcattgaaagcacccaaatgttgactacgaatttggtcaactaatagcagagccttattaattgctgattatcaccacgtataaacaataaaagcaagtaaaggaaataatacaacaatttatagaagtttggccccctggtgagcgagtaatgacttactcctcttttagttgtattgattctaaagataataccatgcatattacaagttttatcatgtaatttctagctatgactctcttttaatgttacaatggtgagaactgagtgtatgatagactaagaactgataagttcttgtgaaggacttaaaaagatttttgacttagtgtctaggaagcatgaatggaatgtgagaattgagagagatattggcttgtacgtatatgaggctgagatgagactttgtagcttatggaagggcttaaagaatgagagagacctaatgtcctttatatagtgtatggcttagaaaagatctaattcaagtaggtaataaatatatcccttttagatagggatatttgcatctttttatctattatctaagttataaaaatagataatgaaatccctagaaaataagactaatatctcgcgaaaatatccctatttttgtgggatgttgggcctgtcccgcaattggctatgttgttcagacttgttcacataagttggtcgaccaaccttattttttagggtctggccagcctatgacccctatggccagctaggtattttgcaacctcggtatgtgcttgccaatttttccatgtgcctgctagcattttcatgtgcctggcagccttggtatgtgcctaccagccttattaggtgtctactagcctttctagcttctttgtacaaatttccttataaatgtcagacttccttggtcgaacatgcattttttggtctgacagttactctttggctggctagcttgtgctcaaaccctggtcgatctacaagcttcctttggccagcctatgtactttccttggccagctagctgtggttgtttagggtcttgacgacctgcttaactcctttcgcttattgcttgacagatttacttgattgctttaaaacccttgacaattgtcacgctatataaggagactttgtcctattattgacgagctgtattctacttgtcctcaatcttgactatatggacatgtcacgtcagatagataaaatttgtaataatacttctaatttaatttagtataataaatgtataaaatactataaagttatttcgttttataatttttaattaaattttattttttaatcaaaatttttaataatatatatatctaacatatatataatagttctttgacaaaaaaaattatataatagttatatattggaaaaatatattatgaatattaattttgaatttattaaaaagctattacaataacccaacatgtcataactataagatattttagtatatatattttttataaataatacagccataataacatgataaaattataaattatttaaataaatatttttaatactaatatatataagttgcaattaaaagtattttttgaaataaaataatgaataattagtatttttttcctttgaactttcgacactatttgattttgtcctttaaaatatacgacttgttaaaaattcttcctaaaatataacagttacataacaccccttctgttagattccgttaattagtatataacagttacattagtagtatgatgctccttctgttaggttccgtttattttaccgataaaaaattaacatttttacccctgaacttttacaaaattttgcctatttttttaaaaaattaattttaaaaattataatattatatatttttaaagcaattatttaactttagaaaaaaaagaataaaaaattattaaaataatattaatttt

SEQ ID NO: 229400 - DNA, 2064 bp, Cannabis indica
atcttattaaattaaaaatttagcccacatgtaatttttgtttaataaggtttcatatttaagcatgtttatacattggtaaaaatatgatttatttaaacctcaaaattatatattaataattatgtaattttattacatcactattcataaatttctaaaacactagtagaaatttctaaaatttactctgataacttcatcacaatgtacagttttttactgtacaattaaggaaaaataaatcacacttcattaccaccaattttcatttgtataaatttattttaatatagttattgtaattattaacacagtggattattaatccacattcataatttcttgtaaggtttacaaataaacctaaaaaagtcagtaactgtgagaaaattttatccatagacaagattagttctcatatttagcagtttaaggaacaagcaatatagtagtgacattattttaaaattatcaaagacctttatgattaaagtttctttagaaacttgatctagacacatgtctaaaggtctttactacattaatttacaaaatgatgtcacttataaaaatatgcatgttcaatccggcaacaaataatgtgttattaataagaattcatctacattatagtactggagattgtatagcttatctccataaagagaataaatgttagtaaatggtggggtactagagattgtatagcttatctccataaagagaattcatctacattatagtactaatgttttcagtcgcctaacaatcagtgagaaaaaatatagacacttgcctaatgaacatgattggtttttagcaagtatgatgtgtgaaaagttgaagttattttacaatgttactgaaatattttttggggctcaatatcctactgccaattcttttttttttcctaagatatgtgagattagattgttgctcaatgaatgtcttgagttagaatgtcttgagataaaatttatggttgaaaaaatgattgaaaaatttgaaaagtattggtctgtgatacatgggatattggccatatatagcaacaattctagatccaagatttaagatgaaactgattgaatactacttccctcgaatttatggtgagaagtcctctatagaaattgagagagttcgaaaattgtgtcttgatttagtgggggaatacaatattaatcaagatcatggaagtactatcaatcattcattgagttgctctgagcatgataaggatgttgatgagtctgttgatgatttggctggttatgatttgttagttactagcacaaccaatgtggatacttttaagtctgagatagagtactacttggaagaggctgttttgccaaggatttctgaatttaacattttagcatggtggaagagcaatgggttgaaatatcctactttacaaagggttgctaaagatgttttggctataccagtgactacagttcctttggagtcagcttttagcactagtgggagacatgtcactcctcatcgtaacaggctacatcctaacactttggaagctttggtgtgtgcacaagattggttatgggctgagattttaggtatgctatttcttgctcttttttttcttcttcatattttagtcatttctaatagttttatgtttgtttcttagattcatctacaaaaataccaaaatattcaacagtaaatgaagatataaaagatgatgatgaagaggtaattattttttttaattattcgaatattatttacttcaactatttctattaatagttataagttttaatatatttttcttatatgttattacagggaccaagttatgtggactttgaaacttgataaagattatgatgactgatgatgaaggctgccatagaagatatatttatcttttatttatggacttttaagatgtttagattgatgttgaagaactttttagactatcgttgttttttttaacagtagactatgttagtttttttaaggctattggtggatttttatatttcatgtaatagaattattatggttattatttgaatg

SEQ ID NO: 229401 - DNA, 1171 bp, Cannabis indica
tgaataaaatgatggacgaactacaatataaccatgatacaacacaaatacaactgaaatactaactgaaagaaagatgccaaccactacaaatcaaggatgacaaaagactgatgttctacataaagttattaagtaaagaaactaatttcacgcaatacccattgtgtgtgaacaaaatcaacaacacagagacacaaacttttttggcacctctgaccaatcaatgatgtataacaatatgatgatgacagcatatcacaatcactcagcataagcagatgtgcaacgtccttataacaacccaacaataactatctgcagcaacaattgaatcagttcaagatgatgctattttggtcgacactatgactttaacatcagagtcaaccatacaacaaccaaaaaacaataaaaaaatactcctacagaagatgaatattttgacttcaccgactacgcaaaacttgttactgcagaaatagtacaacaacttgaaaataactagaaagaaaagaagaagtcgacaacacaattataattatcatcactgataaacaaaacgaaacaatagaaaaggaacatatttataagaacaaaggtacattgataagtgtcctctactactttgcaatcaagaaaatattgcactacaaagtagtgaaaatcttgctctaaagaatacaatattgtttgtttggactcaaattgtaaatagagttcgaaggcttcaaaaaatagaaacacaaaaatattcataataaggagttatcgagaagaacacacatgtgcagttcaaataagatttggagatcaatgacaagcaactgcaaagttgatagcagtttttcgtaaaaccaaagttcttgaacctgaaaaacaaagtgcatgtctgcaaatataaagggagaaatgaaagacaaatacgaaataaagatgaattacatgaaagcgtggcgtagtagagaacgagcacaaagtcagttacatgaaaatcctaaagaatcatataatctattgccaagatacctatacttgctacaaaaaacaaacccaggtaccataaaattaattttttgaaatataattaattaaattggaaaaattgtttttgggttgctcaatggttgaataacagttgttaaatattactgttactgataaataactg

SEQ ID NO: 229402 - DNA, 1301 bp, Cannabis indica
attgtacccaaaatatcctgacaagggcaaaactggtacaacgtttaataaaataggtaaaaataatagactttaaaaaaaagtataaaaataaaagagaacaatataaaaagaatatagagtgtaatttcctctttagaaaatgtggggtatgatatgtaaggaataaacgatatttatgagagaatttcaaaaaaataaaattacttgcaactactcgaaaaaagagtaaaagaaaaaaaattagatatatacactttgtaattttagtgtttctttaaaaaaaaaaatagcaataacaaaaaagatgttccaaggttatcaagaaagagtctttcatgtgcttcaaaagaaagaagattttggagtaatatttgaatgtaatggggtgagtcgattggaatattaaaacttatagtataggtgagcttaaacaatattttttatctacctttatctaagcctaaaagttaaagcccattaaagtctttttgatttcaaaacatatattgttgacattagtggagaaggttaaatgatgcaagcttattgataattagtttgtggaattgtatggattgagtcaaggatgtatagtgattttcaattatttatttttaattatgagtcgtattcctttttctaatttgagagctaaagttagtattgggagcaattggattgaaaatctagttttataagagttgaatcttgttaatagcggtgatgtggtgtgaattgaagtaaagcttgctttgtgttcatttattttagattattctcaatctttactcgagggtgagtaaatgttaagtttgggagagtttgatagactatttctagaggtgtgtttcagttgattttatttattttatgaagtttttttagaggtgtgtttcagttgattttatttattttgtgcaaaattatgcttgttttttttacttatttcaagtttgaatggtaaaattcataatgtgaatttaaaatgagaagaaacatgttaattgagatgaatatgatgaatttatctggaattttaagttctaatatataattgtgtgaaagattctaagttttggatgctcaacacgctcagcttgtgattgaaaatcaagtctgaaacttcaagctaatttttgactatgatgtgttcactttgagggaaaaatattgtgaataaaagttctagatttctctttcagcttttcaaaaatcttgaatcgtctaattccaagcaatatttaaagagttatggccaaaaaattattagtcatcgcactaggaagctcactaccaaa

SEQ ID NO: 229403 - DNA, 1446 bp, Cannabis indica
ttaacggtaaaaaaaattcaaaggtaaaaattactaattagccattaaaaaaatataacataaataaatatataaaaaaaaagattaaaaaaatttgttagataccaaaataaataaaggtatcagtttaagatgatgaattctaaaattaaccaaagatttatattgaccatatgagactttttgttctcgttatttattattgatattgattttagtcagtcgccagtcgtcacacggcaattgcagttctggaaaaaattcaaatgacagcaaggagaatgctaccgtacgtggaaactggcttcatatacatcaccatcaattaaagactttcccgacgagctttaattttatttgcaacttttaacaattttttgttatggagcattaactaacacgtgatgtacaactacaaaagaaattactttcataagagtattggggtttaaggtgtccaatactactcaaatatcatacattctaagtaattaaaagttttctatactatttattaaattaaaatttatgaacctattgttaataccataaaccatcttttattatacttgacattttaaaatacaccttaatatttttcacttcataaatattgtaagacactataatatttccacataaagaaagacacttctcccgtacatagagttgattttaatagtgctctaataattcaatattagtatatacttgtcggtgtttaatttgtgctcataaagtccaatgataacgtagaagactaaattaacctatacatctacttcattgccgtatcttaggcatacaaaacggttgagtaacatgtataaaatattaataattactcgcacattaatcatgctactaaaatgcttgtaaaaccattaattgtgtttctgcatatgctttgctgaaaaaaatcatagacgaatacaataattttattataataattattacataaaaaatataaattgatattttatttaccaaaatacttctataagataaggacaatatttatactttttatgtgattttaattaccaaaataccacttacactatcacttacacaattaaatgatggttgcagtgtggttgctacgtggttgtgcggtggttgcatcagacgaaggtttcaatcagacgatggttgcaagatagttgctaggtggttggccgaaagttgcatcaaatgaaggtttcaatcagacgaaaggttcttggtggttggccgaaggttgcatcagatgatatagctgttagcaaaatatttatgcaactgtaatgcaactattgtgaaacattaaaaatcagaatagtatatctacgtacgtaactctatttacatatctctttatgatttaatatgaaaaaattcatcattagaaatttagaaaacaacaaaaatacacctagataaacattttactatagtattgat

SEQ ID NO: 229404 - DNA, 1724 bp, Cannabis indica
atgatactagttttgtcttagcttttggtacttgaacttagaatggttgtttctcttttgatattatattgttgaggcctttgtatatctactctagggtcttgcttgtgtgtcatcttgtttaccagaggatagtgttggagtctgattgccttattgtaattaatgtcatccctcataacaaggttgatcaattattgttaaaaatatccttatttattgtaaaaactttatttatatttttttttatgtattatcctagggatgctaatagtggctcgcactttagctaagctagcactctctttcaatgatcattatgtttggtggcttaactactctaattgtattattgttgacactcttttccttttgaagtttttatcactagatatactcttgtagttttaacggttttaacgaggccatttttccttttttaaaaaaaaataatattttcatgtggcaactacttattataataatgtttctaattatttcaactcaacacctgccatgtccaacctaatacatataatataaatatctgattatttgtcatgattaatcttaatacatattttctacccattgaaatttaaaataatttagtcctgtgtgggggcttcatttgtgaaaattatacaaattatctatgatgtatctctctgaactcaaatttcattttattcctatcatcatattatataaagtaaaaaccagctgaggaaaaaagagagttatcaaaacaacaacaacaataataataataatatattattaattactcatgtcaagaggtgcctcatcttcatcatcaccaatttttattagtattaatttcactactcatttacatgttatcttcttcttatttctatcttcaacaacaacaacaacaacagctcaacccactacagatccctctgaaggtcacttctctctaatttttctctttcacaacaatataagattacatatcatgtcttttttttttataattaatttaattatagtatatatatatgcagtgagagttttgaacaggttgtttgaaaaatgggatataaaagcagatacgcaacaatggaacataagtggggaattatgcagtggtgcgccgtagctgatacaccaaccatcgaagatccatcctataatcccttcatcaaatgcgactgtactttcaacagtagcactctctgtcacattacaaaactgtacgtaatactcataatttggtcattggtacacaaaataagatgcattcatatatctattttttctttcattactctcgtgctgaaattatacatgaccatcatatagttagtccatgcataatatcaccaagaaaggaagaagtatttaggattatttgatatatattagatcttgaatttgaattaattaatttttgtttgattggaggaaaaacttatgaatatattggctataaaatgttagagaatttcacacatgataatatgtaaaaattaaatactatacatataagattagctactcctcttatagtcaattggttttgagatggaatatcatgcatcttattttcatgtttctcaacatggtaatcaaactaaagctctaacgagtaaccgatccaaatccaaaaaccattccaaaaaaaatcacttgtgatcgagtcgtgtaaaattgattaacaaataaatagccaccggatgttaaagagtctcacattg

SEQ ID NO: 229405 - DNA, 1824 bp, Cannabis indica
ttgttaactgttactcaaggtatttagaaaaaggttactgtcatttatgaccgaccttctgttgaggtatatcttttcatagttttagttgtttttattctatttattattctattatggttggtttctttcttgttttatttcagttacattactgtttttaaacaggtaaagactttttatgatattgatgaccctaattctgaggatgctaatgatgacaaaggattaccaaattcagagaatattgaaactgagtctattgatggtgatgaattgggtgaagatggtggtgctggctctattgatgaaaatcagtgtgatgataaggttgttgcagatgcttctactattggggaggttcaaggtgatgttattgtaagtagtgaagataagtccaaggatgttgataatgtcaaggacaaagaagttgatgtaaagggagatgattttttcaagagcttaagcttgcatgagattgatgatgaccaagttgtttcggttggtttggaggttgttgaaaaaatcaatgtaagttgatattttttttttatatttatttatattttttcagattgtgttttgtctagtagttgttttacagttgttgtagagttttgaaacttttaattttttcttgttatctttcttttcatcaggttccagattccattcatgctgaggtaattcaaaaatgagatgccaatgtttctaatgaagaagaggatgacactggcgcttgtaatcctctattggacaatagaaagtgtgccctgacattaaaatctccttttattgattttgggtctgctgatttgaagagcagtccaatagaggtaatgtcctcaagttcttaatctacaggagatgagatggatgttaagattgttacgtatgtgaaggcctttatgctcttactgattcttttttcgatctcgtctctcctgaaattgagactaagtttgatgattggattagcaaaggattgcttaaatatcctacgtgataattttctttattctgtttttatctttctttgtatgaatttgattttattttgccaattatttgaatcatcttttttcatattcatttgttttttatatggggcttataatgtttatgaggatggtgcgaagaagttttccccggggttcagattaggtgtagattatgttgaagataaaacttagttttatcttgctgtgacatgtttatcaatgactcggtaatatttttaaatccatttatagtttttgtagttttaatatagttgttttatcatttttttttcagttttgcttttgttattatgttattggaatgtttgttcacgttcatactatgtttctttattgtgttgttttagcacatgaacactatattctattaccttagaaaaaaagaaaaatattcttctactattactgaaaattttgctacagtagattgtctttttgatgattctatttagtctttataccatagattctacaaggctaagtcattaaaaacgaaaatgtctcacattcatgttgctcacccaatagcccattatattagaagcttacaaattccttgttctaagccttggtatgaagtcaaccatatcttattcattataaatcttaggaaagagagccattgggtttttggccgtctagatttgaacgaggaaatgatatttgttttttataattctttgaggactgccaaaataattgttgcggcaaggaatgcaatgaatgcttattctattctattcccattgtttttttatcttcttgggttttggaagaataggtctgttgggttttgtgccct

SEQ ID NO: 229406 - DNA, 3400 bp, Cannabis indica
cactgcccattacatctagttccaatttctgagccaatacatgtacctaaacgcacctttaggttcgaaaattcgtggttgaaagaacctatttgctttcaagttgttgaagataattgagagctgtcccatggccttccaatcacagaaaaaataaaagcttgtggtagtgctttgttagaatgggggaaagactacacaggtaactttgggaagaggatcaaagcttgtaaggttgagattaagaaatggaagagaggaagggatccaaattccattgcttgttataaagaggctgagtgtcaactaaataatactctagtttacaaagggacggttttctggaagcaaaggagcaaacagttatggttgagggaaggtgaaccgaaatcaaaagaatttcatgccaaagcaacatctagaagacgggccaatgtgattcagcgtctgaaaaacgtcgatggagagtaggtgggatgggaaaccggtcttcccactactgtagtgaattattttcagcagctgtttcaagattcagcgaatgatttttcctcggttattacatgtgttcctcatttggttactgaagaccaaaatgctttgttacttgaggaagttactcatgtggaaatcaagaaagccttatttcaaatgcatcctgataaggctcccggtccagatggaatgacaccaggattctatcaaaaattttggcatttggtaggtgatgatgtggttcggatggttcaaggcttctttgctacgggtgagtttccttcttctttgaatgaaactaacattgttcttattccaaaaaagaaaattcctgagcaaatgggtgatcttaggcccatatcactttgtaatgtcctttacaaggtcatttcaaaagtgattgctaataggatgaaagatgtcttgccatcagttatctctactaatcaaagtgcgtttttaccgggtcgtttaatttctgataatatcatgatatcctatgaggttatgcattacatgaaacgaaaacggatggggaaagatggttttatggcggtcaagcttgatatgagtaaagcgtatgatagggttggttgggcttttcttgaggctatgttggttcaaatgggtttcaacccaagattcgttgctctcataatgtattgtgtgtcgactgtgcgttacaatgtcacttatggtgggaagactatgggtccgattgtaccaggccgtgggatacgtcaaggagatcccatatctccgtacttgtttttggtatgtgctgaaggcctttcttcgttgttaactctttatgagcaacgtagatggttgaccggttgtaaagtggctaggagtgctcctcgggtttctcatatgctatttgctgatgatagctatgtgtactgtaaagcaaatgtgagtgaagccacacatgtgatgcaccttcttcgaatttatgagcaagcgtcgggccaacaggtgaattactctaagtcttcagtcttttttagtaagaactgttctgttgaaactcgatctagtttgtgtcagttcatgggaatggttgaggctggggatgatagtttctatcttggcttaccatgtattctgggcgaaataagaaagctattcttggctttttacaagagaagatgaagaagaagatcttcacttgggagagtcggtttctatcaaaacaaggcaaggaagttttactgaaatctgtagctcaggcattgccttgttacgccatgagtgtgttcttgttaacgaaggagatttgctctaaccttgaagggttgatggcaaagttttggtggaagtcccagtcacaagcggggactaaaggagtgagctggatgagttggaaaaggttgagtagacataagaacgatggtggtatgggatttagagatcttcgggattataatcttgccttccttggcaaacaagggtggcggcttttgactaatgaagactctttagtaagcaagatttataaagctcggtattatccctcgggtagttttcttactgctactttgggacaaaacccaagctttatttggaagagcattttggaagctcaaggactggttcgagctggtgcaaggaagtcgattgggaatggttctactgtaagcatactcttagacccttggcttcctgatccatctaatccctatgttgtgtctgatcatccaggtttgttaaatcacaatgtctcaagcttgttctctgaatattctaaaagctgggatagtgatgttcttactgacttgtttactgagagggataagaacttgattttgtccatccagttgagtgatcatgccactactgataagtggcattggagtgaagaaaatagtggtttttacactgtgaaaagtgcatattggttgctgcagcaggcttctcgtgtcgctgttgctgctcatgatcaactgctatttaagtttttgtggcagctggacattcccccgaaggttcaacattttctttggcgagttcttgtgggttgcctacctactaaggttcaacttggcactaaaaatgtaaatgttgatttatactgcccattttgtaactcggcgttagaaaccattaaccatgtgctaatcgaatgccgttttgcaaagtcctgctggtgcgtttccagcgtgtctgctggtgctggtattgcagacttcagttcgtggttttctgctctctcacgaacagcttctacagccgtggtgcaggaggcagcggttgttagttggcgaatttggtctgcccgtaatgaactgctatggaataaaaaagtttgttctgctatggatgtagtccgatcggctagagtgttgcttgaccaatatctttctgctcaatctcaaaaatcgggtgctttattaattgataatattaataatgttgacgagcagtggaggaaaccaatagatcatatggtcaagataaatgttgatggggctatttttcagaatcaaaacaaatttggctttgggtgtgtggcccgtgactcgaagggtctccttcttgaagctatttctgcatcaaggctaggggtggttaaacctgttatagctgagataattggcataaaggaggccttgagctggatagagagaaaacaatggtccaatgtggtgattgaaactgatgcactggttgtggttcaagctatcaatagctctttttcaatgccttctcagtttggtttgcttgtgggagattgtaggactttactgtcttctttacttaatgtgtctttaaaatttgttaagcgatctgcaaatagggctgctcattctcttgctagagagtcttgtttttcgtcagattgtatttttaatcagcataatgtttctgctgagttcaactctattgtaatggctgaaagtgt

SEQ ID NO: 229407 - DNA, 774 bp, Cannabis indica
aaagattgtttaattttttgtttaattattgggtttatttatttgttaacgtttaacgttaacagtctgttaagttaatcgtgtaagccaaaataaaaaaagaatcgttaaaccaagaatcgttaaatcaagaattgccgttagataggcacttttaatatataaagatatatataaatcctgtcttttaatatttttcctcttattttattttaattttttttatcaaacgatatgagaattagctaggcgactgattattcagctcgtttttttcaatcctaatcatggtcgtgtcgtcccgattgaattgcatgctattattttagttaatttacatttataaaatttcatgatttattaaaaaatatatatatgtaataacttaaatataattatattttttatcaaaaataaaaacttaaatataactatatggaaaatttcacaagattattttattcttttttatataatttagagttttgaaattagtcttcaaatatatatgtaacttattgggcatgcatagacatatgaaaagagaaacaagcacatattacaataaagtatttcaattctaataatggtattttattcgatttaaatttttaaaaatacaattatattgtgatgttgttttaattaatatattttattgatttgcatgggcagctggtaaatcatggtgttcctgaatatgttttcaaaagtgtttacaaagcaatatcagaatactttgatccaacgatgatagaggatcgtatgaaatac

SEQ ID NO: 229408 - DNA, 1725 bp, Cannabis indica
ccaacggactgtggaatcgtatttactaccgatgctaccacgtcaacacaataagaacattaaagtaaaagagacacaatattttttatagaggttcagacccctcagtaagtgggtaatgacctactcccattttggttgtataaatactcaagataataccactcagagcacaaaggttggagattctgaagtggctctcttaagattaaaatatgagaatcaaaaggaaaatctcaagtatgaaagagagagagcctagggcgtctaggagagaagggatgagagaattagggtttctgacttagaacttgagagattacagatcttgagatagagaaattagggttaggttaacgctctttatatatgagagcttacaagagattaataaccaattatccctaaaaaattggaaacatcaagtgtttgttacataattaaataataaataataaataataaatgggttaattatcccctaagaataggaaaatagctgatatttctccacttattttgggggttgttgaggcccaaatcgaagcttggcttattgtcccagatgaaggttgcacaccaagggcctgccacgtgcaggctggcagaccaagtgcctgccagggtcttgcccgccaagtgcatgcgagggtctggtccgccaagtacctaccaaggtctggccaaccacgtgctaccagtgtctggccagccaagttgtctctagggtctcgccagtctattgcctaccaaagtatggccggccaagtgcttgccaaggtctgcctggaagtgcctgccaaggtctggcaggtcaagtacttgccaaggtctggcaagtcaagtgcctcccagatttgccaagttttggccagcatttgcatgtgttggtcagcctttgcaccatttttcccgcaaaggcaaggcttccttgataaatcaggccctttactggtctgacagtgatcctttggtcgacaagcttgtgctcaaaccatgaccggcgatacaagcttcaccatgaccagcctatgtactgcctttggccgaccaaacattgttgtgcaacttcttgacaacttgcttaactcctttagcttattgctcgacgattttgccatgccttataaggagacattgtccagctattgacaaagtagtataccatgcgtcctcaatcttggtttaggtgaacatatcatatcaggtgaacaaaatttagaataataaacttatttactaaattacataaaaaataccctgatattaatatattttcttactaaattatataaaataattaaaaatatacgtaggcgagtttcagtccccaggcaattaattggctctgaccgtgcttaacaaaagggttatcttaaagttaattacgtaaatgcttttgtagatgtatatttttatttagttgttatgataaatttaaggaaaattactctatatatagtatgttttaacattttttatcaaatttatgatttggatttcttaggttattttttcggtagtttttgtgtgggtttccatacgaattttagttgcgataagttgctccattagttgcaataggagtttttatgtagaattaaaaaatacgaaaaaaaatatatttaaagtgtaaaaataaaaaaaatacattaattaatagtgtagttgactaattgtattctataaataatatcatcacagaatattaataaataataatag

SEQ ID NO: 229409 - DNA, 1866 bp, Cannabis indica
ataattagtagtttagtactaattctgtttttgtgtttgaagtgaacatttatgactgttatttcagtataattaggcaaataaaaaggacaatgataagaatacatcaatatattttattttataaaaatgctacaataatcaagaccatgatttagctacttctttggaattgtcatgcaacaaaagttgcttaaagattggaaaaacaccacaactaattgatttcttccatgttgccagaagatagttacaacttacaagcagtaaagaatttaaaccccaaaaaaccatccttttcaactttggtcaccttgagatattcctccatctgagaaagtgttaagtctaattctacctgggattggaaacttccgagggctcgcctaccttccccttccccgagtctgatttctgttcttgaagattatgtccaccgcgaggttctttctcagtatcaatgcatgtgcttgattcggaggtactcttgccactacttgcctcagtttctgcagtatcttttctctcatcatctctttcattgttcttcaacccatcactgctgctttggctgttttgactcaacctacaatttttttttgaggggattcctcgagttttatctagcctttgttttcacttccctcaactcaggattacctgtttctttttcttcaatagctttcaattcaagttcttttgctttcttttcatcttcctttttcttcttttgctcaagttcctgagaaagtaattataaaataaactgagagatcaacattaaggagaatattggttctttggagttggaaaattcacaaattgaacaaaatttacagataagtaataaaaatcaaaatttagtcacctgttccattcttcttatttcataacgagcatattgagcaactaaatatacagctgtgatacatgaaataatgtaatttagataagagtcgcaaaatcaatagataataatagattatctgcatgaaaattaaaaatttagtaatacccaatgaaggcatcaagacaaagaagagttgtactaggtgaaaatctaacctgacaaaaatattaataagcaacaaaacatgtcaaatacaccaaagaacaaagaaaatcaaagtatgaaaaacatgaacttgtactaaaacttatgttttgttgtcatatcacccccaataaacatcatgaatttatgctaaggtatcaatttttgctgtcatgctgctaatttcagaattttgaacaattcctaagttaactaccttattctaaagtactatcccagtgttttttaatgaaacctaaaacaaacataaatgtgttcgacaaaatgcctgtgagaacaaaacaatcaaacgagaccacacaagatgtaaaactaaccattgaagaagagattttgaggctacagaaaatacccaaatttctttctcttgggaggttcagtaaagaggatcttagcggcggtcatgaagtcaagattgtctagttgccgatacgactcgtcgtacttagtcaaattggactcagtcttctcgcgaacgccgccgcctttgttggtagagctcgttgtagtgggattgcttgaaaatggcctccccattttagcaagtttaaaatggttcaaagctccaaaccagccaattctggcgcgaaacattgcgatcaaaatcaaatatcaaaggaaaacagtcattgcgatgaaagaaaagggcatctgcgatggtcagagaatatttctgtaataattttgaatcatcggaactttctgatgaaaaggaacaggacgagtcatcctcaggcccaggcccaggcctattttgttattggcccagaaaaatctacgcagcccataat

SEQ ID NO: 229410 - DNA, 778 bp, Cannabis indica
ctgaaaatttagataatggaagcttataacaaacaaatccaaaaagtactcctatatataaatatggctatttaaaattttcacatcgaactaacaactattaaatcatacccctaaaaatttattgcctgttaaaaaatttctcttaaattattcataatactgaagcattgaacttttgttaagttttatcccagatagctaacaaaatgcaaagataaaattttacaaaaaccttatatttcagcattgcaagtagttcgggaaaatttttaatgagcaaaaaaatttagaggacacgatttaatagttgtaataattcgaaagataaaaatcctaaataacctataaatctttaacaggtgtagtttcatttattacacttgactgtatatacaaagacttttgcaaaattatccaattagtagttttttttttgtaaatactattttagattctatgttttgtaaaaattattaattggaccttctgttttattaaatgacaaaatggatcctgtatttttcaaaattgtacaagtaagactatgaactcaatttttcaacaattttattttttaatataaccaattttaagacaatttttaacacgaacagatacagaaaataaaatcagttttaccataacatctctagatcggattattattaagttttattttgacaagaaatcagtttagtgtattatttgtataattttaaaaaatgcaaggtccattttatcatttaacaaaatagatggtccaattaataacttt

SEQ ID NO: 229411 - DNA, 911 bp, Cannabis indica
agatcctttcaatccaaactatgggacatggtgatcctgctgtcccacctgctcaacttaacactgaagaggaatgcccacctatcattttatcggtatttccactgaaagatgtttaattgtagtctgacaataacccgatgaagaattttggggttgctacatcaccaccaaaaggggttcatcgcccctaccccctgaacaagtacaacagattggcaaatcttttgggattgctgaaattaatagccgtgataaaggaaaagttgttgtctgctctgagagggtggtgggtaagttgtttcaaagtacttttgagtcgttggtcaaagcccaaaagaggaaaacttggaagaggcgcactccctccctagattgacatggtgctagtagttctgttgctgatgggatgtctacacaaccaaattagggtacgaggtgtcctagtggtgtgaaaagaaagaatgatactgatggcaagatagaagagtgaagagtgaaagtgaatgtttcaccagttgttagtcttatggtggttgatgatgatttggcacagtctgcggagcagactcgccaggcccaatgagtatcttatgctggaatgcacgggaactggagaaccctggtgtagtaagtgcattgcgaacttttgtgcgcaagcatttcccaagcttggtcttcttgtccgagactaagtttcgtggaaactgggtagaaagtattcgaagacatgttaattttactattaactttcaagtggattgtgtggggagcagtggtggacttttattgatgtggaatgatgattaggatgatactattaaaagttactctattggacatattgatgctcttgtacaatgtctagagagtgagttgtggcgattcacgggattttatggcaacccaaa

SEQ ID NO: 229412 - DNA, 1717 bp, Cannabis indica
ttttttttctttttttaaattttcatatttttataattttattattatatactaaggaatactaatatttttctttaaaataaaaaatcactactatttataattttttttgcccaatgtaccccaaatagtgtgatggcctaatcaattttaattatttgtcttctctagttgggcttatatataaaaatattattatatataattgaatatcataacatttgcgaataaattaatatttatacgcaattagatgattttaattcattacattattgaacatttttttttatatataagatttacaataataagacacaaaatattactttcattcaatacaatattgatatgttttaatatttaatttgatatattttaaattttatttaataatatattatatctaaaattaaagaacttgtttttagaatcttcttaggaataagtatttttttagtcactcacttatcaatttgatagctaaaatgtattaaaaaaacataaatgttcaattagattcactcttatatgaaaaaattacaaagaaatatttaaaaattgatctatatttattcatgaaaaaagaaatgcacaatgtttatttgaattttttcttttttatttgtaaagaggtttttttctttcttttgaataatttttttcttaataaaaggttttttatttttcttattattttcttataaagatttttttatttattaataaaaaattttgtttatttatatagagtttttttatgtaatttttatttataaatatttttaattattattattaaatatttaattggtaaatttaattttcatagacttatttgtttatttatagcgatttgtatatttgacaattttatatttattatataattaagtgggaatatactcatttaatactttgtgttttcataaaaaacatatttggcaccctatgttctcaataatagctaattagtacctcaaatttttaaattgtacatatttggtactctaaagtaaaatttaatcaatataattttatcaatttaacaaaacaattctcacttatatgtaagcaaataattaaatttgaattcaaaaatcataaaattttaaattgtttgattgtattgacaacattttatcaaaaaaattgaatttagggtacaagggtgaatattcaatgattacattaaaaatataactatgatgattacattttcatatgacctcgtataacaagttaataataggtaaaatgtctacttttagactcgaaatagttataattaattatatacttaaaataaattaattttctaattaaaatatttaataagatattttcacaattaatatttgtagatattttttatttttaatttataagaaaataatagaattatgttagtatttagttacagatattttgttaattatttttatttaacttttaaattaattataatcgtttaataatgatctaacaactacaatgaatctaaccattgaaacttttttcacgaaatcgaataatatgtatgattttgaattgcattgtatcactaaaggttcgtttggtacgtcatattacgctgtattgtattgtatactattatattaaattgtattttatgtaatatttttatgtaaaactatatatggtattaatttttatagacacctaaatatataatattttagtataaattaaagtt

SEQ ID NO: 229413 - DNA, 1156 bp, Cannabis indica
gagtttcagaggtaagaagagatagaggcaaggggatccattattccctttgctttttgtaatcatcatggattacttcactagaagactaaatctagaagcttcctaaaagtctttctgataccacccgctttgcaaatttatgaagttgattaacctttattttgcagtttgacctcatcttgtcttttaaaggctcggtccaggttgttagtcatttaaaaatggcactttatgatttcaattaagtcttggggcttggttctaataactctaaatctttggtttatttcgtggaagtctctaatgaggttaagcatggtattttggaagttctgagatttgaagagagttccttccgtctcaattatttgggagtcccgttgagaacaaccaaatgaaggaggaatgtgagcctataatcaagaaaataaagatgaggcttctcacttgggctacgaggcacctttcttttgtaggcagagcttagtagattcactcagtctaactggattcgcataactattagatgaacattttcattcttcctcggagtattattaaagaggttgagaaactttgtgtagaggtttattttggggcctcaaaggagttaaaagtaagattcacgtggtctcttgggaaaaaggtttgcctccctaaaggttatggagggatgggttttaaagatgaagcaaattggaacagagttttacttggcaagtatatctgggctataatgaagaaacatgaccttctttgagtcaagtgggttaatgaaatttatttgaaaggtaaagaattcagatagtacaaactccctcctggtacaagctggaactggtgcaaaatatgcaatctgagaatgaaatttgatgagcaaaacttgctggctgctgaaaacagatgtaaattcaaggcctcaaaactgtataacaacttattaccgcagcaggtggtcaattataatgaagctatttggagtaggctcactcttcccaagcatcaatttattttttggcaaatggttaatagtcaactgcttactcaggataagtttatgagatttcatgtctatttagaatctactgcttgccctgtttgttacatagaaaatgaaagtcatgagtatttgtttttcgcttgtgattttttt

SEQ ID NO: 229414 - DNA, 1403 bp, Cannabis indica
gtaggccatataaaaattcaccaggatctcgtgcctcttttggacctctggtattggaattggtctctatagcatttgaaaatgtgagaaaaataaagaattagtaagaaaatccagtcataaaaaatctaaaactcaaaaccaagattttaggaatgatttatacttacgtaaaattttgaatcaggtagtgtttattggatggaaccttgttgtctaaaagaagtcctccttaaactcctttttattgggaagcctaacaataattttgtggtcgatggtatgggtctccaagtagtagagaggcctcctaaatagtatttcctcataggataggctttagtagagtagaaacacagaatctcgaaaggggttgggcaatcccatcctaagatatggtaaagtgacttcaagcatgtaagaattctgtaagaattgagagcgagttaaaagggtgtaattccgaggtaattacaaaagtccttaaagtattgcctaaggggaaggataacccttgctctaatatgctcaacactccaagctcctatccttgaagagtcgctagtgctgcaaccttcatcattcaagatgccagttggggggaagcatttaaatttgccaggtgcgactgagcgtatgcaacaccctttttcattttttatgttgtaagatcgtaaaacatctcctacattatctaaaaaaaaatctcctacataaggagcaattgatctgaccttagattcgatcaactctgcctcgaaagttacactaggattctgaggcatcttagaattttgagctttagaagccataatctcaatttccagatcacttggtggaaaagcaacagtggctcgaggtaaaataatagttttgctaaggggatttttactaaattagaaaattcaggccaagctgcttctcataaacaacgacgtctaccctcaataacttcatctaagaatagcctataacgaatgcatgtctcttcttgattattcctaatggtatgctccctaattctttcatcatttatcttaagtatggattgaggtttacgactttgaggtttaaaagttatggcttgaaattggggataatcagattcaatatggtctgggtgttcataatctagatgagaatgggacattgtcttgttcacaaaagaaaatcccgaaaaattcttgaaatacagagcatagaaacccaagacctgcaaattgtgtaacctcaaaatttctagccctaagttactaaaagtccatataaatcccatgcaaataatatatgatgtaagaaatatatggaaagcaactattgacctcagatttggccaaccgacaatggagtagtatgttgggttttgtgccctaaataaaaccttttacaatctgattagttat

SEQ ID NO: 229415 - DNA, 1377 bp, Cannabis indica
catttctaatcatcatcaccactagtgagattgtttgtaacagaagcaaaagcttcttgagttgtgtaattgaaccactcgtaatctcttcttgttcatcagctaataaagactcttatagccctattgtggttgtttttggctagagatgtagaattaccataatcttttttgaacctcataaaattcatgttttcattgtatttgattaaatctgttttgccattagttattgatgatgtcaatccttgcacaattctaacgggtttccattgttaattcttgtgctgtatgttcttgcttgttgctttcacaataattagcattagagctcaggttcttggagcaagaacagaatcaaaaaagtgactcgtggcttttgcatgttttgaagtagacaagttcaatggagccaatgactttggattatgcatggaggattaaaatgaaggcatttctggttcatcagagagtctatcaagccattaataaggaagaattaaaggaattgggagatgataagaagaagatcaaagaaattgagacaaaagcacacagtgctatcctactgagtttggcagatgaggtgctgatagaagtatcaagtgaagaaacaacattgggtttatgggggaaattgccctcattctatctaaaaaaatcccttgcaaacaaactgtacttgaaaaagaagctatacactcaagatggaagatatgagagaactcagaaaacaccttgatgagttcaatcgaatcatcttggatctcagcaacataggagtgaaaatagaagatgaatatcttgctacttagctcactgccaaaatcctatgaacatcttgtagatactatcctatatggcaaacactactacaaaataacctttttatgtcccacaaaaatagtgttcgacatgaaaaatcttatggggagtttcatagtccaatattgttggacttggaaaaaattacattatgtccaataatgctggactagaaaaattatagtggacgttataagttgaaaatttctcattataattttttgttttattttatttttgtggtagagccacgtccaatactgttggacgtaaggccctgaaggagcttatctatgctaagaatctaacagaattcaatctatgagattgcaattcaagactagcaaaagatgactagcctttggaaatgatttcatttatataggggagaatacattgacaaagcaaaagaaaaggataacagaaagtagttacaaaagtagttacaaggaaacagtgataactgttttaactaacaactaactaaacagttagtttaggtacaatagttgttgtacatcccccctccaagcgaaagggtgttggacacac

SEQ ID NO: 229416 - DNA, 802 bp, Cannabis indica
accacgacgacagtttgagatcgatagatgaagagtgaattgtcggactatgaagcagcaaaaccccaggccagaagagttgtactcaacttaaggaaccatgcacgaggtgactactttaaaccataatgagatttcgtgagcttgcagacgtagtgtgggtgagactcatcgacaaagcctttaggatgagtcatatatatactatctcagtgagatcaccatgaagaaaagcattttgaatgtcaatttacataagaaaccaattggaggaaaccgccagggatagaacaaaccgaataaaggtgtggttgatgaaaggactaaatgtttcatgatgatcaagacccagagtttgatggaagcctttggcaacaaggcgggccttgtaacgtttgacgaaaccatccgcaatgagcttgatacgataaacccacttgcaaaccaattattcggtaaccaagaggtggttgtacaagaacccatgtacattgagatttcaaaccaacgatctcaatatccatagcagagttccaacaaggatcagtactagcttccttaaaacttgagggttcatcgggagtacctaaaacagcaccataaaacacatggggctttctaatgcccgatttagctctagtaatcatgggatgcaaataagtggaggcaagagtagtctcgtgaggattatgcaagtttaccatgcatcaaacgagcaatgtggtgagaagaagaggatgaggctaaagtagaggaggtcgtggcaggagtaggtggtgtgggaataatgggagatgatagt

SEQ ID NO: 229417 - DNA, 1678 bp, Cannabis indica
ttcattttttttttttaaaaaataaaacaaataaaattacagtgatcgccggagttatcactcgatctgaaaaatcattggagtttgctgtcagtgccgaaaaagtctctagagtagttgtcggtgtcggaaaagttgtcgaaattgctaccgacatcaaaaaagtcatcgtaattagtattatcactggaagtcaatttcaaggtcaaaccattatcatattgaattcacttctagaaacttatcagagagtgaaaacaataataaagtatggaagaactctatcactcttgatgaaggtatatctgccatgaaatacttggagataaaaacaaaagaaattgtggctctattagggaattgaatctaagtggaggacctatataaagaaagccttagcatggtaaatggaggagtcaaaaccatagtcacaaaacagaggtccaaacaaaggcgccacaataacaacaaagggaaatctaattctaaagggctacaagacgcagaaggatgctttaactgtcggaagcctggacatttcaagaaggactattatatcttaaataagaatagaaaaaacaagttcaatggacaaagagataatattgataactgcatgatagtaactatttttttttaatataggcatattttttgtattgtttctcatttagtttttcatttaattattttaagtaattattatttatttatttttatatgtaactagtttccttgtgtttagattttaattagctaaaatcatatctagttcttatgaaggtaagtcatttcttaagaatttatatacagtatttttgttaagtaattggtttttgtgctttaattttcttatgattgttttagttgtattattaggcttttatttcaattttttagctacttgtatttagaaagtagtttcgtgtttaattgttagttttgttattttacgtaattggtatttaagtttcaatttttgatttgggtatttcataagtaactggtttttatgtgttaatttgtaatttagttgttttatattaatggtttccttgtgttagatttttcaattatataataaacgtaattagtttctctatgtcatattttaatatccaactttagtgatgcctctaatgtctaattttaatgatttttcgatgacgacgaaaactctaacgacctttccaattgcagtatcaactctgattacttttttttggtgacaataagaactctaacaactttttcaatgacaaaggtatatcattggtgatttctctcgcagcgaagccaactctaacaacttttggatggtaatgactactctgcataattacttttaaaaagtttattcatgatattttattgaatttttattttttgaacattttattttctttaatataataaccatattttatgtcattgcatttttctagtgttaatttttcttaagtttttatgaaaataattaggatctaagatgagcccattccacactaacaccacgtacaccaagccatatgttgatgttgatggtcaaaaagaaacttgagaaatactaaacaacattcgtagtacctaatatccttgtgaagtgtaatatcaatgtaacttgttatagtgagatttctcttacctagaaactcgagaccagactcctctttaaagg

SEQ ID NO: 229418 - DNA, 1712 bp, Cannabis indica
aatatatacctttcagtttttttttaatatacaattgcacgtaaaaacgatatacgattgtgcaaaataactatacgaaacactcaattattcaaggttataattgtagtttcatcatcaaacttttaacagaatagatacattttgttaatttttttataaaaagagacatttattaacttaattattagatttagggccattttgcatcttggccctttatattatcctatattattttataacacataattttattttttttcattttgttaattttatttaaaatgtaataaaataaggaaataaaataggaatagtagcttgctttttgtatacacaactactacagattacactcaatttaacgttacagtcattattgctctgtcactttttcttttcccaatttcatatccttcctttttcttctccattttttagctcttctttctttatcacagatggagcttagagttttttaggttggggaattttttagctagtattaatcatcatcatcatcatttcattcatccttttttattttttccttcttcgtcctctagctaattcgtgtttgtcttcgtctattctaaatttttgaagcattttattgagttcggagactgttcttgaagtttttgtggtaagttttgttgtatatatatatatttactttagttattgattttagagccaataagtttaaaagttggtttgtattgttgaccgagattttcggcaacgaaatatctaaagtaataatcagagcttagggataattaatgtaggtagttttttacgtggtttgagcattaattatccgtagttcacgagtctctgttattaatgagtgagtgtttcttacagagaatgtgtttcttgtgttttttttttcgatcccctcactaattttattgaggggtattttatagcgattggtggaaagaagaaaaggggtaacttgtcttcaagtgccacctacgggcacgcacaagttctcaaaaagtacaaaatagggcatgcataacctacgtagtaggctgtttaggttttaagtgagattaaccctcatcccttcttgattgatgtgattcttcataatagagtcgccactagcttccttgattatcgtgcaatcgcccaaaaccgggtttatgacgtctgacacgtcctcttatgggtattcccagatgttttccccatgtcgcattaaatgtgaggtgactgttcacctccagcttcactggcccggaggagtttatttgtccttcacctcccaaagaagaagtagagctatttgtccatgtccgggagcttgcccttgaatcataattgttggtccaaaggagatttaattaagtcttttgttcatctccggatgataggcttctacctgccacgtgtcccgcattacagttgccacatatattgggagaaacttggggcaacattcacccccaagtcttatttagtcgtgggtaaatgagacttgtgcaccgtctccagcctcaataaatgcaatgacacgtgccttgcactactacaatttacacatttagtgacactctatagtgacaagcacaaaaagtgtgggtcactaaatgtttttattagtttttagtgacacgcattgctggaccgtaaaatttaatatttatgttccatgatgggtgtcactaaaaattatttattttaaaatatatata

SEQ ID NO: 229419 - DNA, 1899 bp, Cannabis indica
taattttatacatttaattttttaaaataattttctttttacaatagaggattcccctgtccccgtccccactccattaggaattcccgacctcgtccctaatggggaataagcgggaatggggattaaaatccttaacagggatggggacggggagagcactccccgctaattccccgtcccgtgtgcatccctacgcacggagcaatggtgtggaaataattttattaattggtgtaataattattgagaaagtataaagtacatagtcatttataaattttgatagtttttattaaagaatgttctctcaaatgaatcaaatgtaaaaatattgaattatatataagaagattggttactccactttttaccaattgattttaagaaaaaatccataattatcatcatgattattctataactaggaaacaatccgcgcttcgcaacggatattttataaatattaaattatttaatataaaataaattatatctattatttaatgataactaaataataaaattgtattaatttttttaaaaccaaaaattgtattaaattgtaactttactaaagtttaatatatttttttaataatatgtagatagtaaattttatatttaaaatattaatgtatatagttaaaataatattataataactaaaatgacatgataataaataaataaaaaaattgctacaaatatacatcatgttaaattttgtcttaaatttaacatattttgtagaatatgtcaaatatcatattttttaccatactattgaattattattgataacttaattaatattgtcgactctcaattttcttccaaacttaataatttatcaaaactttttttttttgtaaggaataatttattaaaagttgaatataaatgttaattttataagataaagggtctttggtgtgattttcgagtatgtcttttgagatgaataaatttgtaatcaattaataaagaaagatttaaaaaaaaaaatgtattacgtactctatttaaatttgtgatttctaaatattttatttcaatgtccaaataaaagaaattaattttattttattatatttaaaaaaaactccatgtaaacagttcactacacaataatactttagtttaaagtaatctttaaacgttatttaagttttatattactttagtttatgctctaacaatattaatgaaattgagatatgctatctttaaaatataatttaaattttttcaaaaaaaaaagaaattaaataaagacagtttttcgtgagtaatataagattaaaaaaatataaatatatacaaatttaataaaataaatagagtgcaaatttacagttacacaatcaatggaaatattggttaaaaaaatgtgaatatatgtattagttaaaaacaattaaacaaatcatataaatagaacaaatgaatgataactattttcttactatttcaacattaatatactcttattttcttgaaggaatagatgataaaaattaattaaaaaacaattcttattaagttgatgttttaattagaggacttattaataaaatatatgatcatatatatatatatatatatacttacaaatttatcacaatacattttattgaagactattgagttatatgagacttattgatgccgactatctatatagaacacaagcttcctaatagtataggttaagtgcaatctaaaagtggcttggaagtatcattacagagtctaaacaaaacccacatttatgtcagtgcaatcaatctgggtcatggagaattagtttagggaaacttacaaagatactggaatttgggttaatttttacaaaaatactgtcacatggaaatcttttcaaaaatactgtgtttt

SEQ ID NO: 229420 - DNA, 1340 bp, Cannabis indica
attacgctacactcaaaaaaaacaaaataccaaatattactttataattgttcccaaattatcatatctctccatctaaaacaacaaacataacatatttcgaaaaattgatacataattatttcacactctaaagtattatcactactacagaattatatccctgaaaatatattgttaaactatggagttacattcttcaaattattactcatatctctcaaaattaaaacagacaaacacattttcataattataataattcaaaaaaagaaagaaattaaaacaatatgtaaaaaagttggaaaaacaattatattaaaaaaaatatatattatttccaatttgatttcctagaagtcataatttcacacactcataagtcatatatatatataaacgagtagactttggtgagtcggtgaccgtctacagccaaccatatcaatgtttttttagtacttattattagtcaaaaattcttttttaagtcaatttgtttgctattaatttataaatattcaacaatttttttgctattagacaagagtgttacaaatttcaagacttaataattaaaaaaattattttaaataaaaataattgattatttatttttacattttaaaatagttttttttttatttttatttttacaaaatttttacataaagatctctattgcaactagcgttgtaacttaaattacaacaaaaaattatataaaaatctttattacaactagcgctgcaaccactttaaaaactcaaactgtaaatttaaaaaaaaaaattaaaattacccttacaaaaaattaacattgctagaattttcttacaatccaaaaatatgttatcattggtaaaataaattgattataagatttacatatgaaaaaagaattattaaaaaataagactaaatcaattatacattgactcatctaatcaaatcaagccaattagatccgggtgcacttagaatgtatatatataaaataatattatattgaatatcatctaatcaattattatagtgtatatatatattaaacattcttttgtggccgttcaatgaatttattttgctttgagatacacatatatatttatatttttatatattaaaaagtctgagaatatatgggtctaaataaaatagattaggattcgaattgataatattgtataatatattatacacttaattaattatgttatgaatatttgttgtttttttttttttttttgaatttaaacgtttatatattacaatgcataatttgggactcgaacccaaaacctccaatacacacattctcctatggccacttaagctaa

SEQ ID NO: 229421 - DNA, 961 bp, Cannabis indica
acattttggtgttatatacattttaaaatcaatttttgataagtcaattcgtcatgcatgctttccgtgtgatatttttaatattattttatgtagaaaaaaatatatatcaccatattatttagatatgaaaagtttagagtcgtgtattattttttcaaaagaaattgccgacagttttaaactatcggctatagtaaaccacttgtcgacagtttaaaccatcacacaaaaaagaaattcggatcgatgtccaccttcgtcatcaaccgttgggaataaattttttaaaatttcctcttttcaattttttagttgttttaaatcgtcgggaatattaaatacttacttttattaatgatggttcttgaaacgatttgaggacttagacatagtactttttggtatagcaggttgaggaatacttcttttttgtattcattaatcaaaaatagtctcatattatattttattaaaatatacccatttttataagtaaaattacctaatatactctcactccctacttaataagtctcgcatataatttacattaacttaagcgatttattaaggatatcatctataaaaataggtatatcttaaagaatataaaaatgaaagtaaaaattaaaacaagtaaaataaaataagtatacaatgtaattttcttgtatttttcagttcaaggataattattgatccaacctatattatgaaatagttacaatacatgtacaagccacgttaactcgagaaaattaatatcaatccattattggggctcaatactaatttttgtatgtttttacattagagatttaaacttgagattttctttgtgtgatgtgaaattatacgtatgactatattattcaacttttattaaattgcattgttattagatattttatagtacccatactatataaaatgaatagtaatttttttatattattta

SEQ ID NO: 229422 - DNA, 729 bp, Cannabis indica
aattactatttattatccatcatatgttgcggaaatgaatgaaattacaagtgaatgtttttctatatatagaatacaaagaattgttaacaaacttaaccaatatgcctaactagcttaacataataaagaaataactaatcttaacagaactaacactaaactaatggctataaccaacttacaactaacacactaaactgaaagtcaaaataatcgaattcctattagctagccaccctccccaaggtagactgtataaattaggattgaacattttgacctgatttgattcggatccggccaacctgtctggacccaacccggttaactcgtaaaattaaagaaaaccattctattcgggcgaatcggatccaatccgatacacttttaggtcaaatgaagttcaagtacaagtacactaaattggcaagttaccgtctcaaatattttagaggctttattctaattttaaaaagtaggttcctaacaaaaaaaaattataatttgcaaataatacttttaaatattatcatattacgaaatatattttacataattaagcacctaaaaatttaaacaattttattaaaattgttgttatttctaatacaacttcaagttaatatcaaatattatggaaaaaaaattaaaagacattaaataaggaaaacctttttttttttatttgtagataacaaattagtagaagattgatttttttttttt

SEQ ID NO: 229423 - DNA, 1021 bp, Cannabis indica
gaaaaattaggaaagagtgataatttcttttttttttttttttgtaaaaaaatagactgatggaatgatacatattactatattatgatatctttataattataatttgctatcctttcacttcttatttctcttcttcattcaattccaccctgttgtcatctccaattcctcttgtcaaacaaaaaaatttattatctcctctcctcttcttcccgtccatccacttctccctccaactaaaatagtgcaaagcaaaatttttgccaactttcatccaaataacgattttgggaaacaaggcttttgttataatacgtaattatttgaaaagaaacgataagtttaatgtaaaacaacattaattcacacaattttgtgataacaatattgttaacagtgcatttggttagttgtaattaaatagaatcaatttcatcataatctcttgtttgattatattttaaaatattgatattataatatattattccattaaaataattattccaaaataagatatcaatataattttatttattttttatatatgcatattaagttcaattcaattttattattattcttatttttgttttttaattttcattcattttaattaacgtaccttaagatcttaaaatttagtgagttatagaaaaaaaaatatttttgagcccttatttaataaaaaaaatgtgtaattttttttaaaaaaaaattaagcacttgggcaaagtggaccatacacaccaacttagctctcctatgtttagggtcgggcttgaacctaaggctatgtttagtaggaaggagggagaacatgatgaatggagagattggatgggatgagaagtaagagagatcaagaaaatagttgatttcctttatttgatatgagtttggtttaacatgcttaaatataagggattattttacaaatacacataaacaacaaaaaaaattacaaaaatatagagtttgtttggctgtgttttcagttttcagtttttaaaattgt

SEQ ID NO: 229424 - DNA, 1747 bp, Cannabis indica
aaaaaataaacaagtaaataagataacacattttaattatgaatgaaaagtgaaaaaggtataattgtaactattttttaacatactttagaaagttacacatgtcactcaattaaaaaaagagtacaaaaaaagagagtttacctagcactcctcttcttttaatatagtataaattaattcaatacagtagagattaattaattaaatataaaaatatgtatatttatattgctaccgacagttcatagaccctagaacttaatcactagatataattgaaaattggagacaaaatacacacctagctaaaaatatatatatttatataattataagtaggagaaatgaaacatcattaagaccatttctaatagaccatttttaaatattaaattacaccaaataataatattacaacttataaaaatactaaaaaaaatatgaaccgtataaatgtccattaacatttctctttccaatatgttgtagaaagtaagtgggcatctgaaaatatcatcttttgtttattgtatatggcaaagactttagccaatggcctctaatttttaactatagttgattatattatagtttatattcgctcatattaaacaaagatactaacttaaatcgatgtataaaatcgcgtaccaaaattaattacttataaaatttaatgatatattcaaacaaacttggaattgaacgttaaaactaatcattctcatttttgaccaacttggaattgaacgttaattacttatctacatgttatacattaaataacacaatttatagtcttgttttttttttccaaaattatagttgtgtatttatatatatatattgaaggaaatgaatatatcattaaggcaactgcccttaaaacagagacaatcaacttacaaacccattagaatgtccaggccaccacactttagcactactaaagataagccaattttttatttttttattttttttgaaaaagataaagccaatttgagcaagatcacttacttaataatttcgtaatgtctttctctatatatgtcttactaacttgtatcaagtgtcggcaattaagtttgtaataattaatgacaatctctagagaaaattatgtaccaactaatttaaattttttattcataaaaacaaactaaagaaaataagagtgggttggacgttgaatgcagattcttttggtatggctcctatgtagccttttttttttatttattttattttaatatatttatataatataattgggtggtccccattttcttttttttttttttttttttttgggaaaaattttaatggagcatatatattcatatatgttgttacggttgttgcacgttaggaataacgaaacaaaacgtgaattaaatttgcaaaatatctataaacatgacattttatagctttaacttttttttttgtaaaaggaacattttatagcttaacttatactattgactatcttgttcattacttgtgagatatttctttctttttgttcatattatctgtaaatgtggtaactaataaagccgctgacacttttattaaaaaaaaaaaaaagagatgaactgttgtcacttcatgtgcataaattgggaactgctttacttgttgcaaggttacattaaattcagcctaatagtttttttaaaattagtaaattactgatttcttatttctgtttttgtaattaaatggcctttaattaact

SEQ ID NO: 229425 - DNA, 1490 bp, Cannabis indica
tatatatattcatgaatgtaacttggtatattatagttaccagaataatttcaaagtgataaatcaaaaatcagtcactcattccatacaaaataataaataaattaattcagtcattccataaaaattgatgtcaattttggtgggctgaaacaattaatccttcttaaatacttaggtggtgtttggcgttgagaagaatgaatgtaagcccctaatccttacatgtatgtatttataaattaatttataatcataaaccagcagtttaaacaaaatgtgcatagtcccttttcacaattagagaccccctatttaaaatattacaagacatgctattatagtaatattataaaatgcatttaaaagtcctaaatatttaaaatacaattcctgacaattcagcacaacctgttggataagctgatatatacaattgttggttgtccaaacgtctctacctaatacgtgcaccacatagcacccatgagtcacaaggacttaacaagaaaagtaataacaacaatcatataatatattattcaaacatcatcatctatactcagacaatcagaatcaaataatcacacattactcatgagaggaaatacaattcactattgacaaaaatacaatttttgatttccctgaattttccaaaaacggtaaatcggttaggaaacggttaaccgcttcccaacgaaccggtaatcggttgcaccaaacggtggagtgattcgtcgcagcagaagtggaaaatcctaaatttaacattcatcgaaacaccacccaaacctatcaaaatcattccaaacttcacatggcacatatataccataattacaacaatccttacgtaacaaaaattaaaatcgaacccttaaatgaaaaacatcattaatgttcgaacttaagctttaaatagttctaaactcgatttctaactcaaaatcacctcaaattcaataaaaaaacatcaaaactagtcctatagctacccaagaacaattccatgaagtcataatctccataactattctaaatcacaaagttactacataaaactaattgtattcaacttaaacaaaatcaatatttatcttaagttctcaacctttgatgatttactatcctgctactaccggagcttggattgttagattttggattgaaaataaaaagaaaattaaataatggaagtgagggtttcatcgcaccgaaggaagaaggttcattcgttcttttattttaaacttttaaaacatatatatacatatagtataataaatgataagaataatatattaataataataatattattatatatattactaataatattaattttataattttttgttattaattatagttattttatcatattttaaccactaagaaatctttaaccttatgatatttggtcaactccgagtatttcaaaatactttgatatttttaaaatcaacttatctcaataatctcat

SEQ ID NO: 229426 - DNA, 1759 bp, Cannabis indica
agtctcgcaagtaatacttacctaattaaattgataataatgaaattaagtcttataaatttaaataaacaatcaatcgactttgaacttgttttataaatggaggcaagtgggactgacttattacatactaatagtccagtattaattatttaaaaacactacatcactctcattaattgattaataatcgcagtaacagaatcagttaataacaacgctgcaatattctgttctaatctgaattcatttattattactataattcatattaatttttgaatggttgacgaaatgaaattataaaataactcaacaaacttttttattataaggaccattcagtttacctgatgtgatgacacactcattattcactgaatttatttcctagatattatttatttggttctgccctattcactaattttcttttatttatgatatttaaaaatcaactactattaagttacaactattatacacgacaaaaatttgaaatttttaataacaactttttagtcacaacatataaatgtgatttttagtaacaaaaaaatattacttgtgactaaaacatagtatttagttacaaattatcacaacaagtattgtgactaaataatacatttagtcacaaaatacctttagtcacggagcttttagtcataacatatgaataataatttatattaaacgatttttttttttactttttagtctcacaaatttttgttgtgactatcagtaagattttttgtattacatgtatgggctaagaactctttggtataacgctaaactggcacgaacacaaaaagatataaacaaaatgaaggtcggaaaaaaaatacacgaggcaaaaaaaaaaaactaataaagtttgaaatactatgaaacacgatactaaaaaaacgtaaatgacccaatatagtaaaagtatagaatttactaaagcaatacgataagctcaaaaattaagtagtagtaaattgattgctacatggattgtgatataaattgtaaattaagttggaatgctgcatgaattacgattagggcatttatgaaaaacacctcatatttgtaatttatacaaattttatagtataaatagaaaaaaaaaacttttaaaatgtatttaatgaacaaactccatatttaaatctaataattctagtaattattttataaattgtctataaaatattattaaaaaattatataaaataaatgaacatatataatgtaataattatctcattatttaatttaaaaaaaagtgaaaaaataaagcacaaattcaaatttgtataaaaaatgagttagtttattaaaagaaaaaaaaattatttaactaaagcacgatactaaaatactaggcatacctacacaacccaacctatattatttttactttttcaaaatataaatgggactaacccaaaatatgtacatatttacaatactaattacaacacgatatatattcaattcaaccaataaggaaaaaaaaaaaaaaaagtaaatagtgacataagtacccaaagttttaagtttgtaagcaacataaatccaataatttttttagtggcataagtacctaatgtttataaaactgtaattttcttctagttttatcagtacaaactctgttattatcttaaacaagacacatataagacccaaattttaaattatttggtctggacgaaaaatatatagtatcggttacttccaattttttttttaataaatt

SEQ ID NO: 229427 - DNA, 1641 bp, Cannabis indica
acagtaaagagtctggctttagacatagaagatcttgctgatcagttgggacttggatccaaattttatgtgatggggttttccatgggtggtcaggccatatggggttgcctcaagtatattcccaataggtatggcagagccagttatgctctttagttaatatccattatggaaattggaaactatatgactatcatgacttagtcaagagaaggaaaagtatatctgaagtttgatttgggtgttatactgcatacactgttgcaattaagaaaatattggaaaaaatgaattgttatcctgttttatattggtgataatctatatatacataaattcaattcagctttcttaaattgtttaaagttagatgtttgggatgatgacaggcttgcaggagcaggactcattgctcctgtggtcaactactggtggccttcttttcctacaaacatttccactgaggcctattacctacaactaccagaggatcaatgggcactccgagttgctcactatctaccatggctaacctactggtggaacactcagaagtggtttccttcattaagtgttaaagatgagaaacttgaaattttctctcctcaagatttacaacttataatgaaaagactctcagctcctaataatgagagagaaaaatacagggtatgtaactacataacaccccccaaaagaatcagcaacttattttatactgcagtagctaccaaattctatttgctcaattagacatcatggccttagtgtcctactttagtttcattagtactgatgagtttatagttggttttgactctcttgttcactttttacaatgtaaaccttattaaattttgatgtcttgataagttatgcataatagatgtaatgtattagatacttataaatgaattgaatatggggaatgtctttatcaacaagttttttttccatgaatatgtgcatactttataaggtcatcaatatgattattttttctcttgtttcttttactacctttatacagatgcttgtcagacagcaaggagatttcgagtctgtacatcgggacttaagagttggatttgggagttgggaattcgatccaatgactgatctgaagaacccttttcctaacaatgaaggttctgtccatctatggcagggtgatgaagataggcttgtcccggtagtgctgcagcgccatattgttaataagcttccttgggttaagtaccatgaactagcaggtgctggacacatgtttccccttgccaaggaaacgagtgaagctatgatgaaacagttcctgattggggagaagtaggttgcttttggcatcacattattctccatttaggacttcgtagaaatgatctttgacacgagggaccattgctgatagtataataagcatgtctatctttctagccacagctcatctgtggttctcatttaacataattatccaagattgaaacatttcccatgaaaagcaattaagctgagctgttttcaaatgattttgttggttgtgtttttgtagttgttttgttttgtttgtttgtttgtattgaagagggtctaaatgcagtaacgtgcatgcatggtctttatttaaagaatttcaacttg

SEQ ID NO: 229428 - DNA, 891 bp, Cannabis indica
gaaatgtaaaaataaaaaaaaccttataattcacttgttattgggaattcctattttttccttttcgtttttttttttgaaaagtattttgaaataaaattagagaaagaaaaagtaactctttgattgatgattttccattatttctctattatatattaaactcttatcttcttataattattaataacgcaaatggtcacttaaagtgtttttttttttttccaaatcaaatctgatacataaaagttgtaatgtagccttatacatcgttctttttatttttatttttttctaaatcatttatgtggaagtgggaaaaaaaaaaggagaactaattccctaaaatctacttggactccctaccaatgtttccctaaaatctacttggactccctaccaatgttcaaggttgaaatatttgatccctacattgatgtcaaagtcaacaaaatgggtcctatcctaccacacaaagtggattagatagaagcccatttataaggaaggacaacttcaactactccctatctctccttgtgtccttgttctctcttttgttaataaaaatcaattcaaagtttatttgtcacattttaatatgagtgatgatacattacattttctttaaaaagatagaaatttttattgatctcacttttaatcaactgcaatgaattaattaaagcgattaaaaataattaataataataattaagcaataagatcataaatttgttatagagactcgaccccgtaatagtggtaatagtctactttctttttatttatattaacctgtgaaagaaatcagagtcttgatctctcgaaagctttataaaatttagcagcgtaagtactctttcgaatgaataattctccccttggata

SEQ ID NO: 229429 - DNA, 1565 bp, Cannabis indica
aaagtagaaaattgtatacaatcatttcaagtccagtcatctattttgagcccattttatccattatgaagttagtttcgtaaattaatacaataagacactaatgaacacactataatcaaatcaggtaaaacattcagtaacgaaatataaaccaagcttcaaagtacagtgtaagacatagcaaactagaaaatattaaaacgcactaaatccaattcaactagatttttttaaagggaattcccactagattcttctatattaaatcatagtatctcaaatacaaattattagttggcctaaattggcttattacatttgaaaccactctaccatttcccacaacatacctgcattaaggggaaaaaaatttgttattatcagacaaattattggttagggatggggtgttgacctactatatataatttggttggagtagtgtagacctttacacttttcaacttagctacacaaatataaatacatagaagtacattaattattaaataatgaatatatccatatggttaaggattagttgtgagttttaggagatttagtacttgccatctgtacgggtgtctatcagataggtgaccaaagaaaaagaggcaccaatttctttaaaataaaaaaaaaataaagcttaatgaaaatcaaaaatctcaaaaatcaatcacctctcttaaaaatagcaaaagtgtccacttaatttaaagttatttttttaaaaaaaaataaaatagtgggaccgccgattttccaaaaccatgcattacattttcattgaagccggtgagtaatgagagatttggtacggtagttaagaagaaatggcttcgatgtattaatcaaatcaaactactatgtatgtatagtttagaatcatccgttgtgcggttgatttttcacaattgcatggtacaatacaatttacggtttgaattttttttttttaaagaaagaaatggtaatttattaaattaaatcagctcttacagaaatacttatgaatttaggacaatcaatctaaacaagaactctcatcgaactagtaatagacaagcatccgtccaaatttacggtttagaatttcataaatacgattttatttaaaccacgtcgcacccacttttattgaactatttttttttaaaaatataatttatacttttcatttgaatttggttttgtttctttataaatatgggttagtttaggcataacatttattaactatgtacttaaaaaagtaagtatttttatactaattagtactttatgtatcttatttttttttgttttgttttgaacaattttagtttatgatttttatctataaattatatgatgcaattttattataatatttacttattaaattagttggtgattaacgtaaattgccaacactgcactgctactacatttttgttgatgtaatttgttgttgtttcgtaggttaatgtggtgttgaggtgcgatttggaaaattgctcacactgcatatgtggtgcagttcaaaaaaattggctaagagccgcactaccctacacctc

SEQ ID NO: 229430 - DNA, 2318 bp, Cannabis indica
atatttttttgaaaaattgtggatgcattgaaggttttttttttttagaaaaaaaatattattatagaatatgattagttttgttattcttaaaatttactaaaaaaaaataaaaataagaattattactttaaactatttaattaatattgttgtaaatattttttcttttgagaaatattaggtgataattaattgataaatttaatagtttagaatagaaaaaaatatttggaaaaaggaaaataaatatttttctttaaaaatattaatcattaatattgtacattaactaattaatatgcaaaaaaaaaaaaaaacttgaagttgctacaaatatttgggaacttgaataaatcttaaaaaaaaaacattctaacaaatatcaaccaaaacatgacttcatgaatacaaatatttaattttaaaaaatacaattatttacatgtacaaaaatatagtacaaataatttctttataaataaacatatagaaaacacataaagtaaataaaagtctcggtccaggtctcgagtttgggttcgggtccgggtcccgagtctggtctgagtctcgggtctgcgtctgtgttcggtcccagattcaggtctggattccagaactcgagtccagtcccaagttagagttagggtccgggtcccgggcctggatcccgggttcgggtttgaatccgggcgggtttgggtctgagttcgggtctaggtcccaatcccggtctggaattgggtccaggtcccgagtccaagtccattctcgggtttgggtataggtctgagttcgggtccgagttcaatcttgggtcatcccgagtcagggtctcgaactgagtctcgggtccaagtctcaagtttcggtccgagtctcaagtctgagtctcgagttcgggtccggatcctgggttcgagtttgagtgtccgagtccattcataggttcgggtctgggatctaggtttggatctcatacatgtccagtccgagtccgagtccagagttcttgaatttaagtttttttttaaaaaaaaaaaaattaacatattgaaaccgaattggatcttatctgattcaaaaaaaaaacttaggcaaggcaaaaccaatttgattcgagataattaaatatctgaatgtttcgtatcaaaactcaaacctgcttcatataaatggatctttttgacatgtctaaataaatagaatttactcccaaactatgacatctataagtttttatcccttaaattatttatttgtaaaaaatactctttaaattcaatgacatttcgttcacttttatgaatagtttagttcaaaaaaaaataataaaataattacataaaatagcaagtttgtgtaattttaaaattaatatttgaattgattatacaactattaactccatcaaatttgcaattaaaaaaattattaattacatcaaaaaattatctataaaatagaaacaaaatgcatttgaaatagctcgaggaattttaatttttaaaaaacataattcaagaagcaaaagcaaaacctcatcgcaagtctctttttttttttttaaggaaaatcgtacttataatagatagcaaattaattagacctctcggtcattacataataggtttacaaagatagttgaaaatggaatacaactaaatttcttgtgggtaaaaacccatttagccacattatgaacagtaaaattacgagttctactaatattaacaaaaatacaactaataaacgaaagagaagacctaaacaaaaggaggtataattctcaagagcccaataagatttcgtcccattaaaagcgttgataagtaccatcgaatcagtctctcaataagaagcttaattataatatgctcatcgctcagttttcaaatcatctaaatcagagcacaaggttaatggtataccccccctcccagagaggaccctatttttattttttgagaagtaactgttaaagagaccttatttagactggcaaaactaaaattaaatagttgtttacgctaaagttttgatcaaactaaaactcaaaaccataaaatgtccgttaagaatggtaagaacataaaaccaatttataaagtagaatctagttccttggcatcttatatttataaaaatgttttggaaactatgatattttcaactgtcgaatcttttctccaaagatgtataaattttgctgaaagaagataaacaataaacgacccagttacctcaactactgcatatagagtaaatgggtataacaaaaatcataatagcatccactaatataaaaccaagag

SEQ ID NO: 229431 - DNA, 1457 bp, Cannabis indica
agcaagttgaatcaaaattgtggaacataaagaacattagtaagagtgacattgcgattaataataatagttctaacttttgtaattttaactggagtgtcatcaggtaaggtaacaaaaatagcatgattataggattgaaaagaatgaaaacatctactatcatagcagacaaggtgagttgctccactatcaacaatctaaaaagtgtgaggaaaatcaattttgttaccagaaaaattagtgacagcagggtgtcactggatgtggaagcagctgttgtagttgttatgtcaacatggagatcagttgttaacattgatcagctgtgagctgagaaaaattgatctcagtagtggatccaaaaacttgagattcctgaggtgtttgttttgttgatttgatttttatctggtttttgattagatgcatcaagaagctttctattgccatagcctggaggaaaaccatataagaaatagcatttatctttgaaatgcccaggtttcgggcagtgggaacacattggactcacctttctatttcttgatgcaagattggctactgcatcagaggttgcaacagtagttggagtagcagcagcaataggggcattattacgagtacctagagttctttttcgttctcgatgaatgatcatagaaaaaactttatttaaaggaggccagggatcatacattaaaatctaggccctaacaacatgatatgattcatttaaaccagtaaggaattgaagaacctggtcatgatcaatttgacgttgatgttgagctactgcagcacagatacatggaatacgtgggcataattgattgatttcatcccaaattacaattaatttggtgaagtatgtgttgattggatcgtctccttgatgaaggtagagtaaagattcatttagttcgaagattcgagggccattcccttagttaaaatgattattgaaggttgtccacatctcagcaactgtttccaaatacattatgatgttgttaatatcaagaaaaactgactgtataatccaagacataaccatttagttctaacaggtccaagaactaagaagagcatcatcaggagtgccatcaagaaatagagtcttgtttcgagccccaatggaaatcatgaaatcttgtttccatggctgaaaattttgatcggtgagaaccggagtagcgagggcgagacctggatgattagttgtgcttaagtagtaagaattacgaatatctatataagttgcaggatcttagacaacaggtcttggagctggtaatggagatggagcatgggttctaggagaatgtttagatggtggtggaacaatcgaattcatggcatcgatcacaaggacttctccggtgatggtagctaaaggtgttgctctgattgtcaccattgttgaatgctttgaagttcttcgaagaataaatcac

SEQ ID NO: 229432 - DNA, 1679 bp, Cannabis indica
ctaacttggttacactcaatcctccaagactttcacatcaccatcaacatgccttcaaccctgttttgtgacaacacagcagcgatccatatatttgagaaccctgtataccacgagcgcataaaacatgtggaaatagattgccacattgtacgggaaaagataacaaatgacacactaaaaatgaatcatgtctcctccagcaacaacttagccgacatcatgacaaaactcctattttcttcttaatttaataatataatgtccaagttgggtgtaaaaaatcttcacactccaacttgagggggtgtattaggatttcttattctacccttctatcagttatgttagttatagtcggttatgttcgtttaagccaattgtgtttgttataacttttgtgtaccctttcctatataaggggatgtactctttgtaaccaagatacaatttcacaatcaataaaatagatctctttcttttctatactgttctaataccttatactacaaatatttttctgagctattgcttttaaaaaaatatactatcattttattattttaatttaatgtgtgtgttttttttttgtctatgcgtcaatattttttatgtgatatttttaaatcttttttatttttagttatatatatttattttattttttctatctttatttctttcaattactttgtaaaatgatctccaaaaaaaatgtattgttgcatctcttattatttcggtatctaagaaaagtttagttcaatcttttttcatagttgtgcacactataattatttaatgcatcctacaaaatattaaaagttttaaaataatttgtaatatagaaaacaatattcaaatagttaattttatacacgtgcataagataaaaaatagtcatggtgtacaactgattatttatctatttttaacgtgttaaagtcttttaaatttctcaaaattttgtactatatattttaaataactataacatatacaggactataaaaaaaaattaatcaataaattttcctgaatgcctaaacagacatgcatcggcataccccttttacggatgtgcacctttaattttcttatactattcaatatttttttaatgtgtttgttttttcgtcatttgcacaggtcatttttgttgtcattaattccgttttgttctttaatttataaaattatttttaaattatttttatttcaataattcaattataatgataatatcttcatttatttagatgttttctttattcttaatctcaatgagttatttactctagcaaacccataacttgagtagaacttttttctagatattatgatttaagtattataaattttaatattaatctaacataagatttaaaattaaagaagacgtttacattaaaacaaaaaaattaattaaagagttttataatatataaccataatttcaattttttttaacaattaatattaaaagaatgataaatattattttagatcttatattttaaaaaagttacagattgaattctctattttgttaaatgataaaataaatcttgtattttttaaaatagtacaaataggactcagagctcaattttcgataattttttttttaatataactaacatagaaatgcagaaagtataatcgttttgtcataacac

SEQ ID NO: 229433 - DNA, 1735 bp, Cannabis indica
aattagtcataattttttttacttttaatcattttattgtgactaagagtaagaattttttgtagtaaattatttattttatttaaaataataataataataataataataataataatatttgagcacgtggatagcatccgatcatggcttcattcctataatatagtttaatatataaatgaatagataatatagttattaattatactttttattttattaaataatatattagtattttttttttgatgaataagtaatttcattgcactatcaactcatttgattacaaactatggcagacatctatacatgtaaattttgagaaaaattataatccactaaaccaatctatatccttttgatctacacctttgggcattacacaagtaattctattttttactaaccacttgatttcttgcactagcatcttcaaatcggtatcctctttgcaccaatattttttattccttgcataccagattttgtacactgcagcagctacacaagcagtatagcaactctttttgaatttgctttgttttgccctattaatccccctcagaatactcggcaacaaattggtctttgacttccatcccagccaatttttcaaatcttccaggcagtgttgtgcaaatcaacattcaaaaaacaaatgacacatactttcggctgcaatattacacagcaggcaggttgtatcacctgtaatattgaatttctgcaatctatcccgagtcctcagcttgttttgtacagcagtccataacacaaagttatgttttggtacatttaatctgctccaaatctgcttgctgaggtgaaagttcctctgctcctgcatcattagtttataaacagcagatatttgaaactctgatgttgtaaattgatcaagatggataacttgtttcaccagatcctttatgtacactattctcctccaataccagctgctatgactgggagcctcatacccccaccaatcttcatcttcaatatatacactatgcacccactttacccataggttatcctttttagtagcaatcgcccacacgtgttttgcaactgcaacttgattccatttggcaatgtcttgaaatccaatcccaccagcttttttggacttgcacagatgctcccaagcaatattgcctggaccattcatattacttctccttgactaaagaaagcttctgcagatactctcaatctctttaatcactttcttaggaaggataaggacttggctccaatacatatggatggatagaaggactgaattgattaacacagttctaccagcaaaagaaaggttctttgagctccacactttgattcttgaagtcattttctcaactagaattgaacattcagctgataaaattctcttggcacatataggaactccaagatacttaaaaggtagattacttctctgaaaacccgaagcatctacaagccttcctatctcattctcatgcatcccactacaattaattgcagttttcttcttgttaggttgtaatcccaaagtcattaagaacaatttgaggccctttagcatcaaatagacactcttgaaatcacccctgcaaaataacaagacatcatccgtaaaggtcaagtggtttatttttaatcgcccacatctttcatggaactgaaagtcttttgtatcacctattttcttcattattctgctaagatactccattcccag

SEQ ID NO: 229434 - DNA, 1560 bp, Cannabis indica
cagattaagtgggtatagtagataccacttttgaaataaaatattttcgagtttggcggccttaggaactcgacgaagtggttagaaatgtcaaggcaattaagtagtattgaattggtattataccggatgagtgtagaactttaagttgtcagtttggcaaattagttagaaattaccaaaatatccctaagtcttattttacagaagtgttttattggaggggcaatttagtcttttactaagctaaaatgttaacttctatgaatttattttatggctgataattatttaagttaaatcttatattaaaaggatttatgttaggaaaattaagaggataaagaccaaattaagaaataacccattaagctctctctctcttctctttcggccctaaaaggaaaccaaggagaacaaattgttcatctcatttcagtccagaatttcactagaaatctaccctagttgctttccaaattattgaggtaagttcttaatactctttcctttgattttcttaaattttaagttgaattttggttatggttttaaggttttagggctgtgtgattaacctaggttcagagcttgttctaagtgtaattctaagatttgtttaggttctaattggttgatttcttggttgtttggttcagtattaagaattttagcttaaaactctatttcttggttctagcatggtgatttgagtaaattgatgaattatggtaaattgatgagctgaatgtattatttttatggtattaaactgttctggagcatttgagtaggtttgaagaagttttggatcaattttgggggaagaaaaaccaaatttcttgcctgccagaaccggtcgaccggttggtttgggtatagcagaacaggtcgaccggttggtctgcaggggaaatttccagttttcttcgaggttagtttttggctcggggtgatttccagtacctagtttaagttgtttagatgttgtttggcctactttggggctaaatgaagttagtgtttgtctaattttggtattaggggttgtgtccgaaattggttaaggtgctcaccagattttattgtcgtgacataggactcggatcgtcgagctttatttccattcaagtcgacatacacacctgatttctgaactgaggtaagaaaagttttatgcaccgctaagtatgttagataagaaacaattataatcgttggtgcctcgattatgatcgaggtaatgatgtgtacttgttgtgcctcgattatgatcgaggatagaaacagtcattattggtatgagtaattacttgtttgaaactgcagatagattttttacttatcgtccgctttagtgagcaacgatagtgacatatgtagctcgtggataacgaatggtaagggtgctttatgaagcactgggatcgtctcgtcttgtagacgtttaattgattatgcattgttgaatatatgttgaatgatgagtatgtatcttatatcaagatgtgattacttgtattttacattgtgtgtgatttaatagcttttcttgctgag

SEQ ID NO: 229435 - DNA, 1625 bp, Cannabis indica
gagagagaggagtttagaaaaccctaatgtaatgggtttaagattaggagtaataaaaaaaaagttaacgaaacattacgcctaatttttaatttatttatttatttattttgattttttttttgtaaacatatttattttattttgattaatatgagtggttttcaataaattatgcaattttattaatgaaaattacttaaaattagtctataactcaattagaacttaaaattaaaaaaataagtccaataatgagccacctaattctcaaatcgtttgacaaaaaaatctgagaaaaaatattgcagcataacagttaaacttaacaagacatatattcagttgtatttacccatcagaaaacacaacagtaaaaaatgttacaacaaattcattcaacttcatatcttaaataaaatttttgtttttatgttaaggcaaccgaaaaatattaaaataacaaaagtaattaggttacccaataaaatataataaggtaattaattttatataattaatatgattaaaaatagtcaattataaaatgaaatgtaatacacaatagctaaacaattttattgtctatcctaaaaacaatacaacaaccataaaataaagcaaaaaaaatatacatttttatataaaaatatagtcacacataattttatgatgtaaagattaaaatttatttgtgctcctctccatttttaaaagtgtcttcagatctaatattctttagaccataatggtttaacaaaattaagttgaattccattttggttaaattatagttaataataataaataaataaatagaacaaaaggattttcatttgcatatttgagcaaaatacctcaaattactattttcctcttattaagagatattcaaggtgcatctctttgtatataaacacacaatatatattaatacaatattaaagtaccgtttgataacacttaacgaaaatttaataaattattaaacatgcattcttgtatttttttcataactaattttaagaaagcattatttaatacatgaacataatataaatagttagaaattctcaaatatgggaaaaaaaatattaataggctataagctcctctaaaaagaggagaaatactgatgaagattacatatataaatataattattatatgaattatgtaaaatatggtatggaattctttattgggaattcctttaccaactataaaatctgtcatgagactgaccctaataaagggtctttttatacactagaaaaatattaggcctatgatcaacttgtaacttaactgttagaacttgaagattcagcctttgtgcttgaacaacaataataaatctcaagagactgacatgtctgcctccacatcttctgagccagagagatcattttcttcaatcttgctgtctgaatcgtcgttctgtaatggcgaaggctcggggctcttctggggttctgttccaactcttcttctgtgctctgtagaatttatgagacatgaaatcttattaagattgttgacatgatttctttttctttttcatgtgttgaataaggaaagattacttttgtgagtgatagcatgccgagtcatggctagaaatt

SEQ ID NO: 229436 - DNA, 1115 bp, Cannabis indica
ggtgaaaacagtctctgattctaattagctagagcttagaaagaaatttgatactgctaagaaaattaagatgacaaaagaaaggagcaagtcgaaagaaagtatgtactaagtttttattaaaattggttttaatgcttttatttctattcagtttgtaatattttatcatgaatcagttattttgaaactaggttccgaacgcatatttatctttaatatgttttaatatttaattgtaatttactatttgattactatgtattttgttttatagtaataataatgagaagggtacgtaagaagaaatatacttgttagttatataggtaattagcttatgtgagttgatttttaatttaattattttacgtaactggtttctctatatcaaagttttgataagttatttgatgtagaaagtttttgttatttagtttataagccattgttaaatattcttttttgatattttttttaagtaactaatttttgtaattgatatatcttttttattactttaggcattatatttttgtttagttttagttattgtcatacgaaattggtttctgtatttattgcttttgttattacacataaatgattctaagatttaattttttatttggttaatctatataattagtttctcgatcttatattttaattagctgataaatattattgatttttctttgttaaattgcaaggtccaactccggcaacaactccaacgttcaacactagtgataactttaatgtctaactacaatgaattttcggtagtgacgactttttcaatgaagatagtaattctgttgaatattctcatttctattttttttttttttttgtcagtctatttttattttgttttagtggatggtgactgttttgtgtagtgacgtttgatgggtcgagtctttggaacttttgggaaatttgtaactagttttttttggtactcgtgttggttttagttttagtagtaaggttagtggtaaagtcttaaagcttctaagaagcaggtaaattttatatgagttttagtatttgtaattgtttttggttaagtaaactcttttttaaaaaaatagtagttaaatggttta

SEQ ID NO: 229437 - DNA, 1198 bp, Cannabis indica
cattcaaagtaagtgaaaaaaaatcttaatttttttaatttttgattttgaatatgaaatctataagaattgtattttgatgtttgtttcttcatacataagtcctaaaaataacaatgcaaatatcatgttagccatattattattatttgtggcttttgagttaaaattcttatttttgcaaagtgaaacacaaaataattgagaaaaaaaatgaatcacaaggcttgagattatagttttagtaaagcttgattgtgatcagttgagaatagttacagtagagttcaactaaaatttattcaaatttatatttttaattattaaacatttttcatgaatgtttactaaaagagtgataatcattctatatcaagcccattacacttattaaatatataattttgtctaaataagtatgaaaagtgataataaatttaaaaagataactgacttttaataactttaattttgtggctgcagctaaatatttattatggacaagactatcgtaaataaataaagtaaattttgtgttaaatttagctcaaaaagtaaactaatattatatttgttttaaaatttaataattattttcaaatataatataagtttttcattcgctcgacgagtatcccttttgggaccaaaagcaccaagccttatagagattagagctagcatgcagttaaatttgaagtcgtcgtcgtggacttaactattggcttaatttggcttgtgaatgggtctgtcttagttaattttgggaccttataagtacacgtatcacctattcaaaaatacgagtcacactaataatttaatttaaatatttaattatgtataaacaaagtcatatggtcaataatgcatgttgctactttgtttactaatgaagattatcaataaatttaataatttaattatttaaacatatttgtgtttctaaaaaagttaaagttattaaaaatcaattattctttttaaatttattatcacgtttcatacttatttagacaaaactatatatttaataagggagtgtttggaatgagttaatgttagcaagggaatagtaatgttaaacattaccttgtttgtttggagggtttaatcttgaaatgtcattcccttagtaatataaatacccttgaagagggtaatgttgttacattaaaaaagggtgggattcattatt

SEQ ID NO: 229438 - DNA, 1662 bp, Cannabis indica
atatttagtccgtgagatctaatttatttttaactgagttattttatattattagtaatacataagtatatatttattatacataaattttatgcggatggtgtacataaatgacataagcgaaacaaaaataaataacatagtgataatatatatatagaaatgttcattttaattaataaaaaatacaataaaatttaatatttactaattaataaatatatttctttaataaataattattttatttttatatataattaacattaaataaatataataaaaaaatatttttattttaattttttaaaataatatataagattactgtactcaactacgattacatattaccctacacagccaaatacaatttacacatttccctacaatcatattctccttcataatattccctataattaagggaatcaatggtaaaaaatagttacatttttacatttattcacttaatttattaaaattaagaataaaaatacttaattaattaaataagatacttaatcaaaaaacaaaaattacagtaataatattcgaagatagttcatgttaatgacatgtttactaataaataatgagaattaatgataaaagataattataaaaatcaatagtaaaaaataattattttttttatatttatttacttagtttattagaattaaaaattaattaaataagagataaaataaaataaatatttctcactaattttgtaagaaatgtcaaggatgatgaccttttatttatttttattttactttttaaaattaaatatttaattataattttgtcttttaaaataaatcttataaaataattatattttaaccaaataaagtaatatttagtcaatttaaacatattaatttacattttttaataaaataaacaagatatatcattattattttatttacaaaaaaatttgtaaacaatatattaaaaatattaattcaatttactgataaaaaacatattgatttcaattttttttttcatttattgtattatatttctccattagtttattctcattttcattagtataaacgtgccataagtttgttgctagatgtgaaattgatacatacaattggtccaagttaggggtggtaattcgtgttcaagggtcgtattcgtattgtgtcaagatccatgtacaaaaaatatatgctcgactcaaatatgacccatttaataatcgtatcaaaaaatcaaacccgaacatgactagtttataaacggattgacccgacacgacctgtgtaacctgtttataagcatattttctataaacatgtcaacaaccaataacatgtttatgaagtattcaatacatttatgacttgctaaataactaaaaaaactttaaatatgtcattaacgagtcagtttcgtattagtcgtgtcaaccggaatatgactcgtttattaaatgagttagacgagtcaacccaaacacgatccaaactcatttaaagcaaacttaaacctgctaactcttgtgcggctttcgagtcttcatatcgtgtctgacccgttttgccggccctagtccaagtcatttattattatttaaaaaattaaagttaaattaaaaaaaataatcaatatacgtatttgtaaaaaaattaaaat

SEQ ID NO: 229439 - DNA, 4919 bp, Cannabis indica
acacactgtgcacttgtttttatcaaagttaaccatttttaacatggtaaattaatacatatatatacattcaaaactaactactctccttaacgaattctcttagttaatattaaggaaggatgtaataatttcacctatatatatgtacatattctttctaaattattagtttctaagtaaatacacatagcaacaacgtggttcattaatcatcatcatcatgaaattaactgcaggcagagatatccctttgccgtgtgtacaagagaccaggtgtggaagatcatccttctcttccacgctctctcccatctagagcgtcgtcttcatcaagagcagctcacttagtagacagaaagcagcagcccgtcaacgccatggaaaaaatcggccaagctttcatgggacagccaacggcactgcctcaacaatttgagcaagaaaatatgaacgaaacagacggaagcagcagttccgatgttgcagcaggaaatattcttggagtctctaaacgcaaagccaattacaggacttcattaatggctactccactcattcacgcctccctcgaacaaacagtggccgcagccgcagcttccaacaatatcaacgaggcacaggctgcgatgctgtcatctcatctactgcagcctaagcaaatcatgagtacttgtccaattagttgctccccaatctttccgggctcttcttcctcggcagtggcggcagcgaattccatcgacgaccttcacagattagtaaattaccagcagcagcaacaacagcaatactatcatcaacaagagcagcagcagccttccaccaaccaatttggccatccattgcagctgccaccgcaggcacagccacaacttccttcggctgcccttaatgcactgcctaatttccttccaactaccttctctgaccggctgtgggagtggaaccctttcccggagcctaaccgagactactccaacaaccccttcaagtaattatgaatcatgatgaataataatatttataactgcacatacattaattaatatacttagaggaacaaagtagttctgcttgtgttacttctgattatcatcatgatctaagtcaatttagtactctaccaattagttctaatgcagtgtaggatcttggatatatatatatatataatattataattatattaatgttaatttgtttagaatactagctagggcttttgtattgaattattttgattattagtaatatatgtgactcggtataacgtttttgcttttatttccctcctacatatctgataattctcaaaaaaaaaatattaattacatatctgatatatattattttgatttttaataataatcatcccaagctgtatatgtagacaattcattaatatatattaagtacttctccaacttaattaatgacattagtttaattattaggcagaaatttcatgaaattggttagggttttgagttttagtagacccaatattggggttaaggacctctctctctccttaaaaaactagtatagtttggtagaatacaggctcctacaagtatcgctatatatacattaacctggtatgaaaagaataaaaaacaaattaattcacaacacaaaaattacatgttatgtttagtgtgctttaatagggaaaaaaaaaactaatacacaaaaagaggcgttcaaactgatatacaaaaaagaatctaaatttaacactaaacaattaaccaactaaaaaatcggccattacatatatgctgataattatatattttaatttaattctttattaatacttacccatgacatatttaattataattttatatgtaagagaaccagtggatagagaggcagaggaaactaatcaagctctcaaatatatgatttatacacgtacattacatatatgtataaaaaatatctataacctttggtgcaagctagatttagactttagttgagtgaaaagatgatgattaaaaaaaatgatagatttaaataataaccactcctatgtaattcatttttcttgtgaaccgctttcattataattaacgaaagaaagtatccaaaagaaaatacggtggtatagtccttagctttgagggtaaatttctgttataaaaggtagtatatataaatatgtgcatacaactaaagatattggtaaactttttttcaagaaaagtgagtatttttttagtacaattaattcgttaatttttcttatggtacgtacgtatactatttacgaaatttatgtaattgtagagcttttaatattgtaacttaattattatcttccatagaaaataaaaaagttaggcacactatagcttttatatatactagccagttaataaatgtgacaaattatatgctgcaatttttccaacgacataccttatgaattatttcataaatataaaagaaattataacatttctggaatattataaaatattattacgatttttaaaatgttatttactataaatatcattttttatatttgcatgctatttgtaatcgatatgaataagaggtggaagtggaacttcatgcatttatactctaattaaattgtgacacatcaattaatttaattattttaaggaaaaaaaattaatctacatggttaatagaatctaaaaaaagtagttaattagttgaattatatattaaactacaccattttaacctataatcttaattccgtttatacatatatgttattatgatctgatcgtaagagacagggaaggacgcatgatgtctagtcgaattcttgttctttgagttcagataattcggagctggaatagtatagtagtatataatatatatatatatatatatattattatgtgtgtgtgtgaaattttgtggattgtagaatttgatgaatagggtaggtttgggtgaatcatatgatattatataacaaataactgtaaagtgtataaaaggcagtagtcagaacaaacccgcgtgtgcgtgctgtacactgcgcacctatatatccatcatcactttgtttgccgctgccaggcctgaattatttctggttctccactgcatcttgatatatatataatctatcgatctatctatatataccttttgtgagaattaaattgtttatatatatacatgttggagatgtagctcatgtataagtctaacacagcatatataattacatatatttgatcatttttcataatctatacttagcagattataaggattttatgtatttagactagacgattgcaatataaatctatgaaattatatagttataagagataatggggctaagattatttgtgtatattatatatatacttctcctacgtgtattacatctctgtactaatataattattattagctttttaacacatacttttatatattttatatatttatgtagttgtttaacgaaaattgttaatttaaaacttcttttttattaaattagtgattaaaattaatacagttaaattaatcaattaaaataccaaagatatatatatatataaatatatatatacgtggatattattattttatggccaacaaaaaaaatctcaactggtaatgaattaaattttgcttcaaattgcgtcagaaagcctctctaggtgttcatgtaaaggtaaatttatttcattaaaaagtgtaggcgcatatatttttaaataatacaaatgtgattttacttctaaattcaactgcaacaaatcatcacaattttattatatatcctaaattgataaaccatcagtatataattgagtacaaatcacaattaaagccaattaatgctatatttatacgatagagtctcatattaagcatatatataaaaatgtctgattatataacttttttttatgaatcagtatgtatatattcacatcaaaaactcaattaaaaattagagccaaactcaaagagaaactaattagtagaatccgaacttagagtagcaggaacttgtctcatgcaggtaagattgtgctcataaattctgtccttcattataaatgtttactggtttcaaatggtaattttgccaaagtcaattaccagcaaaattaacttaatctgtcgagcttatctttggaaagggagtgagatgtcaagcggcccgggtcatgttgcttggtccgagatttgtagagataaaaaagaatgaggccttggtttcaaagatatagctgtatgaaatctttgtgctattgaaaaacatgtttaggcaattgagaataaaaaaataaacttttgatcaagtggatcatttcggtgcatattaatcaagatgattggtgagactatcaagttccacaagaaacaagttggtatcgaaaaagaattgtgcagtcgaaagaaaatataaagattgtttactcaaagtgagtttcaaaattttcacttttctattgctagtctttagaataaaatgcataatgttcaggtgtgtaaatggagatatgatttagtatcccaaaatatagaattattatgtggttagctcttcttgagagactaccaactagagattggttccacctatcttttgtgtggagatgccaattgagacatgagtcattttttcattttttttttttttttttgctactgttatagtaggaaagttttgaaccatcttaccgaatggtgtggctaaactataatggaagtgaattgaaaaaacttcttcatatgcttcagaaaagaaaaataatctcgaaaggtagaaggaaggtttttttgtgcattatcactggagtggtttattttgtttaaaaaaagtaagaatacagttttgtaggagcaaaaacttccaacaattcatgtaattgtgaaaaatattattc

SEQ ID NO: 229440 - DNA, 1559 bp, Cannabis indica
ataaacggtaagtttgtaatatcttaacttagttgcaatatcggtccagtccaatgtatactccatacattcgaaactagtataccttactaatgtcctggaaagaacataacacttactccaagtgtaagtacacaacatcgctgattatcacattggtgtaaatccaataacactgatgaaacagggaccaagtcttttgattccactgtgttgacgatactgtaattgtgaataaacatatgatctggatttaactgattttgtgtgtaaatgtaataaacatattaaaccattagcatgtaaaattcatgcaaacatcaatcacttcaaattccttatattgataactaatcagattgtaaagagttttatttagggcataaaacccaacaagtgcctactcactgtagtaagcaatattttctttcaatggttgatgattatagtcgatgtgtttggacctacttgctaaccactaaggatgagtgtttggaatagtttagaatttgaaaacctcaggtggaaaaccaaaccaatcttaaaattaagaacgttatgactgataatgggttggagtttgttaactcagaatttaacaagatgtgtcaagaatttggcatcactaggtatagaaccgtagtgaagacctgtgagcaaaatggtgttgctaaaaagatgaacggaaccttgttgaacaaagttagatgtttacaattcagttctgggttaggaaaaccattttgggaggaagccttagcaactgcaacctaccttattaacaggagcccaaatagagttttagaccttaagacacctttatgaaatatggtacaacaagacccccaacctaatttatttaagaacttttgggtgtactgcatatgtacaccaatccattgacaagctagaacctaggtctgtgaaaggaacttttctaggttatgccttaggaaccaaggggtatagaatctacattactaggaaaggtaaaccaaaggttatgattgctagaaatgttattttcaatgagttagaatatcctcacttgacctctaggaagggtagtgtatctccgtgtgttataggaaaaataggaaataaagagactgcaagtgtagaagtggagtgcggaatgaagctcctagaagaaggttcacaggcgaaagatagtgtggaaccggaagacaatgggtagatggaagtcgttgtgcagccggaagaacaagataacaaagaccaaacagaggtgccaaaagggtttggacagacaactctggaaggttattagttggctcgtgatagaacccaaagagggattcatcctccaactaggtctgcggaagtatacataataacatttgcactagcggtagttcaacaaactgaaattgaagagtccaaaagttatgaagaggcaattttaggtggaaacaagtctaaatggctccaggctgtggatgaggagatggattctctatggaagaataaggcctggtagttgtgtcgaggccggagaacaagaaaattgtggagtgcaaatggattctcaaggtgaa

SEQ ID NO: 229441 - DNA, 1968 bp, Cannabis indica
atattttgacacgtggtaatttttaaaaattaaacagctcagttaaaattaggactaacggacaaataaaaagcttgaccttgaggactattaccgctatttttcgaggttggggacttatctgtatcaaactttactttttgaggacttttgccgcaaatttccctacatataataaattatataataatataattccataattatacacagttaactagtagggtttgctaatccattcttttaatcttaggatattacagtcctcttaccaatgggtctcccaacatgcttgaatacatagaattccctttcacgcttatttgggaggacatcagtatttcaatctggtcggttaaattgagttttaacttcctacaagtagatggaataaaagcttaatgcctcgttaattgcacaagcttcacaaatagatccctccggttgagatcaatttttacctattgtttgtacatagacatggctcgttcaattggatacatcaacctgaagtgcattggtaccccaagtatcgcttctttaggtaaatgcatcaccaagtgaaccattatgtcaaaaaatacgagtgggaaaatggtttctaatttgcaaagaatgtcaaaaataatttttttcctactctacaagtcttcaacattcaatgtctttgagcacaatttttggaaaaatacatacagttcaattattgtatcccgttcttatttctttaaaaaatttccaatgctctccgacatcaagcgtagtaacaacacatggcaattgtgagacttcaagccagaattgttgtcttcagtctcattcacattcttctctaaatttgaagcaaatcttcctagcaactgcatagacttaatatatttgcaaaattcacgccattcaggaagactaagcgtgtaactagcaggcagtttcctccaaatcccattgcagtcttcaactaaacacaactcacgacgtattttgaggtcttccaaatccaatcttgctttccttggacgtcccctcaatacttaaaatagttccaagtatactatcgcaaacatttttgtcaatatgcatcacatcaagattatttctgagagacaggtctttccaatactctagttcaaagaatatacttttctttaaccagtttagctcagctacagaacgtttatgcttgactctacaaaagtgcttgtgttttctaggaaaacgatattgtatctggtccagctgagctaaaacataaacccctaacaattttggaggaggtagtattttttcaatttttcatcttatttattacttctctaccttgggtcgtctatttcaagaaaatgtctgcccccaagataaccaatcttaatgcacaatccaatagaaggtggtgtgttcgttacaagtgaggcatgccttgtaccctttggtgctccaaccagacattaaagcgtacgatgtgtaaagaccacttagtattaatttggaaattagcagactattagggtttaattatgaaatttgcatattagttttgaattattaatttatgatgatttatttgaattaagaatgcattttataagtcataaatggaattttataattttgcatgttttgtgcccgacaacattggaatgtggtgtttggctattagaatcacatcttagtatctttagtgtagtaggaaatatagttagacattaggaatgttaggaatactcgagattttagaattgttaaaaatacccctaagtgaccttttatgacttttagtgtgagaagggcaaaatggtttttttgcctatttttgttttgtctttatgtggatttgaatttaattaataatcttattttataaagtttaattaaatgaaattactttttaataaaatacatttcatttattcattttacaaagaaaatcaatttgacaaaacacatactctctctctctcaaaactctct

SEQ ID NO: 229442 - DNA, 2022 bp, Cannabis indica
gtgcagctgcaaggcatgaggattgaatacacacgagatggacgtgtgcatagccatgcaaacacgccatgggagacgaacggagcacgaaggagctagacccgatcaagttcgggattttgagcagccaccctgggacctctgtggtctcatggctccaaccagttgggtcgaccggaccaaatagggtcccaaggtcgatgatggtgctaaaaaaaaagggccgaaaggtcttagaattttaatgctccatttgtggttacacgggtctgagtggcctaattttgccaaacccagagttgttgctctacgccatccctcctccgatgaccctggtggcttttaagccgccattcatccctctccactactagccatgctggtcagactaccaccccaccgccatcttatatatttatgtatatgtatattatgtatacaatataatctttttattattattatttaattaatgtggtaaaagtactgtgtataatttaattatacatgactggattgatatgtaataacatctttcatcaacatgtcgtttattatgaaagagttattcacatcacaacgataatcattagtagatctgtttgaatcttgagtatacatgaactcttgtttgtgtttattgagatctttaattcactcgttaaagtttctcagagaagatgattcttacaacttctgttttgggagcttgacaacatgagtggatgggaacatgtaatacaataatagaatccaagttttctgagatgatcgaatattagttcacttatagtgtttattttgggagtgctaacagttggatctaaatctacaattggattatagattaattgttcacattgaatgaatggtacgtaaggaattcaagcgataattagaagagtaaaacaataattttgcccaactctaattatgaactgataattggagggagaactacttatattgatcatatcaatagactataagtaagaattttataaatataattatatattgtcaaagagtacaattctatatttatagttgaagggataactacttatattgatcatatcaaagaatgcaattctatatttataatggagtaataatagaattaataaacttgattattctattaaagagttacaataataatcaagcaatttcttaaaggtttgaaacataggtacatggtcgccatattacctttatagaacaatgtgtaggggaatgtttaatttgaagaatgaattgataaagaattaatttttatgagaaataattcttatgggcaaaataataattaaaataatatttaactaattagttttatttgataaaataattttaactagttaaatataataatatttttaaataatatttaaagagagaaaaatattattttagtgtaaaataatatttattttaatcctagtaaaataagagattaatgagaattagtcaattattatttgttgtaaaataaataataaatcttatttatgaaaaaattaatacatgaatttcaggctttaaaatatggcccacacgtgtggggcttagcccacacatgaatggtgatatataaaagctcaattaatttattttgattattttatttaataaaataaaatcaaaataaataataattatcttttaattatttgaatcaaatatattataggataatatatttaaattaaaagataatataaaataaaatgatatgattgaattctgttatttagttatatgatatttattttaaatttaaattttaaattttaaattaaataatattatctttttactttataggattaaatagtttcaattattatatttatatttatatatatatgatatatataatttataattaagaaataaatatacataatgatatatataagagtaaaagtacataacactctaagatataattttgggagtggaaaataagaaaatgaaaaacttgtttctcactctcatgcctactatctctctctctct

SEQ ID NO: 229443 - DNA, 1437 bp, Cannabis indica
aatattcaataaataattggattggatcggatgggtccaaatccattggatgtgatccaatgaacatccctagtggtgaacaatgtcacgacgataaaagttgagatatattggaattatactggactagtttagaaagtcgaattgttagttcattaagggaaaattagaaatgaccataacattctaggtttgattttaggccttaatattgtgagaggggtaaaatagtctttttggtggggtttagaattttatcttgcatggactttccaggctaaggttttaaattaatattaggtatatgtgttaaatataatattaagaaataagaatttataacctagaaaagtaagaaatgcccaaattttgctcttccattctcttcccttttaaaatctgaggtgttcttcacaaatatagattgttctcagctgattttatcaagttaaggctattcttgctttgaggtaagttctccttatgtgtccttggttatttttaaggttttaagctaggttttgttagttctttttaagattttagggttgtaggtttagataggttttgatgcttggtttctaagttcaattaagtttgtttgtgtatgctttggttgattacttggctgtatagacttgaattgggagaaattcagtttaagaactcaaactttgctcaattatggtgttttgagtatttttgatgaattgttgagtattgatgatttgtatacattgtttttatgttataaaactattctggagagtttgaatagctttggtggagtttcggatcagttttgggaagaaaaccagaaattttcttacctaccaaaaccggtcgaccagttctactagtattggtgaatcagtcgactggttggtctgcaggggcaaatctcgattttcttcaagtttggtttttggctcggggtgctttccaggacctagtttagggtatttaggtgtagtatagcctattttgagttaatgaaagttagggtttgttcgattttgaaattaggatttgttttggaattttggttaagttatttatcagattgtgttgtcatgacatagaagctgggatcgtcgagctttatttccactcagttcggcgtgcattcctgattactggactgaggtaaaaaagccaaatgcactactaagcatgttaagtgagaaacgaatatcatcatttgtgactcaattatgattgagataaagatacggtcattgccgtttattatgaatgagtaattactcgcttcaaatcgtagataggtttcttacttatcgtctgctttatcaggcggcgatagtgacatatgtagcttgttgatgatgagtggtaagggtgcttcatgaggcatcaagaacagttcgtcttattagacaaatagttgatctgaatatttgattttgtgatgaaaaa

SEQ ID NO: 229444 - DNA, 2297 bp, Cannabis indica
ccaacctatcctcatcactaaaatcctcaatcctccaattcaagattacctcggcagccgaaggcctaaacacctatttcacttcagtcgtgttccagtctacaccattcttcgttaaaaaaagcactaataggtaagttcgttaccacttgaggattgattgcaccagcatccataataacaccatcgccgcaggaccaaccatgattccacacttggatatttgagtcacgtcccatcaaccacaaacaattatcactgatgaattgcttggctttccaaatcccccttgccacatgcgaagcatgacgagggaggttacaactccaaaagcctaactcacgacaatatttttccttaaagatattaacccaaatagtgtttgtgttcttcgccatcaaccaccccagtttggcaagaaaacacatattaatatcacaaaaactgcgaatactgagccctccacagtttttaggtttacaaatagtgttccagtttacaagagcaaggtatcttcatccatctagatttcccctccaccacaaacgcctaaacaaggcatcgagagtgttagtgatcctacctgggatcgagaacacaaccatattatagatctgtaaagcagagaccacacttttaattaacgtcgttctcgcggccttcaattctagccttcaattcttctcctcaccttgtcaataatgaaattaaagttgttgcatctattacctttcacaaacaaggggttgcccaggaagagctcattaccatccataaactcatagcccataaccttagccaactccaaaccctgctccacaaagcagttcttagacataatcgacaacaaattttttttaaacctcaattgaaaattaataaagtagttgacatctttttatctatacatgagttatataacacttcttatttttcctaaattagggtccagagtctgggctaggggctggggtgcaagtccaaactaagtctaactctgggtcaaggggtccaagtcaaagttgggccaaaaagtaatacgtttataattcatcaacttaaaaatgcacaaatttttaattgagtatagggatggtgaaagtacgaggtctaatccaaaaaaattgtctgaaattgaagaaaaaaacttatttaatttaaatattttaaattctaatctagttataaaaatgatagaaattttaaaataaaataaattatttaaagaattaaagtaacaaaattgacacaatctcacaattttatacgtgacaaaaaatgacatgcttagacccacaataaataaatacataaacatttaattaattattcaatatcataattatatttttacaaatgctaatatcataaagtaatttggtgatatgaatataattatgttttcaatcaataaactatacaaaatgaaattgtgagataataataattataaaaacaatttatttaaatttaagtatgtaataatgtgttaattaatcatttaaattgaccaaactccaaatataatcacataattaaatgaaacaattaaaataaagcaaaactatgaaaaattagtccaaaatggaccccacacaccccagacgccttaaaaaattttaatttttgtttatttattttttctgatttgactatacgatatgttgttttttcaaaatttatgtcatttcctaaccaaaacgacacatcgttgatcatggagaaacaaaacaacacaggtcatccttgaccttgatctgggcacgtgggtcaaaatcgcgtcacgcgatccgactcttggaccagattagttatttgggcactgttatatattataatataataagtgtagattaaaatgtagtaatatatattattatgtaaataatatatattaagtgtttggcaaataaattgtgtaatatataatttatttaacctaacgttgtaacttacaatttataatatggagaggagttacaagattaattatttttgtaacttctttaggttgatcatattttgtgtaataaaagagatgttacacaattgatgatggaattcaaatgttatgaaatatagttgttacaaactatattaatactcatttatatgagagaaatgagtgttgtgtattttgaattctaagtgatcacctatacattataaaaggaggtctttggtgctcatttgaaagagagagatgaagttttctatcaagaaagcactttgctagaaaatcctaaaaaggcttgataattcccaaagctattcctagagagttcccttagtgctta

SEQ ID NO: 229445 - DNA, 1199 bp, Cannabis indica
tgggcgatttattgcggtttttgtaattttttggtttaaccatttttttatttcaaaaaccgaaaccgaccgccatgtcaaaaaaaccaaaactaaaaccgactgccaaattcggtgatgacgtggaaccgaaaattcggttacggtctggtcggtttcagtttattgatttttatgaacacccctactttttggcttgattattcagaatcgtcgttattttttatcttccctacatgatataagattacattttattaggcgatcaacaaatcaagttgtttatgctattgctagacatgcttaatttatccctgattgtagcatttttgggcaaaatgtctagaccgatttgagggttatcttgtattcataatgtttttaattcaatgaggttgacatttcattaataaaaaaaaggtgaaatcaattctaagaaagtaagctaaacaatttcaaattgtatttgccaacacaaatattttgacactaatcaaaatcaacaataataacaaacaaagaacacacaaactttcatgtgaaattgaattaagtaaatctgaaatttttctaaggttgatttgttttgttttgttgtgtagtttttttttccctttccaaacaaaagatgtaaaactattaaaagtctgtacaaagaagtataacacctttaaatataaactctaaagaaagacatatatatatattctctataaactcctaacaaaagatattaagagataaaactcaaaggccacttcccaattttgctttgctttgcttttcttttctttatttcttaagaaatgacttcaaatgaatctgaggcattattgatttttggttcaagtgctgaagcagaagcaagaccaatgagaagcttaatgacttcagttgaatcatcaagatagtattttgctgtgcttggtttctgccctactgtgcaagcaaacacttcagctatggctggtagcgaggcggggttcgatgatgatgatcgataaatcgactcgaacatgtcctcatccgatcggtcgtctcctatgcacagcacaaaatctggtgcctttcctttgctttgtaatgctgatatgaggctttcaacagctctgcctttactcacaccctaaatagttacaaaatttcattaaagaaaccaaaaaaacaaaaaccaacttttatgagttttccttagcaaa

SEQ ID NO: 229446 - DNA, 2264 bp, Cannabis indica
attcttacacttaatggagccatcatatttgaaattgctgtaaacttttcctttctcattctcaaagtagataataaatggaggatatatcatcaattacctccatttttacaaggacttaacgaatctaataatttatctttcagtgtgactttggccaccataattggtttttctatggtgctaaccaaagcactaaggcagttgtgcccacaatattgaaggcatagattaggcaatctaatctataaaggcacaaaatgaactaaccttactgtgtctaggtcttgtgtccaaggacatacaatcaccaatttcttgtcaaattgcacaacaccaaactccagcactaaattgcgagtagcctcatcattgaatttcacaatagtgagtcccatattcatcctcaccatccgttcaatgccaaggtatccccaaatttgattaacgaatccttcaaaaactataaaagggggattgacacccatcaccaaacaaataaccacagaactccagtaggagtgtcaatgggtcgagtcggatctgatccggctataatccgacttgatccaaatcatgcaaggatctgccccggcccgccctaccacgttagaacatatccgacccgacttattcggatcggatctgatccgacccgactatttttttaaagaattttaatattaacttataattatctatccattttaattttgtataattgttaaatacaatactatgtttggtattgacatatattaatagattgtgtaaagatctggatccgggttcgggtccgagttagggtctcggtcctagtctgggttcgggtcccggtcccggtcctgagtccaggtctgggtcctggtcggggtccgagtgcgagtgcgggtcccggcccaggttcaggtctcgggtgccgggttcgggtcttaggtgccgggtccgagtccgggtcctgggtcctacgacccgggttcgggttcgggtccgggtccaggttcgagttcgggtcccgagttcgggtccaggttcgggtcccgagtttgggtccgggttcgggtcccgagtccgagtccgggtctaggtccgggtctgaatctcgggtcccggtctgggtctgggtctgagtctgggtccaggtcacgggtcccggtctgggtctgggtccgagtctaggttcgggtccgagtccaagtcccaagggatctgagtttggattaaaagttttttttaaaaaaataaattaaaatcgggtcggatcagatccgatctaagaaaaaaattaggccgggcggagcagatttgatccaagatccaataagtatctgaatgttttggatcagagatgattcgtcgggtcagagccccaacccgctccaactaaatggatctttttgacatgcctaaactccagttctgagcttgctctgtcacctctaccaaataaattttagcaacaggcttaccaaattttatcattagttcctcatagcgaagctttgctgctgcactaattttttgaccttctttgagcttcgcccaatgtctttgtgccgaggtttggaaatcttccttctcaacttccttagccaagttagtgttcaaccagttcctcatcctcaatcatctgcgaacacaattgtatctctagtattgcaattccatctggttcatcaatggcacattcatcaacaatcttaaattcttggtttgaagggggatcttcaactttagatcgaattgtaggatttcgagtaactttcttcttcttcatcgagagagaagctagttcctatgcacgcctagggggctcctctcctttgtcatatctattaattcacgaaattatcaatactctgttgctaaaattgagactttattgtcgtctcaagaacatcaaatggagactcataataaagatttggactctattagtcttgctatctatcgtggtttcaggccaaaaccatctggcttttcttccttttctaacagtgtagatactagatctcacattgataatggttcaccaactaatttaggccgtggaacttggaatccatattttgtttcactaagatcaaacacatctagtcaaactccaaatcactacaatgttggttgtggctcatccacatcagctacttctattcctcattcttccatgatccctggatcgagattagtgtgccaattctgctctaaacctagtcacattacttcaagatgctatcaaaggttcaactttgatttccctggtg

SEQ ID NO: 229447 - DNA, 2314 bp, Cannabis indica
tttcgcaaaaaccgacgctgaaatggcttaaaaaccgcctctaaaggggggtttttgtagtagtatatattcgtttgaatacatcatgtataaaaaagcagctctatttatcttttcagatacacatctacagttagaggaatacaaagtaacaaatatgagactaagaatatgattgctcttcactgaattcctttggctctccccagtaggcatagtgatacaaagcactgtctaggtcatactgatccttcccaaagtaactagcttcgacataccttcttggctcttcgacatacagagtacaaagacaatacaacatttttatttcctaagagaattctgtactggaaacaactaccaacaccataaaaaaaagtaagctatatctctaagtgaaacatgaacaagagaatcgaaaatgcatataccctgtgaaaagataacttaataccataaccattggtacttcctgtaagttaaaaagcttgctatgtcagtttaaatgcaattagtcataaagaataatttcacaatttgagaatcttaagaagagtttagacaccaccaatacatagcaagataagggtcaagagaggggaataaagagttgaggaccagagagaaatctaaaattgaattgactatataatcttatccactatttgtgctagttttaacatggtatcctctcttctatcctgataatataaagtggcatataaaaaatcatcaccatcaaagaaataaaacttaaggaaaaagaaaggcaaaagaagatgaaattagtatgatactcattatcatacccaatgatgtggcatgactccaagaattgattctctgaattccctgcattcatgctaaaacacaacgaaaagcaacgggaacaaaattatctcatattaagaagtcgaaattatagcaaaattatgtaatgagaaaagcaatagcagtatgcatgcatgtcagagcaagttatgtgttcaaatgttcttctagcaacagctaaatcaaagaagaacacatgagaagttgtaaccacaacaatcaaagtctttaacacatggaaataaactgtaatatatacctcaggaaaagttgtacattttcttcacatatatgatcaatggagtcgggttctgtttcatctgccgcatctactagatcaactacttccttcgacccctgaaaagacttttggttaatcaattttgggctttcatggttgagatataggtatgtatggctttctaaattgaagaaaaaataacttggactacaattcctctaaagaggcacattctaatgcggaaagagagaatgaaagaaagtgaattatattttcattaattcagtaaagtgaacaagagaacagaggtatatatatataccacacaacctaaccgactaaaccagaaaaatagctgaacaatctaactaacttaaccaacaaaagaaacttacagtaataacaaacaaaactaacagaaaggaaatacaaattaattcttgatacccccctcaagatggactgtacacattgtggacagacattttgcaaatgtgagtgtttaaggttgtggaagcaagaggctttgtgaatacatctgctacttgtaaggtgttgttaatagggtttaaccggatttgagaacgattgatcttgtcacggatgaagtggcaatcgagctcaatatgtttggttctttcgtgaaaagtgggattgttggcgatgtgtatagcggactgattatcacagaaaataaatgcaggttgtgtttgagggatttggaaatcttgtagaaggtattggagccaagtaatctcgctgcctgtcgcagctaaagcgcgatattctgcttcagcagagcttcgagagatggtgggctgtttcttagttttccaagatattaaagaatctccgaggaaaatgcaaaaaccagtggtggaacgacgagtagtaggacaggaggcccagtccgaatcagagaaaccacgaagttgtagagatgaagaggtagaatacaaaagaccttggccggggcttcctttgaggtatcgaagtaagtggtgaacggcttgtagatgaggagtacggggtgaagacatgaattgactcaaaatgttgacaacaaaggtgatgtcaggccgagataaggtcaagtagagtagtttgcctactaactgtctgtaaggagaagggtcagcaagggcttcaccttgttgatcatctagtttgagacgtggatccattggagttttggtaggtttacttccaatatatcttgtgtcttctagtagttgtagagtg

SEQ ID NO: 229448 - DNA, 641 bp, Cannabis indica
atttcaatttttgtagttaagtgctacaaactgtaaaattcgaatggtttagccgccaatatccctttatacaataatataaacttctattcgggacttactattaaattttctataccaatacaatatatatttttttgaaagctaatggaaatatattatagttatgctagaggaaatatactcttaaaaaagttgttatggtacattctttatttatttttacatttataatttttttttaataatatctgcattattcttatttaagaccatttataatcttataaaaatttcgaataaaataaattcataaaaatataatgaacatctatttcacggggtactcatagaattattctataatatacactattataggataatttctttagtttgataaaataaaataaagactaactatgatttttgctttcgaattttatgtacaaaattgtgcctttaaactctttagattgttaaaaattttctcgaactattgagattgttgaattgaaagaattccgtctaattttattaataaacacctaatgatgtagatgaaagttcaagtgacatgtcaaatttagcaagtgaaaaccctaattaaactaaaatattttgttatttattttttaaaa

SEQ ID NO: 229449 - DNA, 627 bp, Cannabis indica
atattctaagttattacaccaagatgtaatcataaaaaaactgtaaatgaaaacaacaaaagagcagcttaaattatgcaagtactcatgtaccgcttaataagtatgcaaaattaaaatatcctcgaaaggatatagtgttcgataacaaaataattaaaacttatttgaagtacaaagcgtgagtacccgtatactattaacaaaagaaattagagttcaacaatactaaaaaggaacttagaaaaattaagaagctaaagtgatggaatcgtctacgaccttgcttgtagcaccatcagcgacttcctccgcatctgcgttctcggcatcctcaggtaaaaggtttcccccacatccttgagtttgggtaggcgacatagcacgaaaagcctcgactattttagctgctttcgctctaagaactgtgaagtcaaagtcaggcagcttggacaaagtcgtgtaaatgtaatcagaaatagcctgatcatactgtttcttcccattctccttttcagtctcaagatcgcgagtgagttcctcaactcgggatagttatgaattgcgaggctagttctgcagagcacgacaataattcctcagcaagtgttgtcgagcaaatttcgc

SEQ ID NO: 229450 - DNA, 902 bp, Cannabis indica
aaaaatggggatgataacacttccattttccatgcaagtcttatagatagaaggaggcaaaatagaatttggtccatagagtaacaagatggcacccgaactgagaaaccgaagcaggtaacagatgcctttattagttattataagactctgttgggtgctacaatggatcataggagaaaagtgatgaaacaggtagtttacatgggaccaaaagtctccaaccaggaagcacaaatgctattggataagtttccaaaagaagatgttaaagctgccttatttgcaattccaggaatcaaagcgccaggccctgatggtttctctagctattttttccaggacactgggagctaatagggaacgatacatatgaagcaatggattctaagaaggtgataatgagattgaagctatttgccgagttgtggaagggacagagcaccatgaatggttcgggtcccattgcatgggaatctgtttgtcaaacaaaatcagaaggtggtattgggttcaaaagggtagcagaatatgaatagagctgcaatgttcaagtataattgggcaattgcaaataaagaagataatatgtggatgaaatgggttcatagtgtgtacattcgggaggaagattggtggggctacaaggccccatcacaagggagttggtactggaataaggtagtggaggccaagaaccaggttaaagacttggtagatgtacatcagtttacccaatccaagtactacatctccctcgggtacaagctacttgttcctccaaatcatagagtccattggagtaatgaagtttgggggaggctcaacactcccaaaactagtttcatcatgtggattgcaattcaaggaagattgagaacaaaagagagacttcacaggtt

SEQ ID NO: 229451 - DNA, 1160 bp, Cannabis indica
cgccagagaaaattaagtaccttcggaggcactttaagattccacaatctcttccacagatcagtagggacattaagattgatatggccatgagactcttgttgatgcctataggcactcttcaccaaaaacatgcccttgctatctttcaaccaataccaaacatcttccctaccagctgctgtaagaggaatacgccaaaccagctctttgtcacgatcatttagcacatctgaaatgacttcctgatcccattcaagtttatcaatttgcatcagcgcatttaccatcttcccttgaagactcgggctggatgtttcaatatatgtattaacatcgtcaataagccaaggttcatgaagaatactaacccgagacccatcaccaaccaaacgcctggcaccagcacgaaccaaaccttgagcttccaacacactacgccaaatgtaactcgggttactacctaatgtagcagtaagaaagttaccagaggagaagtacctagctttaaagacttttgtagctagagtatcctcacaagacaacagcctccacccttgtttggcaagtaaggaaatattaaaatctcgaacatctcgaaaccccatacctccattacttttatgggccgtgagcttgtcccaacacaaccaatgaatgcctttagtgctattcgacttccaccaaaatctactaatagcactctcaattgcttgacaagttcccactggaagaaggaaaagattcatagtgtatgctgggagtgcctgtaccaccgccttaataagtacctccttaccagctctagatagaaacttattgtcccaagattgaatccttttttgaaccttgtccaccacaaaactgaacgccgctgttttattccttccaattgaactaggaaggccaagatatttgctattttcttcagcttctctaatacccaatcgatcacaaatggttgctttcatgtgactagttgtattggaactaaaaaaagccgaagactttccaaagttcaccctctgtcccgaagcgttagcaaagatctggagcatctgttgaacattagtaacctctctctcagtagctttgcaataaagaaagcaatcatcagcaaaaagcatatgtgacacaacaggagcaccattagccacttt

SEQ ID NO: 229452 - DNA, 1011 bp, Cannabis indica
ccatactatgtccattaggaattataaattatagtaatttgcaaaccatatgtatatgatatcattgttaccctttttatatctaactttattctattaaataatatttttatatccacttgatcataaactaaatggaaaatcatgacaagaaaataaattcaatcattatgttgtctcttaagtacttaatttactttaaggtgactactactactagctccattccaatgtaagtcaagtaatttttactaacacaacctaaattaaccatatatattttaaacccgtattttattttagtttttcttgtgttgttcatgatgattctttgttgttgttgggtgctctatcgatttgtcgtgatggcatccttcaaccagacttaaccgaagtacttgagttcaaagaagctcttagtcagattaagagtaatgtatgaaacattgttatagtagagacgaattgtgtctgtagtaaggtaactatgcaatgtaaatgagtgtcagcctttgctgcgtgagttgagaacttatttcttaatttttttaagcaactgctaataaggtgattaattatctttttgaagcttcttattaagagttaataagacaataaaatcaactattattaattctctatacgcgaagaatgcaacaatagctcatataaatatatatatccattatatagtaaatatatgaacctcccctgatcattacatatgtacttttcagtactttcttcatttgatcaatcttaaaacttaaacggtatgcgtaactttaccaacaactttaagtttttccaaactacgttatcatctactactatatattcaaatttattttctgaatttgtaggaccatctcatccaattctcactaatactaattgttagcctaaaattagtctaagtttcgggtcgtattttcggttagttttcactctttgtttctagttttaggactattttacgcttgattcttttgtttcaggtccccgggtgtt

SEQ ID NO: 229453 - DNA, 1215 bp, Cannabis indica
tattcatctctcgcagctacattttgtcaagtcataagaaggtctcatgggatatttctgtcaacaatattctcataaacgttccttgggaaaatggagcaagtgagcagtataacttggtgatttctttgatcctttggtagctaatcatttcttttctccctgatttcaatttggttgttttgcttaatgatggtttttgtgttccattatttctctaggacaatttgaatattctagtttttgttatatgagtgcaaccattaaacaagttttgggaaagagaattagatgtgcttctccaattactctttgtttacaatttccattcattttaacattaattattagtactttgtattttattattaactgtaaactttcaggtacttgatgtcggatctgtaatatttttgactagaaatgattcagaaaatcctgtcttagaggatgctaaacaattgtatgctctgggaagatcaaattcatctctcagctctgatttttctgcatgcttccaagttcaagatttcaatgaacactttgagatcaaaataaatgatttggaggttagctttcttatttccattagttatgcttcatttttattttgttaatttttggacataactaatatccattttttttcttcacgaagattatggtaagaatgccttgtcattctaagccaatctctatcattgagaaatttggtgcttccattgtgttgacccgatgcattattttagatgaatcaatatcaaaacaattgaaggttaccttttttttttgttttttttggtgtatcttttacataatttaggatttatgtcattttatcgtcttagctaattaccatttttgatctcatgttttagtataattcaaaattgactttgtaattaccaaaaaagaaacaaaaattgcgtatttgcagcaaaaattctcaacctaacccaccttgtgcacttaacttccttatcatatttttttttgcagtgaatgcaacctcttaaaaagttagcatcatcagcttttttttttcacttttttttttgaaaaaagagaaaaaggtacttgtactagactccccccaaaatgtattgaaaaaccttacttttggcggaggaaaaccgtagttatagggttttagcacaagatcaactaaacaaacagtattcaaacaagagacaagcatataaactactatgactc

SEQ ID NO: 229454 - DNA, 798 bp, Cannabis indica
gaaattgcacgatcaagacatggcatttttgtttctcaacattagtatattctagacttactcaaagaaacatgaatacttgtgtgtaaaccagcctcaaatccaatggagtcaaacaagaaaattggctcggggacaaatcagacccttgtggatagggggagatatcaaaggctagttcgacgccttatttatttatctcacactagaactgacattggtttccctgttagtgttgtgattcaatacatgaataattcaacagaggaacacagggaagcagttacaagaatcctaagatacctcaagatgactctaggaaaacgtctgctattcaagaagaatgataataaggaaattagagtgtacactgatgcagactgggtaggagatataacagacagaaggagtacttcatgttactgttcttatgtttggggtaatctagtaacatggagaagtaagaaacagacagtttccagaagctcggctgaatatgagtttagagctctagctctcagtatttgtgaaggaatttgactgaaaaagttacttggtgaacagggagtatctacaaaagagtctatccaaatgctttgtgacaatcaagatgccatcagtgtagcaaaaaatcatggtcatcatcacaggagtaaacatattgagatagatacacttcatcactgagaagattaagaatgctattgttcaagctatttatactccatcaagatttcaaacaggggacatcctcactaaagctctgccaagaactagttttgaagatttaatttgcaa

SEQ ID NO: 229455 - DNA, 841 bp, Cannabis indica
tattaaaaaattttaaatttaagagtaccaaatatgtattatgattttaaaatacaggatatcatttaagcattattgaaaacacagtatacctaacttgtatttagatcaaatacagggtaccaaatgtgtagacacccttaaatttaacaaattatgtggatgagaaatttgtaccctaaattacaatattaaaaatgaaggtgatgataaataagattaattttttacataataaaatatttatttgttatacttttttgcttgttaattaagtaaaatagctaattaaaattataaatatagtttgaagtatttctaaatatgtaaaaatgtgataccgtgggaggatgagaaaatattttggagaaaactatttctcacaataatttttaaagtaaataccattttaaccatgtatcttataaaaattattgattggataatctattttgttaaatgataaattggatcatgttttttaaaaaaaatttaacatctaatatataattaaatcggatctgaatatacttaaaatattggatgtgttctaatgaacacctctagctcatgatagatgttagagcatctccaatatagagctatgtattgcctttttttttagaatattttgttaaaacttaactctaatagtgatgtaaaatatatgtcaaatttggcccaagctaaaaattgggtcaaatataattttatgtttttcaatcctttctttatgatcttggtctcttgagtcttgctcctgaaataccaaaagagtaatcttttctgtcaacaatgtattcttttcttatattgtctaataaaaacacatatatatata

SEQ ID NO: 229456 - DNA, 1904 bp, Cannabis indica
ggaagtttaattactcaatggtgtgcactagaccagatattccatgccatgagtgttacaagcaaatatctagccaatcctagagaaaaatactggcctgcactcaaatggacaatgagatacattaaagggacattgaatattggtctggtatttgattgtagagaccagttgcatggagatgtaactggatatgttgattctgaatatgcagttaacattgacaccagaaggtccttaactgattatgtatttactgtctatggaggatgtgttagctgaaaatcgaacctacagaaagtggttgctttgtcatccactgaagctgaatgaatatatggctgcaatatagaagccattaaggaagctatgtggctcaaaggaatatcaaatgaaatggagataaactcttaggacatcactattttttgtgacaatcaaagtgctttgcatctcatgaaaaatctaatgtttcatgagaggtcaaagcacattgatataaaattacacttcatgcgtgacataatcagctcaaaacaagttcaagtcgagaagattggaacaaatgacaaccctgctaacattttcacaaagagtaccacaagtgacaagtttagacattgtttaaacttactcagaatcaactaaagcaatgtctcctcacggagacaacctacattggacttagaaagcagttcttctattggcaagtcattacaaaggtgttcaagagatcaaaccaagtaaaatttgttgaggtttgaacccttgaactaggacacactcactatcagttttgacagttggccaactccctcaactaacctaactatcttgatagttatgttagttaagtgtgctggcccgagtgcctactaataccccacatttgtgtgtgtttaagacagctgaagtgagagagtttagagagaaaatcagagtgtgtttgtgagttgtaaatggcctctcatgtgtttgactgacagagtcactagtgagacacattgtaaggagcaagactccattgagtgaagggtttttaccctggttttgtaacctttgttcaaacataataaagttcatctcctcagccaatttgaggttgttttctcccgtgaattaagctcatgatcatcttgattgtgtagcccaaccacgtaagttcttggtgttgattttatgctttcattagttgttattgttgctggttttatattcagttattgttcttgatcattgtgttctgtttttggtgttgtattggttcttatttggagtttgagactccacaaaattaaataaatttatgataattaaacttaaaagtaaacaaatatttgttgtaaccttcttgttcttgccaataatttttaaaattattttttcacaggatgagtccacttctcaaactcttgttttttttttctattgtaaaattgacatcaaccaaatctaatctcctctaacaattgcctcttgctctatattgacatcaatcaatatacacatttacaaacttaacgttcaacgactaacattctcactaaggttagcatttggttagaatgaataaaaacataggaataaaaatagaaataagaatagattttagaaataaaatgaaataaatttaaaatgcataaaaaaattgataaagaaatcattacatttttctcatattacattagaatggtctttctttctatttcaaaataaaatagttattttaccaaaatgatagaaagcgcattccattagaatgatattccaatacttaaaaatagcaaccaaataaaaaaataaaataaaaattaaatttcgtttgtaattttatttccatttcattacttctaaatctaatcaaatatcacatatatgtataacaatcaataacaataagtatt

SEQ ID NO: 229457 - DNA, 1548 bp, Cannabis indica
cttaaatctaacaatctcaatagttcaggagaatttttaacgacaaaaaaaccaattatttatgatcaacaacaaatttttaaaaaattagtgaataacttatattattgaaaaaaaattacaaaccgttacatataagaattaaaagcagacgtgtgcaataaaatatttaaactttattttcagtactgtaaataatttaatttttttaaaaaaatttacaaataacattaaataattataacatacatgatcataaattttttttttataaaactttcttttgtaacaccaaactagagagagaaagtactatacatcctgatgctctaagtttgtcctacatatggttttattacaaatttttttacttttagtcataacaaaatttgtcaataaaagtaaaaaaaaattataactaattataaattataatttttatgttgtgactaaaaagtctattattaaatgtattaattacaaaattcacaatttattataactatatgtatttttggtcataatatttattgtgattaaaattatattagtaataacttgtatctaaatattaaattttagtcgcaaataatatttattgtaaaagtcgcatttaatcacaaaaacttatcttgtttttaaaaatttatcagtaaagataattttttttttttgtaggaattgtatcaaattgtaaataaaactaaaaataatttaacatgaactaacctcattttattattattattattattattactacttaacatgaactaatataacctacaatctaaaattaggggaaaaaaagtgataaaagtaaagtaaacttgtagtacaaaatcctttaccataggaatattcttcaaagtacttttttggggtaagatttatatttttatgtaaattaatcatgtaattgaattactagatatacatataataattgtaagcattattttatataataataaaagtaataaattaataataaagtatatatatgacatgaaatgaaatgaaatggcatgatctgcatttgcctgcatcgataaatacatgtctatattctctgacctttttactctcttttatcctttaatctcatattccttcctcttccattaaaatacatattttattttattttttaaaaaacttattatttattaatatatgagacactgtttaaatcaatcaattgaattgaatctaaatctatctcttttttatttttttaaccttggaaatattctaatcctagccctgtatatatagctatataaatattaaatatatagcaacatcaatattgtcacaaattttaacttgtaatataaggtggcactgtcatttactgaaaccttgattcacacaatccttttgaatgacattacaacatcatattgtcatgcattcattgaatatttatcataacttattttaaagcattaataatacatgaagggaaacttcattttttgcccttaataaaacccccaatatcaaaatttagacccttcactaatttgtataaattaattccat

SEQ ID NO: 229458 - DNA, 1877 bp, Cannabis indica
aaatcacgtaatacgcctaagttagttagggtgttacaagggctctcaagtagacaaccagttttctccctctttggaccacagttagagtcttatagcagccttggaggcatatacaattgtggccttatgcgtggtttctgttggaaactctgtataaggctagacaataaatccattatggttaattgtgcaatttaggacttactgtgtgtcttggtaattgtacctaagacgatacttggtcattggttgaccttgtacccttcgtttttcgtggaagatgtcattgacttgaatatatttgtagctttgtcaggttgctcacctccccttgtttctcccatccaggtagtgtcagtgttgaattagggaggtgacagatgtgttgaaaaacgaagggtacaaggtcaacactaacagatgtgtcagtgttgaccttgtacccttcgtttttcgtggaagatgtcattgacttgaatatatttgtagctttgtcagcttgctcacctccccttgtttctcccatacaggttgctcacctcatactgatggccaggacaaagcaaactttgcgaacggctccactgtacgatcctcatgtggccatcgtagccacaatgggtcgaatcatagtggaggaagagactgcccagcctcctggcgaggctgagccaaaggtggactaggagactaggaactctgatgcagaatccgagtaggaggaggctactccagtgagggggaggagatataggacatgttctatcctccctaactgtctcttgggccattatgacacccgagacaatctgttgaatgggcttggcgcaccttcggtactaggactagatcatgtcctagaacagtctcccgtgccaaagatattggattcgaagccaccttagacaaagtgggtttcaccaacttctgctctttctagtaagacctttgacaaggtcattaccagtggccttgttgggggtgtttgttgcgagatccctcgcaagaactgtagggtgcacaggtaccattcgggctggttggcatggtcaaggcaccacataaaacatggggcgatgttgccgcttcatcattacttcttagacgtcgtagcctattttgggatgtgcccaacacagctcatgctgaagagcactaaatatctgtcggcaatgtttgttttgtacagggagcttggttggcctccacctaccccttatgagattgggtacttttttgagttgaagtctgggctgaagtagagcagaaccggctatttttattttagccaacttggtcatcaatggctagtgacaacaactgcaaggccatgtcaaaagtaggcaagtatgccaaaagatactttgtggcacaaggcctttgcagaattgtgcaccacgagttttagttggtgccgctctttggacattccatctctactttggagataagggatagagcgaatcacatccttttggacaacttttggatgcatggcttgtaccccctactcctggggttgcaagagtgccgattgctggtgtggcctaccatagagatgggcaaggccctgacttggatgatgaagaagcacctttgtcttgtattatacagaatctggagaggagagagagagctctccataggcgcctgtcctgtgggggtcaaggtagcgaagcctctcttcgtatcaagcctagaggctcagtttctgatcgacctacatgccctgtacccacaactagggtcaaaagcaaagctatagttgtgagctctgatagctcttcttctaatgatgatggtatttgatagtttataacaccatacttttattcttttgttgaatatttttgaatgcattctgactttgctac

SEQ ID NO: 229459 - DNA, 1105 bp, Cannabis indica
tttttatttcttttaataattttgaaaataacatattttttaaataagtacccaaagagattttttcttccttaaaactcactaaaattcaaagcaagcctgaccacatgtaaatagaatagaaagtgacttgtatttcaacttcaatgcaagtgatgggaattgatcattggatggccccaagaaaagccttagtaggtcatcctttatttaagaagatatatagtgacatggtttttcaatgatctttcaaacttaaattttttgcttttgagagtgttgataaaattttaaaaatgtgagtagttcttaaacaatcaaatttcatcaaatattataagatatatagctaaagaagatactcacaaacaaaaataaacattactcaagacaactagaaaagcccgactactaaataaaaagtgactcgagtgaaataactcgatgagcaaaggcataagcagtagtattatattattagcccttttacaatattgaatagaaatagaagaaaaggaattccaaacacttaaaatgtcacaaaccacaatgccatattctagtaaactattcacaatgcatcctaataccgccgtaagtaattcaaagcctaatgaccaaccaattcatcttttaacaacttatgatcatgtacaaaagcctttcgtctatgccaaatgcgccaataaagaacaataaatttctcaacctctttcatatggagaaacgacatacatccaataagcaagtcatagaaagaagtagtagcaacccctaccttatcaaagcctttaatctcctaacctttccaagttgattctttagaattcaagaacctttttgaatctaaatctaattaccactactaatcaaccatcttaccccttcctgccataaatcatggccccatataagacactcttccataagaaagaggcacgtttgatttcaagaacattcacaatcgagctatgtgggtaataaaagcctttcatcacacaagcaaccaaagaatcaagactatcatagagtcgacctgcttgtttcgcaaagggaaactgattaaaaagaaacatgttacgaaacctgtaacgtccccgcttca

SEQ ID NO: 229460 - DNA, 1949 bp, Cannabis indica
ttttgtaaaaaaatcccatacattattgtgaaatatcataaattaacatgctatctacatacttggtcagattttaaagtaataatttgtagaattttctaattgtgacaaactcatgatcaactgatcaagtgaagattaatatacaatttatgatttatcttattgtttgtgaaaattgtatgtacttaagaaactaaaatttatggatgaaataagaataatcatatattgaaggttgtttgatatgcaaattcaatgtcttgaagcatattaattaagtaacaaataataataatataaacatgaaaatgaaagcatagcacgcctaaagtacggccatgcaggtgagtacttgatcagtagtctaattcatgacaatttaaggcaatttcttcttcatctttcttctaacttgtatatttctttgttatttcaataacatcatattagtagtaaaaagtgcagcaacaacatacaaaactagaaattacaaatgtaaatatgctttttctcatatatcttcattcatgcaagtaagagtagacaaaaaagaacaataagaacttacctcaattaaataagaaattagttacctcattattaattgtgatcttatatattggagaaaaacactatgaaaaaaaaagtaacaattaaaaaaaatatataattgaaatatcataatcataatatatataattaaggaaaacttacataataacaataataagaataacaatgaattagttatacctcctttttacgatcttcttgttatcattcttcttcattttattaaacaaaaataacatgaaaaagataagtaacaattaactataagaagaagaaacagaatggattttaagagatggtttcacttagtaaccaaaatagattttattattttttccagcaaaaacaaaaattaattaatttgagctacacttcgctcattggtgggttcttctcttattttgttgtgtatggttgaaatgctaatgtgaaatactaaaagccctagttgtgtttatcacttttattgatgtcatattgtaatatcttaatgttaaacccgaaattcagctgtacttcagagaataacacatgtcaatcaagtggaatatgaaccaccagatataataacgattatatcatttaatgcaaaatggaataactaattaaatataaaattaatagagtatattcataactcgctgactgtacagtctttggcgagataaggatacacaaactataaattcttgtattgatgagagaccatcttacctcggaaggtacaatcttgagaaaactacgagcaatgtatagcaagacatccacctccctacatataaggaaatattgatgagatgaatcagttattgaaacacttagtgtatactccacattataataactaagtgtaacaactaggaaacatataagacatgattgttcagtctgcgaggtcttatggtcaaagagtagttcttaagtttgctcatgtcattgctagaaggcatatgctcaaaccaaattattattggccatctatacatgcaatacgagatgcctctacccatgttagcgtcaactgttttgaagataagaatgataagcggttatacagttatctagtgttatctacacgtgtttaaatgaaacgtgatcatcaaatcttacatttcatgaaacgattatgtaattcaaatttaaatgtaaataattgctaacctatattcctataaatatgggtagattctacagaaaaagagacggaaaatctttgagagaaaaagattactaattgtaatactgtattaaatatccagaaatatcttgaataagatagactcgtggagtatgcagatttaactgcaaaactacgtaaaatactgttgggttttatgccctaaataaaactctttacaatctgattagttatc

SEQ ID NO: 229461 - DNA, 895 bp, Cannabis indica
cattggaagtcttggaaatctttatgtaaatcaaagtttatgggggggccaggatttagatctcttgttcattttaatcaagccatgcttgctaagcaagcttggcgaatctttaaaaatccttcctctctccttgctcaagtccttcatgccagatattttcctcgtagtacttttcttcaagctaatcctggtcacaatccttccctatcttggaggagtattttatggggtagggagttgttaaattctggtctcttatggaagattggtaatggtagtgatattcgaaccattgaggaccattggcttcctaataataggtttaaattcttttcttctgataatttgcctccttccccttttttgtcttatttaataactgattctggggattgggatattgctaaacttgccagttgtttttctgctcctttggttgatgagattcttagtgttcctgtgttaggtgagtttggcaaagatgatattatatggggtcatcatagttctggggagtttacggttaagtttgcttatcatcttgctttttcctctcaagatcttccctcttcctcttctttctcttcttcaaaaaagttttggtcaaaagtttggaattctaaaattcccccaaaagtcaaagtttttatttggagaatattttctagtgctcttcctgtttctttctctatgaataaaagatgtgttattgattctcctttatgtcctttatgtaaaattcatcctgagacggttaagcatgctttactagattgttccagatcaaggaaagcttggaagtcttcaaggtttgtctcctattataaacaccttagtatgtatgatttcttttgtagtatatctcaggttttggatagagattatttctgta

SEQ ID NO: 229462 - DNA, 1263 bp, Cannabis indica
tcaatcatcatggtatctcggatattggaatttggaaggaacgaattctggcaacttctcgattaaaagtgcttatgtgtcaagccaaggagtgagatttggggaaaaaagaactctatggaaggagatttggaatattaatattcatcctaggcaaagcatgatattatggagggctgtggtggatgctctgcctactcgaagcaagtatgggggccgtaatggcactagatgtctcttttgtaatgacagtatggaaactccgctgcacctgtttggcagatcgcactctgggctagagcgtatcgtggtttgggggccctgttcccattcgtctgagcaagttcaaggtaacaatcatgctgaatttgttgatggcattatttcatcacttttcagagctgctaagatggacgagcctttgatttggttggcctctatgatggagattatttggctttggagaaataagttgaaccgaggggtggatgtttgtattaaccgaggggtggatgtttgtattaacctggaggacaatggcggttgggggaaaagtgtcttacactccaaaagtcctgcttgttgatggttcctttaaaaatggaaagtttggtggagcctttgttgccattgattatgataattaattttgggtggggaagtctatcaatgggatgcaaattgatgctactggaatagagttagaggctttcaacatggctttgtgctgggctgaggataataattgaaagaatattgctgttttttgtgactcaaaggtgattattaatgcgcttgcttctggaaaatcgcctgattggaaacattggtctctcttttcggctgttttggcccgaaaaaggaagcttggtgaggctctctttacttatgttaatcgtaatgttctaagtttcgttgataatttagctaaagaagctagagtttctactcttggtgaatgtaactttaaaggagaggaatttccccctgtggatcccagttatcttttcttggattaattgaactgagattctattttgcaaaatatatatatatatagaagggtaaataatattttagattctatgttttgcaaaagttaacaattggaccatctgttttgttaaatgattaaatagaccctgtattttttaaaattgtaaaaataggaccttgagctcaaatttcaataattttattttttaatataaccaactttacgacaatatctaacacaaatagatactgaaaatgtaaccagtt

SEQ ID NO: 229463 - DNA, 2367 bp, Cannabis indica
aactacacataaaaattaactataggtggcttagtgaatgaaatgggccaacacattattttgggtaaatatgggcctccaattccaaagtgatgatttatataaaaatatttaagaaatatggtgtgttttctattaggatgttacagaaaatatgagatattttttgtgagtatttcttttttgttaatataggtatattttatttgtgctgttttttaattggttttttattaaatcttttatgtaactaatttttgtgtagtttttaatttaattattttatgtaactggtttctaagtcacatttttaaacaaaccaatataattttaatttagttactttacataattagatttctttgatcacattttttaatacacctaatttgtttttctatgacaaattacaatatccaacttcggtaatgacaataactttgatggtttttttgagaacttttttattgacaatgaaaactctaacaacctttttactaacaatgacagctcaagtgattttccgatagtgattaatccaatcttataaagctcgtttggaacgtcgcattaggtcgtattgtattgtattgtattatattgaattaggttatatatcatatttttatataatactatgttaaattttaatttatactaaaatattatatatttaggtgtccataaaagtttataccacatatatttttacattaaaaaattgcataaaatatagttcaatataatacaatacaatacaatacaatacaacctaatacggcgttccaaacgagcccatagtgatttttttttttattttgacaactttttggtgataattgttcttgaaaattttattaaatttatccatgtcagtttgttggaatgtttattatattttttaaaattaccataatttgttacattactttattctcatatttttgtaaactatataattattcccattttttttttttgtaaaatctccttttttttatatatctaaatttgataaacaattttcaatttcatacatttttaaggctttttatatttttcttttttaaaaattttatgtgatttttttcttcaaatgttttaaaagtgacaataataacttgtagttgaagtaattttatttacaagttgtgccatttaatatggttaaaaagtatactttgtaatctttttttttttttcttttgaataaaataaaataaaaatactttgtaaatccgtacaaagtcatttaatgttaattaatccatgacttttcactaggtgagggacacctttgtggatgagaaagtcttttttaattttgtaaaggtaagtgattattattctttatatattggtccaaattggcctctctactaatagcctatttctcttattgaatgtggtttggttataaaactaattaaggattaaggcataatactttaaggatagaatatgctatatgctataaatattgattttttttcctttttaataattctctttttattatgagctattttcttttattatacttcaaagttaaaagggctcttcatgatgtatttatttttattttcttattatattttcatttattttttaaaaaaattatataatcccacatataattttacttaaaattcaaattacttatgatatacccatatactatttttataatttttttttccaaatttacagtgtgagtttctaaagtagttgcagcgctagttgcaataggggtttctatacgattttttgttgcaatttaggttacaacgctagttgtaataggagtttttatgtagaatttcctaaaatatgcaaaaaaattattttaaagtgtaaaaataaaaaaacgtataataaaatcttaattcttaatttcctttctatgaattatttttgaaactcgagcatatgtgatagagaattcaagaatatattttgacttgaaattcaacaaaataatagaataacgtcaaaaaatgtaaggtaatgtttggttgggaagaatgaaaacatgagaatatgaatgaaaatgtaaataaaaatagaaatagaatgtaataaattttaaaatagcataaaaaattaattaattttttttactttcattcatgcattagaataatttttaccctttcaattttaaaactaagaataatacattctaccaaaactggtgaaaaagtacattctacttggaatgacattccaaatatgcaaccaaactaaatagaatggaatgaaaaattgtttaatttttctatttctattaccttctagctaacgccaccttaactgtttagtagcgttaatagctactatgtgtaataatgaaatactgtaaaaaaa

SEQ ID NO: 229464 - DNA, 1180 bp, Cannabis indica
atagaaaagattacattgaaatagagttttatttagggcacaaagcccagcaacatcttctttgccaaaggagatcgtgggctctatgggcttttgttgtttagagctctaatatttgatagctaggacttttcctttgggctcgtgaggagtgtccaagcatagcactccctggctttgctggtttctccaacaatgtggggtccgcctattatgatctctagatgtcctgctacgggtggtggcatttgatctccatttcggcctccttatgcctggatctggtcatctttcacataacaatgcaagtagggattgtaacgccttatcaggtactcaatcttcctattcagattttacactcattagtgtcatggtcgaagttgttgttatttacagagctttgacatgttcctcttgcccatctccctcttgattggaaaagggctttcgatatgggaccattccctgagtagccatgaagatggtctcggacttctctattaggagggtaagcaggtgtatttctcctccttattcttttgtgtcgtgagagaagtgttaaacttcccctttttgccattattcctcctagatctgtttgtgctgcgcttaaatatagtgtttttaccactagaggtttgggcagcattatcgttgcccgcctgtgaacttggtggtcatgaggctattgggtgccttgtgactgcgtgccattgacttgccccgcctaggtctgtcgtatggcttcttaaagtttgataaattcgtattccctatcggggaactccttcatgttgttggttgatattttcctgatatcttcacagaagtcacttagtgggagtgtgcccccccagtatggccgtatatcagccttcttcaataaggcctttgactttggtagcctcgaccataaatctccgaatataatctttcagaggttccccttatcgtttttttgacttccacaaagtcttccagctgcaatggtacaagtgtcgaggatgagaattatgtatagaattcttgtgagaactcagcctaggagttgaatctccctgaggtgagtttaaagtaccactgttgggctgtctccgacagtgtcgctgggaatatgcaataatgtgttgggttttatgccctaaataaaactttatttcaatgtaatccagattat

SEQ ID NO: 229465 - DNA, 1448 bp, Cannabis indica
aaaaaaaaacaagcaccagaaacagacaataactcaatacagcaaaggacaacaagacaaaatcaaacccatgtcaaaggacaggacataaaatcacttttttttaatctattaataatattcaagggaatagtccaactatcttctggccatattttttttttaggattgttacaacaccttctagatttatcatgacattataattaattagtaataatttttaaaaatttatatttataaattgtacaaatagtgatattgataaatgtagtaagcatgtcaatgatatattttaacattcctctattttagtaatttgtaccattactctagtcttgctttacgcctacatttctatagttaacttttatttttattctttttgggctgcttttgattttagaaagaaaaaagtttatatgaatcaagtgtgatttcaattgattcattgctacaacaaaacaattacaaaactaaaataattagcaatgagtctccccacttacactcaaagactcgaaccaaatttcctctctttctatttctcattatctctcataacatatttaaaaatgtgatttaggcctactatactagatctcattaattttattttgcaatatgccagctactactgaaaaaaaattacctatcccatccctatttctccaataaataattgtgacctagttattttttttttccacctcatttattaattatttggtatactattttttgctggagattatttggtacactattacttttccctctctcttgttagagatgatgagtatagggtacttctctctgcctcacacaatcattgccatgattatctggcaatcattttgtaatcatctagagtattctttttattattagaaagttgttatgttttgatttttatattatcacttggcacagcctctttggctcttcctgtatcatgctatccctacataattaaggctccacactcagtatcaatatgagatgagtaaataaattttcttttttggctaaaacttaacttggtatcagagtcgtaccactcctccaccaaaatgtcaataggaaattctcaaactccccacaccaccacctacaaatcgtgcccagcaaatccaacctgccaccaaccctactgcacaaactttcagtggtgttggtacctctaatagctcaccaaactgaccacaaattacacacaaccttttaacacccttaaccagcccttttcaatcaagctagaacgaaataatttcacactatggaagacaacagtatctaccactaatccaaggccacagattggatggttttgtcgtatggcacaagacctttccctccctgaaattcataccagcagagactactacagacagacaacaaaagttttagagttacaataaatcctgactatgaacattggatagtta

SEQ ID NO: 229466 - DNA, 1896 bp, Cannabis indica
ttttttttttctttttctttgttgtttaaattacatgaatgaatagaagtttaaattttaatgttattatcagaatactattattggtgtgcttgtttgttattaatttccttattttacccattaattatgtattttttttttcttcttttctaagttaatttattttagatgtatacataaaagcacaccaaccatatatttaataaaatactaaaagaattttattctttattagtttaaaagaaagagagcatcttcaagcaattttttttcttatcttttttaagttgttttgtaatattattatagtgctctatttttttttagagaaacttttgcttcattaaaatatgcaaagacagtacaaagcaaacaagttaaatagaaggtaaaagaccattccaaaccaactcattatctaatcttaattctaactttgcaatctgatgagccaattgattagagtccctatatacatgctcattcttaagattaggacggaaggataacaagtgcttaatactagctaaaatatcatccagtggactaacattccaattacaagagttaagtttatcaacaatagttttacaatctgtttttaaaacatccactggaagatgaagcaattgaacctattgaacagcatgatatattgccttggcttcagctatgacagcagggatacttccaacacaaggcttggctataccagctttcactctacccgaatcatcaaccatcacaataccatagttgtgcttcttaccatgaaaatcaagagtagcatcagtataaacctataaagaagctctcagaacatcatccgaaaccctgctttgcaagtgagctaaaacactagaatgctgattagtttgttgggcatcaaggtactgaaaaaaatagttgacacaccaatcgaaaatatcagaagctggtaaaatattgttatggtgcaaataattgttcctttgattccacagagtccataaaaaacaaaacagaatgttaacataatctttgtccaaaatattaaaagagaataataaaaaatcaatgatatcaagatgtttatatttataataatgatccacaaacctagaagatttccaagcttttttcaatctgggacaccctagcaaagcatgatgaaccgtttctggactatttttacaaataggacaaagtggggattcaataatatgtctagcaaaaagtgaggaagcaactgggacagtattagatactactctccaaatgaagtgcttaattttaagaggagctttagagtgccatattttattccaaaacttcttagaatcagaaatagaggaagaagaggggatatcctgacaagagagagctaattgattggctgacttaacactgaataaaccagaactctctctggccatggaagtggctccagtatttaacaaactaattaacagattaaaacaagcctaactaacttaatcaagtggctcctaaaagcccccctcaagatggagtgtagatgtttattaaactcatcttggatacaatattgaagagatgggtaggcaatagagctttggtaaatatgtcagcgaggttgttttgagatgaaacatgaagtagtttgatggagccttgttggacctactctcgaatgaagtggcagtcaatctccacgtgcttagtgcgttcatgatagaccaggttttcacaaatgtgaatggcagcagtgttgtcgcaatagagcaaagccggagtggaatggttgatgccaaagtctttgaggagagcgaggatccacgtgagttcggaagttgcattagccatggctcaatattcggtttcagccgaagaacgagagacggtttgttgtttttttgatttccatgacacaag

SEQ ID NO: 229467 - DNA, 835 bp, Cannabis indica
tccatccaagagctgcaggaactcaggacagtggctgctggaactgatggggaatcctccaatggcaaaccggctgttgtgaggataactgaaaagcctgaggcaagccgcaacagtccaaaacccacctgggttaggaaaaggacccctcaagctcctccccataaacttcctcatttgggtaaacatgctatagccgttgcacaagatgaagtactgaatgcctctgttgaacaaaaggagtctgagaacctaaagcaaccttctgaggcttttactcttcgtgtatcacctggacatgaggcccaaaatagcagcccagctttgaagcccataataaaagatctcccaaactattcctctttgctcgggtcccaagccactccaatggattggccttcaactgactgttgggcccagaagaaggcccgtgaattgttaatgggaggcctcacagtggacaaatacttcagagaacccactttgctaaacccattaatggatatcaacgatttcagagtccaggaacaccttgtgggcccccgtaaaaggaaagcctcagatggtataatcgttaaaccagcacctgaaaaacaattacttgatcctgaatgtgattcatttacgaccaaggccaacatacccagcgtcgattccccacctcactcacctggaacaactccacaaccaagctctgaaactcatcatcaacccaatgtcattggaacatttaattcgggctcggccgaagctcccagttccagcaagagacggggaaggccacgaaaatgctcaatgtcgacaattaacaacagctgcactccaaggaagaggg

SEQ ID NO: 229468 - DNA, 1169 bp, Cannabis indica
tcatcctcggggcactatgatgaggagatggccggctcacctgctgaggaggtggccagctagggctttgaccaggtggtcggtcagcctatagaggcaatggctagcccacactccaatgatctagactttgcagctttcgattcagccccacctgcaccttcacacatgtagatttagcttattagtttttgacattatggttttacagtatagacattattttcatgttctgtaaggcctttgggccttttacttttgaatgctacatattttcagccttagggctttcatgttcatacttttggcctgtaggcattttatttttaaaaactactattgtttagccctatttctttttatcatggattgtgcgaccgaccaggtcgtcttaaatcttggctattttcttatggcattgacatacaagtatttgaatttacttttctttatgccaagctgaattatacctacacctgacttagaggcagatttagtagcttattctaagcgttaaaatttctttgctaagttatttgcgctagttcgatgcattgtatggtgtgggtgccccccaagtgagcacacagacttactgtctcttagtcccttgcaattcaccaagtttcatagaccttgcttgggaattttcttagggtgctacctacgcatgaggagctgaaaaaaagagtaactttaagaagataatcttgttagcaagtagtttagacacaataattcaaacatacatattatttttattcattaattggtctttgttgttgtgcaacttacataaattgaatctacaagcttacataacaaagttttgcttctatatatcaaatggctacccttgcttgacttgcatagtagaggccaccgttgaaggacggtgggaggccacaccaaaaaggtcgtgggtactagctcttttccactctaatgttgagttggtagaactgctactacaaagtagtgttctgtaagctggtactaatagtatttgtgaaggtgctctccattccagtatcttggtaggagaacgagttccatgttcttgttgtaccttcctagattgtaggctcccttactagttatctctgtaacttgataggggccttcccagttcggtccgaacactccttgtaatatcccgatagcctaat

SEQ ID NO: 229469 - DNA, 621 bp, Cannabis indica
tatgctagacaactttcttttttacacttacttttgaaactctctttaatgttactatctacataactagattcatacactttttctcatttatacacaatttaagtttagcaaaatattataaattacacatactaacacattcttataaacataatataatttttatcatacattttttaacaacaaaaaattacatgtatacatacacactaccatataacttttatttgactttagcaataaaaactatcttatgtgacgaggtacaaattaaaattagtagaattacccttagagaaaaaaaaaaaaagcaaatattaatccattataaaatcagagaaaataataaatattttatggaatctgaaaaaaattgttacaagtgggtaagtcatgaaaaattgaaaaatgttggttgtgacacgtgctaaaactttgtaatacaactagaaagaatattaaataattaattggtttgccactatcccaattctcaagttgagccgaaaacgtgaaagaaatgttcgaaaaaggaaggaaacccaattacccaaatatccaaaaccaatggaataattaattaagataattataggcggagagagagagagagaggag

SEQ ID NO: 229470 - DNA, 2458 bp, Cannabis indica
ctgcacagtgtttagcaacaccacacaagtaccattttttccctcgactttctaatgccacgacgtcgtttccgctcgttaacggcactgctccaactggtgctgtgcattgtctgaagtctgccccatttactttgaacacattatgaactcctgctggatacgtaaatactgcaaaggaaaaaggaaaacaaaaaacgtttatgtcaattttgacagtgaacatatttcgaattgtatcattgtgttgtgtcgtgaattgtcatctttaatatttttgatgcatatagtgtacataatgtatcattaagtattcatattattattaataagtatatttttttttaaaaaatagttagggcccgctctaaggataagtgggttaggcctgcgcttggacccaattattttaagggtccaaaaaaagggaaacttacaaaaatactaaaatttgggttaatttatacaaaaatactatcacacgaaaatcttttaaaaaatatcgtatatttagaaaacaatagtggaacacaaaaccgaacaattaaaaacaacagtcgaacaactgaaaaacaaccgtaaaataacagtcaaaacttaacacagtacacagtataaaatctacacagtaattttgaaaaaaattccgcccacagtaaaaaaagaaaaaaaaagaaatgaaatggtctaatgatctaattatctaaaaaaataacttttaaaaaaatatacatatattttcttaataatattttaaaaataccatttatctttagagtgaaagaccaaatatttttttgcctactcattttaactcaggatcgcccttagtggttaattacctagtctgtcaccaacacgaaaagacttatcctgagcccaagcttggtaatcgaagttaatagtccagcctgaatcatcaccaacaacgtaatcaacggctgaagttgaagcaaccaacaacataatagttgtgacaccaacatacactatttccttaaacgaggccataattatgtaatattaatgaattaattcacaacaattaagttgaaatgttatgttatttatatatgcactttgggtacttactgagtggtacttggcctgcctgctttgccgaatcacatatacaatataatatagtccccattggaattcactattattttgaacttattattattattttttttgaatggaaagttaaatttttattaaccatcaaactccgttaccaaacaaggtaacaaattggttggatggaacatcctccaaaccaaagatacaaccagaatataaatgagaagcccttgcgaagttatgagctacaacatttgctgatcatttaataaaataaacactaacatgacccaactctaacatgagttgtttacattcattgataatttgaccaaataaagaaaccatatggatagagctgcgcaaagcctgaaccactgttaagcagtcagtttccactacaactcttgaccagttacgattttgatccaacttaaagcttctctcacactgatagcctcagcaacttcaggattaactctaccaataaagcattctgtacgagcttccaataaagggctgtgtctatctcttgccactaaaccaatgccataagaatttgcttcactaaacatagcagcgtccacattgatcttgatactattttccatgggaggacaccaaagctctgccccatcacccgactgtaaaccagtccatgatgtctcaatgagagaattttgagcacttgtccagtgatcaagataaccttttgccgacattactatgctttctactgaagtttctttcttacgccataccatctcatttcttccatcccaaatagcccaacataaagcagacattaataatttgttggccatattttcctcattgaaaatcttcacaaaccaatcaaagaaattatcaatatcatcacttatgatgttgccgactgacccaggagttccagtgccaatgcccacacggttccatacaacttgaacctttggacaagtaacaagtgcatggactatagtttcctcagccccacggcaaactggacaggcagagtaaacatttactctttttgtttggagctgacaaagggtagggagacagtttttacaagcacaccacaccagattttttattttagggggcagttttagacgccagaacgcagcccagaattttgctgctgtatcggggttgtcattccatctcccttgagctgtttgcaataaattgtatgcactttttacagaaaaaatacctgaggtctcaagcttccaaaccagtcggtcttcaatggccgagaggagaggtatcccattgattaaactaaattaaataggaagtaaaacaaaaagcttctatatattaccagccacatatataggaaaaatataaataaggtaataaatgatattgg

SEQ ID NO: 229471 - DNA, 1548 bp, Cannabis indica
ttgtatactctcagacagaagaggagcatgagcaacatctctgaatggtttacaatgactcagggatcataagttgtatgaaaagtttaaaaggtgtgaattcttgttgttggaggtgtccttcctggaaattttgtcaaaaaacatgaaattatggtcaatccgggaaagaatttgattcaattaataattggtcgaggccaagaacagttattgaggtatgaggtcttctcaagtttgttggttattattgatgttttgtgaaggtttttctaagattttaataccactaacaaaattgacaaagaagaatcaacaatttttttggtttgataagtgtgaaacgagttttcaagagtatgaacatcgttacccgacacataatttagaacttgctgctgttgtgtttgctttaaaaatatggtgacattacttgtatgagaaaagtgtgaaatctacaaagaccataagagcctcaagtatttcttcactaaaaaagatttgaatatgacgtagagacggtggttagaattagtcaaagattatgactgtgaaattctatatcatcccaagaaagccaatatagtggctttaagcaaaaaaggtcctgggtaagtctttagtaccacaatgatagcacctcaattatcttcagatatggttagtgctggaaatgagtttgtggttgggaaatcacacaacctgactctttagtcagatttgttggaaagaattaggaagacacaattggaagacactgagttagttaaaatttgggatgagatattaatgggtcgacctaaggacttcttaatcttaaataatggaatgttactttacaaggcttgagtttgtgtaccgagtagtgatgagcttaaaaaagagatactcacatattaaaccttattcgttgcactcgggaaccaccaaaatgtactaggacttgaaacccttttattagtggtgcaaaatgaagaaagacgtagttgaatatgtgtcaaagtgcttaacttgtcagcagattaatgcagggttactacaaactattagcacttcctgagtggaagtgggaggatattatgatggactttgtggttggtttacctagaactaagagaatgtatgactcagtatgggccatagtggaccgtttcacgaagacaacacattttctatcggtaaaaataacctatttagtggatcagtatgcataactgtatgtaaaagaaatagttcgtctccatggaactccaaaatccattgtttcagataaagatttacatcaaaattctgggtaagtcttcagggagctataggtacaaagctgaagttcagtacaacttttcaccctcagactgacggacaatcagggagaacaattcaagtactagaagacttattgtgagcatgtgtcatggactttcaatgttcatggagcaaatatttttctttgataaaattttcctacaacaacatctatcaaagtacaataaggatggctccctatgagatgctgtatggtaggaagtgtcgatccccaattcattg

SEQ ID NO: 229472 - DNA, 1157 bp, Cannabis indica
aaaattcttctagatgccgaaacaagttaagggtgcatcagtacatccattttaaaaaggtatattgtagaaccactctaatttttttatttactcaatttctttcccctacccactggccactacacacactttctctttctcatttctctttcttcaaacactcaaaaaactataaccaccaccactactgccggcgaccttattcctgccaccactaacccacaagttgcaccattcagacccccggcctccagaaatctcaactttcaagcggcgcctcctcattcgttactgttagggagagatcgtgagtcaaagattagaatttcaaactttgaacacattttttgatcacctccggtgttcgtttgacgatttgtcaacttgcaatttgcactaagtcatttcgcccaactcaatattttttccggtgacatttttgtagctctgccccgttccgataatatcgtgtaccgttttgacaaatagttgtcatgagtgtgatttattaatgtgtgtcgtatcgtttaccacaacaaatttactattctttttttatttctaaattaacagttatttcaatataatgataaataaatgttgaacccacgagaactattattaatttattattcaagaattataactaacaattaaaaatgaggcttttaatataaagattaaataacataaatagaaagcaaataaagatagataataggctattaaaaatagctaagcgccaatctccatccttaacaatcattcaagatcaataataataaaaattattttaatttctcaattaaattattaattctgtagaaaacgctgaagcggccaattttttcaatctccttattacaattaatcaaggcaaaatactcaataatattaaatctctttactaagcaatagatccacgaagcatgcaatctatttattctataaaaaccatcaatttctatggagataagttaatatagatatatatcaatgaagcatataattcatttaacttaggttcaatttttcatcacaatcaattagacacatttgatattactattagttgcaaattatcactctacttagaatcctaaactagtaggtgagaagtaatttcaagatgataatagaataatacaaaattt

SEQ ID NO: 229473 - DNA, 2554 bp, Cannabis indica
gaaaaactagatggaagtcgaaacaaatcagaatcagataagtgagtccagcgcactaggccatttgctaacctgggcgctgggtactaattccctagctctctggatctcgttttgatactttccaatgttcttgaacttgaggcgaggtctcctaccctatttttgaccatttaggattcattggtcaaatcaaatttggcatttgagaattcataagcagtgcaccagattgattgtccaatacatgtcaacctgggcgctgtgcccttttcccaagggctcgggtttgtggttttctcctttagttggcttgaatcttcattatttctgatgataggaaaaatgcccagaatatttttcgtgaacttgattgaaaatggcccaggttgagaatacgccaacttaggcattgggcccaatgtcaggtgtcaaccttagcactgagtcccaattatggccctttggaagttctgtttgatccctaaaaatagttgaatcttaatattttctgaaaatgaagaagttgaccagaaaatttcttgaaaaacatcattaaaatcggtcaaggttgacatttacaaaatgtcaacctgggcgctgggccttgcttttggtacccagcaagtgttttttttttcccaaaagtacctatttccccattttgataaagacgaagaagatggaaaagttttattatcgatctgatacttggaaggtgcccatattgacaaattgtcaacttgggtgctgtgtgcccaggcactgggtgctcctggtgctaaaaaatgaatttgctccgaatttgattctaatacctcaaatatatttgtggtatgtctagttgatgtcccaatgcaaagtttgatctattttcactagacggtctcgaaaattgcaaccctacttggtaatgtcaacttaggctttgggtgaaaccctaagtgtcaggttggctttcgggttacaggttcatataatttcagctcccggggcttggattaggttgtttcatgtcttcatggtacataatactaaaagatagtgagttagattcaagttattgaagtccaaacttccatcccaaagcttctgaggttaacttgggcacagggctagggtcccctccaagatcgatagctatgactcgggtctactcaacttcgtgacgtcatccttattgccatgtatcaaacattgaagtcgacgtcactagaataattttctaggttaacattttcccccaaatcaactttacacctttgtggagttgacttgatgatgtgaattgagcccatttcacttgaaactaccagatggacactaattttaacaatcttaggcaattatttttgttcttcaagcattcccaatacagttaggactttggattcccgtttttagtcttttggaatttttgaaagttagttaacaaagaaacagaagaaaaatttatcttttatctttttctttaaaattttgaaattttcttatatttgttatggaattaggattaattggatttgaatcctaatcttagttgatgatgccattctaaaattagaggagaaaagaagaagagaaaagacttttgatcttttgcttatcagttatccttttttttaaatctctaattttttattaatcttagtaacattaggaattgatgttaccttttaaacttgtaattcatattcttatctcttcctttaaagctttaaatttaaaagcctcccaattgtctctaggatgaagagagtgaactcataaataaacaagatagctttcaatcgaatttcccattcctcctactttgttctccacacccaagcattagaaaaagccttgaaatcaagccttgaagttgttcttcatcttcaaaggtagtaatttttttcggcgacaattcctctttcaatgagaaattttttcttctcctcctttgttgatcttactccaaggattctcaaactcccaaaaacccttacattattttttctaagaccttcaaaattccaaaacactttcctagtgaattaaaaatttcctcaaaattgtttaaattttttcacaacccaagtagacttttcttgggctgtacgcgacttgtagtgttgagctttcatggctaggatgaagagaagtagaatgtttcctgatgagtatgacccccatgtggctcaacttatttgagctaagctaactatgcctaagtctaagaacttagacaaggcatgtgttgggaaggtgatgacaactgaacttcttaaagctggcattgagagtgatgatctgagagatcaagctttcaagcgaagacctcttgtgtttaacactcttactgaagatcaagctcaattaatacgagatgatcactgtcttcttgaaagtgtcgtctggaagccactatacggtggtcccaattgctcttagaacacttgttgtaatgcttggttgagattctacatgaatatgggttcttactttcccttacatccatagttcatatccataattaatttttcggtgtgtgtcgttacaaaataaacccaaa

SEQ ID NO: 229474 - DNA, 1504 bp, Cannabis indica
atgggtaatacccattaaaaatacagtactttaggtagagactaggataggagcaattgaaaaattaaagagcaaggaaattctaagattcatggaaaatctcaatttcgattagaagaataccaaatataaagattttcacaaagaaaaaggacaaacagttagaactataatttattctcaatataatatgataacttataaatgacaccacgtataaactaatagaatcagttttgcataattaacaattttagttacctaacaattgacaaccacacacttaggaaaaatcaaggaccaacaaatttcatgtatgacgattatttatacaatatactatatactagcattaaagaacatataattatcactaatttatatgtgtggaataaattgatgattgttcattgaaaacagagctaagaatcgaagtcgagtgcattaccagataactaaataaagatggcagaaacagctgttggcttggtcatagacaacttgattccattactggctgaagaagcatacttgttaagtggtgtgcataatgacgtggaagaaatcaaatgtgatctagactacattatggctttcctcaaagatgcggatgcaagagcccaaacacatcaaagcacaaacaatagccatagtgtcaaaatgtgggttggaaaacttaggagagcagcatttgaagtggaagatgttattgacgagtacacacaactcgtggcacaacaacaaggtcgtcacaagcataaatttattggatttcttcgaagaaatgcttgtttggttataaaactaaaagaacgccatgacatcgcctctaaaatacgagatattaaacaaaaaattcgagatataaataaaaaaagtcaagaatttgattttgtgtccactctcaaagaagaatctacatcatcagtaaatgattggtatgatcctcgtaaaaattcttgcttcctcaaacaaacagagattgtgggtatcaaagattcaagagatgaattgagtagaaaagttaaagattgttcatcaaggcgcactgtgatctctgttgttggcatgggaggacttggtaagaccactcttgcacaccaagtatatattagtactaaagataactttgattgccatgcatggattgaggtgtcccaatcatacaagaagggggagctactacaaaagttaatgaagaaattttgtgaggcaagaaaagaagcatgtcctgatggaattgatgcagcagatgaaactactatgaccacaaaattaagagattacttacaagacaaaagttatctagtcatctttgatgatgtttggaatactttttttggggtgacatacaaaatgctttatctgatgaaaatgaaaaaaatgggagagtagttatcacaacaagaaatgtagaagttgcaaatttttagcaaaacatcatcaaatgttcatatccataatttacaacctcttccactagagaaagcatgggaactctttt

SEQ ID NO: 229475 - DNA, 1560 bp, Cannabis indica
attgaaaaagtcactgtagcgtgccttagcgttagggcgttacacatatatatatacgtattgatattttatttattaaaatatctttgtaagataaaatatgaaaacatctatttaaaattagataccttatacttcttaatattaaaatttaaataaaatatttcagtatttttgaaatataaattttaattagcaatatcttatttcttaaaatatctattaagatctaattatgaaatatcatattttagaaaaaaagatactcatcactttccaaattgtaaaattttaaatgaaatattcaagtttatagttatttattttaaatatttaggtttaaatttagattttattttttttaatataaatatctaataagataattttaaatataactttaaaatttaaaaggaaaatttaaactttaaaatatcaaatatttaaaatataaaataaatctaacaatatttgaaatatttcatttaattcttaagtgaaaaaaatcctaaaaccttcatttattctttattaatttaaaaatcaataaaaataaatttattccaatttcagtaattttaactttaaaaatagatgctatcaaaaaaaactttaaaaatagaaagtacccaaaaatttgatgaatttagacttttgaattactcaatttggacttaccatttaataaaagatatgcaaaaaataaaattagaaacaaagaagaaagagaaaccaaagtttccatggctaggcacccatgtccgtgcgcacgcaagccttgggcgtggcccaaaaatcttggcccttgatgcatccgcgcacgcgcatgcacttggtgtcacccaagtgtgtggcaaccaaagtttcccattttcaaaaatttataactttctcaattcttattgaaattaagatctgtaaaaaaattacataatttttcctaaatttttagaaaaaataatttcaaacacaaattacaattattttatacaaaaaaattgtaatttatcaatctttcaaataattcataatccactttatatataacatctaaatctcataaacatgtaacaaacaccaattaaaattatttttatccagtttaacatgaatagtaaaatcttaccatgactctcatactacttgttggaaaacatatttaattaggatcttattttactatttaagtatgttgattattttgaatctaacttcctaaatatggaaccttaaattaattcaacttaaacacataaaagtttatgaaaatcttatagtgattgcagcggaattaaatatatcattccatttgaattaattattgttcctttcagtcacagagtattaacaaaaattcaaacttggatcttcatctccttcgattgtgttcatgacagtcttccataatttcctcggtatcactcatgactagtttgggctgtgtctcaactcactaacgacatgtatctcaataatatcatggaggaagagatatgaaaaattttaaattctataatgcatagcatatgttgaaattaaaaataaagagaagagaaaaga

SEQ ID NO: 229476 - DNA, 1824 bp, Cannabis indica
aaaaaacaaacatatatatagagaaaaaaaatacattgaaagaagaaagcacaagaaaaaaaacaatatgagacccatcataatttaagacatcaagtgaaactaaaggtgacttaatcataattgttaaaaaaggttacttaattatgtgtatactactaatatttgtaatactatccatatataaacaagattatgttattgactctcaaaaaatgttctaataaggcacaaaagcacattgatgattgggagccctctcaattttaattttattatggaaaaaaaatcaagtccactaaataaaacttcaaaaaatttaagtaatccctcattataagttatgtccctctcttttgattattaatgattatgtctaaaagttactaaaataatatttgttctccaagttagagtatgcaattgagtatatgcctacaaatattatattgtaaacaacctaaaaaagcattttattaaaaaagatctttgaattaatatattttctaatgatatatattcaacaacctatacaataccatcattaataaacaattttctgatttaaaaaaaaaaataaaataaacaattttcttcaaaattaataaataattgtgcttgtatccatgtgtgtttacattaaacttaaacccaatatcttcccaaattatcttattttttttttcaattgaattgatgtatttaaaaatcactaatctaatacatttaaaaaaatcattaatttcaactattataatcataaattgtcataaaaaaaagatataatcataagtcttaacaattcatatacaattccaagatacaacttagtttgacactcaataatcttcaataaaaatctaagttttacaacatttaaaggtttttcgttttttttttctttcttaaatgtacaaaaattgtagactaagaatgatcttgttgggttgcatgcatctctaataaattaggtgtattgatacatttttcacatttttcacattataattctaagtatatttttgtttaataatatatattgtagttatattaatctttaaaagttttgaaataatttatagtactataaataaaatttgtacaatttattttatgtataaaataaataaaaatcatttaatttttttctcaatataaataaattattttaaaaattttagaaatttataatttttttattcaccatcgtatatataacaaattgagttaaataaaaactatttagggatttttatcttcgaactacgacatatgtattatggtgcccactgaacagtccttgaactatatactttattataaattagtttttttttgtcaaattttgtcacacatgccaaacaaaatgatagcacaattacttaactaattgtcacatcagcaccacgtgtataatttaacattaaaaaaaagtatgtatttttaagaaaattattaaacttaaaattaattaataattaaaaaagttacgtaaaaatttttaaattatttttttttcaaattaattacatacgtgacgttgacataatactaacgtaataactgattaaataaccatattattattttatttattaggtgtgataaaatttaatagaaaaaataatttataatactataaatagtttaaaaattatttttaataaattaaaaaattcaaacataaataataggtggatgagcaaaaatactaaatttagtatttttaatacataaataataggtggatgagcaaaaatactaaatttagaatataaaagagtgctgataaaaaaaataacaaaaaagtgcatttatttggag

SEQ ID NO: 229477 - DNA, 930 bp, Cannabis indica
ctcgttctagtccaacaaagatcaacaattctgctagagtgtccttaagtcctactgtttttaatgtcaatgtaaatcgacctgtggttgatgggtctttaaattccaaactagatgtatggcataggagactaggccatccatctactcgcattttacatcatgttttagagtcaacaaatgtacaagttcccaaaaatggagtgagaaatttttgtgtgcttgtcaatatggaaaatcgcactctcttcctttcagattatcctaaacccgtgccaaagctgtccttgatcttgtccacactgagctatggggtcctacccctatagcctccaatattaaccatcattactacatccactttgtggatgattttagtagatacacatggttgtatccactaaaacacaaatctgaagcccttcttgccgttcaacagtttaaaacactcgttgaaaacaaatttgagaaaaagatcaaagctcttagaactgatggtggaggagaataccaggccttttctaatcttgttcaagagcatggaattgaatttcatcactcttgtccccatacttcagctcaaaatggaagggctaaacgtaaacatcgacacattgtcaaaatggaacccactctcctggcacaagctgccatgcccttgaaatactggtgtgatgcttttcacacccctgtttacttgattaaccgcttgccaacacccatcctttctcacaaatctccacatgaagtgttgcacaactagaaacctgactacaatttccttaaaaccttcggttgtgcttgttttccttgtctccgtccttaccaaacacacaagttccaattccactctaccttgttgctataattttaaacactacgcaagtatacgcaatcaagtagtaaatctcacacaggtgaggtcgatcc

SEQ ID NO: 229478 - DNA, 2439 bp, Cannabis indica
aaaagaacggaagcctatacctctgtcaaattttgatttggataacattttccatcgcttccaatggatcttcgacccgtctttgtttgacccccaccagaagttcgccatcattgattcaatttggttgcaaaactcaattggcaatcagaagcaactcatagcatacgttggtatcgattgtaccacaacctttaataaaacttctttaccaccgatggagaaaagcttctcattccaagcatgcaacaaccgccaaattttttcctcgatattactgcatatttcctttttatatgtgttgaataagcagggagtccaaggtaagattcatgacactcacaaataggcatgccaagtatttgactaaaaaaaattctttgccacatctgaagtgttgggagagaatgacatgatggattttttgggaattcaataatttccccgaagctctatggtagacagcaagaacatttttgatggctaaggctgaagcttgatcagcttgacagaacaaaagactatcatctgcaaatagaagatgtgaaattgatggagcatgtctagtaagctttaatccttgtagatgacccaattgttcctcatggttgaggagccgtgaaaagccttctgagcaaatcaaaaataagtaaggggacaatggatcaccttgacgcaatcccctcgttggccatacattataaatctattataatcatggtattttatttaaaattgttgttaattttttttttaattattatagtattagatttacaattcacaagaaatgtcttaaagtttttaattattataattattttgatgcgtattagatataaaattaactataaaaaataaaattcttaattggtattatatttacaatttcaataccaaaaacataatatatttgagattattcacaagtctacgcaaattataaatatagcatcattattttactattttattataattattattttgtttttagatcaaaaattcaaaaggtctttaaaaatattaattatagaataatttttataaacatgaaaaataatatatattattgaatatagatttcattttttaattctattcataaagtttacacttagatgtaaaaatcgttacttttttcctattttaattatttttttaatacatttatttaccagattatgaaatttgtggtatagttttaaatgaaaaggtctccaaatgacattcttggaaaattgttcgctcgcggaagctagtcctggaaggctttcttgtccttttgagaagggtcttcaggctagcattctttcgaaaaatagttgcaaatagctagttgttcttctaagaaggtagtcccggatagtcgaatccagctaactctatcctatccggaagctccttcagtaagtggctttagtcagtgatcccagaagctcttatatgttcccggatgcactaagtcttacgatgacgtggatgttcacgctcaggggagaattggttaagttaattatttcctaactaacttaacaatttcgtttcttgcagccaccgaatttaggatcttgatcctaataaggctataaataccacattatctggtcatttcagaagaagaggttcagattgagattgagagctagagagagaaaagattgtgaggtgcagagaaaagagagagattggatttggattttgtaagaagaatcttctatagatgaagaagattcttgggtaagagtgtgagagttaattaatcttctatagatgaagaagattcttggataagagtgtgagagttgaaacactttgagagagctcattagagaatcattctccactgtattatacctgttcttgctcaatcaataaagaggatttggtggtattccaaagctggagtagagtcatagatcacatcgatctatcagacataaaccagtatatatcttggtgtacttgatttctttattttatgtcatttttgtttctggttttccatatactctgttcatccctatttttctctaattacagtttgcacttattaaatcttatcattgctaatagtttgattgtttaaaattttgataatttaattttgcactattttaattgtaattttccaacaaaatttttatttttttcattaattatttattatactagaaaacaaaatgtatattacattaagtaatagaattactgtttggtaactttagatactatcatctcaaaagataatagactaattaaatacaagctgataaggataataatagtataacatactcaattacaaacaccataaattaatggttacttagatcatctccagagatataaaaattgtgttatctttgacacaaaaagtagttttgtgataaatttacatcaaattttgacattgtacttcaatgtactattgtaaaa

SEQ ID NO: 229479 - DNA, 1235 bp, Cannabis indica
ttcatattgaatttgttagctaacaattcagattctttttcactgtgaatctgttacatgggtgtatccgagttagaccttttttgttagctaaatttatttgcatttacaattggtggtgcatcaactttgtaccagggctgtgccaggaatatgacaagcaatgtattgagttgagttgagttgagaccaaatttgggtcctttgggcttgtgtaataatttaaatttaagaaggctctttttttgaactgttgtacaatctgcacattaatttgtatatcataaagttttacttttatcactatagtaatttttaaacttagtttatgtattgcaagtaaactagagttgatttaaatatcattattcttgcctattgtaattactgaaattgtacagcatcaactactagttgttgtagctccaatgctcttccatcatctattccaggttggtccgagcctttacttagttcactgtactccttttgaaatctgatctgttatcaaaagttctttaagagcagttaaattaaatgctaatgctgttttaacttttaacagtgtctactttggataagttgttcaaccaggtaactgcatctggtttttctcttgataattctttgtaacatacatacacaattgctttataccaataatgtgataggagtaaagtgttttaagaattgttagttgtaatagagttaaagatattacagattgtgtcttcatttgtctaataaattaacaaatcaacctcaaacaatggtttacaggaattcctagaaggcactagacagaaaattgtttatatttattatgaaacacaaagatggttgcatttatatttgttgatttgtgtagatttcagagtgcaatggcttttttgccgttaactattgactgtaaaagttcatgttagagaatactttgggccattgattgtagggggctcctatgatttgggtagagattgtactggccacttcagattgattggtcacagacacagttggtgtgaagtcctctcctcttatcatgttggcctcattaacgtctctactctaccctacccaataacataaaccaccattgattcattttggcagagtttagtaattatttttttttatttgaaattctaaagaatgtacatttttttgggattttttttattttaacacttcaaaattgtttttctttttctttttttttttttgttattttacta

SEQ ID NO: 229480 - DNA, 2072 bp, Cannabis indica
gaattatgattggcaccaacaatgttgtaacagtggggacacgagagggggagatcctcctcttggaaatggatagaatcatttgttggaacgtccgagggatcaatgaccatggaaagcaaaatcaagtcaaaggcatgttgcatgctaataaggctggtcttgttggtctcctcgagacgagagtaaaggcctcaaaacttggggtcttatacttaaatatattcaaaggatggtgctttacatctaataatgcttggcatgatggaggtcgaatagttgtagcatggaatccctctagtttttcagtgaacatactcaaatgtacaagccaacttatccatctacaagtcgctactttggatggtaagtctttctttgctacgtttgtgtatgcattcaatgatataaagggtaggaaactcttatggaatgatttgtgtagtttgatttcccttgaaccatggatggttatgggagattttaatgatatcttgttcaaagaggaaaggattgggaaaagagtgaaatacttggaagaaactgagttcattaattgtgtgggaagttgtatgcttgaagatgttaagtatgggggctgcctctacacttggaataataagaggcaaggaaatgagagaatctgttccaagatagaccgagttcttgctaatcaaaagtggttagatagtttctcttctgctgaagttatctttgcggctgaggaattatttgatcacactccagctataatctctttgtctcatgaaatacttggtggaaaaaagccatttaagtacttcaagatgtggactgctcatcctagttataatgggatcgtttctggagtttggaatcaaagaattgacggatctaagatgtatcaaattgtaacaaagctgaagcaactaaagggagcttttaaagagctgaatcgacagcattttgctaacatccaaaatgctactgatgaagcaaagaaagagctccttgaaactcagctgaaattacaatctgatcctcttaattcagaccttatagctactgaaaatgctgttcggataaaatatggacaactcctgaagggactcaactcatttttgcttcaaaaatccaaggtctcttggattaaaaatggagatgacaacacatccatcttccatgctagcatcaaggagaggagaagggctaatagtattctttctattgaagaccatcaaggatcccgaactgataaagcagatcagatttcagctgctttcattgcttattatcagcacctacttggtactaaaatggaaggaaggaagaaggttaatcaaggagttatgatgttggggcctcttgttaacaaggatcaagcagacttggtactgaaagaattttctaaagacgaagtcaagaaagctatctttgcaatttaaggaatcaaagcaccaggtccatatggctacaccagttgttttttccaggataattgggacttaataggagaatatattagtgaagcggtaatatctttcttgcatacaggtcagatcctcaaagaaatcaatactactgttttaacacttattcctaagtgtaagtgccctaatacagttagtgatttccgtcctatagcatgctgtaatgtcatttacaaaaccgccactaaactcatttgttcaaggttgaaagcaattcttcctgatctgattgcgcaaaaccaaggtggattcatttctgggaggtttatagccaataatatcatgatttgtcaggatttgatcagacactatgggaggcaaaatgctaaggccagctgtatgattaaacttgatcttcagaaggcgtctgacactcttgattgggattttttggaagaaatgctttatgaatttaagttccctgagaagtttatcaagctaatcatgatatgtgttcgtacacccagattttcactcatgatcaatggttctttacatggatattatgaagggaaaaggggtttgagacaaggagacccaatgtcacctctactttttgtttttggtatggaatatctatcaagaataatgttgaagattgga

SEQ ID NO: 229481 - DNA, 2000 bp, Cannabis indica
tgaagtctcaaaccctaagccttgtgctctaagtcagataacttatgtctctctctctctctcatgtccactgctcttctcttacatgagattttccaactctgattctcataatgtaagtctaagagagctacttccgatcccattactacagtgatctaagtagtattatctctcggtatagatacaactaaaaggggagtaggtaattacccactaactaaaggggccgaacctctataaaatcttgtgtctatttaccatattattctaattgtataacatgcggcaagcatcaatattatattcgactccactgttgattggccaaatctgaggtcaatagtttgatgcttttattgagagcagttgttaatttatttgatcaaacgtcatggttagcccaaagaaaactctggctacgacatatgcctcatcgagtcttcctcaagaccctatgactgtagatcctaatgtttgtgttccagtcacaattagagtttccacgatgtgcatcttaatttgattatacccagaaaagacatccatgaagccgagcaacttgcacccgcacgtggcatctaccatttgatatatcagtggaagctaaaagtagtcttttaggatggccttatttaggtcattaaagttgatgcatattctccacgttccattgggttttagaaccaaaatagggtttgcgggccaggcatggtataatgcctcccggaggaaatcattagtagtcaacttactcacctctgccttcacgacttctgcccttactgaatctaaaggtcttctcttctggaaaactggcatcgcatcctctcaaatttttcaaagcatggtagatggtgttatggtcaatcccagtcatgtcagaatgggtccatgccagcacatcctggttcttttttattgcgtttacaatactttctcttatggatggaggtagattccttcccaccctaatggttcttgtgtggtcttcatcactgaagcttatctcatctacctcctccattggttctaagtttctttctgtcctaacactaggatccaactcatcttgaaaatcctcttggacggcttcagtgtccatttcatcttccattccaggagcaatagatgtctcttccaagaccatgaagacaaccgatgttgaaatgttgtaacagtttcttacacttttttgatcgcatttgatcatgctaatacattcgttgtcacagggtaacttcatgcataagtgcctgatagaggttgttgccccaaaatccattagggttggccgccctagtatcacattgtacatcgttgggcaatataccaccataaaagtcgagtgcttcaaagaacttgtgctttgagggtgataggtaactagattttccccatcgacattaaggtatctccattgaagccttgcaactaaataggacaaggatttaagtccgcttcagtaagtcgtatcgcttggaatgcgaacttaaagagggtgttgactgagcttccattgtccactaggactctacaaacttgcttgtgggcgatctgtgcatcaattaccaagagatccttatggggaaggcacacattttagtcatcatcctcggtaaaggtgatgggaaatacatcagtctggggtggttgtgcgggatattgcaccaacacacacacacacacacacacacacacacacacacttccccttcttccacatggagtgtaggtaatgatgttctaggagcttgagaacgccctaccccttgtaggggatttatagtgttatactatttgagaatgatcatgtgcctatggaagatcccctatccaggataaatgatcggaattcagacccattgtcccagatgtcgcactcggaccaacatttcaatctcgtctttcaaataatcacactcattagtggtgtgacccttctcctcatgatactcacattctttgttgtgatcacgtctatttcttcctccatgtga

SEQ ID NO: 229482 - DNA, 1333 bp, Cannabis indica
agttgcagaaactaggcagaatcaggcgactgattgttttggaagttcctagaattttggtgaggcccaatatgttggcaactattgtccgtacgcaaacacgctgttgacagtgataggtatgcgtgtgtcgtcggtttagagagagaatgtacgtcggtttatcttattttttacctggcgtagcatacgaattattacatgtggcaagataaagcatcacttttaataaacttgatcggtacatacaatgagtagacataagaatcacacacttaaagacaactagcggtcgacaaaaatgaaatgatcaacattgtccttgcatgacacatccttgcctgatgaaaatatcaatttaggagaagtaatcacagcttcaactaggctcatgaaacgaaccatggtcgatgactgacgagagcatatacggtccaaatccggtaaattagctcctaatccctaaggatccggtattcattccctccacattatttgttatgatctttaactaataatttattgtcatttattataattgatatgaaaaatttataaatataggtccatcacacaaagtgaggatacaaaaaaaattcacatagcacacacaccactaaaatctctatacaatttttcttacaccaggagtgaccataagtaactatagactttaggaataaaaaaaatcattgggctctcattgaagaaatatataatattttcaaaaattagtaaaaaaatatacatattttaaaaatttttttgggggccctaggcaaagtgggttctaggcataggcaagtgggttctaggcataggtctggcccgtcttagtccagagttgcccctcttctaaacttggaaagcttagttgaatcttgttcgtattattctgggtatgaactaaaggaatttcaagaaaaattaaaatagttagactattaccattataattggtacataacctctataaattctatttttattatattatattctttgttcttttattaattataaaatcattattattgtatttgtcacttcgtgttgttggctaaaatctctcacaaaaacatcctattttataagagagaaaaaaattagccactaatgtcaaactttatgaaaccaaacaagaaaagttaaataaaaaagtaaaagacatttgctgctataaggggtgttcaaatatctgatataccatgatccaaattttatagcactacgaattttttttattcctctcttttatacttttttttttattataaattactcttttttatagttgacctaactgcaataattagtatagactaacaaataa

SEQ ID NO: 229483 - DNA, 1383 bp, Cannabis indica
cgcctaaggtagttagggtgttacacagactgtaatggagaagagttttcattgtaagtggaaatgggaggttaggactgtaatggagagtaactttcatgaacagtttttgaagcatcactaggaaaaaacttagacaattcaaaagacataggactattcacaacaaaagaaaagatatgttcatgaaagagaacatctctagagcaaaacactttgttagtgttaagatcaagcagcttgtaagctttcataccagctggataccctaaaaaaacacaaggggtagctctagatgaaattttttatcttcctgcacttagagtagaagcatgtgctaaacatccaaaggcttttaactgatcataactaggaaccttagaatgtaaaattacaaatggggatttatgtttgagaattggtgtgggagttctattgattataaatgctgcagtgttgatgcattctccccaataatgtaagggaatgtgtgactgaaaaagaatggccctagcaatattcaacaaatgttgatgcttccttttcacaacagaattctgttgtggcatttgcacacatgaataataatgcactatacctagggatgaaaacaagttagggaattgtagctcttttgtattatcagacctaacacccataatttgagcattgtactgagtttttattaattgtatgaaagctggtataactaactgagcatttgatttgttcttaatgagatgtatccatgtatatctagaacaatcatcaacaatagttatgaaatacctaaagccttcaataatttggatattgtagggtccccaaatgtcaacatgtataagatcaaagcaattttttgatagattatgattgctgacaataggcaattttctttatttagcaaagtgccacatagaacaatgaaagtagaacaataggagtattgaaactgcaattttttatttaatgaatgattccttacacaagagacatgaccaagtctataatgccacaaagtttaatcattgattttagaattagtaatagaacaagctagagaaaatttttgttcagacatatagtaaagattgtcaattctatcacccatcccaatcacttgattcttggtgatatcctaaacaacgcatttgtgaggaaggaagagaaaagaatagttggctgaattagataaagcacgtacaaaaataaggttatgttggaaatcaagaacatacagaacatttgtaagtaaaatgtcatgaatcctaacatttccaacaaaagaaacctttgtattacttccatttggcaattttactgatgtgattttattatgtttttgaacagaacaaaatagggaaagattggagcacacatgat

SEQ ID NO: 229484 - DNA, 1183 bp, Cannabis indica
taagagcacgggttagagatccagattcgaggtttgagttcgagcacaaatttggaatttggggctcaggaagtacaggtcagaattagggggtttgaggccatggtacggagcttgggctcgagtttgggtatgggggccagattctaagtgttcttaacacaagtgataattgataaatgaaataaattattttttttctaaaaaaaacaatgaacaatatcatttaaaatatcataatattatatagtataaagtagtaatgtaaatacagatcgagtttttagacacgacacaaaatcaacacgagtcagaagacatgagtacgatcaggcacgacacgacacgtaagcacaaaatagactagttcgaaagacacgacacacgaaaaacctgaaaagtacgatatctaaatgttcataaaatacctaattcaatctacataatccaattcaatccgcaaagtgcagatactcgcactagttcgacatctaagagagttttttagtttattttttttttcataatcacctatattgtagctatttaagactatttgtaaacttttagaaaaattttaatagtttataatgacgaaaataaagtttaaacaaaataatcgtgcgtgcaataaaatacataaatcttattaactttttagaattttttaaaatttaacaaatgatactaaataattataatacatacagtcataaaaaataattaaactaaaattattttaaatttctcaaaattttgcatgatgttttaaataattataacgtatacgactacaaaaaaatttaaactaaaaaattcttatagataccgaaacagttaggggttgcatcagtacacttattttaatatggtgtattgtagaagcacccaaaatataggaaaatttgacaatacacctccttaaaataggtgtatcgatgtactcttatctattttggtatctaaaacaaatacttagtctatttttttatggtcgtatacattatagttatttaagatatctcgtaaaattttgagaaattcataaaaatttaacatttcgaaaacagtgtttaaaaagtctgttacatgcatgattttttaattttatacgtgtgtgatatagacgtttcaaacattgatttgtatattggcaattgttctaaattttttaaaattttac

SEQ ID NO: 229485 - DNA, 857 bp, Cannabis indica
aaatatttcaaaaaaaaaaaacttggtacaagagtagtttttgatcttattattataataatatgacttgaaatatgcatgaaagttagcgggttttggtttaccttaaacgagtttgagtcaattttcacgttgacctgtttaataaatggatcgtgtttgagttgactttaaaactcgaaattaatccgttaatgacttatttaaaattaatttatggcattattaatagatcataaatgtttgtatatgtcataaaggcattatacatgtggccaacttggatggttcttgtgtgaagcttgtcttccgtaaatgtagtgtcttctgaatagcttgtcattaatctggaaacgcaattttggatagcttactattagtcaaggatatgttcatccataaggagtgcttttacgaatcggatagcttgtccgtattaaagcttccagattatctactgaaagcatgttctcaagcttacgtggattattattgctagtgatgagctgaaacatttaaggcggtgtaaatgtgtcacgatagtttcagagctaatttagaaaacaatacaaatctataaatagctatcaaatctttgtaatcaagtgagtgatttaaattataattgcttgaacgaaaatcatgatagtgtaaggttgatagagatagtctaaactagatagagatattttctcgtaatctttgagagtttgtaaggattcttgtaaccttgataaacattgatatcaataaagatatgagtactattgttgttccgaccgagatatagtgttatattattttataatataataataaagtagattaaaatgtgataaatatatgtgaataatata

SEQ ID NO: 229486 - DNA, 1280 bp, Cannabis indica
cagtacgacccaattagatttagtgactagtgagttccatagagtaactaataagaacattttatattaacaggcgtagctcaagtggagtggtgaggtacttgggtatctacagtaattgttacagttttatgtctagtaccgatacctacttaaaaaaaagggacatgttagtgggtgtatggtaatgggagtgaccaaggcttatgaaggtatttgctcattccaatctcagtaatcttagaacattaatcgctttaataaccaaagcactcctagctcaacccacattggtggttcttggcataaacttgaaaccattgaaacccaaaccagttaggtttccaatttgattttaagaatttaacaaatccttgcctccactctgctgatgtgtagaattgttcaacattgatatggaaatgctacagtttgaccccttctcattagcaagtaacctcattatggatggtggctatttcttacccctaagaagagagaggcttatcaatgaaggcattccttattgcagcgactctactcttgagctgctctactagccttgtgcatccatctaatattgcatttgcatcatgtcttcccatttgacatccttcctgcctggactttgtgctcttcttcttctccattgtggcctggatagtcatgcaggaaattcactgtccactcagcacacacactagaaagagggaccgacttaccatggatttcattattgccaggccaaaataataaaaatcttgacttggtgatggtgagcaattctggagaggaaggtcagctttttcatatattaaaaaaattatagaaaaggataaattcaaataatataaaataaccaagggggttctatttacttcccaaatttttataatggtactctattttaataatttttattttatataaaattagggaataaatttgggttttaggcggttttaataattttattttaaaatactttcataattatgaataaaatattaaatttaatactttttattttttatttttcaattatatatgtatatttaaagtaattataaaataaaaaaatataagtgtttaaaaaaaaataatcaaatgtaaagaaaaaaaaataaaataaaaactaatatttggattttaatatagatttaattaattttttcaaataaataaatatatctaataatagtgtaaaattgagataatcacatatacaaaattaaagaaataataataattttggagaaatggtgcatgaagaaatactt

SEQ ID NO: 229487 - DNA, 1091 bp, Cannabis indica
ttttttgatgctaatattctcaaacactctcttagtaaggttcttgtccccttttatcccatggcgggtcgcttagtgcggcccacccaggtccacggaggtggccaaggccaccatccgcggactgagattgattgcaacgatgaaggtgtcctctttgtcacggcggagaccaccgctgtcatcgatgactttggtgatttcgctcctacgccacaactccggagactcactccaactgttgactattctcttggaatttcttcttatcccttgctcttaattcaggtatataatttatcaattaattaagtagtgttgccttttttatttaacaacatttaattgaattataaattattagtatgatgtctaaattattattgttaatttaattttaggttacttatttcaaatgtggtggagtatcaattgggtttggttttgaacatcatgtagtagatggaccttcatgttttcattttattgaatcatggtctagaattactcgcggactggaaatgactattttaccctttctagatagaacattactaaaatctcgaaacccacctaaacccacatttcaacccattgaataccacaacaacaaccaaaatactagtaatatttctaacatacctattataggttccactttcaaaatcacaaaagagcaactaaacacccttaaagccaaggcagaagaaaaagatagtactaataataataatatgatgatgatcaaagctagtagttatgtgactttatcagctcatatttggaaatgtgtttgcctagcacgtgatagtgataacaacaaaatcagtactctattcctcccaatcaatggaagattctctagaagattagtggaaccccaaattccagttggttactttggtaatgtgatatttgcaagtgtagcaaaggctaaggtaagtgatctcaaaacaaagccactttcttatgctgtaaattgtatcaatcaaagtgtgaagagaatggacaatgatcacttaagatcaaatattgactatttggaacttcatcccaatttggcttccgttagacgtggggcccacacatat

SEQ ID NO: 229488 - DNA, 792 bp, Cannabis indica
cctcggacctcaactacacataagacatcaataatcgttgaccgtatatttctcaaatgtgatagggagagaaaaaatgaattgcagagagatcaacccaaatcaaaatgagaaatcgtaagggtggaagaagacattaccagcaaataagggtacgaatggatatccctgaccgtacggctcacaaatgctcccctctttcttcctttctttgttttctctttctctctctctctctctcttagaagaaggaaagattttcgtagcagaagcttttttagagagagaaactcgaagactattctcagaaactggaaataataataataggagatttggattcggatgagttaaaatattaaaataaatagaacttatttaagttttttttttttttcttgtcaaaaaaataataaaataaaataaaaacgtgggagtttcgatctgaaaaatattaaaatgaaaatccaattgggtaattatcatatctctactatttatttagcgattcactcttctaaatgtgtcaatttataattaatattaatattattgacattgacataaataatataggatctccattttcacaaattaaaaaaggtgagatttgaatcataatgtggtgcatttctaatgcaagtattttctttttttctttttttttttttgataaataagtaatgcaagtattgattttttccaaaaacaacaaaattccaacctgcattttatctaagttattataaaaagtaaacatattcatttcagtttgagtttttttttttttaa

SEQ ID NO: 229489 - DNA, 2023 bp, Cannabis indica
caagtatgtgtattgctcaaaaaacgatttatacaacctaataacattctccaaaaaagagaatctaaatttctataaaactttacaaagtataaaaccattctttctcacttttagttgcttttttttggccatatacatgcaattctttttttcactatgtttttcacttttacaattacaatctctacatttgcattggagttctgccaaaaatgttgtttcttgtacgccatatttcgtaagcaagagctactatgacaacaactaaaattgacttctttaccttgcttatctttgccctccttagccaccttatgattctttccaaggtagtagttttcattccccaatttagccaagatttcaccttttccaaacattccgaagagaaggaacactcaaaaaataagtgaggcactgtctcatcttcaatgttgcaaagaaagcatttagagttctcaagctccatagactgcaacctgtcttttgttttgattctattgagcatagatagtcatagaatgaaactatgcttggaatattcaacctgcaccaaacaaatgaatcccattcaactttgttagcaataggccgaataccgttatatccctctgccactttgtacctgtcattctgtacctgggatacatcaaaattgcttactaccttatcttttatgattaccagcttgtgccagtaccaactggctattggagtggccctataggaccaccaattttcatccttgatgtatacattgtggacccatttcacccataagttgtcttatttttttgcaatggcccaaacatatttgaacctggctgctagattccaatctgagatactcctgaagcctagtcctccagctaatttaggtagacaaacagagctccaagcaactgctgctgaacttgagagagtatggcttccattccacaaaaaacttctacaaatagattctatctcattcacaactttctttggatgaatcatgatttgacaccaataagaatggatggccatcaatacagaattgatgaaaacaactctccctgcaaaggagagattgcgtgaactccaagatcttatcctagccaaaaaattttctattaaagtaccacaatcagctgctgaaatcctctttggacagattgggattcctaagtatttaaatagaagatcctgcctttgaaatcccgaagcatcaaggactcttttaatatcattatcattcatgttgttgcagtaaaaggcagttttagagggattaggaaataaacctgaggtatgagagtacaatttgagcccttgcagcataagataaatgcttttgaagtctccattgcaaaatagaagcacatcatctgcaaaactcaaatgattcagctccaaatctctgcatcgttcatggaaaacaaagtctcgcctcttgccaattttcttcaaaatccgagaaagatactccatgcttaagataaaaagaagtggggacatgggatccccttgtctcaaccctcgcttagattcaaagtacccatgtaaagagtcattcaacatcaaagagaactttggagttcgcacacaagtcataataagctcaatgaacttttgagggaattgaaaggcttgcaacatttcttctatgaaatcccattcgatattgtcataagctttctgaagatccagcttgaaaatacagcttgctctctttgatttccttccataatggcggataaggtcttgccagatcataatgttgtgaccaatgaacctgccatgaacaaatccaccttgatttcgagcaattatatcaggaaggacagctttgagtcttgcacatatcagtttggttatcgccttgtaaagtacattgcaacaagctataggtcgataatcactcaccagattcggacacttaattttagggataagagtcagaactgtggtgttaatctctttcaaaagctgacctggatgaaagaaaagcactaatagcatcaacaatatcagctccaat

SEQ ID NO: 229490 - DNA, 1681 bp, Cannabis indica
aaaccatgcatgttatgatttgaatattctacatcgtttatttaggtacgatgtatcttctacgaacaaacaagatgaaaataagcagctttctgcagtaagtgattctaaacttagaatggtttttctagtattttgttggaatgatcgttccttaaaaagaaaaaaaaataggaggaaagctcattcaaatggacaatttaaaaaagaattaataagttatgtacttaataaaattctattctattttcatgtccattcctattattttgtttttattactcccaaccaaatgtatgaggtgtggagagacgatttctttcactgttttttcgccccgcacccctttaatgaggtgtgtaaaaattcttaatgttacacaggtttatgcgaggcttgcttcaatcatatccatggagagtcagaattcaagtttaaataccccttctccttctcctgaatgatgagctatggcaatcaacgaagatgcttatataggtattaggttctatgtttagtacatctggtatatgggagctatttctttatcctttgtagctagctattttgtatattctcatctttgccacccctcatatatataaatatataaatatatatatatatatattataaatttaagcccaattctgtaatgatttgttaagaacagttactttaaatcatcatatctttgtaagaataggcagctggtagagacaccgatcaattttaaataacatgaaatgtgaaccaatgaaggctgctctatcatcttcatggttatcaagaaggataagtgactgactataagcgaagaatatgactgactgttattataggtcacacacagaaagcaatgccttttccttttccttttgtaagtgatcttggttatctatataattttaattttcatgtcttttttcccttttattttcaagaaattttaattttaatggtttaatttattttcacgatgattagaccacactaacctttcagtttttaaatgctaatgttttttttttttttactttaacgtgtcaaataatttgtgaatttcgtacaaggcaagggttcttaaataaatatttgtaattcgtgacgtcaaaatctctgaaatttcaagaggtgactttaagccgcacccacccgatcgcacaatgtgtcgatgaatttaatacttaacagttcactgtttttttttggacaaaatacgtaagacatcacaattttattttttatattttacttcaaatttttaatagacaatataaattttgtactaaattttgattcaaaaaataagttaatattatatttagctcaaattttattactgtaatccaatgcattaacaataaaataaaatttattttaagagaaaggtgtcaaaatgtaaaaaaaaaaaaaacatcaaattttaattgaaagtacataaaaagttaaatatataaataaaaatataaaaagttaggagtgacattatagtaacaaaaagtaaataaaaaaaagtaatatttactctggtgtaaaatttaacttatgttatattttgtatcaaatttgacataatttttagcaagcaccaaatttatgtcacattatatacttctattggagttcaattatataaacatgagctaagaaatgcatatacaccacatttatagcactc

SEQ ID NO: 229491 - DNA, 4063 bp, Cannabis indica
tagttttggcatttaaatgtttacaattgagaaaattgtatttttgagaaaataaggaaattttatcaaaagtggaaaaattccaaagtagggcccattaccatggccggccacttatatgggattttccacttaatttttctattattttaatgcctaataaatcctaacccaaacccaggtggttgcctataaatagatagtgatggctcacacttaaaagatgatgaaatttctggccttcagaaaaattttccatccttccttctattttcgaaccagcccttctcttccttcttcataatattttcataccttgagtgatagagtgagtgtccacacacatcaagtggtatctcaatcatagtgtgtaaggctgtgaagaatctaaaatcaagagaaagacattctggcacagatcttggtgatactctgctacagacaggacacaagggttagagatctgagtggaaggagccattaatattctgctgcacccaatgtaaggtaacctaaactttatatgtgtttatttatattgttttagaaattcatatttaggatgttaaataacgtacatggtagtaaatctagatcatggtaatacttattccaacatctgtgacttcatggtttagtttttgggtggctacgggattggtttcgatgtttaattgcacaaattgagatggtttttaagtggaaatcgacttttagatttaaaactcaaagctcgagctttaatggtgttatccttttaaggactctttatttatttttgttacgttagaactgttatatggatgatatatatgtgtcctattaagtttggaatggtttggttaggattggagttattttggaagaattaaaattgaggaaaattatgtttcagactgtttagaacctaaatttcggatggtaccaaccgaaattctatttggtcagttttgggaaatgccaaattttgtattttggccataacttttcactagtgtgttcattttagacattttatataccgcttcaaagcttgagatgagctctataatatggtcaatattttagagccacgatatgtattttattttatggtattttcaccacgagatttagtagaaaatcctagattattttatgcgaatattaggctttgttttggaataaacacttatcgatttactattattgtgacatagggcccaggatcgttgatcgttctccatacaggtcggccaacatgccagaattgagacttaatgtgagaaaagtatatttgtatcacatagcatgacaagatatatgggcttgcctgattaggaaattcgatatatatggatgccaagttatggcatgggcttgcctaattaggcaatgcggtatatgtgaatgccaggttatggtatgggcttgcctgattaagcaatgagatatatgcaaatgtcaggttatggcatgggcttgcctgattagccaatgcagtatatgtgaatgtcaggttatggcataggcttgcctgattaggcaaagtaatatatgtgaatgctaggttatggcatgggcttgcctgattaggcaatgcgatacatggataccgagtaaaagcatcgacttgcttgattaggcaatgtgatgtaatagagatgattacttctcagtctaataaatatggttggttatattacatcatcattagaatattattgtttaattatgttatgatattaatatagttgattaattatcatatgtatttcctttattacttttcttactgagtccttgtgactgacgggtgctctgtggagcaggtaagggcaaggaaaacttagaccagccatgaggcgacagtattctccaatgattatacatattgacccttccgacctgtgtagtcgagtggccaagagatgttttaggctgtatctactgtgtattttgacttactactatgcatagtcctttcgtaaaagctttgtaatagagatctgaaaaaaaaaattttagtgtcgttatgttgttcattactaggattttattttggtgatgttttttttctttatattatcacggattttaataactaattaatatattattactaaactagtttataaaactacacacatgactttcctgtagattagggcgttacaagtagttcacttcgagaggaaaaggctacaacaacctagtttggcatacatgatgaagagcgctgagaggtactttatgcctttcattgttatctgagttggacacagcttgaagaagttagctatgtccctaaagtatggatgcaaaggaggaaccgccccttgcttaacatggggaccagaccatgataactagtttggtaggggatggtgagccagatggcttagagccgtccctgaccgacatgtccccgatcgataattttgtcaagcttggcagcaaatagtgtagattgaggagatatccatctctctcactctcaatgttgtaaaatccaaggcacggtgacctcgtctacaatatgctcaaccccaacctctaagggttgacccctactatttagaggctctctaacctcgctataagagccaacagtatacccaagacaacatcacaatccctaggatgcttttgggcagccttgggctccactttaggctcaacctattcaacttctaactcctcttctcaactagtcataggttcctcatcctggccgaccttaggctgctcagcctactcaacctagcggactctccctcttgccatgagttgaggatcagttgggggagcctggtggtatgtctgcttagtcctcgcaatggtttaatgttgcttagagtactgaccaacactcatagcagtctctgctgtaggaagatctctaaacatagaatatgcttgtccaacaggcaatgtgtagggcacgccctgccagacgatgtaagtccaacacttgggaaggcactacctcaacccttggttcagttcctaaatgaatcttctataaatttcaccacctattcgctcaaaatagtggtgatgttggatctcatgtttcggtgaaccattactcacgttgaaatcactcaaagagctgcatgatgagctctgagaggaggagccaattgggcaatattctttgtacaaaagactatgtaaatcctcatcgatccgcttgtcacctccctaatagtcgcctgaaaaatcggagatcataaaatagacatggataaaaacacaggctaacagcccaaaaattaagggtattaaccagacagcctgaaaatagtctatcattaaccgggcaaccttaatttgagaggccaagaattggccagcttaaaattggttccacaagaaccgaccagcctaaaattggttctatgagaatcggatagagtttctatagggatctaaacgaccaggcagggtctctaaaagacccaaagtaccaggcagggtccctaatcgaatctaacagccctatttaaacatttgaaactcaattatttgtgttctttgaaccctaaagttcaaaatgtttaaacaaagtgcatgattcaatctttttcatcaaaaagtcatgcattctacatcctaaagatattgcatggattataatgtataaagactactctaaagcatgagaatcaaaaatttcaaaagcttgaaactcaacaatggcagaacttaaaaacctaaaaaaagaaaagagaagtttttggactcacccactatgaagacttcacaaaagtagcatgaatcagctcgacaagggtgattctccgtaaacaaggatcaaatttctcaaagaattcatgggtcacaggggcttcatgtttggaaagctttgttgggattttatgccctaaataaaacccatttcaatgtaatctgatttgttatcaatagaagattagaagttattatgtttacatgtagttttcatgtttatggtttaatgtttacaaaatctgttaagtccagaacatatagttaatcacaattaaagtgatgtcaacacattggaatgtaattgatattatatgcttcaaaagataat

SEQ ID NO: 229492 - DNA, 1864 bp, Cannabis indica
taatttaagagcattgctatgcggcactaaggtgcttatagcacctctatgacatgacgtcttataattgattaacagttctctataatctttatcaaattaaaataagtggaactcgatattgaattatataaatagcgatattacatctcataagagtgttagacatcatggtaccctttagcatttcacttaatttaatagtaagggacaaaattaatagtaaaaaggtgattcaaagaagaaaagcctcaagctataccaattcgagttaccaaggagaaaaatagattgttactacttcttttctatgaagttcgaaaggctgtcttttcgataatggcagataaatctctttgggagaggatggtatgaatgctttattttatcaaactattggagtgaggtagaagaatcagtcatccaagttgttctagaatgtttaaacaaaatgccaaatttatccactattaattttactgtggtgactctaatccctaaaaaaattttgcaaaaaaagttagtaattttaggccaataaattatgtaatattatttataagattatatcaacaaagttgtttcaatgattaaagtcttggtttgatgatatcacatatttctctcaaagagcttttattagaggtatattacaacaatgcaatggttgcctatgagttattacacaacctaagggatgttaataaagggaaaagatgttttgctgtaatgaagttggatatgagcaaagtctatgacagagttgaatgagataatttagaataattaagtattgttttagctatggttctcttattagtgggtgatcttactcataaaatatgttcatacagtccattattctttcaacttaaatggtgaagttaaagaaaaggttattcgaactggaggattacgtcaagaggatccactttcaccatacctttttcttttttgtgtgaaaattttttcaaccttgttatgtcaggcagaaaggaataaagatataattgaatataatgcagctcgctcagttctgtcgatcactcatcttttttcgccgatgatagtattctcttcagctgtgcttcttctcaacttctttgattgagctctttaatttatattctaaagcatctggtcaggtattttttcaccgattaattaatctattactaatgaatccttaggtgtctaaaaggttgttagcttataatagtacgactttagagacttatattgaggtataactgaaacttgaaatgttcttatgataatgtttactttggttccatgttctatttatcatttatctcaatgtattatctttggttttgactttagaattcttttagtattaactttggatctttgcatctaaataatttgatgaatctactatgttacaagaggttatatacttataataatatgatacttagacttatattgtggtgtaactagatgatgaaatgtccttacattaatttacgtctattttgttaatttacatatttttttttcttttttgcagctaataaattttaataaatctagtatacactctcaccaaatacagccgatgataagcaatccttatatactgcaacttttcacatgcaaatcactaaagctattgataataagtatttagagttaccaatgttaagcggactaaataaacaaagaaaatatatttaataatgttaaagaaaaagtttggtctcaattaaattcctcgaataataaactttttctcttatgggagtaaagagatacttctaaaagcttgtgaggagtttggtctcttaagtttttattcaattcaatctatccccaccaacgtgatctgtcttgtttttag

SEQ ID NO: 229493 - DNA, 6162 bp, Cannabis indica
acctatagtgacgctacaaattacggatatgatatacaagaaatgaaaaagaaaaaacacatgcatatacatcaacgtgtcaaataattgttgatctaattcatattttaatattatttcactaaatatttttttaaaataatttaaaccataaatatttaattttaattctcggttgtagataaatagtaatagtatccaagttattagaaaaaataacatatgagacaatttgacacttaatgactaattacctacagtaattttaaaaatataactaaagtacatattaattattaccataaaaaattaaacttaaatatttatctacactaaaatttaaatttatatatatttatatcgtaattatattctttttattatatatatttatgttattgtttttgtttttatttgttaattaattaattaataaatagagtttccttaatggtaatattgaaaaaagataattgtattttagatttcaatagatcatcacatctattatattatatatataggatattatatatacaattatggcatcaaagatttccttgtataatttataattggtgctacataaagaaccatttcatttttttcatttgactcattccagcttgatgagatatgatatgactgatgagatcatatgtcaacttaataattatatatatatatatatatgcatgaatggttaagaatcaaagaagctgaccattaagcattaacacaataaactactctaattaattgaataatagtcacataatctaataagattatgaagaataagaatataaaattttaggctgcatggttttttttttcatcattaataatatcacaatgctctaagaattattaaagcgtgttttatgtaaagggatcaattatattgcacggtaggtaggtacaaaatatacccttgttttaacttatatttattgaaagaaaatataccccattttattttaatctttgcatttgaagattcattacttcactgtcggtcccttattttaaacttgtccattttgtccttagtttttctgtttacattttttaattcaaaagtatttaaatgggcttttaaatagattagaatattatagcaacattttcaacagagggagagaatattagcaagaattgatataattcatgatatttttagcaatataaccaacctactttttgagtgaagagaaaattaataaaacatttagtgagagaaataaaatatgaacattgttattgtgcattcttagaagttgcaccttataatgtgctagacactacagtgtcttttagcgtgaaccataaaatattaacagaatttgttcaaagtttattttttttttacaataataataactaaaaaaaataattagaatactttatttatgtttagacttctctagaaatatatataactcatcgaagaacatcaaacttagtggtggagctatatatatatgctaacatgggtcatgcctcaaaaatttagaaaaagagtatcaatatatattgttgattcggaaactttttttcttttttggtgatgtggaaatttgacacgtggcaagaaagttaaaatttaggagttgagtagtcctgaatcattatagtcaatttggaaggggtccctagtcctgcgcccaggttaactctgggaacttcgaaataggtatttggattctgacaagttgttttcaactcaccatcttttggtattctctaccattaagacatgaagcatccaagttcaggccccaggagctgaaacatcacctcagaaatcaacctaggtgcctaggatttcacctagtgcccaagttgacaacccaactagggtttcagttttttgcaccgtcttagtgcaaatgggtcaaactttgcattgggacatgaactagatataccacgaacatatttgaggcattcgaataagattcaaaggattttatttttaagcacctggtgtcgggacacccagcgcccaagttgacaatttcccaacctataggtcatttccaagcatcaaaccgaaaaattcaacatgtgcatcttcttcgtcttcatcaaaaacaaggaaacaagtgtttttggggacgaagtagaccaatctaggggccaaaacaagggaccagtgcccaagttgacacctggtgctggcccaacgcctaggttgatattttgtcaacctgtgatgattctaaagagtttttccaaaaacattttccttgcgtactttctgttttcatcaaagattaatattcaactattttcgagggcaaacagaatttccaagaggcttgaaactggaccaatcagttttctaaaaaagtctttcgggcatttcttcggtcataaaatgtaacaaagatacaagtaaactcagggagaaaacaacaattacaggggcttcaaaactgaatccagcgcccaggttgacctggtgttgggctcaatgcccaagtcgacaatcaacttgatgcaatggttttgatcactcaaatacaaattttgtcgctagcattctttccaaaatggtcaaaaatagggtaggagaccgcgtcctagatctcaagaacttgggaagtgtcaaaaaaacatcctagaagctctagaaagagcactcaatgcccaggttgaggtatggcccggtgagctgggttctgcttatctgattctgattctgtctcgattgttcgtctagtttttcatagtaactaagagctatgaagtcaaaagagtcaaattcacaacctcatatttttacttttctagcaaagtgacttactcaaaaattgggtagtttcaagtctcccatttccataaaacaacaacatcttcgagaattggtaacgagtttaaccaaaatcgaattctggctaagtaatgtccaaatatcacatattcatcaaaaaatacatccacggtacgttttcttattcacccagcgttcaggttgacatcaaatgttaacttgggcgttggatgttaacctgggacaccgggatgtcaacctgggcgcttggcccagaatagtcttcagtaaaatagtcataactcactcaatattgatctaattggcgcaattcaacttgtatttcaaagctatttaaatgctctatcaagccatgtatcgcacttcaattgtaattttaaagttatcgactccaaatttcaccctcaagagagttataaatttaagctacaacttacccgaggtgggtcctgcgaacgcgactcaagctccaaaaattgacgaccgacctccagagtcaatttcattgttagaccatcatctaagattcaaaacaacctaaatatatttttccatattttattattattttaatagaacctccttccctataaaaggagagctctgctagctcattttctaagttcaaaaaattacacataaggttagagcatctagtttctctcttaaaaaatttcaattgctagacttaaccatttttttataatccatctcatgagaataaaaactcaaagtagatgtagctcaattactgtcgtgatacagggagtgaactactataaattattttatctctcttatttacaattaacacataatacattctcgccaatttagagagtaggtgtggccatatatctatgtccatatttttctgtgtcaatattttggtactttcattgagagtcacaactcaagaaataacttacaagatagttacaacgcactccttaagtgttgaaagaagatccacaataactggctagcagactaggggtacgacagtcattgaagctggtgatgggactacaactgcatttcaaatgccaagtggaggtctcaaaaccaactccacaactcgtcccccaaggccaccacctgctcttgacgctaaaaccagtgaacagattccactagggaaccacatgtggaattagaagaccccacattgggttttttttgagttgtttggagagattcctcatcggccaactggcaaccgtgaagtactatgcaaagaacaggtgctaagactccccaaagggaagcaaactttgggcaagagtttgaaagaactcaagcttaagcacgataaccaatgggccctccacctaatgtggagcgaccacgaactactgaaagaaccaacagaattcctccaccaggttctccccttcgctttaatgacaccaagccttgagaccctgcaaagggaaagggacttgctattcacactgaatgagaaaattgaagactctacttcgaaactagaggttatgagatccaacaagtaatgactaacctactgcttcatactcgaaagtatttccgagatgagagaggtgagtggtgtcattactttgcacatggccccaaaggctagcaatatgaataattccctcgggtacatggagtagaattgaacatgagcaatcaattcaattattttcacacttgtgatcccttctaaagaatatttcaaaggggaagtagtcactacaatgctccaaatgactcgcccccgtatttgtattatcccaagaagacatggactttgtattggaaaaatcaccaatattgactttcacgaccccgtggttaggagacaacaaccagacataagtcgactagagttcatgattgacttggaagatctaaagacctgtgtgacaccctaaccagaagatggtttgtggaagtgagagcttctagaggtgatcatgatcaagtaacaaaactcttgactaagacgcaaaccaccacccatggtgtcaacatgatagagtttgacaatctagcagccctggtaaaaggaatcatgaccctaaaggttttagagttcgaactggacagagagtaacgctcaccaatcttgaaccgaatcaaagctctaccaatccattcaaagttcaagaatccttcctagcatcaatacaccaggaaagaagactcattgtcttacattacttcaaaatgcagaccgatttgcaaggggtaagagaaaacgtctgatgtataatttttcctaccacgctgataggcttagctcagcggtggtaccttaagcttcccctttcatctatcgatttatggaaagatctagtggatgcttttggtaaccaatgatttggtagatgttaaataacaagaagatgaacccctcaagaactacattcaatagttcttagaggcagtcgctaagaaaaaaaatacttagcgaggacgcaagggttatggcacttacaatcgggctcaaggagatgagtcctctttggtttgacctttgtctcaagtcagtttacactatgaattcctttcttgatagagcagatggatttatcaagcttgaagaagctatcactcgagctaaggtctcaaagagtaacaaggagaaatctccaaacttctcaacccctgacactagagtgtaggtcaatcgaggaaagggagattcaaacagaggaaaaagagcaaacaacatgggaaaacaaggcaactcctctggtggaaagaaagccaaaattggatgtaagcctatgcaggagtatgaaactcgtttcaccacctactctattctcttagcttgaagagaggagatctatatggtcacccaatcaacagtatcataccgcaaatctcttcccctcaaaaaatcagggaagagggacatgaacaagttctgccgctatcataaaaactacgatcataatacaaatgaatgtaatcagttgcgagatgagatagagtccctaatgagacagaaacatgctgctcttcagcggtatgtttgacttgaagctcagggcaatgcacctctcccatctgcaccagttgtaggcaggctcgagattgtgattagaggccacacctggctgggaattcaagaaaggccttagaaagatatgtaaggtctttgcgacatgagccaagagcaaaagtattagaggttgcagaacgtcctatgaagtctcaacactacgactgtgattcaatcacattcggagagtctaactcatatcatgtaagctaccctcacaatgatcccttagttgttaaggtgcaaatagccaaaatgataaaggcaaggacaatgatcgattgccattggtggcagaagaatcacttgtagttgttgatttgag

SEQ ID NO: 229494 - DNA, 2136 bp, Cannabis indica
tatatagaatacttaggaggattggtggagaggcaatgtattgagtaaatctctagttgcttcaaaggggcctaagggctcccatactttgtaattgggtttctcatacattcaatacacattttctattgttttgctacagttctacccctattattgctgttgtttgtgctatttgctactgttttattgtgttcttgagtttggagttctcggggcttatcaattggtatcagagcaccgattctttggatgccgataataagaatggaggattaattagaggaacaatggaaatcagagtcttattattatcattctgaatttaatatattggaggaccttgcttcgcttttggatcaagtaatcctcgggcaagtaaggttactccgcctctcccgtgatatccgaagtcatgtcgcaacaatatcggaggacaacgatctcaatgagtggatccaccaagttgtgcaatcagtatgggttcgcaaccaagagggaatccggagtcgcaacgtgccgaacctaacatctggatctccttcaacactagagacggatgttgaaggtgatgaagagatggaaatggcaataagagaacacaaacgagcctttgctagactcgacagctccagagaaattgtcactggttctctaacctacagccagcgccttcagggagtggcaccaccatttcctgaagagacggagaggaattcacatgtgttggaagtgacgaatgttgctaatgatgcggaggatctacaatcggagagttccatggatattgaggttaaaaatgatgtgaaacctgttcaagcgaaaccatcgattattgttgaggaactctcacagaaaaaagttgagatctcaatagatcagcaaacaaattctgtattgagtttctaagattctgaaatgaaattttcaatggagaagaacccacagcaggcaacattgccggagaaggagactcgaagaggactttggtcacgagatctgggtgtgcatttgttgatggaatccgccgagaccaaggctccattggtggtgacgctggagaaaaaccagcagttggaggcgttgccagagtcggtgaagaagcaaaatctagtgtcgtcacctgagaagaacgttgcggagatcatctccaatggagaagaagacaaatggctaaagaagaaaacgccgctgaagacggagccggagaagaatcaacagcgggaatcgccgcctgagaagatggccaaggaacgagactcatggattcccgtatatagctcatctctaaatcttgttctatccctggatatttttgaggtggcccattcagataaagaatggcatgagcccaagacatgggatccagcccagtccaatttcctttaatatcacttactctagctgaggcacacaccataggtctaattcacataacctgaatattgcaaaggatatcatccaatgtcgtgctcctttggtgataaacctgcaaccaaaaaaagtaatttcacttgacaaaattgagaattacaagtgtaatttggtaagaaagccagttgtgatgacttgggttgtatatagtatgatggcaagtttgtgctccacacgtgtacatttcacagatgttgcacatgcaatattggatgaaaatgatacaataattcttggtgatggagaccaacttaatttctgcaacatgttatttcaaaagctttggatgatctgctcaaaaatttatccctctaaaaattattgggaagcagaagataagaaagggcacttggaggtaactctttggagggatgcagaagtcattatatttgacaaaggaaaaccaaggtttacatattctttctatggttgccacaattgtaaggatccttatcttctctctctttcttcattgttcagaatttattgtggtaaaagagcattacctctttttgttaatggggttcacattccattgtcttactgtacatgggtaagaaaagtaagtgctctggagttttgctcgatcaagattgttaaaaagaaaactgggcagttttggatttttgatcgaggaagaaggccgaatttggtgcgagtttttcgagtcgccaacctgggattaccatatctcaacagggg

SEQ ID NO: 229495 - DNA, 2629 bp, Cannabis indica
taactcctagcaaataaaaattaggtgcgaatcggcgcgaaagttttgccggcatgatatttcgttggtaaaccttcatcagggactcctctgccgacaaatcattcccggagaggaacttatggtagtaattcgccgggataaatagttttaccggcgagttatagtgttgtgcgcgcaaaataccttatgtcgacgaattattgccaacatcttttgccggcgtaaaagctcgcttgtaaaacaatatcggtgacatatgtatacttttgtcggcaagaaaaatcgccggcaaaatcctttttcttgttgtgattgattgattttatacttaatatataaactattctaataatatattaatgcatttgcggtctaattcaatttttatttcaaaagattattaaatatttttaaaataaataacaatagaagtttaaatatcaaaaaaaaactgtagaaatatatttttatttattttagtttttataattaaataattactatttaattttttcaattttgaaattatttaataaaatttttattaaaagtggaaaattaatcaattgatatgtgtttgttttgtcaaatttaataaaatttgacgaaattaaaattaaaagctgcaacaaaaacatatgatgtattatgattaaaagctctaaatttaataaagccccgatgaatggcagcacgtattggcaaaaaatggttgaagtaggacacttttagagaccaaaacacattctttcaattcggccagagtgaatattctataccaaaagggtattcgtttctaagacctcctcttccgcgagtctcttgagatgctattatttggattcggttgaacttgcctaaatatagtattattatgtggttggcaatgattgatagattgaaaacaaaagtcagattattcaagtttaaaatggtagacgaaatacattgtatgctatgtggggatgataatgagcaaattgactatttattttttgaatgttcttttagccaaaggtttgttcaaatgttgaaagttcttcttgggtggaatgtgaatcgcaaccatctagcacgattagttaagtggattaggagagctcccatatcaaagttttggaagttggtattttcgactttttgggctgctacggtttactcaatttggcaggcacagaacattggtttgtggcaagaccaagtgagcaagccaaagttacgcatacaggatattaatcggaatgtaaaacatagaatgtatagacttactccaaaattaaataaaataaataaatagcataaataaagattggtttgatactttgtaaaagattctttttgtatgtaaaatatagtatttaatcccttaaaaaaatagtatataaatgtgtaaaactataaagatattacaaaaattataacacttgtaaataagtgtataaatgagcttaattaagtgaaatgtttttttttttttcattatttaattaagtgaatgttaattggaggagtgttacggtcaatctcctattacaacctcttagtcaactttcacctcgaaaacatatgtcggaacatattgtttttgcaaaaaaaaaaaattcacaggggtgttcgttatgcttacaacatcttcctataaatttttgaaaattttcgaatagtttacagtgctgaaaatacgttataagttttttgaacgcacgtggtaaactggaatatcaggaactgtgttttcggtacggtaaactattaagaatttttcaagaatttaattatagggatgatactgtaactataacgaatacggctatgaaaaaaaaattaaaaaaaaaaatatttcggcatgtgattttggacgtacaggttgactaaaaagttgtaataggagattgtaattagtattccactttgattcgatggtgagaagttgcctaagtttaagggctctattaactaaatcactaactgaagtgttaattttccaaaccatattaaaccacaactagttcaacctaacatcccatttaacattaaatgttcgttaatattaggcgcagccgagagagaaacttcatgtcgaaataaaatgttgaaaatgtgattcatcatttataattttattttttcttcttctagcatctacacatttttattttccacatcttctaaaaaaaatttaaatacagaattgcataatttttttcgcatcttttccattttcatatagtttattatttaataaaaataaaattatatttaacattctttattgaaaataatactaattttcttttttaaaagtgtgaattgtattatttcaaaattacatatgtttattttgctttgtttaaagaaaacgtaccatttacaataaaaaaaataataattataaaaatacagatagcagtatataaaaatttgcatacaaagttgtaattgggctagtttgacacaactgtattgtaggaaaaacaattataaatgtgttttgagaaaaaaatagttgtaacagaattgtaaaaaaaaaaataaattgagtgtttagtaaattatgaattgttaagattctaatcataatgttataatctagttcattataataactgttaattccatttttggc

SEQ ID NO: 229496 - DNA, 924 bp, Cannabis indica
agggatagggccaatcatatcttatcactcccaactgctcggcataacatttatgatttgccctgtgaggagaacttcagaaagtatggcatgtacctttctggtgagggtgttgttgccccggctaatcctcttgaggatccaggcaatgctcttgtagggaaggagaagagaaagagaaagagccctgatgttgagaaggagaagagcaagtcttctaaaaagtcctcattggctgtggtggcttagacagagactaggagggaccgcgctcttcagtagtgtcttgcccgcgggggaactgttggtgatgccccaattttcatcaggcttgagagactggagcctgcatgacctatccaacctataccaactaataaagacaaacacaaggcttttgtgattagggatatcaacaacatataacagtaaccagattggttcactattgtaatacacacagggatcataataattttggttgtacccaatactgaccatgaattcatgaaaccttaggttctattgccttggagcttgcttgagcccataaagtgatttttgtaggaggcatacctgatttggattgctgcttttgtatccatcaggctcttccatataaatttgttctttaagtctgccatgcaaaaatgttgtcttcacatccatttggttcatttctagatcatactttgccaccttagtcatcatgattcttatggatgtttgtctaaccactggagagaagatgtcattgaaatcaacaccttctctttgatttaaccccttagcctctaattaggctttgaatctaacttcctcacctggcaaaccttcctttttccttaaaaatccatttgcagccaattagtttctgtcctagtggccttgtgactgttttcatgttttattcttttataggga

SEQ ID NO: 229497 - DNA, 3749 bp, Cannabis indica
tcttccctttggtctctaatcagccgagtttctcttgaatgaagccaatctaagatctgttggcctactcgctgaaaatgagtatacttgtgattataagtatcccaagtatatgtcagggtagcaggttccagtcccagctgacgagaaaactcaggacaatgtgggtcgggtgcattacctctagaatgtagtccctcaagaaattatgtcttccaagcctcgtaagtcaaagactctccaggaccccaacgtcactttcgaggccgaactcattgagtcgaggataagagccatcagagactatttaggtagtatcttatggatttgtggcattgaccagaaacagaaatgtcgtgttagatctgttgcccttggtgaatttagctactacccaccaaattgacttactcgcgaggcacatgagggggcccttggtgaaaccagtggctcggtagggataggcacttggagcctcgagcgtatcacggctgaagcgattctccccttgtgagattactttaggagttcatcaaccatcttagaatagccccattcatgttggttccaatttcctatagaatccttgctaatttaagggttttgtataagattttaggatgggaatgccccactcccctagaaatagtctatctttactcggtcaaggcagtccctgcaaggaaaaatgttgtaggaggcttttactatcttgggactcatacaggcgatcgtaagatcatcgttgggttaccaaacaagacccctttcaaagaatacttcttctacacaagtggcctctccccaataaatacaaccgcctttcacataatacgtaagtaaccatctgcgccaaacttggttttaaattattccatgtttttaatttttgcctcgcagacttatcattttatccttttgacagcaatctcgaaaagaccaacccccactctcaagatggcagagcaatgcaggcttctgttgggtcttccctttggtctctaatcagttgagtttctcttgaacgaagccaatatgagattagttggcctactcgctgaaaatgagtatacttgtgattataagtatcccaagtatatgtcgtggtagtaggttcgagtcccagctgacgaggaaactcaagactatgcggctcgggtgcattacctctagaatgcagtccctcgggaagctggagaagaagaatctcgaggtaatcaatttgaatggtcacccacagtgcatagggccgagcgtaacacacttgtgtctttctgagatattcagtaaaaaatttacacctagaatccctttctcatagatcgcgtaatacatatgttcgatagttggtacccaggattccacattcagattagatgtactagctcatactatgggattgtctagcagtatgggactatgttggataggttaggtcatatagattcaagttgggatttagaaccaattaactcctatgacatattcaggatcacaggatctagggaatttagtgaatactatagtcctccttcttcatcatcttatgattatggtaaactcccttaagtgggaaatcatttcccattttcccctttatctgtttttaaacaagtgttagcacatttctttatcttgcagatatggatctagaggaccttgtccactcttcaagaaaaaaggggaagaaaaggataattgtctcggttgcgtcttcatacatcaatgtggagcccctcaaaaggcctaggaagaggaaggctaacaagaaacgtgcctcgcagaccatagatctcgaggcttctgagaaccaagttcaaactcatcctcttgctataacacatatcgaggaccctgttccaaaagcaagtcaggccacagcttcttcaagccaagtgcctgaggctttgcccatcaaggctgggagtattggttcagaacactctgtgcagtatgctgctacttgctggcgtcatctctgatcctttttgccaagcgaccgggacttggtcaataatggcagcctaaccgagatgcttgagaggagtctcgccttcagtatctcaattagtttctctctcctttcgttttgccttttatttcaagaaccctcaaaaatacttatgcattttcattgatttattttaagcaaaacttcctctcctttgtcgccgaacaccggggtctcgacagggtgaaacaactggagggcgagctttagagcacatttgggcaaagcgaggtcgtggctaaagaatggaaagaggctcactcagagatctctcgtctaaataaaggggccgaggagaagaagagggcctaaaaggctgagcttgaggcatctcagaaggaggccaaggacaagtccaagttgtgtctgaaactccaagaagaactcaatgcaaccaccatgaagctcgagggcgctcaagcaaacaccaaggagcaatgcaatgccgttgccaagcattccatctaccgagcttggatggcaatacaaaaatttatttgagtttcttgggagaaggcatggaggaagtacttgcctactgcgagcaggccaagaaagcagaagaggaggctgaggcagaaggagaagaagaagaaccatccaagcctcctactatgtaggtggcttggtttttaactatatatttttatttatttatttatttaggaaaatggccctatggctgagacaatggttttcccccttgtggcccttttttgtaaagacaaatttgcattgttggattgccaactttgcttttattttatctttcatttattgcctcgcatttttacatttgaacttgatatatttgcttgtttgcgtttttattcacaacataaacaattatactttgatcaaatttaaaatactttaagtaagtgtttctatggatcttgttttccttttgatattgctaaagtagttagtaatctactatgtacgtgagcaattatcgtctgcgatgccttccattcgtgagcagtttatcagttctacttcgcgtaaagagttataatctaatttaagcaaacttaaacatactttgaataatttatcttgtgaattattttgtatattttttattgcctatatgaatagttaagccttctattcacaccttaggttaagtattttttatcaaggcatcttggtaccttgttttaatacattcctataaaatgtgagtcgtttgatattcagcttcacatgtagcttagtgttgatgttatgagttaaatctcatttacaactgttacttttgaccttgcatcgtccatagatgacttcaaataaaaaaaaataaatggagtgggtttgcaatatattatgtattcctggataaattccatttgatcatgcacatatatgtgcccctcaagtaattttaaagaataaaactttgtaattacttgaaaaatacttcaactttattaataatgattgaaatttaaaaatcacatcagagagagattacagcatatttttgagtttactggtagtagggtcacaaatgctcaacattcgagttgttctttattagcgagttgttaagccgagccaatttataaaccccagctccaactattgcctcgttcacatatgaaccttcctagtttgggttaaatactcctgtagatgcatctctcatgtttgcaaatacccgccttagcaccaaatcaccgacattaaaaagctttttcttcactttcttattgaaatatcttgtaactcggtg

SEQ ID NO: 229498 - DNA, 2521 bp, Cannabis indica
agactctgtgatccgaaccaaaaaaagctaagtgatgtaacatagcatcagggaaaagatcaaaccaagaatcagaacaaacaacccaatataacctttcataagtggacccatgtttcaaagtatatttattaccaataaaagacataggagaaagtttaaaattttcaagaaaatgagcaaaagcttacatatcaacaatagaatgatagttactaccagttttatcactatataaaaggtaagaattaaaatcaccaataacacccatggaagattaggagcattataaaaaactttatgcaaagattccaagtaaaataacgttgactagaaacaggagaaccatgaaaaccaataaaatgaaacataggcttatcacttaaagtaatattacagtcaatatgattataggaataagttaaaatattaacaaaagcatcagctttccacaaaagcataagtccccctccaaaatattttttaggaacttcaaaacccgagtcaaaccctagagaaagcttgaacctatccacagctctaggggaaagtttggtttccatcaaaaagagaacagaaggcttatgatccttcaccatcagggagagccttcggaacgcacgagttctccccaaccctcgtgcattccaactgataatcgtcatttttctaggcaggtgtggtcagcatcacccgcctgttccaaagataaagtagcaagagtagtagtatcatcactatcattggccctggctctcttaagggtttcccgaagagaaccaccaaccataatctgttgcgattgaaaagaagctcgcttcactcctgaagcagaggcaagactcctcccttgcacagtgggatcaggttgaccatcattgtgatcaacattgccaacaggaatattggaatcacccgagacaaccttaaaggctgaaacagaagcactgcccattgaagactgaacagcttgcatgcccccagaggtaccactattggccctatcagcaacaaggatagagtccgtggagtatgctccataaacaagtgatggaacatacagggtaggatcagacgaaccagtgttcaaagccaagttgttaggattaataggggtgggaatcataattccagcagtctcaaaagcattagcgaattgattttcagcagttaaataattttgaaatagagaggagaactgaatagtaggaaagtttggaacagatggaagggagaaaaccccctgaggcagttgaaccacagagatagaaggtgggtgtggatactggaatggttgagatttatcagctgctttttctttgccacgaaggagaatagtaaaaggacaagaaggaggggtaggactttcatcacacttctggaggaaagcatgacaatacttcctagtatggtcaagttttccacaaaagtagcaaaagtcaggtaatctttcatatttaaaatcaatccacttgatgatctctctccccatcttgataaatctcacattcaaacctctcgtaattggcaagttaacatcaagcaaaacacgaatcctaagatatggcccagtaccctccctgacagtggattgatcaacctcaaccagatcaccaatctcagaagcaatgtacttagcaagttcatgggacttacacataaaaggaatcccataaacctgaacccagaaaggaacataatggagtttctcaagaagaatagggaaagcactatcaggagcagaaaaaaccgtgacactttgagcaaagtgccatggttgtccctctaagatcctacctttatcaccctcacacccaaaagtaacaaggaataaaccatcagcatgttcagaaacgacaagacttatggtagccggagactcaacagaacccacctcataagtaaaaaaaacagtattttcttcacaatttagaactagagaattcgagacattagcaaagaaatcatccatgttgaaagacacaaaacacaaagacaaatatttgactacagactgaaaaagtggagggaagtgaggaagatgatacctggaccttcctttatataggtaaaaccaaaacgccctttgagatctcctagaggagtcatatccaatatcataggccaggtaggaaaaatgatgattttgtgtttcgattcattattgtgccatagctccacctctatttttccaaaatcgaagagatagacggaagtaataatgaaatttgggggttgggaggatgagagagatagagagaaaggccatatggaaggattaaggagaaagcagaaaagataccgacatttaatgctctgaagagagattttaggatgggatagacactcagcataagacacagaacaattaatgcgagagttaatgaactgagagaagaaagacagaaaacttaggggaaaaggttgtaaatcgaggaagtaaaccaccacaaaaccaatttgggtggaccataactaccatttttggtggaggaaatgaggtatgcatgccactagagtg

SEQ ID NO: 229499 - DNA, 1125 bp, Cannabis indica
aaaaaaaaaaaaaaacacaaaccaaatcaagagcaaactcaccaacatacataaacaaactttagagaaaagaacacataaataaagcccatacacactaaatggatggtcatggtcgtcttttgaaaaactaactgtgaacagtactttaaactaaattcgatgagacaactttaaaaattccaactaagcaaccatgtttttaaactgaattctgaatccattagaccactcaaagatagatgtggacaacaattgattggaatgttataattacatgaagaggattttcattataagtggtgtccaatgtcatacgaatttggtgcattttaaatgattaataattttttatattatttattaaatcaaaatgtaaaatgtgtgagatttatgttaaattacacacataatattaataggttcaagtgatcaagcatgttaattattaggctttacattcagttagttagcttttgttaattctgttaaattagctaaacaagtgattaatcaagttgttcgttttcttgattaacaatatttgagctaaactttgtgtaattaatattttgtaattcagttttgtaatctttcttttgtggtctctgagataagccgaatcaagtctttattctctaagttgcaactccctcttgctaggtgctaccccacctctcatttggtgtgataatctaatcatcatcatccttgctggcaatttgatgctttatactcgcaccaagcacatagagattgatctctattttgtttgaaataaagtgattcaaaaagagatttatgtgctgcatgtctttaacaatcatcaactaactagctgatttcttgacaaagtttatttctaattcaaagttttcctttttaagagataaatttggtgtgatttgttcaaccacgctcagtttaaggataaaggtccagttgagctaacatgttaatcattaggctttacattcagttagctagcttttgttcattctgttaagtggttaattaagtttattttcttgattaacaatgtctaataagctaaatcatgtatatgtactctgtaattcagttgtttaatctataatatagaattcattctttcacattgttctt

SEQ ID NO: 229500 - DNA, 2323 bp, Cannabis indica
aataaaacatgtatttttttaaaaaaaaaaaaattgaatccttagttaggtagatcctaggaacagatttagcccgtttatgccagtaatcaaccctaatgagatgagtcctaagaatcaagcaaaatggttcacatttttttttcaataatttattagctataattaaatagaattatattagaacaaaaataaaagtttgtagaatttgtgaaaaaaaaaaaggaaaatagtattagttttgaatggagaatagaaggtacaagcgtgcgtgtgtttgatatagaaccaataatggaggctcccaagtcccaccacaccaactttttattacttctccattctttctttttttcttttcattttttattcagtaatttgtgactaaatttaatttttagtagtaaataaatatttaaatttaatttttgatgataataatacttaaattatatttttataagtttcgtaagtacttaatcatttagtgttaaatcaataatcacttgttagcctttgtttgttccaagttattaattttattttttatttaaaaattaatttaagtatatcaataagaaaacaatatgtggataatgacttaacacttaggtacttacggaagtttcagaaatataacttgagtattattacggtaaaaaattaaatttaagtatttacaccacaaattactcttttttattctaaacaataaaagtatgcacacaataaggttcttaaactttggttttttttaatacactttgaacaataatgttatattttagagaaaatttatatttattaatttaaatacagaataataattttttcgttggttaatctttgattcttgcataaatgggaacaaattactatttatgctaaaagaataagtttatttataacaacgaatgtcaaaaagtgagatatttaacgtcgattatttggtaatcatcgaagagaaaataaagactttgaaaaggagattgggtaggggcaaaatctttcctcttctattattataaaaagttttttggcggttagaccctcacaattatcgttttacttacacttaattctctaagcaaaggtggcaacttgtctttactagtcgttttcatgtcatgtcgaaatccatgtataatatgtatatgcttgatccgaacacgatccgtttaagaattgtggcagaaaataaaactcaaacacgactagtttataaatggattgacacgagacgacccatgtaacccgtttataagtatattgtatttaaacatgtcaaccaatacatttatgaagtattcaacgcgattataactcattcattaatgatatattaaagtattaaaaaataactttaaataagtcattaaagagtcattttcgtattagttgtgttaacccaaacacaaaccgttaattagatgagttaaccagaacacgacccaaactcatttaaggcaaacccaaactcactaattctcgtgcgagatttgaatcgtgttatcatatctggttcattttatcaaccctactttcaagcagaacgttaaaggagaccgatgtataaaaaaattcaaatttatgtatttatttttactgaaccaatgtaggattaattatttagaagcacatacaccaacatttaacatctcaattaatttatattatataattaggccatattatttagtggaaaccctatcctacaagctagctccttcacaataattaattaatagtgatacatatggacgaaattatattattaaatacattattagcacgttcctcaacctaataattcattagttacttataaattattatcattattattattattttattctgacacaaatgttctcatataattttacataatcaaactattaattaattgtatatttctaagtacattccccaacccttttagacaactccattatttgattaggtcacattattgaaagtaaagctcctaagtaaaatagaataatataactctaaattagaaattagagtaagtaactttgaactaacatataaatttattgtattttgattttgaaattttcaaaagataaatgttaaaaggtatgtctctaatattttcctcgatattatattattattagtataattaagtattgagtctcatataattaaatataataaatataatattactctaaagagtttggccaactctaatagcacgataaaatatcaaaagtagagtaaattgacattaaatcatttccaatggtactatagatcacattataatattatttttttgctttattaattttta

SEQ ID NO: 229501 - DNA, 1574 bp, Cannabis indica
gagtgtttttttaaaatatatataataatgttgttaattgatacaaaagtatattataattagtagataaaatgtagggccatagcattaaaaaaaaaagatgatttgtggattaagtagatttatagagcttagatgcaaattggtgggactactcagcaacattaatttcagctagaacatttatacatcaggaggtctaccgacttctttgtccgcaagatggaattagagttagatggaataatgaaatgtgaaatagatttaatagccctaaacatgtcgtgattgcttagctggctgttcaaaatagattaagaactcgagagagattactcaaattcaatatattagaataagacttgtcttttgtgtggtttggatgagaaaaatgttaaccatctcttttttaattgtcctgtgagtatgaaatgcataaaggcaactatggattagatggattgacacactaatgcatgccagctctattgtctctttatataggtagatagttcggactaagatgagtcaatttaggagaggttttttttttttcagctctcttagcttctcttatatatcatttgtggagagttaggaatgaaattttgtggtcacaaaagttgacaaaattaggcataaatataattgtaaaaagagtgataaaaagtgtaaaaagtagaattttgttaatttagcctaaacataattagtagggaagatgtattgtggtttgagatatgtcaattaaggtgaaatgatgtaaagtatgttgaggcatttaaatcaggtgatgttaggaggtaaggttgattttttcctcattccaaaatatatatatatattacaaataattagttacaaattaatgggtagagaagaaaaaatgaatgaactagcatttggacatatatttattaaggaaatttatataaaatattatttttggtaattattttagagttttgtagtaaaatgtttttttttttacatttttaatgtgtcctataaaaaattatataaaaataatagtaaaataacataaaataatatacaaataaaaaaaatcaacaacaaaatacataaaaaaaaatataaaaaatatacaatagttcgtatttttcaaaaataaaattttaaaactggtagaagtgtttaaaattttatacaaccctatttttgtatttttatttttttagatatatatgtataaaaatgtcctattaaagggcacaaagccaaaagagtcacatacgtacaaaacaaaaaaatcagtctttagaaccgaaagtaattaaattaggctatcgaatttgagaaacatctaaagataaagaactataacattataattactacaccaaaaaatagatttaataacatttgaaaatgttagtattacttagttttaatgacatttattggtttagtaacatttttgacaaatgtaggatatactagtgtgagtaaaaatacaaatgtcactttattatcttttactctcatttgaaaaatgtcactaaaataattgtttttttttgaaatattaatatattatattataaaacgatatt

SEQ ID NO: 229502 - DNA, 1492 bp, Cannabis indica
aaattagaaaacaaaaatgttaccaaactgcaccttagtttatcattcaattaactatttaccattatgaaatattttttttcaaataactaatataagataattaaagaagaaaaaaaaaacaattctatggtaggaaataatactaaatataccaaacggtactcatcatcgacagaacttttaacttttcccatacctttttcttttttctgcaaaagatttttacctgtgtaatacatctagaattagaaactaataacagagactattcattgaggtaaaccattgggcccccaacagtcaaacccaagaccttgggcccaataataattttttattatttatttgtattgtaaaagtagaaagctttaatcgtagccacccgatttgtactcaaacaagatatatcgtctctctaatccgtctcgatattttcaaactccaaaaaagctactcataataatgccgttcagttttgaaaacaagaccaagcagaacttgtttagttttaattactataatacctctatacatacctagattcattcattcaaggttaagaaaggagctaaagcgctagccctagcagacaccacacaaatttattaggagatggcaaaaatattagttaaccatatggatgatggaaggagtaaaaagctcaaagcttatacaggaacatttaaaggaataaaccccagaagaaagcttaaaactaccgccacaaaagacataaagtgtacaaaatcacaaagactaactaaactaaaatataaaaaacaaataacgtatagaacaactccaaagaactccccaaacgcagaggaggctgcccgaaaggccaaaaacaaaggccccctgccaatttatgagaaaagtccacactcaatctcttattgcagttttgaacggtgaaagtgccaggacaagagaagcacaactctttgggtaagactcgagtccccccctacatctacaacactccgaaaactaatcaagagcccttatgcaccggagctaggacacttgaatagaaactcacgaaaaaacactgagatctgaaaaaagagatagaaaaataacactacaaagccaaaacacacgcctgagaatgactacaaccaaccattatcctcaaaaacgaaatggtgagagccaaaagaagcccaccaccagtgccaccatgctgcccaataggatagaaccaccaaaaacctctgacctgcggcaagaaccatctcaacagagacagacaacctccaagaacggtgatcggtcacctgaaaaaacaggcaccatggaaccgaacacaaagcgacgcccaatacccacctaacccgtcaacagcgaaacccaccaagaggggacttcctccacaacacgaagcatggcgagagtacctagattattttttaacagtacatcatttcactaaattagtatgaaattttattaattttttattcaatgacatactagattatatact

SEQ ID NO: 229503 - DNA, 844 bp, Cannabis indica
tttgtcaatgcttttgaagaagccatatgaatttgtttccctttttgtgactttggtgaagaataatgtatgtatcgatcgtggttatctaccaagtactgttaaggatactcgtagtgaggttggaacttatgttccataaataaattcacaggtgttggtagcagatgtgttacctgaattaaatactatcatggcgacagttgaccatgtagcacaaattccctttcatgataagtttggtgatggtccaaaccctgaagcttattttaatggcaatgatgatgtaagagagaatcaagagacataggtccatgttgtagctttgaacttgactcgattattgtaccaaatacttaggcaaacaacacgtagaagaagaccccatagagaagattgaaaaacatctggtactagtagtagttgtataaacgaaaccattaatgctagaggaaccagtgatgctggaggatttagttattcattctcttctttgataaattacggttaattcaaagaaaaaatatatacaaaagaagaaattgagaataatagtcattatacatttatgggtggcacactgagtggggagtgacatttaggaaagttttttaaaaataaagagcatttgaatatggtcgttagcttgtatgcaatgaataaagggtttgacttcatcgttgagtagtctggtaccactgtttggtacattaatgcaaaatttgattgcgagtggagattaagagggaagaagaatgtactttctgacatgtttgaggtgactacatttcaaaatttacacacatcccttgatgtttgaagaaaagataatcgtcaagcatca

SEQ ID NO: 229504 - DNA, 1033 bp, Cannabis indica
ttttatattgagatcatagatcttgcataaggtggccaatcaaatatatgtaataagcacaaaaatgaataaataacacagtcaagaaagaaatagaaaatcacattaacttttggaataaaatcatccaacattcttcatatccctaaattgaaaaattagttcataatctcaacattcaaatcgataattatactaaaaaacagataaaacatagaaattaaagagaaaagaaagaaactagatggtaaactcgatcggatcaccatgctcgctccaagcttcttcttcttgtattttctagggttcttttttgaatgcccccataaaaattcgaaaccccccttttaaaactaagttttacaatttaacatcgagaaaagacaaaaatctccttaacccatgcagagtcgtcgtcacgaccacagatactctagtcgcgacgactgtaaaaagttaaaaacatcggttctgcccaggctccttagtcacgatcacaattctaattctggtcacaaacaaaagttagtcgtgaccaaaaattaggctcgttgcgaccaaaattcatttttctacttcgacctctttcaaaaaaatgtgtatatcttttgcatacaaacttccaatgagctgattcagaatgagttaaaaaaaaatccaaaacatttatgttttcagttcttccaaaattttctttatcatggagggagagacttacgtataattatatatgcttagtattatcatcacaggtgtcctctggcatatctgttgtacgtgttacaaattcagcatgcatgaggtaagtgttgggccacttgtgttttggcagagtttatatgtattttccttccattaaattaaggttcgaggttataaaagtaataaaaaatatacgtgcagggtaaaagacattgtattgtatgtatatagcatgtatttctctgccattattaattataaatctctgtcatgatgcaaacgtgccaacgttacaaacacacataataataatatgacacatgtttacaca

SEQ ID NO: 229505 - DNA, 1271 bp, Cannabis indica
tttttggggtgcttaattatgtaaaatatactttcataatatgataatacttaaaaatattatttacaatttatatatatatatttttttttggttaagggcttatttttaaaattagaacagggcctctaaaatatttgagacggccttgtacattatacatacatatgtaccacaataggatttgaatccaacaatagattcattttcaaatggaataaaaaaaaacccaatgaaaagtaatttgtaaggattttaattgttatttaacaaaatataaagttcgatatcagtaacttttacatagcatgaaaacctaaaatagtattgggatatttgcgacgaaacttttttaacatttataattattatacatatgattctaataaaaaaatggcggtaaaagtacattattttacgattttgctacagtacgccgtacctttttttgccattaagtgtcaactcagaaacacgtggagacatattattgaactatgtagtaaatataaactaaagaaatatgtcctcgcgtgtttttgagctaatacttaatgggcttaaatattgatacttaataaccaaataagggtatgactgaaacaaaatcgtaagataagatattattgccgctacttttttaattagaatcatatgtgtaacaattataaatattataagagtttcgccataaatatatctcttactaaaatgaatcttctattattgttcatttaatatttattaaaaatatgaagaaaaaaaaaatcaggcctgcattatttttagtgttcactcaaaataataaaaaagacatagaaataattaattaatattgatttaaatatacatcatagtatattgtgtaccaaatttaacaaaaaaattcagtacactattagattgaagatgtcttcaccttcatttaaatttaataaatgtattgttttatacatactataataatgattgttactttaatctttttctttttggagtaaattcattatgagtgttgctagttgaacctatgtactttgctctttatttttcacagaatatatatcctaaaaatagaaaccccacttatttttaggcttttcttatttgggattctctttggaccagcaagtacttgggaatattattgtcaataatttaccttattaattttccaacttagctgagatcgttaataagtaaaaaagtattcattcaagatagtgatagctaaaagaaaaatggtcctttgttccattatattcttagtg

SEQ ID NO: 229506 - DNA, 1477 bp, Cannabis indica
taattcaatataatacaatacgagttataatagcacgttccaaaggagccctaatataataaggaaagaaaaggaaaaggaaaaaggaggcacagtgtgaagggaagccaaaatccttgcctcttgtttgcttaatttgaccaaagagagcgagacatgggagtcttctccaacaagatcgagagagaccatctcaaaccaggcgatcacatctattcatggaggcatgcctatatctatgctcatcacggtagttccttccctcttctctttcttcaattttattcgttgcttcattctagtatttcttaactccagtccattctcaatttagccccaaagttggctaatttggcttatatttcttttgttcaaatcatagtaaatatgacctagatttaaaattcaatagtgaaaatgtaacttatcatctcaagacaaaatgggttttgttcggattttaaaaaacaacagaaatcaattttgtttctttcgaagtagtttttggattttaaattggaaaaaactgcagtaatatattttttgttcttcaggaatatatgttggagagggagaggtgatccacttcaccagaggaggaggccaagaaattgggacaggaactgttctggaccgcttcattttcagctcctcaccctctcattctgaggataatccctgtccaagatgcggagatcagtcgaagctgaacggtgtcatctcttcttgcctagactgtttcctctggggtggagaactgtatcgatttgagtatggagtcaaccccattttctttgtagccaaagctcgaggagatacctgcacgctagcctcatccgatctaccagaagatgttctctaccatgcctcttacctaattgaaaatgggtttggtgtttatgatcttttcaagaacaactgcgaggacttcgccatatattgtaagacagggttgcttgtgttcactagcatcagcgtgggtaggagtggacaggctacatctttcttggctgcagccgataccattgtttcgtcaccacttcagtttctgactgccggcttccctggccttgcagttgttggttgtggaatgtactgtgctagccgtgtgctttctgatattggaattcgtcgagatgtcactaaagtttcagttaagacgcttgttgctcgtgacgcctctactgaaactgtcactgttagtaaaaaagactaaggtattatacatacatacatatatattcatgttctctctctctctctctttaaaatttgaagttcttatagtgttagagtacgttgtccattcatataaagttagtactcaattatagcgtggaagattgtgaagaattccaacacctaaaggagatctaggttcagattttgttattactctgcgacagaaaggaacaagagttaaagatctgaacggaagatccataatattttgtttttatcgatgtaaggtttttta

SEQ ID NO: 229507 - DNA, 1291 bp, Cannabis indica
taaaaaaaaatagtaaaaaaagtagagtctgaattcgagcgcttataagaaaacgggttgatgacccatttgtgaaaatgaaccaacccgagtaaagtatggcacgaaaatatggatttacgagccgtgtcgggcttacttttaaatattagcacgatacgacacaatccatatctttttatgggttggctcgacacacacatatttacaactatagttttgatcatctttcctgtagtattattctctaaatatttttgaagtttttagagagaactttattgtgtaaagaatttgagtctagtaaattcttagtgttttattatagtgtgcttctgtattatttttcttataataattgtgcaggttatatacacttggatgttgttcatcaagtttcaggagaagtcttgcttgcaagtcattctagagtgcaagtgttatgatttgaaagagttcaagattttagcacttcaaaattttgattaggagtttagattacaacagttgcggcaaattcaagaaagagtctttatttatataagtcaatttagttttgtaattgtataacttttattctctgagcatgacctcgagcatattacttataccacataatttagagtgttctttattttatgtttatttttatctttcttctattataaactatttaacttattaagtttctattcaaacagtttctagtttctgtgtatgttaaatatttctgcaacatcttagaggatatgaggcatcactatgaccttttagtatttctcaaatattttttaataaataactctctctctctctaactttaataatgtacaacttgaacaagagtcaaagccgctatgccctgcccaagagtaatggactataaagggtcacactacaaaaaatgttacttttgtcagcacaaaataaaaagcgttggtaaaaatgacttttcccaatgcgtaaatgcactggtaaaagttaaattttagccactgcaaatgtgcgttggtaaaactttgacctttttaccagcgcagtactaacacagtagcgaactgtactggtaaaagtgacaatttttgtagtgtcaagtagggcccaccttaagagtaggcaagtcaggtgtgcgtcccgggcccccgaaatgtgattaaaaaatattaatataaagataaaatattaaatattaagaaaatataacaaatattatttagtgtagtggtaaagagtattactttaagctaaaataaatttttaatctttacatttttattttaaaaaatatata

SEQ ID NO: 229508 - DNA, 1330 bp, Cannabis indica
ttttagtcacaacataaaagttatgatttataattagttacaatttttatacttttagtcacaaattttgttgtgactaaaagtaaaaaaatttgtagtgaaaaaatgtatggctaaaagtataaatatgtactaaccaaaatcagaatttatatctatatacgagagtaaataaaaatgatcatattaattaagtcaaaaattctactagaaataatcattaaatagtactagttttttttttttaatagtgataattggataatgtatgttttgatgaattaatatcataatcatgtgtatatttaattggtttgaaaaaccaggtaacattatttcaatagataatgatttcacaagaggagatgatcaacctgagcttcatttttttgagttggatagtgtattaatagccacaaacaacttcagcattaccaacaaacttggccaaggagggtttggctctgtgtataaggtaatatgtaattcaattatttttcaagagaaaatatgtagaaatattttatttttagtcgtactaaaatttgtgactataaataaacaaaattgtgattaaaataaataattatttacgttatatgctatatatcacttataaagtcagcgactacaagttattagttacaaaatcataatttattataaataaatatgttattacacgttgcgatcaactaaaaattaaaattagtgataattaatatctaaatactacattttagttacaaacaactttttattgtgaacaaaaataatattttagttgtcaaaatctatataatgacaaaaatgttatcactaaaaaaatatagcttttttgtgatttatagatatagggagaaatgctaaaggtatcaatagtacatagcgccctctaagttttctgtgggaaaattaggactatagtgcagaatcaaatcaactaaaatttgatcaacaaataatttgaaatgacacgattaacaattcacaaatacgaattagagaaaaatagggatgagcagagtattaaaatcaaaaataattaaagcactaaaaaatcaaattaacaccaagatgtatattggttcaagtcctatagatcgatgtgatctataactctactctagttccggaacaccactaaattttatttattgattgagcaacagacaatacagtcgacatcgattctcagatggattctctaaaagtgttttaactctcacactcttacccaagattaatcttcttcatctacagaagattcttcatcaaaactcaaactcaaatctctctcttttctatatacctctctctctctctctct

SEQ ID NO: 229509 - DNA, 1464 bp, Cannabis indica
aaaattcatctctgaattttacagccttcaataactttccagtcaactctttcataaactttcaccgtgtcgactttgaacgtaagaagaactttctttctcttatgacttttgaaggcattcaaacattcaaagccaacaagcattatcagtaataagcacaacaacaacgaaggctcttttccctacagatataacatcatacaaagtctttctaatcctagtagcaaccatctttgccactatcttttaaaggacatttgaaagactaatgcacaaaaatcacttgtatgagtgaaggttgggagactcgggtccttggggattgaggtgttgatagtttcatttaagttagcaagtgaaacaacttgccccacaacatctcaaatttttaaataaaactcaaccaccatactatctttacttgggtttttcgatgggtgcatttgaaataagacctctgatatctcacctgacatcttcttcttaggcctgccgatgttaagaaggaaaggagaataggcggattgttaatgcataaggggaagcggacactggtgcttcgtacgggcgagtgcgtgggacgcacggggcgcgcctggcgagcgggcgcacggggcgagtgggtgcggtgctcaggcatgggttcttccaagagataatttgatttgactaaagtggattcagggataaaagaggtgggggccgccttttgtcctttcttgtctgtatggaatatcttgagctattcacctttccgtttaatatttgtaggaatatttttcttctcaaatttttggggataacaaaaccatacaaagtttaaaaactagtttcatcaacattaaaagaaactaattatttcattaaaagcagtagaaaaaaaactagtttcatcaacaacataataaataaaatacaatggaaaaaattataatctagaaacgttaccaactttaaaactagtttcatcaacattaaaataaactaattatttcattaaaagtagacgaaaaaaagactagtttcattaacaagataatgaaaaaaaaaataaaaatgaaaaaaattataatctaaaaacgatataaactttaaaaactagttttgaatatataaattgtatatgaatacttaataaccaaacttctaacttctttaatttagcattcaatctttgatttgctttctcaaaaatcaaagttgatttaagcatacaaaatagagtaaagataacaaagggggtcaaaaactaaaacaaatttcatcaacaacataatgaaaataaaaataattcaatgctaaaaatataatctaaaaacgacaccaattgtaaaaattagtttctacatataaatttatatgaatacctaatacttcaatttctaactttatactctgttttgacatttaatctcttatttgtttgtcaaaaattagagttgattttttttttgaataaaa

SEQ ID NO: 229510 - DNA, 686 bp, Cannabis indica
catcttcacacaaagagtgagaacgtttctgttctatgaccagattgagaatttcagagaaaaagtgagggcttccggggttttctattgagctacacaagcaagatgaatgtgtacagattgggtaagacagaaaaacacttctgagtttgtgagtttttctcaactgtgattgttgtactcttttgttgctgaccaataaagctaccattgatgtaggttcaagatcttcattgattttgtactgaaccaggataatcctgtgttccaatattacttttttgattctcagtttatgtcatcgacatatttggtgtgtttaccattgtctgatcaaatattagattaatgtcaggcttggcttctagttctctatcaccacagttattattcttattttcttggacattcctatcaatatataaggacttgtttttcaatatgcagacctcaaactcatagactaaataaatcatacagacatacatgcacaaatgaataaaaaaataataaagtcacttaaagaaaatgctaagaaatttttccactaacatcaacaggattaagagcatgcttctcagaaccctctacccattttgatggtagggtgcttggcactttgcctcaaactaaaaggctcgaggagcaaaaatgaaaaaacagacatgcttctcacagaagctgga

SEQ ID NO: 229511 - DNA, 851 bp, Cannabis indica
taatgataggaactagtaagaaactttcttttttaacctcataaacacattgttaaggaaagtttaatattaatttttctcaagaaaaaaggaagagcttatattatgagtgtttttttttcttttcaagattaatatttagacttctagtcaaaaccaatcaaacattttttttttgctgaattacctcaattcattaaatggaacttaaaagtgagcacatgagtctcacctcccaaaagccaaggaaaccattacaatttacaactattatgagtcaaaatattatgatgcctcggaatccaacacagacaaatccgaaactgtaactaaattgagttctatgagggatgacactacttgtgcgcgcaaaaacctcctcttttgaactgacataattcattgtctagctcaagatcttgtgatttgagatagatgaatcaaaactaaccataaatttggacaatagaactattaaaatatttgtactaagatttcacatgtactgtaagaccccaatcaagtccaacagaagaacaaaatagcttcaacagcactgaaaagagctaaaacacgagaaatgctaatagaaattaatggtgcttaatattttttttttattgtcatatacaattaagtatcgatttttattaaatctgattgtttagctgtgatttctgtctttgctaagagatattctctttgtaatgattttgattctcttttagatggtattttctgttcaatttttttgagctattcttgataataaaattatttatgaattaactatgcatgtacttaaagtggaaactagtatagataaatgattttccattttttttaatgaa

SEQ ID NO: 229512 - DNA, 1496 bp, Cannabis indica
gtgagtttgtgagtttttttgtgagttgagagtgtgaagtctgggcttgtgtttcactgttatctagtagttttcctgttttttggggcaatggcgtctagcagtcatgcagtcgaggaattgggagttcgagtgggccgactttcaagtcgatgacgaggagggagggggtttattgttcgaccaggaggagactttggtggatgatttcgatggaagatggtgtctagtgggcaagctattgtcggacagaccggcagattttgactctttaagaaacgttatggcatcattgtggaggcccgggaaaggtatgtatgtcaaagaattggaaactaataagtatttattccaatttttccatgaagtggatattggtagagtccttgaaggtaccccatggacgtttaacaagattccgttgattgttgaacggttgaaggaaggagagaatcctaggaataaagctctgaacactatggagatttgggttcaggtttataacctggaagtggggtttcgatcagatagagttctgcagggggtaggggcctatattgggcaatatgtttcctcttgtccaaagaattttgctggtatatggcgagactatttccgagttcgggttttgattaatgtggaaaagcctcttaaacggagaatgcgaatttataagaacaaggtggagtggttttgggctaacttcaaatatgaacgagtacccacgttttgtttcatttgcggcatcatcggacatactgaacgattttgtcataggttgtttgaggaatcggctaacaccatcgcgaaaccttatgatgtgttcatgaaagcacctgaccggaggcaatcaaaacaaataggggctcggtggcttcgggacaatatgggacagccagtggagggtggcgccggtcatagtacgtcggagaaagtttccatggatgcaatgaatactgaccgtgattctggggatatgttgatgatggatggagtggctaatggagtgattggtggaaggagatttggtgatttcccacaacctgtcaaaggcataaatcacgagaatattaatggggagagggagaagaacggggaagtagatataaataaggaaagtcaacaggagggtatagttatagtggatcttaaaaggaggcgtgtgaatgggaaagaggtgcttggtcattcaagtgaagattttgtggggccagtggtaattggtgatgatgtggacgtgggtatgattcaagaaggaataaatagagaatgtggcattattgtaaatggggtttatgataaggatagtgagggaatacaggttgtaaagcccaatggtggaaatgaacttttaaggaagaattctgaagctagtattggcatttttccaaaaaacgattctttggcgggtactcaatttggggctcgccaatcgttatgagtttgttaagttggaattgccgagggcttggaaacccgagggtggttcaattcct

SEQ ID NO: 229513 - DNA, 2403 bp, Cannabis indica
tctcttttttcaagataataatagatagcaagcaaacaaattttaacaatttagtgaaactgagaaagtttacacttacaagaaagcaagctgaggacttcttgatagagataaaggaaatggcccagacaagctattgttgttcagcctcctaatctcattacatgacaaaaataaacacagttaaatacaatattatagaatcattacagggcttatatataatatacagaagacaaaggcttcttctgcagctatacataatagctatattgagctaagtgatcagtttcaatattaaatgaataaaacactatggtacagaaagaaactcattagttttcttcctttttcttagtcaccaaacaaccaagtaatccaaatacaaatattattatattaacttacaaatacaagagaccgttcagttgacccagtgagtcaggaaccactccggagaatcggttattagagagatccaatgtctgaagcttctgaagtttaccaagctcgggtggtattttgccagaaatattgttgttttgcagtaaacttcaaattcatagcaaaaacaaaccaaaattagaaatggaacaaaataattccaagtttcaaagagagaagcagaacaagtttgtttatttatttattacttccattaaggaagaaaaatacttaaatgggttcttacacttggcgaagatttgtgagatttcctattgcaccagacaaaaatccagacagagactgacttggagctcccctgcaaaaacccataaagaaacaaaaaaaaaaagacattaaagctcacattcaattcaactcaaaagaataaatactccattaatgaaggaggttgaaggaggcaactcacaggccaattacaaagttttcaggtgagcaagtgatcatagcccaactacatgggtcaacagagtcaccatcccagttgttcaaagctccatgaggatcatgcaaaccatctcttaagttaatcaaagcttccactacaaaaaaaaataacaaaaaaacaaaaacccatatcaccaaaaacagaacagaattttctctctttcttattttaccaaaaaagcttgaaacttaccttcatggttgcgaggttcgtatgagaaacaaacggtagcagaggaaagaaagaatatgaagaagaagagaggaagagcttccatggctaaccaagctatacaaaattagctaatctatgtatatctacctacctaagtggctccttcttcttcctctttcaaaaaaggttgtgtctttgtgtgtgtgtgttctctcactctctacttttctttcctctggtctcttccttttcagtgtctcttaccaccccactctctgctttttacaaataaaataacaaactttgaagaaaaacaaaaaaataaaataataaaaaaaagtaaaagggtgttacagagagagagagagagaaaaagagtcaggggtgatacgagttgtcaggagagagaaagagctggtgctggtgatggtggtagaagaaggagagtgagtgaggagagtgtgtagagagagaaagagagagattgttagtaggaacgtgagtgagtgggtagcactggtagtagtctcctcactctgtgtgtgtgtacttgtacctttcactctctcagggactcaactcgctccctaactcgttcactcgctcactcactcactcattgtatattattgcatttcaagactcccccgccttagtctttttttcttttcttttgtaacactttattcattttcaatgggcaacaagactcggtggtctgtttggttttgtatttttatgtcccctctaattgggttttacttaaaatattatattattatttagattagagataataatacgattattatttatagaacaaataataaccccttcttttattctgaatttgtggataaattaatttttttttgaataaatgaataaacaacacttcctaatttttttaaaaaataaataaataacatttttttataataaaaaaatatatatgttttactattattttgttaattcctgtcctaagatcatctccacccaaactctaaaacaccaaatatagtatagtttcacactatatttactcgaatgggacactaaagctatactcataaatagctttgtctacactgtcccaccaatataatgagatactgtagactacacttaatttttttaaaaaaaaaagtttttaataattaaataatacttttaaaaagaaaaactaaataattatatatatttaatattaatatattcttattatattaataaaataatatataatataaaatttagagtaatttttagtattgtggttggaattgaaaaaaaaaatagtgttaaaatagtaa

SEQ ID NO: 229514 - DNA, 1444 bp, Cannabis indica
agaccacgcattttcataccgaaatctcttcttgacttgtaatggtttagacttggagagatttatccatataggacaatgatcagacactgtgacctctaaattctccaaaatggccgacggaaacagagcttgccaatcataattaactaacgccctatccaaccttacttcaacccattggtccgaacccttccccttctcccaagtgaaaggatgcccatgtagttccatatcaatgagatgacattccgacacaacatcttgaaaaccagttaataaccaattaggatacgggcggccaaccctcttatcgctatggttcaaggtattatttaaatctcccaacaaacaccacggtaaggaagactcacctgaaagttgacgtatagcacgccaggagttagctcgaagatgtctctgaggttctccatagaaaccggttgcacgaaatgttggataaccatccatgttgagctctaagtcgatatggtttgtgctgaagctaatcaatttaccctcctcctctttcttccacaacatagctaggcctccactatgacctcgggcctccaccacaaaactcccttcaaagcccaacgcccttttcacaatatttattttttcagttttgcaaattgtctcacgcaaaaaaacaacattgggtttcttttggaaaacgatttccttaaggaattgtacaaccctcaggttcccaagccctcggcaattccaactcaaaagactcataatggatggcgagacccaaaatgagtacccgccattacatcgttttttgaaaaaataccatgattagtctccataccttcctctaaatcactttgcaaaactccctccttatcactaggcccaatcacacggctctctattgagtcctttgtattttcagaaatgacatttccaatgggcccaatctcattcaccatgggcctatccacttcttttattacccaattcggacccacctcctcactatttaactgctccaacaaactttccctattcatacgccttctttttaaatctgtaacaaccagaccatctttgacattattcccaatatttccttcatttattccaattgacaatctcccatgatttcctcccttatttctttccagcattaacttcaaactttcctcattcttctctcctggattctcgcccttctctagtccatcaatcataactacctcccttgatgatcggctctgattgttcatctcctccctgtagttctccaatgacttctggccggcaacagctcccaacgactggcccatattgtccctaagccatcttgcaccaatctgcttcccctgccttctgtccggagccttcataaaataaaccataaggtttagcaatagtctcaatgggttcttcaaaacaatcggtgacagaatttttctgaatggcctat

SEQ ID NO: 229515 - DNA, 1288 bp, Cannabis indica
tttaattttataattatttactgaccatttatgattgttatatatgaattcgaatcaaaattctaaaaagtgagatttgaatatgatctgatattgttatggatacaaattaatttaggacgaaataatctagattacttgatggttttatgagttgttttgcgtaatgttttctttgtgattattttttccataggaatatagagagttttcacatagatttgagtttgtaagtcttgataactagattataaactatttaattcaacttgccaatagaatatggagaagaaaaattaggtaattacattaggaagtaaaagaaaagatagtcggggatcataataatccttatctttattaatattatttctttaaattttaattatattgtcttgctttatttacttttctccaataataatttttattaatcaaatagaattaaagaattaattgattggtaattgataatcaatccttatgggaatgttattatatttgtcattatattacttgattcaattgtgtatacctacttactaaattaaccgaacatacatggtattattttacccctatatagcaaagttaatattattaattttacctctacctttaacattctcaaatttatacctcaaataaatatcttttatgaacataataatcttttattataattattctcttaatcaatttgtaacctaaaaaaattagagattatacagcatttaacaagaatatattttatatttatatttttaagataaatacataatttttatataattaatatttaataatagagatattgacggtaaaattacttatactttatatttttaaaaattaacctacctaaatcatttttttagtggcaagactatctaaattctctttctattagctatttactccttccgtccaaaaaactatattaagtgtcatggtggacatgccacagtatacacaagtgtatacatgatacatttttaatgctccacgtaatatttaatattaacaaataatttaaatatttaaaaatttagaaaataagaaaaaccctgtattttgcaaaagttacagattgaactctctgttttgtcaaatgataaaatagaccctgtattttccaaaattgtaaaaataatacattgagcttaattttcgacaatttttttttaatgaaaaaaactttattagacagaaatacccgctaaaacaatggactgaagagcaaggggaacatcgctctcaataaaacgacgacctgaccaataacaag

SEQ ID NO: 229516 - DNA, 1222 bp, Cannabis indica
taagaattttttaatatttatgcaaaatacttactaaccttgtaaatatatttagaaataactgtataattattaggtattgtagagtactaattatataatatagtaattgattatattctattttaaaatagagatttttttatttttacacttcaaaacagttgtttttacatttttacgaaattctacatgaaaacctctattataactagcgctgcaacctaaattgtaacaaaaaaatcgtataaaaactcctattacaactagcgctgcaactactttagaaacccaaactgtaaatttgaaagaaaaaaaagttaaaaaaaaaataaatatatggaataattcccctttaaaatataatgtgtgtttgaatatgagatactatttacttataaatttctaatgttttatttgataaaataattagtaattacatataaaaaaatactaatttttagtacttaatatttaaaataaaaagtttttaatattacacaaggtaattagactcaattctcattaaagattggagagtgtaattaatatctctcaattatctataattacataattacagtgtaattacgtaatcagacaaatacataaaattttgaattacctctaattctcacttaactttctaaaggcacccatatttgtttatcaacaaaagcattcaaaaattataaaataaatatatttgattctaaaaccaagacaagtagatttgaataaataaatatataacaaagagagtagtaggtatactatattacttatttttctcgcattatgtttggcagatatgaagaagaagaaaataaatatatgaatccgtaattgaagggttgtgacttgtgaaggtgatagttcaaacaaaaatatttcaagaaaataaaaataataataataataataatagttaacacactatgctttcaataataaatagaataaatatgtttttttacaagcttatatataaaaatttaaaatatattttcagttgtaagtaagataaatagtataaatatatatatatatatttctaatattaattctctcggtatattcttcctaataatttccaacatattttcttacttatatatgttctctctcttttgcttcttagatttgaatccatatagtttagtcactggcaattaacatggtgtgaagaatatctttcaatggcttgctaataagttttttt

SEQ ID NO: 229517 - DNA, 1538 bp, Cannabis indica
gaataatggaaacaactaagaaagaacagtaaccaaatcacaccaaaatataataaatttagaatagaatataaaagtataattctctaattatatatatagtgcatgcaaacaataaataaaattaattaaacaaagaaattaaaccctagtttcataatttagtactacgtaaccatggatattctagatcaccactttcctctaaaaaattgttaagagtttaattttcaatcaagtggagaagtagtacctgcagtgtggttggttggtaatactaatatatatacatatatatctttctttactacacctactggtcttcttcttactgaatctaaaagttggtatataaattttcagtgcaatttgattctattttaatgtgcatacaaattataatctcacgtactgagtctgagattattaatttattaattataataacaaataactgtacatatataaagtagagatatttattaactactagaacaaattaataattatttattataagactatattaaatatatccattaattatatataggcaaaaattttggaatcgctgtatacagaactctcattagatcatcattacaggggcttgatctacttcatcttcttctcttttttttttagttattggacattacatgtaattaaatttgatctttcaagatacaaatcatgatgtcttaaaaaacaaaataaaaaccaaaagaaaattcatatgcacgaacttattgtttatcaacaacgcattaacaaagtcatctagtagatatatatggccatgagtttgacttgccggttaattatctctctgatatagaaaccttaatttcacttctgacgcctcaaatccttgtaaaaccttttaatgaactcctcagctgcctcatccacttgtcggctgtcctcatcggcttcactcaacggaaacggcgagtcagttatcctcaattgccttaccatggggctccgcccgaacccgggaagagccggagaggcctccaccgcattcatcaccgcttgatcattgttcaaaatctccagaacagccttgagggcattggcggtgacgacatcatcttcgccttcgccttcgagggtgggtggcgcgtgagcgcacccgaagaaattgtgagagtggtggtggttgcggcggggcttaccgaggttgaataatgggccgtagttgggagtgttactgcagctgaattcgtattctcctgaagagagacgagggtcgtcggagccgacgttggaacggcgggaggatgcggcggctgcggcggcatggaaagtcatgaggttgtttatggcagccttgctggcgatcttgcctcgcttcatcatcatgttgaggtcaagcataagcttcttctttgatataccttttcttagcatgaagaaaagtacacgtaccatcccccatatcttcttcgctactactggtgcgttttgttccatttttgcttttttatatgttcttttgctattttctttgaggagtgagagagagaaagaga

SEQ ID NO: 229518 - DNA, 2106 bp, Cannabis indica
ggaaagccagattcatttcctttatttttcggaaacctaatccacccaaagacttaggaaggcacagcttatcccaagcctttgaatgaagaccatgatttcttttttcaaagccccgccaaaaatctcggactaaaccatcaaccctcgagaccatatgactagatagttttgtggtttgcatggcatatttaggcatcgacaggcccaccgacttaattagggtagcacgacctgcctttgacaaagtcttagccttccatccctgcaatttagaagtgagattgtccagaataaagttaaaatcagcatccttctgacgagatctgaaaagaggcaaccccaagtaatttatagcaccttccggtgaattaatgcccaatgcttccttgatccctctccttataccatcaggagtgtttttactaaagaatattgacgttttgagtttattcactttctggccagaccaagagcaaaacctctccaaacaattccagacacttttagcttcatttatattagccctgcccaccaggataaggtcatctgcaaaaaacaggtggataataattggacctcccctacttagcttaatcccatgaatgttaccctgccccaatgcctcttccaagaaaatagtgaccaagaaaatacgactaaatagttaacaatatattgaccaagttgaaataaagaagactaattgaactatttatcaaaataattaggatgtgcaaatattttttttttttctaaaagaaaatagtgaaattatagtaaaggaaatagaacaatataaattagtatagtatttatttatttatttatttatttgaaaatgaagatgatgatttgtgtgttattgttaatttggtgagttggaatgttttatgattgaatttgaatgttatagaaggggttgactgtggcagaccaccgccctaattatttctcattatgcaaaattagactgacttcctttatttctctcattatgggcaaatccatgctttcaagcactgtccctgttttggtcctctcaaattcaacctaattctttgtttattttattattaataatgtaaagtgtttcccaattttaagtgaaatttagaattgattctcctcatcacacactgaactaaagggagtggaatttattctcattgtctttatgttttcaaaaaccctattatgcaaactctaaacatgtatcattgttttaaaccaacacaacaaaattgtcttcttcaaatttcaataatgaaaagagtaaacccaattcatttttatattcaaagttaaatttaaaagttttaaataaattatcctttttttaaactacatatatttctctacagctttttacattctttcatttatctccataatttttttctttttaattattattccattactaatctctcattctacttatattatattctaagggttcgtttggtacgccgtattgtattgtgttggattgtgttgtattgtattagtattatttaatacaataaaatatttggtattgatttgtattaattaattgtgtaaagttataatatattttcaatacactcgatcccaacaccaactacgggtccgggtcccaagtctgattttgggttcaggtcctgggtcccggtctcggtccgggtctggttctgggtcctggtctcggtcccggttcgggtctgggtccaggtccgggttccgggttctagaacgggtatgggtccgggttctgggtccgggtccgagttccaagtccgagtccgggtctggatttcaggtccgggtcccgggtaggggtgttcataagaaccaataaactgaaatcgaccatcaaaccgatcagtaccataactgaattttcagttccacttcattactgaatttggcggtcagtttttttaatatgacagtcggttttgatttttaaaagaaaaaaatggttaaaccaaaaaactgccaaaatcacaataaactgtccaaaacagccaaaaaccgtccaaaactgacaaacaaaaaaactgccaaaaattgtacggttataatttctaaatgatcaattacagtttttgtaaaataaaa

SEQ ID NO: 229519 - DNA, 2140 bp, Cannabis indica
tttttttttttttgctaaataaaaaacttcatcattaagataaggagaaaatagaagaaaataccaacaccaattcatggctgcaacagagggtgcaacctccccaacagtgagaaaattggatatattaaaagaagctgctcaagcagcaatcatatgagcatctcaagcaacaatcctatgagcagctcaattgttacaacaaactatcccagaaattcaaattcagaatggaaaacaaagatagaacttttttgaaaatttcctatctgaaacacgatagttcaaaagttctgacatttaaaaacatgaaaaattatgacatttaacataaaatattaaagaaaataaatgtttattaaaacattacattttttttgaaagtaatgacattaaaacattacattgatacttagatagaagcatctttggtggagatctttcttttccctttaattttattttattttttgttttaagatggttacctgcatgaattgtattcctattgtatttgtttgggaataagcaaaccaaatgttttgtttgaaggtagttgaatccaattttttcttaaagctgatacatttgctttcattatatttaacttttctcactctcatcacttgcatgaataaacatttggtgtgcttattcccagtgaagactaacaaaaataatcaacaaacaggagacatgaaattaaaaaactatgacaaaagaaaaatgaataactaaaacctatttttttttctcaggacagagtataatcgaaacaatataatattattggtatttacatcgttgcgtttgattccacaagacaaaagagatgaataccaataaatgaaagttgaaaagaaccattataatccttcttcttaattttgtttgctttaagcacaggcacaatctcatcatcatcttcaatcacttctcctcctttctaaaatttacaaatctcttcaatattggtctgcttctactcaatcattagattctgatcaagaagccaaaaaaccaggtcaaacccacaaagaattttatctccaacaagtataaaataaagacaaccttccttttattttcttctcattgcatcacaaagaaagctccttcttcctcatctaaatcatggcctcgccaaactcaacctctccttccagcgattccttcagtttcttcttccattccttcaacgattcctttagttttgataacagatgtggacagtgatttgggtacggatgatttgagaagcaacactattttcataaaggctttagttgaagaaatagaagatgagtgagagagacagaggaagagacttcattaagaggaaattttttatttaattgtaaattattgtttatattccactttgccgaaaaggttaaatatcaaagtgtgaatttgacttgtcataagtcgtagctctcgtttactacgaaaaaatagttagatgcttgagacgaaattagaatcgaataatcagaacccagtacactaggctatatgccaatctggggttgggtgctcctcggggatttcttgaggctcgctttgatacttttatggcattccatgttgcgaatgaggtctcctaccctattttgaccaaaataagaagaattgtcaaagcaaaattcgtgtttgaagagcaaaaaacttgcaaaccaacttgcatgtcaacctgggcgtcgaggccctgttttggctctcaaacgatctcgtttgcttcccaagatcacttgtatctttgttatttctaaaaaatagaaaagttacccaaaacacttttcagagaaaacattggaactggcctatgttgatataatgttaacgtgggtgctaggaccatgcatcaggtcaacctgggcactaggacttgtcatcaggttaacctgggtgctaggtaccagttctgactcctagatggctctgtttgttccctgaaagcacccatatcttaatcgttcatgaaaacaaagaatatgactagaaaactttgtttgaagtgtcagttggaagtggcccaggttaacaacatgtcaacatgggagttggaacctagcaccaggtcaacctgggcactggatcccagttttggccttcaggtcgatctgtttctttcccaaaa

SEQ ID NO: 229520 - DNA, 1748 bp, Cannabis indica
tggagatgctcttagtatctctcttcttacaaagtaaagctcttccggcttatataaatacaaaatagtttccattaaaccctcacaaaaccctagtctctctctctcctcctccctctttcttcattcttccttctgtaattattcttccttattcatttcggcgaaacccttagctcggacgaaatgcctctaggcgaacgctcgggcgacaaaagcgagtctcgctactgtggcgtcgagaccaatttcagccatgacatgcctcaacttttgtcgaaccatatttgcggtgctggattcgatttcgtcgttgctcaactggttcgtcccctcttcttacctcatttcaatcttgatcttgttccttcattaacggtgtatatgttgatgtgtagtgtaatgtttgtgtgtttttggtggctaattagccagtcacataccagctcaccagctgttattttcctatgtgaatggtcagtaagctcacctatagcaatgcctgtgtttgtagcctctggtaatgaagaatttcttcacgcttcactatggggctactactacttacattaaatttgtactttaagaaacatattggtttttgaaattttgatcgtatacatgatctgattcgagttttgatatcattgaaaatatgtttgttttattcctacttgtttatataataatgtggattttatttgagaaatctatatgattaatgactttctgcctgcttgaagtttctggttcatgcctgttgttgatatggttgctcttcatagaactttctcctgaaacatgctttgagcagacggttaataatatgtcatctcttgtttcgtttgttatgattgctttcatgctatgtgtttatatgtaatttctatgtgggtataagaaagtgttggtagccaattagccagtcacatacggatcagttgttctttttgtgtgaatggtcagtaagctcacctaaagaaattcttgttgtggcctttgagcagtgaagttacttgactctggctttacttgatggctattaactacatttgtcatcatccatttagttttgacttttttttgaaataattgtcttctaattattgtaatcaggattttatggttcgattaaggcgacaaaatgctagcattgtgaattgatgaggatgaaacctctgtattttgattatgctagtgaacaattagagattcaagagtatgatcattagtttttgttatattatattttgttgcttttaactttattaactatttttacacgaatattgtatattactatttattttggaattttatttattatgaaaaaacgcatcctaacattgataacactatcaagcatgtgaatttgtacttcaacatattggtgattggagatttgatcaaaaacaagttttaagtagagtgatatcctagttataattttatttaacattacacagacaagataataatgaaagctctttttgaaagtatgtctttttgttcttgccttttgtttttgtgatcgctcttcagggcactgttgtgtgaaacatgatttggtgagacggttaatatgtgatctcttgtttctttttgtgctttgattgcttacataggttttttttttttagctaccttgtggttgtatgagtttgtattggtggccaattagccagtcacatacgtaacagcttaacagttgtttttttttttatgtgaatggtcagtaagctcaccta

SEQ ID NO: 229521 - DNA, 1240 bp, Cannabis indica
tatgcactatttgaaacgtaggataaataagaaaattggttatatgatgcttaaattagacattagcaaggcttgtgagttgtgattgtattgactggtctttccttagtgcaatgctttttaagatggatttacatgaatgctgggttcagtttgtgtgagtacggatgggtatcaggtggatcatgaaggcccaaagtatgggtcccgttattcctacttaggaattcaacaatgtgatcagttatcacctttatttattttttatttgtgcttctgcacttattgataagtatgtgaagaatcaatttctcttgaggtgttgtgtggcaagaggtgctccattgatattgttaattcagaattttattaatataaatgagacttttaataattaatgaatctgtaataaatattataaagatattaattataactaaagacaagattttttacttgattttgtagtatttgctactggttattagccagtgacttggtaggctctcttgattagtacggcgacctacctataatgattgtcaatcactccttgttgggctctcatgatttccttctctcgatccctcaattcttcaaactgtcgtcattattctacaaagtcaaaatgtatagttgctctagtatcttgttgatcgtaatgaagagtgttattatggccttgtatttgccctagtgtagcttgcaagttctgtagttcggtgtcatcaccgattggccattgagaatttatagtagatgggattttagtagtgggggtagtttgctcggtctgagtactagtagttaaggtttcttgcacaaccagagtaaacccagccagtgggtagtcactccttaattgacctatagtttgttggcctattggtggttgaggattagtcagagtggggtctgtcttggctggatctctagggtttgcaggtgtctgcacgtttggatccatagccattagattcgttgtttcagtctgatttctcctccgtatttgtacaaccatctcgtgtcttgaaaaagacacaaaagaaagacttgtgtttctttgttctcaataaaagtaccaaaatattgacctcgcagccaacgatagtaagtcaaattaaagcaatttaagaataatttgaactaacaaatatgagtaatatataataaagagaataccagaattataaaggttcagtctcttgataatggttatagcctactcccctttagttgt

SEQ ID NO: 229522 - DNA, 1311 bp, Cannabis indica
tttccaacattttttttgcatttctttatatgaaatcgaactcataccaaagattaaatcataaattttgagttaattatataattaagccagcaaaaatagattttgattataaggtacgcctagcaatttttgtaatgcatgtaatttagaaaaaagaaaaagaaaaattgatgaatgaaggaggagtgttaatgtagaatcaaacaagttacaaaatttcaaaaatatctagtatagttggttaataatcttacaaataatatattaatattattaataaatttgtaatagtaaaatattattattttaaaaaaaagttggtatatgtgtaatattattttgtgttttttaagttaaagtgcagatgtagaaggtcggccaagtcaaagttattagtggggcacgtacatgccttagttgtaacatattataacattatatatgatgtgatgatgtattaatatttatatatatataaaaaaaattaaatgatgattaattaatttttttaattagaagaattgatggaggagattcatgattcacacacgtgtataagtcaaagtctccaatgccaaaacaggttgagtctatcactaaccttaatataagtctttataatatataggtcatttccaaaattatggatctaaaagttaatcttagtaattggtttataaatttttgtgtaattagattaattaactcctggaaccattatcctttccagcaaagaaaattttattattgttttggaattttggttttgggtctttagtcttggcatctgccgttgtagaagatattataaaagttgttataattggctttatcaatgagaatcttttcatagaaattttaaaaattagctatgatcctcccaattaagtgttatttttttttgggtttttaatttttacattttaaaataattttttttttttttttttacggaattctacatagaaactcatattacaattagcgttgcaacttaaattgcaataaaaaatcgtataaaaacccttattgcagctagcgatgcaactactttgaaaactcaaactgtaaatttgaaaaaagaaaatttaaaaagcagtatatgatgaggtcatttccccattctttggcaaatcatgcattcatttggctatgaagttctaaataactttagttggcattagaagtagtacgtaagattaggggtgttcacaaagtatccgatccaattcaatctgcacgatccaatccaattcaattcgcaaaatgcgaatatccaagtgcggatatccgcacttgtgcggattg

SEQ ID NO: 229523 - DNA, 803 bp, Cannabis indica
agataaaagtatttagagtgagtattcctctcatttatacatatatagatgttattccattctattgttacttaggactcacataaatgctttcaaatagattttttaaaaaataaactaaaataagttatatcaaatgttctacactcattttctattttaaagccttttcaaaatttgttgttcatgttctatatttatagaactagtaaagaggctgcgcttcgcgtgcggcagttaaattattatataaatattaattgaacaataaaattggtatcaaacaattttaaatttatttttatgcatttttttaaaaagaaaaatatatatttattaaaaaataatatatctatattgaaaactctaaataattcaaaaaaaaaatatcataaaatttcttatataaatataaaatcacacaatttttttaaatgtacataatagtgaagaaaattaaaaactgaacaatccttacacaaaatggagatataaactaatagaaagaatgcaataaatctatagaaaactcatcatataatttcaaaacaactatcatcaccatatctcatttgtagtcactattgtatctaaaattgatcttacatttaatcattattaatactatttctaataaatttcctctatacataaaataattcaaacaatgatcgatatagtatttacttttattatgtaaggggagagggggtgataaacataatcaagtttagaattttcatttttttgtatattagttaataatttattttatgggaaaaaaaattctatgtacattaatt

SEQ ID NO: 229524 - DNA, 1829 bp, Cannabis indica
aggaggttttgaaatgcttctcagagaacaacaaaaagttaaaagctgctctggtgcagaagatgggcggtcccaggttgcctcatctggcttctttaagaaaatgatcatgttcttacaattaagcttctatgattctcccccattttttatggccatgaggtcacttttatttttttgggagacaacttaattagcctttcccgagggcttttccagtttttccctttgtatattcaaaacaatggggtcgggaggcctttatttacttgcactttctttatacacttatcatattttgtgtgttacagttttttgagtttatgacctttgcagaaatttgtatttactaagttcagaatttatttttactcgatttcagtgatgcaggccatctgagtgccctgacatcttccataaacctgagcataaacatcttccaggtttatgaatccttgggctctggataaaaaatcagataaaaatgtgctcttttcctttgaagttctccccataacaagaataaagtgattattcctgatattagagccaccatcttcatatcatcagtaaagcagtatccatcatacgctagatgtatttcttgaggctttcccttagttatttcttgaaattagtcagagaactgacttccaggtcaaaatccttcactgtgaattgtttcttgaacattgtttgcagatctttccaattacaaactgatccaggagataatattttccaccaatcctccatgactttgacaaagttaatgaaaagcagaggcactgtgcgtcatcactagcttttgctacttgcatcatttgactgtgcttggatagatggtccttggggtgcgtcctatcttcatataatttcctctgaggcattctgaaatgctctagcaactgtgcatttataatccttttcacacatggtctcgtgtcctcctcttttgagtcaaacaccattccattttgcttccaagagatcttttctgtgagcttttttaactcttcaatcttatgctccaaacgttgggtcgtatcacttcaactaatggaatcatcataatgatttgtacccttttgggtagtaggattcttggcttatctttctacgcagctttgcctctagaattagtttggtcaccttgctctgaagcatgggttcctttctttttcttttgaggatggctggaacatttatatttcttttgcggttcattttggacaaccttctttgaaatttagcctacattcccttctcttttgtctttgtgaggatcgtaagttcttggagttttggggtcagtcctcctagcgatgttatcttttggatttgtttgactggttttgcttgcgacgatcaatgccttgattacgacctctatttttctccattttctcgtgcatcaacaaagagaatttctcttgcaacaataatttatcctcaactatatttagcttcctgaccatgattgcaagatctgactcatcgggatcgccctcctttttagcctcgtcacccacaggcatatcttgatgatcgtcctcaggcatgttgtgattatcatcctcaggtgtgtcttgatgatcatcttcaggagcatcataatcattctttcatgattcatcatctttagccataagatcttagggataggtttcttgctagtatgatccttcttgtggtgactggtcccctcagtcagatcttttgcatctcttgttttatcattaattatgattagtgtttactcttttttaggatcagtatagtgaagactagactgggttcaggtgcgtaccgtaattactgaatataat

SEQ ID NO: 229525 - DNA, 1283 bp, Cannabis indica
atgatgatgatgatgatgaaaacccaacaaaatctcagcattcaagtgggttatactcttcagggtgtgataatcataatctcaatcatgatcatggagaatcatcagaagctcaaagtagtagtagtagtagtactattactgatcatgtctctcctcaaattctggagagctctcaatattcatctgctccatcaccccataataataataatattaatagtactactggaaagtactgtagtagtactgatgttggtatagtactacatgagtcattattaagtgatcattatgaagagtacgacagtttctggactgaaccatttgtggaagataataaagtgatcatgcccatccaagatgatcatcagtactactatagtactacatattttggagattcagaagccaataatattgcctcgttttataatctttcattgtataatattactgatgatcaagggatggccaacgacttcttatatcatataaatactagctagtatatatcttaaactacgtcttgtactcaatagacgaaaatttatgtatggatcatctccatatgtaagtatgtaaccagtttctgtatctatatattgataaggtttgattaaaacatcttaacaaagctggctcatcagtttttattacaattttagaacatgttgtaaaactctttggtctttgtgtttccaggctgtatagtatctttaaatttctttatgtgcaatattctatatttatgtatgttctcatccagcaatttgtaagctggttggtaaattataaatgatctattattccttttattaataatttatttttaatttttagaacaatttaaaatcaatgataacatttgttaaaaaaaataaaaaatcatactcatatgagttttttgaaaaccgatttaaaatagaataaatgctaaagagaataaataaaatataaagatcaagccgagaatttttacgtggtttaaatattaacgaactctagttcacaggttaatattatttggccagaaaaactttcgagtattacataagtgttcttgtctggtttatgaattctagccatttgcatgaaggggttttgttatatttaaaggctagtattttcatgtattcagtgagacccagcccgtgatgtaatagttatctgtacacgtggaaattactttatagtgacaggtggaaaacatgcaccatctccgtgtataataatgataatttaatagctgtttgacagtcaccatatttccttttatggaa

SEQ ID NO: 229526 - DNA, 2591 bp, Cannabis indica
tctaggaatgctgctgtaataagttggatctgtaactctgctgccctcttgattctctatggaaaggattcggttttgccttattctatgcttaatgcaagcatgaaataaggcagaatttgagtctccatcttgaatccactccactttagctttctgttttaaaaacatagagtaatcctgctgcttttgattcaaatactcacgggctagactttcctgctgatgcaaactttcctcaagaggctgttgttgtagttgactttgaatactgtcgagagaagacttggcctcaagcacctgctgatgcaaatcacaatatgcttccttgtttaacttcctcagtctctctttaaaaagcttcagcttgcaaacaacttgatacattttactacctgaaagtcccaagcaccaactgtcttttaagaaagcgtcatacttagggtgagatttccacatcctaaaatacttgaacggctttttccccctactatttgaggatgcaaagtaaggatagctggagaatgatcaaaaagtccctcattaagaaatacagcttcagaaaattcatacttcccaatccaggcttgattggccataattctgtctatcttggaataaatcctatcattccctggttgcttattattccaagtgaagaaatttccactagctttaacatgttcaaggttgcaaaacttcacacaagtaagaaaatcagaatcaggataagtccttaccctgtgacccactctttcttccttggctaggatatcattaaaatctcccatcacacaccaattctcattagtggacaaatcacataaatccttccaaagacctttcctctctcccctactatttgaagcatagacaaccgtgagtaggctattaaaaccttcaatagttgaaatcctcaaatgcattagttgactagtacatttgatgatatcaacagtaaatctgtaaggattccaagcaatcacaattttccctcctgagtgccaagcaatatttgaagaaaaacaccatccattgaaaacattagagtacaaggctccaagctttgaagcctttaccctagtctcgaggagacccacaaaatcaatcttttgagacaaaataaaatgcttgattaactgttgtttagattgatgattggctcctcggacattccaacataacaatctatccattggaaagagagggtcctccccccctcttgtgtcatcaaaattcctttcaccattgctaaccttgtcaaaaccatattcaccctgccttccctcattattcccatcttgttcttctaatataagtgcctgaaaagtgttccccgtccttactgcattaggcaacctctgttccttgcttctatcgactctcgggcctgtaataattttggtaaaaccatcagaatcaacctcaggaagtttctgttttcggttatcattcttgaccacccattgttgcttgagaggagtagcagattttttacattccccagcagaatgaccaatcccagaacagtgagaacatgtgatcggcctccactcatacttaacactcactgaagtagcacaaccatgctcattttcgaattctatcatggttgggagatgttgatccatttgcacttcgattagaactctagcatagctcagtctttcccgatctttagtaacagagtcctccataagaggcttaccaatctgcccaacaattttaaagagagacctttggccccaatgtttcagttcaagatcttcaagttgcacccaaattggtacacacttgacatcctctttcttgaaattaatattagggtcccaaggtttcaagattacaggtcttcgattgaaaaatacatagcccccattcataacctgatctctgaattcaagagaggtaaatcggataataaaaattccacgagacaaagctttaacccgatcaaccttatctgaccataacctttttgcaaaaccttcaagaatgtgcaatggtggattaactccaagaacatagcacacaattgaaggtttccaaaacaatatctcctcttcaatgtcatcaaaagtgatttttactttcccattatcctgttcagtgtctttaaatgaagtttctaggtttctcatcacagattttgaacgcaaaatagggggaattgaatccttaccttgtcgtagatcactgttacattgattgttggccatgagaaagtgtagaaaatcattccgagcatcatccctaacctcatcctgcttctgaattatcctcagagaagtatcaggggacaaaggtcgaaactcatgtcgatcctctccctcattgagtcgatcctcccctggcatttcctcctcatccgtgacttccagtggttcaatttcatcgattcgctccaacgcctcagcaagatcgatatcagtatttccattaccagctttctttcttgagattttagtagcagatttcgatttttcatggttcttggaccttgttttagccatagcaccagcctcccagctgcaagaacgaaaaaccagagaaaattgatgtttttaattttgaaatttataataatgtat

SEQ ID NO: 229527 - DNA, 1134 bp, Cannabis indica
aaaaacagacccaactattcaacaatttatttcaaccacatgttcagaaagtctttaaaagagaatccaatctaaccttattattagtgccacatagaatgacaataaatctacctacaaagagtaatatcaagaaaacatatcaacattagtaaaagactaataaactaaacacatagttatatttatataaaaattacaagcaacttatctgttaagaatgtctaatttccaaatatatatgtatttttacactctaatttccctttttaaatttttactttatagagaccaatcaataatattggatatttaaccttctgttttattgctcttagaaacagaattactagtggaagtgactgtaacttaattgacactaattcgactttggatgacttccacgtcatttttgtttatttattcttgatattttttcccacacaaatagttatgtggtcatgccatgtaatttaccttttcttatcaataaaagaaggtgggcactaaaattgtaataatgtatatacttttcttgaatttcattatctaagggttgttaaattggtcacagcaggaccagttaactacgaaatttaatgtttttatattttttttatatattatataatatataaaatagtattattcttttttactaaaagaaatttaaaaaaaaaaaattgagagctttttgtattaagaacatcagaaaaagagtacttttctaaaatttgggtcctttccacttcataggttaggattcgacgcaatcaagacttgaaagtttatttatttatttatttttttggtaaggaatcaagacttgttgaaatcaaatgaaaaaagaaataaaaagaagaagacttcaaagttgaaagtgtgtaatgaacaggttcatgagtaatatacaagcttaatgattcataaaaaatgacacgataacactatttgaaaatagtacagaattagcggatttatatttaggtgacgtttagttgggaagaatgaaaatataggaatatgaatagaaataggaattaattcaaataaaaatagaatagaataaaatttaaaacgcacacaaaaattgataaaaaaattattaaaatttttaaaatcttgcattagaat

SEQ ID NO: 229528 - DNA, 1662 bp, Cannabis indica
atttgatcaacacctcacgaccgacctgagagaagagtcccattttccacccttgaagtttgtcccagactttgtttcgaatcaagccaaaagcttccctcttatttcggccaacaaaggcaggaagaccaaggtactttgtgtgattttctgtgaatgtgaccccaagagatgcagctaatctctgaccttctgcatgggaaatctttctaccaacacataggttagatttattgaaattaatgcattgacccgataaggcagaatacttctgaagtacctccgtaatagcttccccttcctcaactgttgcatccataaaaatcaaactatcatcggcaaacagtagacgagtcaatcatctctctagatgcccaaaacggagaccatgaagtttgttggcacgacttgcttcattaattaagcaagacagcccatcagagcaaataagaaacaaaaacggagataaggggtccccttgcctcaaacctctttccggaatgatgtgtccccgagcttttccattgagtaaaaccgagaaggttaccgacttcacacagcccatgaccttggctatccatcgctcatcataacccaatcatctcatcataccttccagaaatctccattcaactcggtcatatgcttttgacatatcaagtttagagccatcttctttccattcccaaaccgaccctttttcaagtagtggaggctttcaaatcccaaaatggcattgtcttgtatctgtctccccttgatgaaagcactctgattctcggagatcaccttatccatactcatcttcatcctatttgccagacatttagagatctttttataaactacattgcaatgacttaatggtctaaaatcactcaccgatgttggatctttcactttggggataagacataacaatgtatcattaatgcaactacaatcttcgttgttgttaaacactaccaagcaagtcgctataacctccttccccacctcgtcccaatgattatgataaaatagccccagcaatccatctttccccagagctttgagggggtgaatttggtcaatagcaacttttatatcttccttagtgaactcttcgaggagcaggctgttgtcattaaaagagagtcgacaaggaacactccgattgaggatttcctccatgttgagagaatgtaaagaccgcttagtttaatttggaaattagcagttaattaagatttaattatgaaaattatttatagatatttaaatagttatttatgttgttatatttgaattctgaatgcatttttatgtcatatagtgaaatttcataattttacattttcggtgcccgacaacatggaacgcggtgtatggcttagtgaatcacaatttagtattttggtttattgcggcagtttattagacattggaaatgtcgggattagtcgggaatttagagttttccgaaaataccccttttagtggcttttaatccttttagtgtgggaggggcaaaatagtcattttttcccataagcttttttgtcctttagtggacttagagttatgaattaattgttttatttgatatatgttggctgaattaaagaaagaaattagacattaactcattttattcaaaaaattagaaaattggaaaagaaa

SEQ ID NO: 229529 - DNA, 1216 bp, Cannabis indica
tctccactcggcaccgaacacctgaccccagacgaagaagaaccagatccgagaaaattcaattgtgggttactggagacgcgcaataatctagtggttgccattgcaatgttgcaacttggttagggtttttgggtagtttggggaggtttagagtggagtatttatatgtgtggaaggaacgaaagagaagaagaagaagattcgcggtatattatagctatttggacttgacggtggcactactttttgccttttcttgggaaggttgggtttgattgtttaaatcttgaaactttcagtattgaacaaactaacttaacctcatgtgatgacgtggatgtctttacgtgtgggcccagttttgttatgagtcgaacacgtgtcagtcatagaagatattcgaagctctattcttcatcgccgtcctcgacttggggagcacaccataatattcgcactcatgttttttatttttattgagtaatggtcagctcacgtgattaaaatttaaattaaggcgtctttgtttttacatgggaagtaaaactgaagtgaataacttaacaatttcagtctgtaattaaagaaattgggagtcacttaaatttattatgaatgctcaaatttatcggggacacgtgtcatgccgactttgaatatggagcgcaatggttaattaagtaggcgcaaccgcgaacgtaattgaggagtaagttgaaagaagaagcaaaattagaaaagggatatatagtgaatcaacgtacgccactgcaagctgtacatatatatatttttcttggagaaatttagagaggttcctagaaaattgttatgaaaaaccaacggtgtatagttgttaacttattataaaagaaagtcaccaccaacactcgaccacattaggagcatatgtttaatgattgcatgcattttgctaagagtgacgaatgcgatgtaaaaaatgtaaaactatgacaacatcgaatgcacaatattagctgtttggacttatatacgatgatctaaatgagggtcatttcatttgtcataaataattgtagaaattaaggattaattattaattgtttatcaaatcgtataaaccactcccactacacaaaatataaggtttgataaatttataatgcaattgtagattgcttcttcttttttttttttctcaaatcacgagatgaagtatggtttgcggtta

SEQ ID NO: 229530 - DNA, 1145 bp, Cannabis indica
aaatttagttggataactcaaaaatcgttagtatttcctttcttttgcccaaaaccaacctagaggaaaatcctcttcaagctagaattttcagaccttatcctcatcatttcaactaaagatttctattagaattagagtagaattgaagaaacttgaggaacctatttcttttaaaaaatttctttcaaattttgaaaaaatataggttttgagatgaattttgtaaattcagttctatatagggttaatcttgttagagcttattcttgaatttaaattaacgttgtttgtatttgtaattctagttgggtggctgttgtagcttaaattgagtgagttgaattctaagaacacaaagcttactcattaatgatagttttgtaatttttgtgcttttatgttatgtgagctatggtttatgtttagaacggccatttatgctgttctatgaagtttggtaggtttggaggagtctgggatagtttcgagtagtgaaaactcgagtttttagtttactggtgcaaactgacggtgagccggttaggaactggttagctggattctatagttccggttaatcagatcaagatttcttttaatcggttgggctagtttggatgccttggttttcatgttttatctatatttagggtatttctatgccttttatcgaaagagaaacttcaaattttgagtttaagtcatagaagagattaaattaagttatttatcaaattaccgttgttgtgacataggatctgggatcatcgaatatttttcactcaagttgatcagcacacttgaatttggacttgaggtaagaaaaatacaattataccacatagcatgtcaatatatgattcgctaattaatgttaataagaagggttattactccatttggttgtctcattaggcaacaatataagagagagttattacactaataattgaaatctttgttaggtttcttacttatcggttgtctcattagacaacgatagtgacattgggttgtctagttagataactgtaacatccccatttcaagcctccattgggtccttacacccacggaatgaatgactcttatacacgagtgcgtcactctggccgcttcatggactgacgactgaccctaca

SEQ ID NO: 229531 - DNA, 783 bp, Cannabis indica
tttaaatttttattataatgttcaataatgatggtggtgtaaacctctcaaacttcactgcaccacatgcatttttacagtgtgatttttccaattttaagatctcgcgatacagttactatttgagaaattacaaaaactacatatacaatttaatttttaaaaaaaaaatattacaacccgcgctacccgcatcacgaacaccttataatccctttaaaatggtatagaggtaagagagtggctgattttggtattttgggtaaaaatgttgaaagcatttccttatatataaagttacatgagaaaactaatgtgggagaatagggaacacaagggaaatggccccattgaagtctttagagcaagatcaccctcatatcgattcctctttccaatcattttgtgcttcacttggtattctctcaggtatcttcttattctttattccaattctcaagcttttctcttttcttttttgtaaaatttgcaattttaattctcattttctgatggtgcagttgaagatttcctactcaatgatcactatgaatttgcagcaatagcagaacgacaacccaattcagagagaataaagcaggtttctccattatcaattatctactcaattcacaactctgcttatagcatatagtaatgtgtaatattatgggaatgtagggaattagagagattttttctattattgatggccaacgtcgagtccattgctgaatggtatggagctttttggatgacgctcttacgtaataaacttgtatt

SEQ ID NO: 229532 - DNA, 2032 bp, Cannabis indica
actttaatgaaattctttccaatgaggataaatcgggtggctgcctcaggagtgaaaggcaaatggaatcgtttcgtaaggctcttgaccattgcaaattacatgagactagctttgaaggtgatccctttacttggattaaaaatcgttcgggtgttaacactattaaagagcgcttggattggtgttttgtgaaccatcattgggagagtctttttcaagccccttatgtgttacatctagactactatagctcagatcaccgggccatatccgctacttttgctcctgctagctctcggttccagccagaaaaaagacgcagcaggtttcgttttgagaaactttggctatctgactcgcaaagcaaagaaataatcttagcaagttggaactcttcatcacactctgatcctattgctgttgttctttctaatcttcacgattgtgcttcgaatcttcaaaagtggcatgttgacaaatatggtaacatgaaaagaaaaattactgatgctcaatccaaagtggaggctatcaataacagtcctcaccattctgctgaatcaatgaatactttgaagactactaaagcttttttggatgaattattggagcaggaggaaatctattggcaacaacgctcacgtgtggattggttaaatgcgggggatcgcaacaccaagttttttcatgctaaagcatcggccaggaagtctaataacacaataaaatttctgcaacttgatgatggtactcgtgtctctgctaagcacgaaatggcagctgctatccacaattattttgctgagatttttacagcttcttcattagatgaggatgctgttgctatcactttaaatgccattcctactacaatcacatctgagatgaatgctgatcttctaaagccttttgaagcctctgaagtcgaagtagcactacattctatggctcccgacacgagccccggtatcgatggtatgtctcctatgttctatcaacacaattgggatgttgttggtaatttagtcacaacagtggtcttgagcgttttgaataatggggctgatcaaccaagtttcaacaaaacccttattacacttatccccaagatcaagaaacctcagcgaatgcaagacttccgaccaatcagtctttgtaatgtaatctccaagcttgtcaccaaagtcctggttaatcgcttcaaacatgttctcccttatgtcatctccgactcacaaagtgccttcttgcccaaccgtttaatcactgacaatgttcttgtagcttttgaacttgtcaatgctatcaagaacaaaacctcagggcgcaaaggcattgcttctttgaaactggatatgagtaaagcttttgaccgggtggagtggggattcattgacagggttatgggtaaaatgggatttgctggtgaatggattactttggttatgagctgccttcgcactaacagtttctcattcattttaaatggagaagtcacgggttctcttctaccttcaagagggcttcgtcaaggttgtccactatcgccatacttgtttctcatatgctccgaagccctgtcaagactgttacaacatgaggaagctattggccgcttaaatggttttaaactcacaagacatgccccatcggtttcactattgttctttgctgatgacagcctcctcttctgtcaagcaaacgtgtcttcctgccttgctatcttttctcccaacacaacacttgcatctcagattttcttccaccgacaactgcgaatgcctatatgtgaatgccatgaacgatacttgggcttgccatcctattctggtagggataagaagcgtatgtttagtgatatcaaggagaaaatatggcgtcttatgcatagttggagtgagaaaatattttcagctggtggacgcgaagtgctactaaaagcggttgttcaatccattccaacttacgccatgagttgctttcgactaccagcatacttttacaaccaactcgagtccatgatggctaa

SEQ ID NO: 229533 - DNA, 3476 bp, Cannabis indica
caaaaaaaaatattatttatctaatattattatttaagtattaattttatctatgtaataattgttaaaaaaattataattataatatatttattaattagacctacaaagtgtctcaattaataaataaatccttttctactctttttttgtcaaattagtctaactttagtgttatcccaaattttgtctacctaacgtggcatgtccacgtaagccaagactgagtacacatagaatacagccttgccaatagcaggagaaagtctcctcataaggtatggcaaaatcgtcaagccggaagttaaaagagttaagtaagttgtcaagaagttgcacaactgtgtctgggcgaccaaagggggtacacaggccagccaggaagagctttatggttgcccagggtttgagcacaagttggttggccaaaaggtgattattagagcaagaaagggcatgttcaaccaagacctgacctctgcaaggaaaagaggtacaaaggttggccatcacctacaaaggctggtaagcacttgatgtgcagcctgcaggctagtaggcacttgatgtgcaacctgcaggccctggcaagcacatggctagccagaccctggcaggcacatgttcggccagaccctagaaggaacatagcagcctagccttttcttggcaagcctttggtgtacagccttcattcgtggacaacaggctaagtggcggtttggaccttaacaatccatgaaaataggaggaaaatatcagcaacttctttatttttaagggataattatcctatttattatttattatttaattatgtaaataaagctttatcttcctatttttaagggatattagtggtaaatattcacgtaatctctactatataaagagcaatagtctaaccctaattctttaagtcactaagtccttagctccccaaaagctctcaagctctaagtctaaaaccttaaccctctctctccctctctcttttgcacgcccaaggctctctctctctcacttgagatttaccgacttttgtttcacattataatcttaagatagccacttcagatcccactattattgtgatctaagtggtattatctttgttaccaatacaaccaaaaaggagtaggtcattatccggtaactccaagggtcgaacatctataaaatctagtgtctatttcactttattattcttattttctacatgtagcaagcgtaaatattaaattcgattctgctgtcggttggccaaacccaaagtcagtagtttagtgctctcgttgagagtgagttatcaatttatctgatcaaacgccatggttaacaaaaggaaaactctaactaaaacttctgcctcatcaggtcttcttcaagaccctatgactacaaatcttgatgtttgtattccagtcacaactggaatctccacgaacccgacgaatgtggccaaccctaccatctcagcaggcatcacaaacctggcccccatgactggtcaggagggcactaccaacctggttgctcttaatggccaacctctgccacccagggagggccctccactggaacctcatacttaaggaatggccaacatggagtaacccccgagtgccacgactggatctagtcctcagtattatgcttgagagacagggccaagaatcggcaagccagctattggagaacctcacgtagacttgggagaagatctcaagttaactagacttagagaggtcgtctgtcaagtcagccaaactgaagaaccacacgttgttggtgtgatgcattcgcacaatagatatgcaaatttttgagatggatggatgaccaagagtacatcctctgatctcatcaggcagaattagaccgctgtaatagagtagctagtaatctggtaaggcggttcaatgaaaaaactaccagaagaggtcaggtactcatcagagatcctctccaagggagattaatcgacagattagggacggtatacagacaaaatgttcaaccaagttcctctagaactaggaccaaccttccccaacccaaaagaggacaagccttgccacgaagatctggtggcgagaacagccagactttggaagtcattggtttgggggccaggcaggggtctctaacacaacaatacccctgattggccaacctttggtcggccagcacctaagtggagaacctctagccggtcaacaaggtgaactcccatcaaacagcattcaagaacgagtaacccaaaggccaatctttagtcgggaaggttcgggaataggtggaaatactcaagacaacaaaaacttgagaagtgaatctaatcacttcccatacttaggtccacctaactccagcaattggtgtgatctaccccatgtcaatgcagaggctccactagctagtcaaggaagaatgggcggccaggccatgcccaacatagggctggccggcgatgaacagctgctaggcccagggctgactggccttgaacataccctctcccagggtatggctagccaggctctaaccagtctagggatgtagctcaatcaagatgggccaatcaatcaggcccctacaacaacagatccttctatgcaagcacagttggatcaaatacgagacatgctcaagggcttggctagcctaaaaccatcagaccttgagctggataggtcaagggattcacttttcttggcatacatcaatgcctttcgtatgccctaattcaagatgttaacgtggaagatatacacggagaaagaagatcccctagtacacctgaaatactttgagatccaaacagatctccaatatgcatctggagatgtctgttgtcgaatctttctggcaactctggctaaaatagcccaacagttgtatttcaagttgtccccaagaagattcaattcttgggaggaattctcctaagagttctatatctagctttttgcctcaagataaataccttcacgaccggaggatcttatcaagataaagcaaacacaagatgaacccttgaaagaatatatttgaaggttcatagttgaggcccccaaggtcaaaggcttgacagaagaaggctgatatatggccatactcaaaggcatcttaccattgaggaaattttggaaagatattagaagaatctcaacaagcaacatgaaagagttccttgagcgagatgatggcttcataaagttgggagaagctatctgacaagccaagacaagaggccaggtaacgttgaatagacacaaggcatcatattgccccaagtgttatcctatgtgccgaccaacacagacaatctttgtcatttctccaacaatgagaatattggaggtaagtgcaacaacgaaggctctgaccaaaataatggcaaaaaagggaaattcaacgattcccttacgccatgaagtctaagggagtatgaggagaagtgtgcatgcttc

SEQ ID NO: 229534 - DNA, 1949 bp, Cannabis indica
ttgaaaacattttccaaagcaagatgagctactttgatcaaatttgttgggcttgccttaccagtttacactacgcaaacaacaaagatttctaagaagcttgcctctaatattaatggtatgaccaaggacttttggtggggttgtgagcaaggaaatcgtggtatctatttaaaggcttgggatcacctgtgtctttccaaatcctggggtggccttggttttcaaaattccttggaaatgaatcacgcattgttggccaagtggagctaggcactccttaataaggaatagtcgatgtgctataaggggttaagggccaagtatattaggggtagccaatttttggagtgttcctttaagaactcaaattcgtagttttggaagaatattgtgcgaactaaagaaatccttaagaaaggggcttgcaagcttatttcagatggaaaggagacgaatatctaggatgacccatgggttatacatggccagggcccaggacttctacctaaagccttatactcatctagttgagggtttgaagaaagtggtagatttactcttagccaacagggatttggacatctttaagtttcactctctttttgaccatgagagaccatcaacaacatcatcaaagggggtaagcgggtgtggtcagggtagagataggtgggtctggactaaagagtcaaatggtttattttctacgaagtctacttaccttattcaagctctagagtgtgcccctttatgcgagattgcctcaactttatggaacaagttatggagctctaaagtttttgaacgtcacaaagtcctttagtaaagcattcttttaaatgctctgcctattcgtgcccttctcgctaagataatgcatattgaggaggtttcttgtcctctttgtggggaaggagaggagtcgatggaacatctcttcctttattgtaattttgcttttcacctttggtggtcttctccttgggggttgtgccagttttggaatctggaggtcgtgtttgggatttggttaatttttagtgaaatctgaaatttaaggggattgatgttgagaagttgttcctatatgctttgattgtgctggatacgatttggagggcacgtaacgacaaggtacacaataactttttgagtaacattaaacattgtattgactctatttgttacgcagattatgggtcttgtttgtttgcctcatcgaaggttgttgggtctcctgtttggtctcttcctccaaatgattaattgggtcaagttcagatgtgatgttaaagttggatgcgaatccatgtgcgtagtggctttggctagggatcacacataatctattttgtgggtggctaaaaatatgctcaacttctttgaccccctcattggagaacctgcggcttgcctgctagccatagagactgttgttttgtttcaacacccttttgtgatgattgagagtgattctgagacagttatcaagacgctgaaggaaacctgttctagttgggggattggtaactatgtgcatcattgtaaacatctctctacatttttattaagttgtaattttttatttattcttaaagtttgtaattttgcagcccataatgtggttaagtgaactttcgtcaataatgttactggtatagttgagctatcttctataccaaataatatcttttgtaataaccataaggtctaattttggttttaatctataaacgcctatttttcaaaaataaataaataacacttattaaaaagtgttccatatataaatatatacatactatctattaaagtttttttttttttgaaaccatactaaagaattttcatatgtattaaattagatcttatttattaaatatatatacatatttgaaaagtaattttattagggacataactatgagtgttcatccaattcaatc

SEQ ID NO: 229535 - DNA, 1351 bp, Cannabis indica
aataggttcatgggcaacataaatcccgatttaatgaagttaggaaactctcctaaggtgacgaagataaaagaaataagaaccaggcttccaggaacagatctcagtagccagcacctccgacttgaaattcggaggttgcttctaaggctctggacatggaagctacatccacttccatcatcaacctaactaaacctatcttggtcataaaacctctgagccaggttcctgtggagaactcaaaaggagatagctcagattacgatgggccagtcctgattaacaagaagcgggctaaatcatctgatggtggtgccagcaagaaggcgagggtggaggccaaggagaaggtcttgtagttggtagactcgaagattcagtcctagaaggggtctgacaaatctgatggtgcaaggccgcctaggcaaggcaccaaaacataaaaggacaattaggatcctctcccaccatccccgccacctaagattatccttgccacttccacttacttgtccagagaaaggactgaactggcttcattacctctggcatctttcacatttcttgttaagcctttattattgatagaaggagataatgcaggcctagaagccgtcgagaagttctactagaaggggcgtggcaacgagtaggaagagctaaagaagttgaccagcagcatctccttcagacgtaatgctgagtttgatgactatgacaagtgggataaagcctgtcctcctctagtaaatagagttaagttgacataaaggcttcgtcctcgtgttaaaaccaacatgtcacactttctagctaactaattgtcatagagtactactacaagttataggctcggtgttgttaggttcgccgtgatggcaagtagggatccaatgtacatagctgaggctatgagatcccaggctaacattgtaagtttaattttcctttatctcaaatataccgcgtattcttacattatttgattcagtcatatttcttcttcgtagattggcttgttggcagagaggaattgctcaatggtcattcaactggcctatgatctagaggtgatgagggcggagcatgccgatgctgagctgagaaaagaggaagcacccaatgctttagctgaggaaaatgaaaacatggaagctactattaagcaaagggtgtctgactttttggacaaagacttgacctgtgaaaggaaggtgaccaagacacagagggactgtggagataggtacaagggcttgtattccacgactattaccaaaattaaagagttggaagccaacctaaactaggccaagctggatgtctaagagaaggacaaaaatattac

SEQ ID NO: 229536 - DNA, 1068 bp, Cannabis indica
attttatataccaattagaactttacttttttttttttatatctgattcgagcatctcttaatattttgtttatatactaatttaagtagaacatagtataattaatgtttgtttatgttttaatgtaaaatatgttggtttttttcttaatataaaatataatataattaattttgagtttataatataaaatataatataattaatttattttaaaaaaagtttcgaggttctagattggcgcgaaatgttttgtcggcgcacttattacgctgacaaaactttttgcgccaatctgagaaatggcgcaaacatttttactggtgcagtcttgcaccgacaaaaagatatcaaagaaggttcagagcggataagggtatcattttacaccggcgattaccttttgccgacgcatttcccctatgcaccgataaaacgttctttaccaaccaaggttcgctgacatattttgctagcgaagtataacgctggcaaaggtttgccggtgcatgtagtgtacttttgttggtgcaaaaaagcgccagcaatgcgtcgacaaaaagaagttttcttgtagtttcttgattttcaaaattttatatctccttcgtttttcgtcggaatcgagttccgtaaaaaccaaaattgcttaattttttcacaaggaatccaaatatattattttcatggaaaaattttgtaattcacatacattcatcaaattacacataaaccaacatgaacacatccacttcaacaaatcatcgtttgatgtccatatttcatgaaagtaaatcattacaatggctctgaagccagttgttgggattaattttaccaggatctagatttactaacatgtatgtttcattaacagcctaaatatgaattttctaataagatgaaattaaacacataagcgttttgaaaaccttacattaatgcagcagaataataatgactccttccactcagatctctaagccttgttcctttctgtcgcagagtaataacaagatctgagtcttgatctctttctctccattgagttggttaccaccgtcttc

SEQ ID NO: 229537 - DNA, 982 bp, Cannabis indica
ctgtttgtcccacagtttaaacctttggccttggattggacagttgaatgatataagtttgtgtgttatgatcagctacatactcttctagctcattctgagatcccaaggggttactagaattagtcactagttgatgattggtgacttgataggcccttataattagtaggtggccttcctagaatagttgttaatggttgcctgctgggctctcatgaattccatctcccgatctctccactctatgaactgcatctttgtttgtcaaaggcaagattaataaactgcttggatatcttgttggtcatggtgcaacatgttattgtggccttggattaatcctaacgtagctcgcaggttctaaagctcatcagcatcatctacaactggcctttaagtgtttttagtggatggtgctttagtgctaggagtggtctgctcgaccgctgtactagtatttctagtttcttgcacacctagagtgaatccagccagagggaaagtcactccatggcgaactgttggtggttgtgtattaacttttttgggagttgtccctagtggatctcttgcctttccaggagttttcacacttggatctatcaccatcgaatcgactggatcaatttgaactccccttcgagtttgtacaaccatcctgtatcctgtgaaagacttaaaacaataaaacttgtttatttgcttttaatgaaagcaccaaatgttgacatttcttttggccaacgacagtgagtcttaaataaagcaataaaataaatattagaaagcaaaaaactataaataaagaaaacacaccaaaatttctagaggttcgaccgtgtgatagtggtaatagtctacgcttctttaggttgtattaacttatgagaccaagaacaaagcattctgtctctaaagctcttataatggatctctgagtaattttttcatagattactatttctctcttgagtgttct

SEQ ID NO: 229538 - DNA, 2848 bp, Cannabis indica
ccaagagtataaaacgaaaaaaggatccaccttttcattacctttgccattttcaaaaactctgtaagcatttctgtaaaaaatcatacccagattattctgaaacagtgtatgccatctttgtcattgacatttttcttatgatttttgtccaatttgattttcgacctcaagtatttagagggatcatcacgccgttcgttgttccgtcaattgcaggaccattcatcgtcccagaacccagcttcaaatagtaagtgatttctctctttattttcttacatgcttttaattttacgtttctcggtttgatcactagtttcttagttagtacatttatctccttatctggttttagcgattttagagtggaattgtatctgggtaaattttagggtttaagcagaacgtaggtttttgagtttctccaatttaccaacttttggtttgataaatttcatgcaggaattgggattggtttctctttgcagcaatatcctaatctggttcagaactttatcgtctagaatatttagaaacagagtgtcccactgaacttgccatcccatataaacccagaacttcagaaatccaaattagagataaatgatgcaaaaattagggaacacatggtaaaaacccatcaagatgatattgccaatcaccacagatgcttcttgtaagaaattacagaaggaaaatgtcgtttcttgtgagatgctacttggcctgaattccccaatttatggtctattcctcttgttaggcctttattttacccaaagtcacaattgcttttgaaccggtgacctggactttgaaatcatgatctccaagtctcaaaaattaaagactcctcaggatcctcacggtaccttcgaggctaaactaatagagtcgaaggtgcaagccattggagattacgtaggtaccatcctaaggacttgtggtattgaatataagcgagaatgccgagttagatcggtggctattggcgagtttagttgttacccactaggacgacttactcgttaaccatctgaggggaccagtggcgaggccaagttgagtggctcgaccgggataggcacttggagcctcgaacacatcagggttggagccgttatccccctgcgagactacttcaaggacttcctaaaccatctcgatcttccccatttcatacagaatccttgcaagtttgaaggttatgtacaaaattttgaactgggagtgtcccgcttccctggaaatagagtatctttactctgtcaaggctgttccatcgaggaagaatgtagtaggggatttttactatcttcggactcactcaggtgatcgtaagatcattgtaggttttccaaataaaactcttgttaaagatgaattcttctagacgactggtcttttccccatcggcacaaccacctttcgcataatacgtaagtaacttttgcttaagacttggttaaattgttccatgtctttttactctggttttgctgatcttaattgtgcctttgtttttgacaactgtcttgaaaagactagttcttactcctgagatgcccgagtgccgcaggctcctactgggtcttccctttggtcttcggtcatctgagttccttttgaacgaggtcaatctaaggtctgtgggtctccttactgacaaggagtttacttgtggttacaaatatcccaagtattcttcttcgcagtaggtccctgtaccagccgacgaggagggtcaggattatgtggcttaggcacattatctccagaacgccgtcccttgagaagccaaataaggagtatctcaaggtaatcaattcggtcggtcgcccatagtgcttagggccgagcgtaacaccttagtgtcgtttcgcgatagtcattataacttttacagctggaatcccctcatcatagatcgcattacacataggtttaatagttggtacccaaggtttcacatccaaattagatgtactgacttgttctatgggatagccgagcaatacggaaccatgctggatagggcaagtcatttagatgcgacctgggatttagagccaattaactcctatgagatattcaggatcaaggggtgtagggattttagtggatattatagtccttcctcttcgtcttcttctgtttatggtaaatcccttaggcaagagattatgccccaatttccccttttacttatttttaaatgaatgctaacatactatattatctcgcagaaatgaaactcgaggatctctttaatgtatcggcaaaaagggaaagaagaggttaaccatctcggaggttccatcagatatcgacttggagcccttaaaatggcccaggaagacaactaccaacaagaagcgagcctcctagactgctaatctcaagatccctaaaactgagactcaggctccgacccatcctttggcccccacacataccgacgagcctattcccaaaatgacttaagcttctgcctcatcgagccaagcccttgaaactctttcctgtcgaggctgggaatactggcccggagtacacagcttgctagcatcattttaaggccctcttcccccacgaatgggacttaatcaataacggggacctggagaagatgcttgaaaatagtgtacctcatggcctctcggtaaattcctctacccttatctgcttacttccttttttaacatccttcaaaatactcctgcatttttgtttgttggctttcaacaaactttcatttccttggcatggaaaaaaggaaatccatggagagcgagatccaaaacctgataggtctgcgcgaggctgtgactaaggaatggaatga

SEQ ID NO: 229539 - DNA, 2196 bp, Cannabis indica
tatttaacattatctaattaatcagaatactgtgtcaaatattagaatatttagttaaaatttaaccataaaaacaaataacaacgttaaactaaaatttttgttacatatatagtcacattttattttacatagaaagatatatttgtataattagttcccttatgatgaaattgaatcatttgaataattatatcgaaattgaattattatgtaatggacaaatcgattccaactataagtataagctaattatttagctggggatgagaaattactaacaatatttctttccaaaataaaacaaaaacattggaataattcgattatacaaacatacgtacacaatttatatatacaacaaattaaaattatacatacatataatacactttggcaaaaataatatatatgtatatatattacacagatatttattgataatgcatgcaccatatttatatataaatttaaaaagttataataattctatctactagttgtatacatgtttacagcttataataaataaataatagccaagagagcaaaaattacgtagttgatcagcgctccatgattgggataaattgtgaaagagcttgaataataagattgaggcatattgtaattgggaaagtaggaagctggaggagcatcaccgtagggcataaatgggggatttgggtaaataatatggccgtcttcatcttcaccaccacaagtattttcttggcaaggaggcttgggtggaggggggcattctggtcctttaggaggcggcggagattgtggaggaggagctggagggggtgggcattcgatgacgggcggcggtgatggtggaggaggagctggaggtggtgggcattcgatgacgggtggcggtggtgatggcaagggttcacatggatttccacagccgtagcacatggatgagcagggtacttggtctttggacgtagctttggttatagttgtagtttttgttgttgctgttgcgtggcttgaagaatggatcagaagaacaacaaagactacaaggattgaatatattgtgtgtgggattcggatgttggaattttccattggcaaatattaatatttattattggatttttcagagatagatgtagtagttatagagatatatcgtaataggagctcttattatgaagaaagatgatacctaaaaaagtaataatatatataaagagtgcttgtgtattggtgaccgcaccatatatttatccatatattatcttctaagaagaattaaaataaattgtaagtctcaaagtttcgggtactcttttatttgtcatgatcagtaataactacctaaatccaaatgacttagagctagttagattcactagtaatcaaattcactagaatcatactaaaataataccctcaataaaattaatgcaagagataaattctaatataaacttttgatatttacaatgatttgtcatcacgttgatatttatagagctaatctataaatatatattaagagatattactggtgctaactaattgttgtgttatttttaagtgctgctagacactttcaatgtttaataagaatggtcaatctaatatttcatatataatttcaaatttgtactaagtccactaatattttttctcatttcataataatttaaattactaagtaacatgagtaatcatatacccattctctattttcatttccaaacccttttagtaaacacattttatatattgagataaaggaatatggaaaatatgaagaaataaaaagttttttatttgagccacacttttatgagcatatacgtccatgtgatattgtttgtcattactatgtaatgaatatgagatgagagactcatatgggttccatgtggttcatatggattttgtattgatgaggatatattctttttcttttgtgttgttgatcaacggtcacaataactataaccgataaatgttaaaaggcacaatagtttttttcattctcttataactagcttaatatagttattagtataataaagtattggatcttaaataatttaatatcataatttttataaaatatcactaataaattataaagtgacacgtctagaagtctaagcaccactattatctaataacaacgctctaactaacgttatgatcataaagtacaaacaa

SEQ ID NO: 229540 - DNA, 2488 bp, Cannabis indica
aaactttaaataaaattaatatttatatggctcggaaactaacatgtataaacaaaacccttgtgcgggcacatcgtgataatcaattttccacgtgctagaaaataataatctttgctaggagcacaatatattctgagcctctcatatttctcatacattttctgtcctattactcatgtccaaacagaatcaaaaattataaccaacgaaaacttatctcattaagttgagagcgaatcataatttaaagagaaatatcttatataaatggcgtgtcttttttcttctttttctttctagtgagaaaatatatttggcacgtgccaatcaatatttatataaatatatacaaaaacctaccaagcagtattgttaattaattatttattaaatttataattctcagaccaagtcttataagcacatgctccaacttagtataaataataatctaggacatctacacaaaacaaacaagccatgtctttattgatcagctctaaaatgtctcccttattaggactactaatatccttattattgatctcggtagcttattctacacctccagaaaggcctattacgtgcaccaatggcaactcaaaatgcacaatcaccaactcaattgatatctttcccgaccgcaccatctgcagggcaggctccgcggcctaccctacctcggaagcagaactcattgcgaccgtcgctgacggcacaagaagaggattgaaaatgaaggcaaccacccaattatctcatagcattcccaagctagcttgtcccgggggagaagatggacttcttataagcaccgagcgccttaataaggtgctcaacatcgacacgaatgctatgacaatgacggttgagagcggggtgatgcttagagacctcataagtgaggctgcaaaggcaaagctggctttgccttacacgccctattggtggggtttgaccgttggaggcatgttggggatgggcgcacatggcagcactttgtggagcaagggaagcgcggttcatgactatgttattgggcttacgattgtcagtccgggcagtgaggtggatggatttgtcaaagtccgacagttcaaggaaggtgatgaagaactaaacgcagccaaagtctcacttggagttcttggggttatctcacaggtataagttgatttattattaattaagaagggttggtaagacttttattttttaaatttttaattaaaaaaacaccaaaattgagtttgtgtttttaaaatattatttttaaaaaataaattgtgttttataattatttttaaaaatagaaataaaattatgttctgtaacttttattttacttttatttttaattttatttaaatcgggtccaagtcggggtttagggccagggccgtagtccatccgggactagagctaagttagagtctgggttcgaaagtccaggttggacaaaaatatttaaaaaattttaaaagatatatttttttttgttttcaaatttttaaaaattttgattcttaattaaaaaagagcaatttgcggcgaaactcccttatgtttttatttttatacacttaacctcatcttttttttttggtggtaaaactcccttaagtttatctttctttgcaaattagacacaacagttacatattaccgttaaatatcaacttgatgaccattgtagtacacctgtgtatatattacagtaaagcctcgaagtcgatacagtagtaacacagttggtatttaacggtaatatctaaccctgacaccttatataaatataaaatgaaaaataaacttaaaggatttttgccacaaaaaaaaaaaacaaaaataaagaggttaagtgtataaagtttaaaacataaaggatttcactacaaattccttattaaaaaattgaaaaggaaaaatacaatatgtttttaaaatatttttatttttctaattaaaaaaaataaaaaagtaattaagaaaaatattaccaaacacattttaatatttttgttttttttattatttgtctttattgtttaactaaaataataacgaggaatatgtttaaaagtccattaaaacaagagttaactaattattttgaaaaataatgtattaaatacttaactaactaattttattttctaattttttaatcacaaaaatgaaaataaagtttttgtttttaaaaatttggtttttgaaaaaaaaaaaattgttttctaaccacttttgcttttcaatttaaaaaaatagaaaataaaagtgttctgcaaaatttatttttattttatttaagtcgggtctaggtccggagtcgagtctgggtccgggtcgggtgcgaggttcggcaccaagaccagggccgcgtttaggtgtctgggtccaagtctggtcggagtccaaaacattgtttaaaaaaactgttttaaaaaataatgagagtgaccttttttgttttcaaaaattttaa

SEQ ID NO: 229541 - DNA, 1795 bp, Cannabis indica
aaaaataattaagaatgctttggaggaccgaacttaccaaagttgtcctccccgcttgggaaaggtttttagccttccacccttccaatttaccaagaattttatctttcaagaacaagaaatccttcctcttattagccgaaaagaaaaagggatttccaagatacttctccttcgggttcagattattaatgcccaaaatccctttgatttcctctctacagtgacgcctagtgttaggagaaaacaccactccactcttggcattgctaacatgttgacccgaccatctttcatacttatgaagacaattcaacagagaacttgcattttcgacagtagcactacaaaagaatatagaatcgtttgcataaaaaaggtgagttatgggagaagtgttcctagccacacgaataccatttaaatcatcattcctttcagcacgaaggatgagtttagatagaacttcactgcataggatgaacagaaatgatgaaagggggtctccttgacgaaggccccgtttaggattgaagggagctaaaggtgcaccattaataaatatagaatatttgaccgttataacgcattctagtaggagagtacagacttgctactgaatccgttcgccttgagaactcgaaaaagaaaaccccattcaaggcgatcataagctttattcatgtccgttttaaccgccattactccctttttatctctcttgcttttcatcgaatggagtacttcctgagccactatagaactctccgcaatccatcggccaggaataaagccgattgaaaaggagacactaaccgatccatacaccctttaagacggtccgttaaaatacgagagatgattttatacccaaaattacataggcttatgggtctaaatttatcaaaagtagcagcattcacaatgttaggaattagacttataaaggtctcattcactctctcctgcattctcccagttaggaaaaactgctgaaccatccagcaaaccgaaactccaataatgtcccaatactttcgaaagaaaatacatggaaattcgtcaggccccggagctttaaggggatgcaacttaaacaccacatccttgatctcaccttcatcaggtacacgacaaattgcttcattctcactctctgtgactttctcagtgaaaagggactccaaatcatcgtctatgtgcgggttcgaggagcagaacatggcctgaaagcagtcctgaaagaacttccaaactcttaaccattccctcgtgtcatccctgatatgaaattatgccttctcctgatcagagtggacatgtggaagaacttcgaattcccatcaccaaaccgaagcaagttctcacgagacttttgtcgccagatcctacccattttctcctccatgtcaaggatttccatttggatttccgcttccttagccaccgtagattgagtgatagccatcttttgcacactctccaattgattccgaaggcatctcaattttctatcacagaagccaaaaacgttctggttccatagtttcaactctctcttggttctgcaaaattttctaggaagccccatttccctttgttcagcaaactcatccttccaggcattatcaataaccattctacagtcttctctttaagtccagacctgaagaaaccgaaaaggataattcagtttcaaagtttccccccaagtgtccagaagaataggagcatggtcggagccaataataggataattctgtacccgagcgttagaaaacacagtgcaccaatc

SEQ ID NO: 229542 - DNA, 1740 bp, Cannabis indica
gagggtgagggtgagggtgagggtgagggtgagggtgagaacgtgaaagagaaagggcgatgatagagaaactatgaagataagtagggagggaggagtgagggagtagtgaaatagaaaaaacaatagaaagttttgagggaggagggatgatgggtgggagtagtaaaatagataataagagaaactcttgagggagggaggagtgaaataaagaataagagaaacttgtgagggaaggagagaggaatagtgaaatttagaaaaagataagcctctaacggtattgaaaataaaaaatggagagagggagacatgaaaatgctagtggtaaaggagagggagagagagtgggaaaggagtgaagagtgattgagagaaagggaagggaaagcatggatgaaagtaagtggagtgagcaatgagagaaagtgaagagagggagggagagaatgagtgagaaagtgaggagatagtattgagagagggaggatagagaatataaatagtcaggagggtaaaatagggagaacgtgaactatggaagagaacgtgaaagagagagagtgaggatatagacactgaaccaacatgttttttttctttcccactgggcttttcatcaacggatataaatatcagtttgataatgagtgtagaggttgggaaagtgaatagagagtggggggagagggagtgagttgagaaagggaggatacactatgaagatgagtgtagaggattgagaaagtggttaaaggatgggggagagggagtaagttgatgaagggaggatcaatgtttaaaataatgtatttaagctttaaagtgttctctttttgtgagacgaggcgtaagcctcaaatatttaattgaaaaatatttttagagcacttaaaaatatcaaggatgagatattataaaactcaatcgtaccataaagtgtctcataaaactcaaacaaaccataaaatatctcataaaattcaaaccaaaataaagtttaactctccttctatagaatgaagcttcagctatgctggaaagaagaagaagcttcagccttcagctatggaaggcaacagacttatatttttcattttttgttatgttctatgaagtctgaaagtcactattgagggaggagggaggagaggggatcgactgcaatctattttgagggtttttagtggggttttttttttttttttttatttttttttttaaaaattagttttgtagttttattgggtcttgctaagttatttaactggagggattaagtaacttaagctgaaagcccaaactaacatcattttgggcctttataaaagaaagctcacaaatgaatttttgattcggtgattttcacgcctcagtcagattaagaggcgcctcacctgtgtgacacgtacacctctttgctccatacaaaggcgcacaccttagttcgaaaaagatttgcgttgcctcagaatcacaattttaaatactggggaggatagagaaagtgaaaagagaatggggagagggagtgagttgatggaggatagagaaagtgaatagagaatgtggggagaggttgtgagttgatgaaggaaggatacacgtatgaagatagtgtgtagaggatgggaaaagtcaatggaggagtggggggagagggagtgagttaagtgaacgggaggctacgataagtgaaaataggagaggtagagagtgtatagagacaaaaaaaat

SEQ ID NO: 229543 - DNA, 3580 bp, Cannabis indica
ttagaaaaaacttagaatcactagaactaagattagataattctagagttgtttagaaatagtaagaagtaattaattagctagtaaattagaaaaatctagaaatctttagatacatcctttgtagcctataaatataagtgaggtgtgtgcttgagatgcaagtttgagcaagagagttcaagtcaagtgtgagaaaaagagtctaaagtgtgtgagttcttaataagtgtctaaagacaaagtatcccaaaagtgtgagttatacacaagtgtgtagtaaaggtgtctagtgataaaataaagagtgagtgcttggtgtgtattgtggtcaagttaaagtgaaagtcttggtgtaattgctttttcaataataaagtaattacgtttttcacgtgtggtggtgtccaacaaagccagctttccttcgaaaaaaaaaattctggatggctaattgttcccttttggaagggagtcccggataattgacttcagctgacgccttttttatccgtgaagtcccttcagtgtgcatatcagaccgtggtctcgaaaacttacattttatcttaaagcaatttgacttatgttgacgtagagatctcactaagaagcattgttgctctaactgcactcgtgctcttttttttattggttagttcataattttttagaaaaaagttgaaaatgaggtccactaatcttgccataccatcacaccttctaattttaagttgttacagacttgtgagatgttggatactcttaggaatgctaaaatagctagagttgatgctggcaatgttttgagggagaggccccctcctgtggttcccaactatacacacacccttgaatttaggacaattataaatatgcaatttattgagagaagtgaggttctccaaccagtgtacaagacattccaaatcctcattaatgtcttttaaagacaagcttttcaatttggagggaggagagaaagaagaaaacaaatcttcttaatgtctttttgaatggcttcaagctagtctcctccagaatcaaatcttcttccaaatgtggatgaagtggcatggaagtcagcttcatttagaaagagaagatgtgattgttttcatttgcatttgcagcaaaagtggaatgatcaacactacaccattcctttagataaggcaattgaagagagagtagtgagtggaagtctgctgagatatattaaatcacaaaaacatatcaccaagttgagcaacaaacaaaatatgcaagaggaatttatcctattaatcaaccaagagttacagacagattacaagacacaaactaagaatggtgatagatacacatcatttgagacctctatttcaattatgcaatctcagtgtatatattacaagattttcaccagagatacatacaatcattgaaaacacctcactcagcaaatgattgtttgtaaacttgcaaatgtgaccagccattattaacattttgttaaattcttattcaccccagtgctgatccattctgtaagagcatgtttgctttggtgtaatcaagattgaaatggaacggagattacaattataatatttggttgagccttttaacttttgtaatccctttacattgtaatgagtattacaccacttgcatgaattctcattacataggcatgactcataaatgagattacaattaccaatatattacaaaataaatcaaacatagtaatagtaatctcattactattcctattaccattacaattacatttcagtaaatcaaacaccatctaaactgttaattctatattaagaaacaaaagaatagtataaaaatatagccataactaattatcacatatcatgaaaggaataatttaaaactatacatttatgtttaccagagtaacgagacgatagatcaacatttcttgcttcaccatagtattcaatattcatttctcagtggcaaaagtatatctctctcatatagcaaacaggatttattatcaaatggaatttaataacatttaaactcacaattacttagacatagttcttgaatattttggtgtggctgaagaccttctattgacatttcataaccaacaatcgcctcagcttcatcgatttcaacattagaatcctacttcaatgtcaaggatcaaagatattgtttatcctttaattttgcttcgtcatactccgctgccacatctttctcacaactcaaatttgtaacttccaatccacctctcaagttattcaatctcatcaattcctttagctcaccaccatgtcttgggatagactttttgctcttcataacacatactttgataatctatgaagattggttagctggcctagttcatgtggcatatactccaatttatcacgaccagaaatatctagatgccaaaggttgatgagtttctcaatatctctaggaggttctttgagcattgagcaattattgagtatcagtgtttgcaaatttaacaaatcattagttgaatctggtagtgataatagacttttattccgaaaaagatccaagtatctcaattgtgtcaacttataacaacaagaaagttcaagatgcctaaggttgatgagtttctcgaaatctctaagaaattctttgagatttgagcaataattgagtttcaccaaattagtaattgaattgggaagtgacttgagatcagaattcaatgagacgtctaaatatcttaagtgtttcaacttgccaatagaattcgatactatcttcctacttgaaaagttcaaatccaaacaacgtataaccttacagtttgatgttatggcatcgcaaatgactcctccttagacttagaaattctaagaaattttcgaatattttttgcatgagccaacgaagctggaagttcacttccaaagtaagcatagtctacgaaaaacacatgaagagtagtttccttgatatttccttaaccatttgaaattgcaaaagtaatacattcttctccatctacttgaacagcaagatcatgcatcaaatcatgcattttgcatttctttatagttccacatttatgtacttcaacatcttcaaagaatgatccttccaagaaagttataaaccattcataacacacgtcttccaaacattgatcttcacttgtatttgttaacttgagaaaccctgtgccatccaacagttaattaaatttcccaccttaatttttttgtctttaggaaataagaaaagcaaagtttcaaatgggaggcaagatgatcataactcaatttgagagtgggcaagatatcatctttacgttggggtatttttgaaaattccttattaaaggaagaccattctaatttagaccttttaccatataataaatttcctattgttttatggctaggggattcctttatactatttcacaatctcctttccagtcttcacaatgctagagttatctagctcttgtgagtcattttcaaaagccactctttaaaacaaagaccaagattgatctttatagaggtaaaaaattgcttaatatttacaacatgtttaa

SEQ ID NO: 229544 - DNA, 1184 bp, Cannabis indica
aacattaaatgttatttctgatctatattaataagtaaatctgattatgttgaaatgagttttatttagggcataaaacccaacaaaggtacacaataatagtccaattgatgtgaagaaatgtattaagtctatttgctattcttatgcagatttacatacttcatttttcccttcccctgttccgtgctcaaaggaggcttggaatccacccccacaggattggatcaagctgaattgtgatgtccgagtggggcttgatggtatgtgtatggtagttgtggttaagaaccatcttggtagggtggtttgggttcaaacggatcgattaaatttttttgatgctctatatggggaggcggcggcttgctgtttggcactttcagttgcgaaagatcttgggtccaagtttactaatgtggagagtgactctagagtagttatcaatgctctaaacgggattgattctcactgggcaattgaaaactatgtctcattttgtaatagttcttctcccttgtttattagttgtaatttttcgatattagtagatcttgtaactttgtagcccataatgtagaaaattgggttttcgctcactagaggtttggttttattccactatcaaccataccttcaaacttgttttataataaccgagaggtctaatttttccttctattttaagtacgcttttattcaaaaaaaaaaaaaaggtttcaactccaaactttgcacgatgaaaattaagagtcaaaaggctagtaactttttttgaagttttcatgtgggtaggtggggtcttaacataaaatggaagagagaaacaaaattttaaaacttaaaacatttttataaattattagttgtaaataatttatttaattattattaatatttttgtaataaattaattaaatataattagatatataataatttaaatatttaaaatatggatagtttgggaaccttacaattttaaatgcacttaaggtactaaaatatagggttgtacaaaaaaaattgtaaaccgcccaaaccgaatcgaaaaaactgataaaaattacaaaccgaaataacccgaaaaaattacaacccgcccaatctgttacttgggcgggttggacctattttcaacccgcccaattaaaccgaataacccgaccaactcgacttggact

SEQ ID NO: 229545 - DNA, 843 bp, Cannabis indica
tctggacttaaatagaattcgtacattatatatatataatcatgaaataaatcatgtgaaccatgcaacataagatgttatttctaatctttattaataaataaatcgaattatattgaaatgagttttatttagggcataaaacccaacactctatttccttgaaacttcctgttacttcccagtgtttcggaagctttaatcttttgtttgtgattcgagttgctgctgtcggtccccttactggtattaccaaccacactaggattcgatgctgtgacagaatccttagaagcttgttctttgattacatgttgttctgcctcttctgcaatcaaggctaactcaaccactttcttgtataatgtgtcatgattggtggtaattttaaagtcctaactgattgtggcattccgtccccttaggtatttttgttttcgagtgacatccgttggtaccagatcactagcaaacttggacaaccaatcgaattccagggtatactcagccacggtcatcttcccttgagtcaacttcacaaaatcttccatatttgaagttcttacagcaatgttataaaaattttcttcaaacaaggttttaaactcttcccaagatatggttgctaacgtctcgggtctgacccacaatatcccaccaaaagtgggaatgatcttgtaacatgaatgcagcacatttaacttattccatccccatcaccaccatgttatctaggatgcggaaaatagtgctcatccactgtcagccttgataatatcaatacctcccaaaaacgttagaggttccagcttcacaaaacgctcaaacactgaatcttgatgt

SEQ ID NO: 229546 - DNA, 834 bp, Cannabis indica
ctttgagttttagagctcaagctcggctctttaaaggtggaatttgtttcttagcatgttatagtgttttatagctttggatatgttctttatagtctaaataacaggtctggaaggtttaaattaaattggggttgatttgaatgagttatgaatttaataaactttccagcactgaagcggtcgaccggttcagtgcgacctgtaagaatgaaaattctggttggtccctaggaaaactggaattctagttggggaactggtctaccggttggggcagttatgggaaccctagtttttcctgtttttgcgatatttaggtattgccatattatttattgatagggaaacttttagtttcaagtttaagtccctgaaaagtgacttagcgtgtcactcaccagttctacgaataatgtgatttaagggcctgtaattcgtcgagaaactgttccactcaggttggccggcacacctaaattcggtaacgaggtaagattattataacgatatgcatatgtattaacatgcttacatagcatgttagttgagcctgttagattacaatagaaatgtatgttagcttttgaactattcgacattatcacattggtaaatttagagtacaactggtgtaccgagtataggctgatattatggtcgatagtaccgtagtacttgacagtatcacatctgtacggctagtgtatgactagtgtaccgagtataggctgatattatggtcaatagtactgtcgtatgaatgttctagactcagcaacgtgtgggacatgggggatagggttatcattgggggtatgggcgtctgatcat

SEQ ID NO: 229547 - DNA, 1441 bp, Cannabis indica
ggacccggacctggacccggacctgggccccgaccccgcaccaagactccgaccgagatcgggaccgggacccagacctagcgggatacgagactcagacccagccccggctccaacctcagctctaggcccgaccctggacccagacccagaccttgaccctgaccccgacctagactcaagacccagacctagactcgaaccgggactcggaaccggacccggacctgagacccgagactcacgacccatgacccaaatccacactcgggcctgtacctaacctgtagttggtgttcgggtcgagtgtaattgaaaaatatattataactttacacatgcaatctattaatacaagtcaataccaaacatagtattgtattaaataatactaatacaatacaatccatcacaatacaatataatgcaatgtaccaaacgatcccttaaagaattatagaacacaaacccataattaacataatatttttctaataataatattaaataatgcaaaataacttaagagactacttagcattacacaacatatatataataattaataatcaaaacaacactaaatacttaatatataataacaaattacttaaacacaaaagcacaacattattataactaatatacttaaaactagacccccaaagctaattacatgattaactagctttgatgatgagtttggtcaatgatttgggccaatatttccttgcactccttgagtttttttatgctcccatccaacttggctcgcttcgaagcaaccgaaggtgactcctctaacattctcaccaatcgattttcatttgaacccataatttgattcacaagctctctttccaaatgcttagtcacaagcctatggacactcaattacaaatgtagagccattgagtcaacaagccttctttgtacaatgctccaatatgccaccaatctcatcctcaataatattcatagaattttggctgttgacattactcaagaacacatcttttttagccatgaacttcttatattcaattttgatagtataaccagtcaatttctctatctccacaatctccttaacccagttcatggaattctctttcatcttctcaatcatatcacgtctagcttctttggctgagatttggagttggtaatagtgttgaacatgcttagtgtgactttgcgtgggtcactaaaactctttattgtaatagtaccctaatcatcatatattgaccacctttagttggattaacataaaaaattgtattaagttactacaaaactttgagattttctaactttgtcacatcaaccattttataataaaaaaatttgaaaaacaaatataacctcgtgatcataatagatgtcgaacttataatttcgtcggcaaaacaaagtggataatcacttgtagaatatg

SEQ ID NO: 229548 - DNA, 1098 bp, Cannabis indica
ctcacataagaaaaggttgtagatatcaataagctaatgtcatctagatggaacctagctgtgtatgcatttttataactgatattatgtgctagaagtagatttcgatttgtctccacctcttcttcttccttctttggaaataagataattacgacaaatatatattctaaaacataattactacaaattaagatgtatgcttactttaatattattatttggattaagatttaattgttcatatttctagttttataatggtttcatttgacttagcttctataggtctttttaaaaaactatttttaaaattaaaataatttatataatttttgatttactcacaaattcaagtaatcccacctaccacacttttaccacatgaatggaaagaaccaatttgactaagttaagagcaatcaagttctcattgtgattacaaaaaaagaacttaaactattacaaatattgtagatatcttaaaattctgttctgaattcagcaaagacaagttttattttattaagaagaatagcaactctttggcaattagtctcatccttaagttttagccaagtttatatcacaattggagaccagtaagaatagacattgcttcggccaccagagaagaaaaagcaccagttttcagtgtggaaacagaggccaaacaatgtctaataagatggtcataaatcatagccccgtagccaagcttcctgtcggactcacatatactagcatcgatgttgagtttgactcgtccttcaaatggcaaagaccatcgtgacaccattgtaagagcaatagtctgggatgaacatgagaatcgcgcaaagacttctgggttgcaactttaaaattctgagcaaacaacaaggccgacttgataactcccttgacatcaaggtattagaaaattaataatctcaagatacaaatttttatatattctagaacacaaccacaatagataataattaggtacacatacttgattaatccatagcaattacctcaaattgataagtcttcctccctaggtctctaaattagaagcagttttttaattatcaaaagatatacaattgtgat

SEQ ID NO: 229549 - DNA, 1046 bp, Cannabis indica
aatacaaaaaaaaaaagaaaacaaattaaaagcagttccaaattatccatgagcataaatggaactgggagagtatgtttgggggagaaaatgagaagagtaaattacactctataccctttttatattgtcctcttttacttttaccatcttttttaaagtctatcatttttacctcttttttaaacattgtaccaattttgcccctgtcacttcaagatactcttcatgtgactctcttatgtcagggtattttgggtacaatacatataaaaagaggtatgtttgaattaaatataaaattagaggtaaatttgattaattgattaataaaagtggtatttttcaacttaccccaaatgagaaagggcgtgagggcccaattagatataagaaaaggtacaaaagctcaatgagacatactcccaacaatatggcccaatagtttggaggagaacaaaaatgcccacaaatagataaaataataaaaagcccataaagccacaagaagacaaaatggagcataacgacaaagcatgaaagactcaagaaaggacaaaataagggttcgcagctcgaagtaatagccgatgactaaaccaaacccaaccaaaagatgtcatagaatgatgatatttaaagcaagataaaacaaaatcatactcccgtctgagaaacgtactcaacaagagttaatactaggatcattttcattgccttaactgaaagcaaggtatctcgtcggaaggaaatcattcctcaaaggaacaaaataattagtagagactaagcaagaagtcgacggatccaataaatatagaagaaaacaccctccaccatgcaacaacaagacacatggcagacagagtttaacaaagaaaaatgacacccgcgcgtcaaggatacatcaaagaaaggacaggtcacacatgcactaaaagaacgtacaacataaataagaaggggacttttctcgtgttcttgctctcacagctggaaagctggggctatggcgaaaacgagatctggaattcaaggaaagtctc

SEQ ID NO: 229550 - DNA, 2600 bp, Cannabis indica
ttttcaaggtaaattttaacaagttctttccttacgcttacaattgttagtatactcttgaaatgtcacgccacacatcttgaaaaatagtgaagtttcatagggagaaagccaaacatcattgttcataacttttctattggtcatgctgagaaaaacctagttttcaagcattgataatcatttttgtcgaaatagttaaaatctcatatttctaatagtggtacccctttgtgaaatgtgacctggatccatctcgaaatatttttccccactattcatgatgaattcgtactcttgagatgtttatgaagattttttttttttttttttgcattatatttggttaaaatgctccctaatttaaaattttaaaatgttcttcttttcaagtatataacaagttttttttcttactaattacagtcgttaattttctcttaaaatcttaccttaaacatctcgaaaaaaatagtaaagtttcatagggaggaagccaaatcgctgtccatcacttttctattggacactttaagagaaaatatagttttcaagcactaacaatcattttaatctaaataaaaaaaatctcacattctgatagtggtacccttttgtgaaatgtggcacggacccatctcagaatatttttcccactattcacaatgaattcatactactaagacgtgaatatgaagattagtttcacattaaatttggttaaaatagaccccttatacacaaattgaaaatgtttttcttttcagggtaaattttagcaagtcttttccttacgcttacactcgttagtgttcttttaaaatatcaccctacacatctcaaaaaattgtgaaattttacatggaggaagccaagatcgttgttcttcactaccgactagttttatttatatcatataatcttaattttattgtacatccttacaagattatactttctccatgtgaataagagattttctgatatttattaattatgcttctataattaatatattcatttatcttataattatatttcatatattctgtaatatattatctattaactacttgcttttagggaataaatcccaacactttataacgttggaaagattgtgacgattacttagtccagatttggagtcttaaatatgaataattatttgatgtgatttagagattaaccttattatgtttaaactcagaatcgtaactagaattattggcactagcttaagatcactcgtggactggaactcttctcatactttagaattcaggtaagacaacgaactaagcgcttagagtatagcgtgatggcgcacttgtatgctatatggatatttatgtagagatgtgagttaggattaataccctaaagtttcaatggttaagcatgccctaaatgagttatgtgaataaatgataagagttatgcgattaaagcatagcaaggttagactcggtaactaaaaccgagataaattctattaaggccttatatataaaatagatgcgtgagtgtaataaatggtatctatacaatatagacataagatgcagtgacattattataaatatgatagtgtattatatagtgcggtggcacaattatttatgcagggtcatattagttgtaatatgtatgttgtatgtttatattggatttatattatgctatcttgatgggtcttgacttactggtgctctaatgtgcatgtaaatgtaaagcagttccaggtcaatcattagttcgagggcttaatgatgaattgtacatgtttcggctgagctagactgagagagttgggtcctacatggtgattgtataaaaatctcattctgtcgcttaaattagcttacatataaacaatttgtaatattttgaaaagaatttcatggaattccgaatttgtaactatattattttgtttttaattaagattattacaaggtgttttgatatataagttattttgtttttcttaattcacttggcttaatagaccccaattaatgggattagggtaatataatcacgacacgcggtgttatcttaaagaggatgttatagttagagaacatgccttacatcctcctcatccaatgttcgttccactgcatattttggatctgacaatacaatatatttgttggcctccctgtaatttttatccctcaaatcatccaacactatattaacttcatttttcctaatgaccctaaatctcatatttaggtgcttctcttttggcttaaaaagaaaaccaaaaaggaattggtattccaactctagagttatttcttcaagatgcagcctattgaacccattgaacccacaataatccaagtaggcaacttgaccactctcatacctcctattttcatatgggataaactagtaaccaccatgaaataaattcatagtaaaattacttaaattcgaacctgcaaagttaatatataatcacataattaatcataggggtaatcgaggcgataccaatcaactttttccaatattttgataaaacctccattagcaatttatcccctaacccaacaaacagaaaagagataatataaaaatgaaaa

SEQ ID NO: 229551 - DNA, 1549 bp, Cannabis indica
tattcttttttagttgttaaatgttaattaagctcgttaagtgccagctcaaaaatacatggcaacatttctttagcttatttaatatatagtctaataatatgttcccacgtgtttttgagttgacacttaatggctaaaaaatagtacgattgtaacaaaattgtaaaataagatacttttgacgccactttttttattaaggtcatatgtgtaataattataaatattaagaaattttcgctcctaatatccctaattgttatggctactaatgccattttacttttcatttgaagtattaattataattttttattataatttttttcttaatttttgtgtgcaaaaatacttattagaatatttctgtaaattttttaaaaatttcaaagtttattaaaactaagttagaataaaaagaattatattatcgatactataaattgtttaaaattatttgaaaatttacaaacttaataatataattataataaatattaccattaaacaaatattttaacaatgtgttttcaaatgtaaaaattgaaaagaaaactaaaataagagattaacggtaacatctcttttctttctttccttttactaaaattttacatacaaaaaatgaaagaaagatagaaaaatgcatcatttttatttatttctctcaataaaaaaatcttctccaaaacaagaagatcaaataattataacaataagaatagaatttttttttttcttctttataaatggagaaagaagcaacattgctttttgactatatatatgtgtatacatttataaaataaaacaatgttacaaagagtggaaataataggtaataataatggtagtgaagtggtgtgagtgagtccatacttcaaattccaaactaatcttttagtgacgcttcatttccctgaataagtttgaaactttgggagataatcttggaaggaacttaaacaactgtatacaaaaacaacaacaacaataatcacaaatcatttcattattacaaggccaattttatttttttttactagaattttaaaatataagttcgtaaagaatatgattttttcgaaaaaaaattattaggtgcttatacaacgcaccctcataaaaggagtgtccgttatctatttcggtatttgaaagaattttttagttcattgtcggttacgttatagttatttaagatatcatgtaaaatttcaaaaaaatcagaataatttatagaatagaaattaatgttcaaacagtatatttcacacgcatataaaataaaagagtcactcatgcaacaaacagtttaaaccctattttgacgtatgaaatttttaaatattttgcaagatatcttaaataactataatgtacatgactataaaaaaaattaagctaaaaaattcccttgaataccgatagatatgggtgtatcagtgcactcattttcaaaagagtgcattgtagaattttctaaaattattttattgagaaattttttgaaaaaaaattaagaaatatgtagaaaaacagtata

SEQ ID NO: 229552 - DNA, 2667 bp, Cannabis indica
agataaaatgctattatattatattaattgtaaagttaaaatacaatagacattaacggtagagacatttcctctagccatgaacaattagttttcactaaaagagcaaattgtgccaacaaatgggcagcaatgtaagcagatctaaacacatgtgagatctgtgctccagggaacttggatactaaaagtgaaatattattcaaaagacaatggaaatcggaaacatgttgttgtaatgaatgtaatcctttaactaccaaaagtgaatctgtctcaattaggtgaacagatagtttaagatcatgtaatcattgcaagttgtgcattaaagccaatgcttccatcatttctggtttaaagcagcctttgcagggaatagatgtagcagccacaatatccccttaactgttccgaacgactgccccaaagccagaaacttgttttcatatgtcaattgatgcatcagtatttagcttcaggtgaccaaaaggaggattcatccatgatgcttcttcagttgcagcagtcttgggcggtttcctgcacacaacattctggtttaagtcctttctagcactatggaattcttccaggtacgagtaagcgaaaaagaggagggcgtcagcatgttttggtcttgtaccatgcctctctttatttcattcactccaaaatgcaccatagaattgttgcaaattgctccagctgctgagatgaaaaaatggttgagcaatgcataaacatttccatcaaactggtgtggttatgcagcagcttttcaagacaaaaagatgaaagcttccaaacatgttgagctcttttacagtagaagagtgtgtgtgttatggtttctctgtcacgattacatagagaataagccgagtcatttatatgtctagtgtgaagaacatctgatacagggaggcagtcatgaatcgctctccaaaggaaaatgcaaatttttcgaaggaagagaaagaccctagaattttttccaccattgaattgcttcaataccactagccgaaggagagtgatcttcaagttttatagccaattcatatcctgatttaatcgagtataatccattagtttcatggtgccacataagtatgtcttgctggttgattaaagttaagggaatattgagaactttgttaacattcgattccaaaaataactcccttaacaaatcagcatcccattgtcttgattctaggagtagatcagcaactttcatattcatgtcttctccataaaaaactaaaggtttaaagctggtatatcctggaagccacgggtcagatgctcataaaatgttagctccatagcccactttccaacgaagccctttgacaagtaattccttaccccacataatgcccatccatgttagagatggatatgagcccaaaccgagatccaagaatgatttgttattgaaatctcttgccttaagtacacggcttagcaacggacacgagattgaaaaaattctacacgcttgttttgctaacaaagcttgattgaaatgaataaagcttttgaaacccatcccaccttccactttagaagtgcgtagtgctttccatgttttccaattaatcccattggaagaagagttagagccccgccagaatttattcatcatcgtttcaatttgcttgatcaaggatttggaaagacggaagcaactcattacatacgttggtattgattgagaaaccactttgagtagcacttctttgcctccgattgagaataacttttcttgccaagctgaaaggagattccatagcttttctttgatttccccaaacagtattttcttgtctcgacctgaataagaaggcaatcccaagtaacgctcgtgacatggtttaataggcatttgtaggagttgctgtaagtgagattgaaggcctagtcgagtattaggggagaaatacaatacagacttctcaacattaagcctttgaccaaaggtagcacagtaataatcaagtgaagatttaatggcagcaattgatctttgatttgctcgacaaagaacaaggctgatattggcaaagaacaaatgcgagacagatggagagccgcgagcaatttttaatccttgcaagttcccctaatttcttcacgctgtaagagtcgagaaaggccttcagcttaaatgataaacaagtatggtgataaaggatcaccctggcgaattcctcgggacggagtaacatggccttgtatcttcccattgacaaagaaagagtaagtgacgctactcaggcagcgtaagatgagatccaccgttgtaaaggtaaatcccatagccaacatcatgttgggattttatgctctaaataaaactcatttcaatataatctgatttttcattaatagaagattagaagtcatttatgtttacatgtagttttcatgtttatggtttaatgtatacaatttctgttaagtccataacatatagttattcacaattacagtgttgtcaacacagtggaaggtaattgtgattatatgcttcaaaagttaatgtcccttgattcatcagtgcactggatttacactgatgtgatagtcagcgataagtatacttacaccttggataagtgttatgtttttttttcagaacattgtcaaagtatgcta

SEQ ID NO: 229553 - DNA, 1454 bp, Cannabis indica
atagcatacataggcatagaaaaggcccacatatctaattagggtagcacgcccaaccttcgaaagtaatttagctttccaaccttggagcttagaggtgagatgatccaaaatgaagttaaaatctacatcattttgcctagatctgaataaggggagacctaagtatttaatattgccttttgggttaccaatccctaaagcatctttgatccctcttttcatcccatcagaagtattattactgaaaaagattgatgttttgagtttattaacctgttgtccaaaccaagaacaaaaattctcaatgcattgcgaatagccttttgcctcctccaaagaagctcttccaacaagaattaaatcatttactaagaagatatgcgagagaatcgaaccccctagacatagtttaatgccttgaatttcacctttccccggggcttcctctaaaatccttgacaaaattttcgtagcccaaataaataggtaaggggaaaatggaggtatattggtagatgagttgattaattcatgcaattagtttagaaaatcatcatttcatttgatccaattagacttcaaaatctaatccaattcaattcaaatactaatcaaattggatgggttttttcaattggatatacacacctgatttttaatattaacttaaaatatgaagaaaaatacgtaaaaattaaatatcactctttatttaagtttaatactctataaaaatatcattgatacaagtgtagtgcaactaaaagtttaaaataactaaaacaacaacattactaaattataaaatataacaaaacatcatgaaaataaatatacaaaacaaccaaatatcacaaattcaacacaaaaaaatccagtttaaatataattaaaatatgtatattttattatacataaataagtatagatatgtttttaatatatataaatgtaattggattagatcggtttttaattaaattttgagaatgacatctaataatcgatccaatccaattagaatctaacttttaacattcgatccaatccaattataattggacatttaactttttataattgaattggattggattgatacagttcaattggattggacatacaaggcaactatagtatgtgtataaccaaattcaaattttcaccatacaagacctattttaattaggaatgtcaaacacatacataaattacacattttttagggtaatttgcggctaaactccctaaactttgaagtttggcacggtcaaattcttagactggaaaaattatggctgaactctcaactccacaatcgttatgctctgtactctttccgtccactttggtctgttaagtgccaaagtggactcccacggtatacacaagtgtacacgtagtaaattttcattggtccacgtaatattaatactataaatattaaaaaa

SEQ ID NO: 229554 - DNA, 3155 bp, Cannabis indica
cgactcaaaaaagcctttagggactccccaagatgttgcttgatattcgtcaacgacgatgcttctagtcttctgtccctcgcggcctgaaattgctttttgaattctttagatagttgctcctacaaagtaatggaataatttgtgaacttatcaaatcaactacttgtcacccctccaagggatgtagggaacaatatgcaatgcaagttattagaaacattacttgcttgcattataatgttaagatttttcaaatatgcaaccaggttagtggtttcatcgtattgcctgacatgagggttcttaaatcctttttcaaatagtgaattcaatatgttagggtggaaaagttctgggttgtcatttgaatcatattttggaagcttcccatactctgcatcatgatattttctaaaccgatcatacaactgaattatcatttgttgaatggagttatcaacgggttgattggtctgttcattagctcgttgagaattcttatttaatatctctatgagatttggtgtatttctatttatttgcttgcgtagatcaagacgccttcgatttagttggtctcgcaaatcaggctgatcatgtacgttttgacgttgattttgcctaacatcataattgcttactgatcgacttggggaaaaattctctaattggtaacttttaaagttactcatactttcctgctcattttggtattcatatcgtggttttctctcaccttatggtgggttttcacattcgtgatctcgaggattgagtttgctcccgaatcctcgacctactttgggctatatttgtctctatatctaatggtgaaacttgagtaggccttcgcctttcaaataagttagtgaaacttcatctattcaagtatgtatacatactctccctttcctcccttccaggtcctcacgatgaacgtggaggacgagcagatgagttaggtggttgatcatttatattttcgttatttctttgacacgtctgttgtccctttggtcgtgtttgtcgcgaggttgtggcaccctaattctgcggaccttgactatcaacaagaatgtcccttgtctcccctggttgttgtcctaagggcgagaaggatcatttggttcctgtccttcaacattgggtccttgtgcccttctggttcgcgatccacggggtcttcctcacagtcgtcggacatgttgttcctcttgcactggcagtgcattgttttgagttattctgtcgcaatcattgcccgttccaactcctcgtttcttcagttggattatgcgagcctccaatagagttgtcagttttctaactccacaacggggacgtacctcgtggagtcatatgcattagactctcttttctcgggaacttcttcttcagggtcacttctctcggagttcctcttagaaggaccccttccttggtttggtctagttcgagtttgtgctccctatggattttttttttctggtcaacgcattgtctctggttcatcatgttaagtactctccatgacaaaatggtctgattaaataggggagatgtgtttcgagttttttttacaatgactctcaatgaaagcaccaaactgttaactcagattttcgttaacaataaatgaagtcttgtatatttacatgattttatagttaaaatatatgtactccacgagtcagtcttatttatgagtatttctatataatgtttcttaattacaagagaatttctctggatgttcactcaatctcacaagatttttccttccaaaaatgaccgatcacttttcctataggttttgtccctatttataagggctttaggaatgacagttattctcttttgatcttatttaggtaatcgttcatgaaacatgaacaatctccacgtttcatatttacaacatgtggataaaataaagtaactattgagaactgctttttgttcttatcaagaagtagtttttctttgtcaagataacacactccaactatggctcgcattcttcaacgatgttcacaaattactggttgtattccgcgagatgctagttaagatgtttgtcatcacaatttttttacagtaattctcgaactagtctttggaaattctgagataagttgtactttgtttatttctcttaatattttaacatacccatgggtatatgggtcaatgagttacaagcttttaaataactcgttatctaccctttctacctaactcattctttcatgctattcaactgcctcgttcatcttagtccaactctaaggatttagcttataatcctgttatcctcttaaatcattatattgatagtaccatgcgatgtcattacatcttttaaccgaagtttatcccgaggcaggaaatttattcattcttcgcatttattattctcttcattcttttaggtctacatggacacgtgtcatgttcatatttcacgctcaaaatatgggcataacaataataattaatagaatacattattttatccaaacatcgtgttgtttattatttaataaaatacgacccttatatgacctaccaaacgagccctagaatagtaaaataaaagtctagagacaaattcaattttaaatggaaatgtgatacattttattaccatgaaaggaattaaaaaacaaagtatttcatacaaataatagttttacaacaaagagttaaagggtagtttacagaaaaagaattttgttttaaaaaaaaattaagccaactaactgattggaagaggtgcaccattccaactagtgagacattcaagcattggatcaataatttttccttggcacattgcagtgaatactttgtcaaactcctctcctggtgatttaacattctctccagtaagcaaaccagtccccaactcctctctcacaaacttgtacaatggataagacctgcactccttgatcttgtttgatatgtctgcattcccactttcaatagcattccttgcactttcaacctctttaggcaaaagggttttcaattcttcttcaaaagctccaatcttttggaagattgaagtgttgggattcttctcactttcaccgttaaccaaagcttgttctactagtacttgccttagtttttgcattaaaggatag

SEQ ID NO: 229555 - DNA, 2284 bp, Cannabis indica
gtagataaacaaatataagtacttaattaatgttataaacataattttcatttattcgtgaatacatacttgttactagtatattaaatatgatacatatataagacctatataaatattgaatttggacagaaacattattaagttcaaatctttctttcaataaatttaaaataaaatctgtataaaattacgattttataaacattaagtgtttatactgttaagaaaatcattatatttatacgacttataaaattttaaactttaaatactgtaattatacctaattaaaataattcaaattttaaaaaattcaaatttttaaaaataaaattctccaaaataattaaaaaaatctaaaagtccactacctggacttttctgtgtattattggatactgagaatatatctaccttaaatctttgtaccgacacatgtaaattgttaattaaatattattagatccacatttttttcctttttattttataattaattattaggaatatttaaagctttatgctataatttcaatttgatttagtatgaaaatggtcctatgtttatctattgaggttttattattattttattattttgataaaattaagattttattaagtatgttaaaacattaagtgtcccacttaatatgtattattatatatattaggtataggttgttgatatacaaatgatttattttaaattaaagaattcacacagaatttacacgtttaattaaactatagttatatatctactttaaaatctatagttttatgtcatgattaataggtagtttttattaagttttttattgtttagtgcggtattatgcattgttttttatttgtttgaaggtttaattagtttttaagagctggtttgggcgtatgtataagtgccatattatattaaataataaataacattatgtttggataaaataatatattatattaattattacgaccaaattttttaatacaatatatgttgtattatttgatacataataagtagtctgtattagcttgtattataatatttataaaggatttagggtcaacaccaatctccgacccggacccgaacccaaacccgagacccagacccgaacctggacctgaactcagacccgggatcgggacccggacccagacctggacccgaactcggacccagacccaggacttgggacccgaacctaaacccggacccgcgactgagactcagacccgggacctagaccctagacttggacccgaaccgggacccggaccaggacctgggactcgggcctagacccggacccagaccggaaccccaaacccggacccgaaacccgaacccggacccagacccgagactcggacctagagaaataaacaaaattggtagaaaagatgataataaaactctaatttttggtgttaattttgttaaaagacgtatcttaaagtaattttacggctttgctgaaattttgagatcaaaaatgtgaaaattaagaatgttcttaagggtcgctggcatgctcctttatagacacattgaatttcaaagtttgtaaacaggcattggcatgggattgctgggtcacgaccgcattacttgagctacctaaaaattacaagggccacggattggcattacttgagtcgtaatccacattactttagttgggcagaaaattggacacaattcccggctcatgtccttttagcaagagaaaaattaggttttcaaacatatagttgtgattttttaagaggcaaacttagagggtgtaattttggaggctagaagcacaacagtgattcctatttatttcgaacccaatgtttattttgattattattttatgtttagaatgagtattactagccaatttttttagggtttctaattgaatcacactactacaaaagaacttttttccatcggtcctcaaattgatttttttgagattgatgctattggaattgtttgcctactataaattgacgactatagtttagtagtgccatttgttaagagtacctagttagttattagttagtgaggttagttagagctagttaggacaactgtactattgttcttaacaacttttctattgtggatttgatcaatcagctgtataaataatcaatcctcagtaatctcattcattcaatgaaatcaattactcttctttctttttgtttctctggtttttgagttgtaactatggtatcagagcatataatcgtcactgtcatggtagcaatcaac

SEQ ID NO: 229556 - DNA, 1716 bp, Cannabis indica
aaactttactttgtagtttctatctaatgagtacctttaattatatcaatctttagtgtatttttagtaaactcttcatataaatactttgttaaatattcatattttttttggctagactcttattatagcaggatctgacactacttccttaagcttagtatggacattagctttgttagtaaacaatagacaagttttaaagcaagcccaagaagaaattgatcgcatagttgggaaagaaagatgggttgaagacaatgacataaaggacttagtttaccttcaagccattgttaaagaaacattacgtctctacccaccagggccattatcagttcctcatgaggcttgggaagattgtacagtttgtggatattcagttccaaaaggtactcgtttgtttgtgaatgtgtggaagttgcaccgtgacccaactctatggtctgaccctgattcgtttttgcccgagaggtttctcacgagccatgtaggagttgagggttcgggtcaccattttgagttcatcccatttgggtctgggcgaagagcttgccctggaatgacttttgccttgcaagtcacccatttgactcttgctaggcttcttcaagggtttgaatggtctacgccaaaggaagctttggttgacatggttgaagggttgggtattactttgccaagagtgaatccacttgaagttcttttaagtccacggttaaatagtgaaatgtattaatttagaataaatttaattgttaaatgtataaagtttagaagagaattgtgcttgcaagactttataattatatggtgttttgttttagtaattcttaatcgtgtttttgttttcaataaataaaatgattataaacaatgtttcttacctgtggaatagctcaaggtcttacttttactatcttagaaaattgagagttcattttgtcatttaagaaaatagatagtccaattcataatttttacaaaaagagtctaaaatggtatttaccccttttgttaatgtgtaatagaatatatatctcaaaactaattgatgatgagtgtagtagtcatattcttatcttatatatgactcaatattaacacaaaaaaaaattcatttactctttaaaatttttttatttgtaaaaatatgtcttcattaaaaataataaactatttgtttattgttttataatttatttatagatatattataattatcatgaagttatttttagttatttaataatttatttatagttgatttataattatcgtaaaatttatttttaggtgtttttagttatttttttatttttatttttttttaacaaaatatatttttataattataaaatttacaaattatttttataattaaaaaattttaatggtaaaatcataaaatgaaagtatatgttcatcaataccataaataaagtaaaaccgtaatgttttcaaaccaaaaaaaaacgtaaaaacataataaaataatattgggtgattctacaatgcatccccttaaaagggatatactgatgcacctcctacttgtttcggcatccagaaaaattttttagtctaatttttttttatcttcatgtacgttatagctatttaagatatcctacaaaattttgagaaattcagaataatttacaatatagaaaacgatattcaaacagtctattttacacgcgtgtaaaataaaat

SEQ ID NO: 229557 - DNA, 898 bp, Cannabis indica
ttaaatatgccaaaaatggaattaacaatatatatagtgtatatatattgtatattatgtgttgtaacatttctttaatctctttgttggtccttatattaatattgcaatagagctgtaatatcttgattttctattccattgttataaaatttctaacactatcattttaggggttattaatttgtgagtacatattttttaccatttaaacttttgttgtctactcgtgctttattcatgtcaagtttttagctactcgcaaagttgaaatatgcaagaggaacgattactaaatttcttagttattatttttaagctttattttaagtataccatcactctcaaacaaaatataggaatgatgtttggtagaatataactgataagtaacctatatatatacataaagatatgttttatgataaagttttagtgattggattaatgctatgaattgaatgaattttatcaatatatataaatagtatctaaaaaaaacataaaatagtcaaaattatgaggaagatttataccaaatatgttctacatttattggtaataataattaatgactatatatgttctgaaaaagaaaagtcacactaaatgcttagggttgtttcttatcaatagaacctaagtttgtatatttaacatatagatagtatatttagtatatatgtttttttaataactagcatttttttttctgtgttgtttcaattacttaattattttattaattgtgtagttttgattgttaattatttagcatagttttaggttagttaattatattttacatagttgtaaggagtttattccttaattaatttaatgttgtgatcatgtttatgtattgaaattaatttagtttttccattagtcttgtctt

SEQ ID NO: 229558 - DNA, 1335 bp, Cannabis indica
ttatgattaataataatctcctttatttcattacaataacttatttccattcgttgcaatcgtacaagagtggttgctgttgaggaagacaataaatacctcagcccatgacatcctgatactatcagagcttccaagttgtggaaaaacataaaggagggtgcaaagctctgtaatctactacatccccaaacatctactcttcttaaatttggaaataagagaataatagtattattatgtgatgatggttccaccccaaacacatgatcaaccatatcatcagcaccatcaatgtatagttgctccaaagaagaagaaaaagaagaaggtgcagatgtagatgtaagatgagtagtagtagtgttgttggtcacttcactatcaccactactacttaaattcacaaagcagcccgacaatgtcagtttatgaattgtgtgatatttgtgaaggaataacttcaaatttggtacaccaattacttcatcaggagatgtgcaggtcaagtgaagtgtatcaaggttgggaaacaatactattgaattactactcatctcaaatatctccttaattacttcactccaatcacttctcaatacctttatcatgggaaaaattacctacaaaagaagattagaagtagcaaattaaacatctagttaattaataatttaaatgtgcaaaaataaatttattatttttatgaaactgaaagtacaataccaattaagcaccgtgcatgtatatataaatgatagtaccttattattgtgcttgaagagactttgtttatttggagcggacatcatcctatctttcttttcgccaataatattattattagtagtagtaataatagatgatgatgatgtccttttatcacccataaataattccttcagtttaggacaaccttctataatcagttgagacaacaatggacattcaatgcaataatctcctaattcacaaaatcttataaggtttggaagatcattaagctcaagagagtcaagtttttgaaatggtattattgcattaatattgctgccacctgatgatgatatgtattcctcatcatgatcacttactattaccgcttccatcttctcacattcatttacacttaatctctcaagttgtacaagatttcgagccatggcagatgataacagagacttcaaattgttacaatacgtaacaatcaactcttttaagttgggaaatgaagtctgaaacataaaagaatgctaattattattaattactcacttatttcacttttagatcaataaccaataaaatcatcatgaaatcaaccaaatatgtctt

SEQ ID NO: 229559 - DNA, 1124 bp, Cannabis indica
tagtcatttgtcctttgatggaagaaaagtagcctacattaccatatgcatattcaacaatgcctgctttgtattatatatattgttttatagcacaaatcacacaaatcaattaacaaatttccaaaaaaaaaattgtggcattattacagatatttcttctttaccaccagaaactaaatgatatttattgaggatttggatgaatattacatacataaattaaattcgttaaacaacagtgtaaaatacaaaacaaaaaacgaactcttgaaaaaggacatttttttctgaaattttttattaaaaacgacatatttattaataaacgacaatattgtttttttgctgaaaataaacgacaatattgttgcatcaagaaaaacgacacgtttcttaataaacgacaatattgttgcatgaagaaaaacgacacttttcttaatgaagaagaaaaacgagatttttttcttaaaacgacacttctgtagataaacgacaatattgttacattaaaaaaacgacacttttataaatacacgacagtaatttttcatgcattaaaacgacacttttcttaataaacgacaatattgttgcatgaagaaaaacgacattttcttaataaagaagcaaaacgacatctttccttgaaacgacaatattgttgcatgaagttaaatttttcttctgaactcgtaggagtagttttttttcctttctttctctatttcctcttcattcaagcaaaagattctatgtagttgttatagtttcaattcttcatatcaatataaacaacgccatggaatacgattcatgggtttgattcccaaatggggttctaaaaaatcatgaaaaaacgttaaattcctccccagaccagttggctttgtgtttgaataaatgcctcaaaggaaaagctttgagacaaggcaagcagattcatggggtgttgttaatcactgaatgaacatgaatttgttgtcgttgaattcaaagcttgtgggtatgtatgcaagttgtggagatatgagggatgcaaagtatgtgtttgataaaattcctaagccaaatgtttttgctttgaattggttggtttttgcttctgcttttaatgggag

SEQ ID NO: 229560 - DNA, 946 bp, Cannabis indica
aagatatatgaaacatgactctttcaacttttgtagttgtcaatctcttagaaacttttttatagaatcaaccaaatgacatgtaacatggatgcaaaaatcatcaagaagtaaatttttaaggtcaaaaaagggaatttttttttaagaactattagcatcaattagaacatacattagaaactacacctaccaattactataacaattttaaaggtttatgtatcagcttaataaatacaaatgcaaaaaataaagtcaaattatgtgggtagagcaatttgtttgtacgtaattagtatcacaaaaacatactaatgtatatgcatctaagttttagtgcacatatacaaagcaagcaaaaataaatcaatatttcttggagcacataaaatacattaactataataaaatattttttttaaaaaaaaataacctgaaagacgacattatttttttcaccacgatgacttgatgaagagatattactttttttattattgtcgacaacttgatgaagctctttgcgctttttttataggtgatactttcgtcatatctataacgataagacaaaacataatacttaagtctagcaatagcaatagcaatggcaacaatatagtaagactctactactactatagtgattagggattggtgaatagtaattagcgattgatttttaaaatctacattacttgtggttagtgagtagtgattagtgctcaatgcaacattacttgtgtattacttagagtgttttgttgatagaaagtcatacaaacaatattaatcaagaataagaacaaggcatatgaagctaagccttgctgttattcaataataaaaaaagacgcaggtcttgttttccatttctcatatatgttcatttattgaagctttaaaaacaatgtttttttatctatatattaaattaacagtg

SEQ ID NO: 229561 - DNA, 1897 bp, Cannabis indica
tttaattcatgagtatgattatattattattattaaggtgttacaactttcacgatgagaggaggtaagagcactttacaattaggtttcatagccatataaagatggtattgtattaaataaaagattaaataaaatattaaattgtattaattattacaattataaattttaatacaatatgagtcatattatttaatacataataaatgacacgtattagcttatattataatatttacaaagggtctagcatcaactccagtcccaacctcaatctcgaaccttgaacccggactcataccctaaccatggaccaggacccggactcagactccagacctcggaccccaacccaagaccccaatccaaaaccctgccccggaccccagacccaaacagagactcgagacccagacccccaaattggacctcgaacctagacctcgacccaaaccctgacctgaaccctaacccagacccaaactcgaactccggctgccagccccggccctggacctagggttttggtttgagatttgaggtttgagtcgcagtttgggtctagggtctgggtttggggttcgaggtcgagtccgaggctggggacgggtttggattcaggtccaggtctaggtgcgagtccagcttttggggttgggtcctgggtttaggttgtgggtagtatttgggttcgtgtctgggtttgagtcttagttcaatgttcgggaccgtgtccaaggtctcgcgagtctagggtttaggtcttggtccggggtccaagttcgggttcgggtctcagtctaaggccgagtctggggtccagggccagttccaaggttcggggtctagggttgagggcgggtctgggtctaggtccaagtccagggcaaggggtttaggtccgaggttcgagttaaggttggagttcggggtccaagttctagttccggatcggggttcagttccaagtctgggtccgagttcgaattcagagtccaagtctggggttcgggttcgggtccagggtctaggttcaagttagggtcaaggtccgagtccaagttgtggttggggtgagggtcgagtttattgtaaataatttataattctacacaatctcttagtacaagttaatgtcaaacacagtattgtattaaataatactaattcaatacaatacaatacaatacaacacaatactataaaatataatacaatacaatacatcacggtgtaccaaacaaatccctaatcatcattgatatggattaaacacaatgatacaattcaaaactcaaacaaaataattaaatttgagtttttcttaaaatggcctattaatcaaaaaagtcattttcgcattgacacaaatttagtttgtctattaaataggttattcttgagttgatacgacaataactaatttaatagttcattttttattattatcaagttgacatgactcgtaaagggttatgaacatgttaaactataaacagattaatgggttgataagtgtacaaaattaaacattatcctccacataaatgggacgcggtcatattaagttaatcttcccacctagtactactagaacactttgtagaaaattttcccctaaactttctttttgttgtgaaactccctaagttatcaaaatcaatcgttgcaaatatttccattaaattatatttggatcattttttaaaaaataattgtttatgtggtcatagttcacgggtatagaggtatagtatgatggaatttatttgacaattttaattagctactcaaaacctaatttattagcattaaacatacgaacataattttaataatgcttataattaataattaaatggtatttatagtattttcttgttttttttttttt

SEQ ID NO: 229562 - DNA, 2859 bp, Cannabis indica
tcataaacttcacataacttggcatttgttcaagtacctgggtaaaaggtatgttagtgtgaagcttccagaaaatatcatgaaactttaaaaactgcttgtccagtttcttcttttgaagttgttgaggatatggaatcttgatgtggtgctcataactaatcggtggctgctttttttcaaggttcctagtaaccttatcttccactaaaccatcatctttaatcattggtgtaggaataggcttcttaactgactcttttaattttttacccctccttagagtgattacactgtagttttctttaggatttacctctgtattacttgataaatttcgattaggtctattatgaagcatattagtaagttgccctacttgtgtttcaagatttttgatggatgctcttgtctcagtcataaaatgcatttgtataatggtgagggttagcaaagtagcttgtagatcaattacaagagtagttggagcttgtggattttggtgctgagaagtagaagcttggttctaaaattgaggttgttgcccttcattattagtccatccattattaaatatgttgaagaagggtttgttgaattgcctctgaaagttggcaattgcttgcacttgagcatgagtcatcacaacatcatcagttgattcacacttatcaaaagtttgtggtcctccacaaatctcacacccagttgaagcttgaacaatttttggcagcttcagttgtcttctgtaactgtttagtgagtgtagcagcctaagttgtcaaagcagtaatagcattcaatataccatctttattcttccagttgctctttcatcagaccattgatggttattcattgtcgtgtcttcaagtaattcataagctccagttgcacttttgctcatgaatgtacctcttgatgcaacatcaataatagttttagtagtaggacgtaaaccagtataaaagttttgaaccaccatccactgctccatacaatggtgggggcactttctcaatagatctttaaaatgctcccaagctttatataaagattcaccatcattctgaaaaaagttatttatttctcccctcagtttagtagcttttgaaggagggaagaattaagataagaacttttgagctagatcttgccaagtgacaatagaatttggttatagagaatttagccaactttttgccatttcctttaaagagaatagaaaaagcctcagtttaaaagcatcatcactcactccattgtatttgaaagtgccacacaattctacaaaatttaccaagtgaatgtgaggatcttcgaaaggcaacccactaaattagagagtggactgcacaatttgtataatagcttgcttgatttcaaagttattggattcaactgctagggatgtatacagttctgtacccccatcagagtgggtagtacattgtctctcaggctctctcagcattattttgagtgtgacctccttgcatagctccaggaattagatcattccctttattctgcaccaccttctctgattttttggcctccctcttgttctttatatttttcttacaagacttttcaatctcaagattcaaaagaacaagactctcttcacctcttctactgtgcatataacacaattcacttgagataaacaaattcagcgactaaacaggttaaaaacaagagaaaataaaataaaatcaaaatcaaattaattaaaatgatattgataatttttaatccccgacaatggtgccaaaaaattgttcgataaatttagtaggcaaatataaataatcgaataaagtaatataatgataaatagagtaccatttccaaaaggattgatattaaattataaattaattaattcgttagttctatttgataaataaaaattgttggatagaaaataaagcgagacaatgacttaaaattttaaagaaataaaaaaaataaaggcaaagattattatgatccctgactatcttttattttacttattaatgcaattaccctatttctcttcttcctattccattgacaagttgagttaagaagtttataatctggttaagacttataaacccaatctatttgaaaacttcctatattcatatggtaagtttaatcacaaagataacattaaacatagcaactaataaaatcatataaacaacctaggtactttcattttaaatcaatttgcatcataaaaatcagagcatattcaatctcaccttttagactattgatttgaattcataaatagcaactattgattaacagtaaataattacaaaattaaaatagattgtatggaattgaatttaaagaagaagaagaaattgaacaactatattaatctataaaataaattcaagtaattcacataataatccttaaaagaaatgagctactagaagacattctaaaacaataaaattcatgtaaaatcataaaagatagagataaagagatagaacattattagagtcctgcactggtgccttctgctctttgccctccttctacactcagaatttctctcaatttttgaatggtgtcagaagcttgccatcagcaccctttttataatccaaagttccaagcttcctaaaaatcaacaaggttgtggccttgcatgctaggtcgcgaccttgcaagtgattttccaaattaatttcttcgctaattttttgtagtttcttgttttcaattacttctagcaacgatcataagtattttggtcataactgtctcgatataacttagaattagacgatttaagatcttttgaaagatgaaagagagatctagaactttcattcataaagtttt

SEQ ID NO: 229563 - DNA, 1626 bp, Cannabis indica
ttcactaattaattacatactgagttatatagttactcatccacaaatcgctatgatcatctcttatttgtagttttggagcgcgatttttctttaaaacccaccaatgaaagtttcttgtcgtgccctaatctatcgagatatagtttttatttaataatggctagctgatgttgatttcaatttctcttttcaacagggcaatttttcaatcttttggcaatgagtttttcaataattaagctgggaataatttaattttaatttggtacttattatttgctatataattatagtagtagtgtttttcattgtataacatgcatccaataatataaatataaaagtcaatttttatattgcatttatataacttttatatataaatgtattgattatttattaagatgtttttacaatatattttgatatatatgcatatgaagcatcgagctaggtgaatgttgtaataataattaaaagcaaaaaggtgcaaatcttattttttatttttttgaggagaagtcttaatttatttaattttactctaactcaaattaactaaaaaagtaaatatataataacatgcaagcttataataaatttgaataatatatataaaatattttttttaaaaaaagaatataaaatattaattatatggagactatatgtatcttgctcatgaaaatatatataagtgaatttttctaattcaaatttgctaaaaattaaaattatgcaaaacatataaaatctgggccttagatatgaacttagccatgatcgagcctgttatatatatttataggtaaagtacacatatatgcttaagttttttttagtgctaataatatgttctttactatgtgataaagacatgattagctagagaaaaacaaaaataaaagatattaacattacgtttgagaagaaaacaaaaatggtttttacactacatactgaaatttttaattttttagtaggcagaatttttttcaaaaatactgtgtactgtgttaaattttccctattattccacggttgatttttaattgttttactgttgtccttaattgttctgttttgttgtttcactgttatttataaaaagacagtatttttgtaaaaaataattgtgtgggtgtaaaattgtaaacttttacaaaaaaaaatctaatatttttataaaaatcccaaacaagaatgaaaaatgaaattttgggaagtaggcccactaatactcaaagtcacacttactcaagtcaaatctatactttacatataacacaattcttaatttctttgatctatttttagtcaaagtcaactctatctctaactcaaaactattgtgaagtgtgagcctaaccataagatatttctttaaaatagagcaaaactacttatttttctcaaaaagaaaaagaaactgtaatattattttaaattatgtcgtattgtcaaaagtacatgattaatttgtacaaatattttgaggtccttcgaaataataataataataatagacatcattacaaagttagtattcacaaaaaacgacaatatatttggaaaacgacattaaatatagcaagcaacgacataaaatttcaacaaaagaat

SEQ ID NO: 229564 - DNA, 3833 bp, Cannabis indica
acttattccaatataacttgtaaagcaacagacaatttcatcatggctaacgtgataggaagaggaaacacgtggacaggactggccttaggcatagaggttaggcccgcacctagggcccactcattttaggaactcaaataaaaaaaaatacctttttaaaaaatatgcatattttttttaataatttattttttttttaataatttttttaaaaatacctattttattatttttatagtaagggctcaatttttttttcttgcctatagcccattttaattgagggccggctctacatgtggatgatgtacaagggtatgttttccaaagtgttatgagaattagtaacacaacaagagccaatttgcatatgagtttttggctctaactatagattgaaacacaactacttaatccctcttttagggttttgcacagttgaaaatgaaaagtttttggtctacaaacacatgcccaataggaatctccatgattacttacattgagttgaaagcaaagatgatatcctgcaatggtgtatgagtattaaattttgcatgggaatagctagaggattggcatggttgcatcacaagtatctctcgatttgtttttatcgtagaataagctcgagatgttccttacttgattcttactacgagcccaagatatctaatttcgggaatacaatcatttcaaaccatggagaagtaatgtttgtgtactcatagtgaggtgtgagagtctgattttgttaagaaggatgtgtatgattgtagaaccgtgctgctcgagtttaattactcggaaggaaactggctcttgctcttgctctgagttgtgttacctaaattagtatatccactataaaaaatttctattcataataatcattaattctatagctaatttgttgcaagaaatcttaaacaaacacaaagttttgtaattaagaacattacataaaccattattataaggcactttataacacccaacactcataacataacaaatcattattgatgtcttgtctcacagagaatatgtgagagactcgatattaaattacactgataacaatagtaaatcaaatccaattcatttttagactaattattcggacccaaaagggagagaagaaaggtcctataatggcttgatgtttcagaatgaactgcatcattcaatggtttcttgtacttcttaagatattcagccttaatgtattgcatatctatttcagtccttgttacaattactctaatcaatgtggtgtcattggttccaaaacctttcattgccttgtacaaaacctgttaaaatcgaaaataaattattttcattaaaataaagttatatatttctccattggtgaaatcaaatcggccaaatgttactagaaattcgagcaatattttctttcaaacaagtttattcgttatatgctagttcactttttaaatgaatttaaaagtttgttcggttggtaagaatgaaaatataaaaaatggaatcgagaaagagaatgtgaaaaaatatgaaagaaataaattaagaaaattattaattttttttatcttgcattgaaatcaaatttttacctattttgaaatggaatagtcactttactgaaatagtagaaaagtcattcgaatactttcaaatgcaaccaaataaagaaattaaataaaatttgtttttttttctaaaccaaagacacccgaaacaaggtcggcccgagaatggggcaactaggatctacacccaaagcctttcaccttagtccgaaaaattctttaataaaaaagctctcaatttgatttttaaattactatattttgtaattttactattatttattttaaaatacaatatttaatattttattaagaataaaaattcaattattctttcaaaacactatattttaaatttttaccacaaaatacaaaaaaattatataaattttttcacataaaaaacccaatgatatttttttggccgaaagcgcctaattgtcttagcacggacccgaccctaagataaaaaaaaatggacagaagcaaaaaactttgtcttaatttcattgagcaccaaaaactacagcttgaagaaattttacctttgcaaaatacttcggaggattttcagcgcaacgaagtattgtcagaagaccgtgctcaaaataacccgaagtttcactctttattgcctgaaataatttcataccaacagttaaaccgaaactctgttaaaaatgtgtggaaatataatacaatatataagagcacgagttattccatggaaccgctcgtgccttaccataactaaatcttcaatttgtacctttttaagggatccatacatgtcacgataagccgaagcaacagcaaccaaattcgatctgcttcgttggctaaatatgtggatgaatgtcttctcatcagttcctaattttttctcccctgctttgtacaaatgttttgcatcatttaccgccatctctctatcgatttcgggtccttcataacgttgtgtactcacatatgctagtaagagctgcaaccaatatatttagtaatgagaaaagtcactaaccatatggaaaacaaaattgttatgcctcaagttatcatgtaatgtttctaattaagctatcaaatacttagatttagtcttatgtgaagaggcattgattggtttttttagttatagatttttaatgagaataatttactaataaagtatatcatttgtgtctgttacacgaaactaaatggttcgaatgaaatccaattaaaaaactcgaggtagtttccaagtttctcgaataacgtggttttatacgatagatagaagattcatctgtataaatattgtaatctatatacaaaaagttggagttttcaagtttctcgaataatttgagtttatacgatagatagaagattcatcagtatagaaattgtcatctatatctaaattaagtcgtatactttagaagaagcttgtataatttggaccaatatgcccttagacacgactatacataacatagaatttacacgctaaaatagcatgtgctatagcgaaactgattaaaaaaaaaaaaatcggtcacattaaagtttgtaacaaaaatgtaatgagaaaaaagcatatagagaacatttaccattttatgatccccagaagtgtagttttcaatatcattttcaaggtacactccgaatttcgaatagtaaatctgcttaaaatgctgaatctgagacggtgttcgcgaacatataacttcagtagcgccttgcagatcaagtatgtcgggattcagcgcttgcttaacgatcagcgcatcccgaccagcaggatcatgcatccaaagaagaaccgcaatctaaatagcaaaaacaaaattctaaagctaaattgcaacacataatttaaaatatatatttttcgttttttcattttattatctcaaaccaaacgcaacttaagttcatattccgagaagctaggaatcataacatttataaaatgtcgctttattttttatccaaacactcttaaaagacggaattagtacctctaatttgccactaagttccgatgctaagcgtttcgaaagatcttcggaatacattgatttgtactcttgttgaataagaacacgttgtgtttgatctctatgagcaagaacattaattactgctgctgaatcacaaccaaaccctccaaaaaaaaaaatcagtgtctgggtgacaagaacatgtgtcaacaacatgggtttttccaaaaaccattattagatgttcctattacagatc

SEQ ID NO: 229565 - DNA, 2898 bp, Cannabis indica
aacatataactaatagattactaaattttaaaataaatatttgtccacgattggtatttatgtaataagtcattattcattttgaccacttaattatcttaccatataatgcggttcaaacaaattatatttgttaattatatttgttctaagtcacattcaaaatggactacacctaaagcccataatgatctataaaattctaaaaatgatataatttcttagaactttgtaaaatactatttaatgagaaaaattctaagcaatccactgtccccacaacgagattactaaaattatgtactatataataatagtcaatattttagttatcacaatctaccctccttaaaggaatttctttctcgaaattaactcctacccacatatacatggggcatcgttccctcatatctttacccaattcacaacttttctattagaatttccactctacaagaccttatctaggggtatactcatatattttagttacccgttctaccactcctcctaacgtgtcgtaaaactcatgtcctgatgtagttagaaattctcatacttaagcatgtgtgtgggattgaatacctaccttctccacatgaaaatgtagaattctgttatacatatctgctatagcaggtggacctaaatatcttaggctttacttaccatgcataatatttctatattgaagtaaactttaagaacatacggttaccaacagtacttaaccttttatcacttttaaatcctcatcattcttcattcgctagagcggcgggcatactctatcatattttgtctactatattttttttttgataattctcttacttcttaccgacttataggtagtacctcactccaagtaaatttagcactcaaaaaaacatcccatagggttgcatacgtattgtggccaaccgattgtcatcatacggaaataaacacttactcaaacttaccaggaagtataccagttgtatcgtcctcgcttcaagtctccattaggttctcacacccatggaatgatggctcttatacatgagtacatcactttagctactttctagacgatgctacgtgaattcatctgattatctaaaggtttgtatttgacctaacacttgaaaagatactaaaattcagatttaggtcgccttctttaggaatacaaggatcgtatcgttttcataagttttaatgctccgctcttacgtactggcatgtaggatgtctaatcacaaatctaattgccgctttttgcatactcatgcatcttttacctaatcattgtactattttacgactaactcaagatgcatatagtgtggggtaggttgtgattccgtcattctctcggccttaagtttccattccagtaagtttactccttgcctttgagcagaaacactaacatagttgctttcctggctacaaatttagatcatatcctttgtttcatactctccttgaggttcgtcaaggtgtaggctactacatattaggcgtaggaagctttcagtctctcttcggtctttgtgtgccaacaactcttgaatactatcacgcttgtaggatcagccacaagttctgtattaagaaataagcattttctgaaagttagctctttgaaccaatagttttgatcttctaatcctccagtttagtcgagccttctaactcaatttggggtcgtattttagtatccttaacatccttccacaggttggagtatgaaaaatataaacaattcgacaacgaactcctccacctaatttttgaacagtcacaccatcctttgggcattgaataatttaagactaaattcttagtgcccccgctatttgagtgttgcttcaaatgtcatactcttttgtacttcttgttcttggtgtctagtttaagtatttaatcccgattgaagaatcaacattactttaataaaaagaagattcctaggtagaggatttgattgaagaagaagaaaaaataaataaatctttatttacttaaaagcgtactaaatctactagttacatagtcactagattattggaatagaaagaaaaatattttttttgtataaattttgacaagttaaaagagactattattcgtcctccacgtatgactcggcttcagattcttcagggtcttcttccaggtcttcttctgggttttcctcaatgtttatttccatttctacatctgctgaaattggtgctggcatgtccttagattcagagtctgactcatcgatttctacttcaaaattataatcaggtatgtcatcttctggttcatcgacgttggttgctgtgaatggatctaagtcctcgctctttagtattggagagtaatctggctcattggacccttctggcatttcctcatctttggattcttcgtctgaagaaatctctattacttctactatttcctcttcttctatttgaggtgggcgttttagttcaagttctaaaatttctgctgtcacttcaaaatagtctggcatttctgattcttccaaatttcattcatttgttacgttcacagattcagttatgtcctccatacggccgtcacttagcttatatcgtacgttcttgacgtgttcttcttccatgccgtttgtttccaaaatataagtcttttagaaaatgaagttgtggaagtcaagcgccagttcacatatgaatgttgcgtatccaattgcgtcaccaagatttgagacacggtgccagacatcattgatatgtaagagaagttcggggacatgtgacaaagaagcccttagcactagaaacttttctgtgattagattaggctcccctcacctctactactctttttatttcttcattaattacgatgacctctcgtagagctcta

SEQ ID NO: 229566 - DNA, 854 bp, Cannabis indica
gcacgggtgttccgctgcctgaaaaggtgagttagtgacatcaggcaaccatgaatcacaaagaacactaatcaaagaactagaaccaacattacgccaagcccaaaagccccaacctgattaaattatgtgtttcaaagatgctcttctagatgaaactaaaattattaccaagataagttgttaaaaaagtcccgcgaggatagtaccatgctttgtatgtatgctgtcagaagaatttagacaacactaaatttgtgcaagtatttgaaggaaataagaatactcaattatagatttgcgagcactcacttaaaatagcgagtactcaaactattggctatagatagacaaaattgataattatttgagaaaaagatacaaagaaaataggagaagattaaggtttcattccgctgcaagattcaaaaagtatagaaatacaattaataagaaagtcttatacaggcaactaatacaaaacactaaaataaaggaaaagactaaaatagccctaaataaatatttaacaccctccatcaaactcatgatactgctgcaagaagcatcaagagttaacctgaaagaaaacgaaaaccaagaaatcatatgtgacttagtaaaaatgtcagcaagctacaacgacgaaggaacaaaaggcaaagtaatggtgcccactttcagatgatgacgagtaaaaaaacaatcaatctcagtatcactactacaaaaagtataattcctgtcagtttgtaagtgtcacttaaagaatttacattagtctagaaaaccgatgtatataccataatcgcaaatagttttttattagtgctatttttgaaatgacgcaaaaa

SEQ ID NO: 229567 - DNA, 1280 bp, Cannabis indica
ttttttatataattttaacataaattacataacttctccatgtattatgaccaacgtactttctcatcaatgaagtttctgttatttttcaaaaaataaaaataaaaaaactaccaaaaccctttttaaaagataccatgacacatatgctgtatttaacattgccatgttatgaaagttatttagaacaataccatattttggggtataaatctcaaaaataccagcattgtatttacgtgcaacaatataccataaaatttatcttctttttttttgttgcctaatttttctttaagacaaatattttagaggaaatgaaataagaaaatcaattttttttttttaattttttttgaatttggatacaagtagatgacatgttagttgttgttgttgggggagttttacgatgcagtagtaaacaggtaccataaaaaaatgggtagttgcgtcgtcattgataataataataagcccatgacctatcatccatgcattattaaaactgtccattcagaatctgattcattctgactcccaacatttataatttatgttttaacaacacacacatcacatcaatattcaatacaacctattccctcttccttccaactcacattttactcaagttctaaccaaaaaaaaaggccaagtaaattgtggggtaaataattaagtttatcattggattattccttacaaaatttaagtttaatttttgactgcaataatagttaagatatatttttagaatttttgtatgtgttaagttattattcacgtgttattatattattggtatatttaaattaatttttaaataaaaaataaaaatttaataactttgaccatttaaggactgccatatgatcattaacttgagacttaatgtcaagtacttacgaaagttctaaaaaatataatttaagtattattaccgtcaaaaattaaacttaaatatttattacttatatatttatggcacaaattatccatactattatttattaagaatctcattacatatttctcaagtgaaaaataatatcaaaatttctccaaatttaatttagggcaaattatatttgcattccttatattatgggattttttcaaaaatatacgtaaaatatgaaataattataaaaataacttaataaatctcaattacaataatatattatcatgtcattaaaaatacattaattccaaaataatatacctaaaataaaactgatctcgaaattcaaattacttttttttttattttaatt

SEQ ID NO: 229568 - DNA, 2043 bp, Cannabis indica
attacagaactgcaatcatcactaaaatataagtgtttgagcagtatttgagcaatggaaggttcaagaatgcggatcaccaagcggtggtgaactcaaacacgagtagattatcgatagcaacattccaaaatccagcaccagaggcggtggtgtatccattaaagatcagagaaggagagaaggctgtgatggaagagcccatcaccttcatggagatgtacaagagaaagatgagcaaggacattgagattgctaaactcaaaaagttggcaaaggaagcagacgatgacgagaagaagaagaagatgaaacaatccttgttcgacaataataataaggaatcctttgaatccaagcccatcgacaaactttttgcttagacaaatataaatatataaatatatatatatatatatattatctttttttttttgttttattaattaattaaataataatcatcacagcctcggcctttatatgaatatcatatcatcttataagctgtgagtttatcattgtaagggaccaaagtactgatcaagatcaatgtgtgctcttatattataattttcatgtaatcttgatctacatttactttgattaatggacggttataaatataatgaagctgttgagataccaactttttattatttttgtcataatatatattgttataccaagaattaaataaaatgaaacgaattaccaaatgaaataagttgagtcacggattatgttattttctttaagatgtttagtggctttacttaaagtgtccacggcaatatcagttactgtgtccctaggaaaaaacaataccttatacaaatctttatgctctgaatgatattgcgctctatataccttatacaaatctttatgctctgaatgatattgtgctctataacaccccaaaattgttctgagaaaaattgtaagaaaagaagagattttttctgtgtagatagaggatacattctctcgttgttcagatacgacttataaataaaatcctatcataaaataaaacggtaaaaaacgtaattgggatcgtgggagtaacattggttcatgacagagaaaaataaatcattaattgatcgcttttactactttattaatcaacacattataaaaataattaaataaaaaataaaaaaaatatttattttattagataattttgttgtaaaaaataaagtgacaccacaccaatattagctcgctagctcaactcaacacggtcggatggcgacgggggcgtgcgcgtgtgatgatttagtttgtgaatcctcaaccatgcacacaaaattgggtgacccttagagtccaaaacccaaatctcatactagcacctttatatacacttatgaataagtactgtttccaatatcactgtgaagactcggtttgacaaagtcaaatcttatatatataataataaataaataaatataaagatatatatatatagtaatattaaaaaaaatcacatttaaacctccccatttcgtcctcttcctcacacactctctctttttctctactctttaaaaacacaaaaggaaatccacaaaccaccatcaccaccactctccggcgacccatctccgtccaccgtccagtcccacacaccggacaaaacgaaacccctggtgccggcgacctcaccccccaagcggtgtcgcttctttcgcactacaagaattatgggcaataccaacgccactattaccaacgcctaaaagtcctcattaaaaatgaaggtatcaataacgacattttaatgtcgttgggaaagcaatttaatttttttttgttttaaaaaaaatatttattaaaaacgaatatttttttcaataacgacaatgtcgttattgaaaaactattcaataacgacattgtcgttgggaatgtgggagaggtttttgaaaaggagccgttgaattaggcggcaattttccccccaaaactgtccccaacgacatacccccaacgactatgtcgttggtggcagactgacacgttgcagtg

SEQ ID NO: 229569 - DNA, 2606 bp, Cannabis indica
aaacaacatagaaccaaagaaacaaagaaaccatgtcatacgacaagacctaacctgcgatacaactgtccaaccgctaaaaactctaccaacgtcctctggttttggatagcatgaagaccacttgaatccgccaactattgtgacgttcaggcgaccagagacactggcggctgctactggaggagcaccatgcgactgcctactggagaagcatgaagaaacgcgcggctactggaggagcaccgtgcgactgcacctgcaacaagccctgaacaaaccgatcaacctactctagtgacgcagaaacggcggttctgatacggcggcgctggtgaagctttgtcctctattacggcgtcgttagtgttctgttacggcaatagggttctaacagtgttatataatttaactattctttaaccaaaaaataaataaataaaaaacaacccttctaaatctatttaactatttctcccaaatttttcttctattttctaaaattttttaaaatatctaattttcctaaacaatatttataataaaataatattaatattaattaaataatattttcaaactctacccattctatttgttagttatatatatacagggcaagaccatggtaggactcaacaaaagttctctaccgatagggtacttttttcaaccatcgattttaaattgtgtggttattatagtttaagatatatattcttatcatataattaatgtatacaataaaaaattttatactttttataataacatttatttttaaaaataaaaaatattaatacttaaaaacaaatcaaacttcattttctcactgtccattacaacattcttccagttcttccaaacccacgtagcaaaccttctctgcagccagcccagacgacctcacggcgacccctcgacggcggcttactaaaaattcaaatccctaaatctatggtctttcaatcgagacacctttctgttaattggaagttctccaatttatcttcaatctaagaacaaccaagatgagttaagaaaggttagggctctctctgtaaacaacatgaaagcttgagagtgggggtcctttcttcaatcattttagaaaaaacaaaatataattacatattaaataatctgatatatttgtcaactataggctacatgcatttagtcctttttaaagttttgattggttaaaaaaagtaccctatgctatatgttaatttcacttggtcctaccgtagcaattccctatatatataaattaattaaaactcaaaatcgtaaagtacttctcccagattttattcatttcatttctaaatttttttttttaaatatatatatatttaaaactaaaatggttaaacttgtattataataacaacctaatatatatatatataataataatatctaataataaattaaagagtaggtaaatactatttaggaccctttattttataaaagttactaattggaccatctatttgttaaatgacaaaatagactatattttctaaaatggtaaaaatagtactctgagctcaatttttcaataattttatgaaaacatagaacttcagctggatttatcatacgaagatcaaccagttcagattttagacataaaagataaaatctttcgaaacaagaccatggcgttggtcaaggtgctttggagaaacagtaaggtggaagaagccacctgggagttggaatccgatatgagggctcaatatgcagagttgttcaggttagattttgaggacgaaatccttttaacggggagataattgtaaaaattgcttaattttgatatgaaaattagcagataattagggtttaatttagaattagattttaattatgatttatgaatttatggtagatatattttgaattctaggtgtattatttatgttatctataaaattttatgtttttcatattttatgtccggtaacagtgggacgcgacgtttggccgatagagtcacattttcttatggtttaagtgttagataaaaattaggatttatcctttttattcaaaaattagaaaactagaaaagaatcacatctccctctctctctctctctctatatatatatatatatctatctcgctctcaagaaactagcaggagttagggtttcttcagcatgattcagggtatacttatttttggtgattcaacctaaggtaaacatcatagctcccttctctttatttttcctaagttcaagctatgtttctaggcatgattttaggagttagggttttgtggtgttaagtgatgtttgattatattttcagatgttgttttgaagttatttaagttgattaagttaggattgatgattgttgttgtgtttgagcaaggtttgaattttagagctcaagctttgctctttaatggtgttttgtatttttgagatttgtacctagttttattgcttgaattatatttgttatggcctaattaggtactctagaaggtttgagatgatttgggatagaattgagttgtgtaggagggaatttgtgttttctgcactgaaccgttcgaccgattcagttggacctgtagg

SEQ ID NO: 229570 - DNA, 570 bp, Cannabis indica
aaaattaattttacatatagtaatatataattatactcaattactagaaaaaaaaaattagtaagaaaaaataacaaactatatttacaattacaacggttgtcaaatatctaaaattacaattatctacatatattaaataatctatatagaaataatattaaatttacacctattgaatggattaatatatgcatatatttaaaaaaaattatactaataaataaacaatgtttaagtattattgtataagtgaaaataataatataactaaatttaaataattaaatcctctgataccaattatataacaaaattaattttacatatagtaacatatgattatactcaattactaaaagaaaaaaattagtaagaaggaataacaaattatattcacaactagtacagctgtcaatctgaaattataattatccgataaatattaaataatctatatggaaaccatattaaatttacacctattgaatggactaatataagcatatatttaaaacttttatactaataaataaacaatgcaaatacaatgtatccgaatctcttttt

SEQ ID NO: 229571 - DNA, 885 bp, Cannabis indica
gccttgtccaggtgtggtttttagatactgcaagatacgatgagcagcatgtaggtgtggagttcgaggacaagttaagaattggctcaaatgtttcacaacatagtatatatcatgtctggtgataattaagtatattaattttccaatgaggcttcaaaaaatagtggggtctgggagggaactccctttgtctttgcttagtttaaggtttgtttctatgggagttgaagtaggcttggctcatatgtaccctgtttattttgacaattgaattgtgaaaggtctttgcagacagagatgccttgttttgtttgaacaacctcaagaccaagaaaaaagcaaaatgagccaagatctttaagtttgaatttgtcatgtaaatatgttttgaagtgagaaatgagaagctcattatttctagcaacaattatgtcatcgatatatattaggactgctagaaacaagttgttggtggttttgatgaataaagagttgtcagagaaggattgatgaaagccatctgataagagggtgtggctgagcttgctaaaccactatctaaaagcctgtttaaggccataaatgcttttattgagtttgcaaacagtgttagaaggtgccttatatcatgggggtattttcatgtacacttcttcatgaaggtcctcatgaagaaaagcattgttgatgtctaattggtggacattccaattgtacattgcaacaagtgctagaaagactttaagaatgttggaattggaaatgggaatatgtttggagtgtcaatgccatgtctttgagtgtaagctttggctacagatgagctttgaagcgttcaacagccccattttatgtatttgatgactttgtaaacccatttgc

SEQ ID NO: 229572 - DNA, 657 bp, Cannabis indica
gtatattcccaattcttcattatctaggggctttggtaggatgggagactgagcaagttgcttttttaattgttgaaaggaaacttctcactctcttttccattcaaacttcttatttccctgaaggatgttgaagaaaggaacacacttatctgtagactttgatacaaatctatatagtgctactatctggctagttaaactctgtacgtccttgagatttataggaaatttcatttccaaaagagcttggatcttttcaagattttctttgattcctcgggcattcactatgaagccaaggaacttgtgcgagttgactccaaatgggcacttaagggggttaagcttcatgttgtattctcgaaggacttcaaagcacttattcaggtcttttgtatgcccccaacctttttgcacttgactaccatgtcttccatgtatacctccatgttgtggtcgattaagtccttgaacatcttatttacaaggcactggtaggttactcttgaattttttagcccgaagggcattactttgtaacaatacatggctacatatgtcagcaaatttgtatgttcctcaatcggcaaatacatcttgatctgattatcctgaatagatatccataaagcttaggatctcatgaccagttgt

SEQ ID NO: 229573 - DNA, 1256 bp, Cannabis indica
attgtgactttctaaacgcaccctaaacattatttattttaatacaaattattctacaatcaattaataaataaatggattaaatatatgcctataaataaacataaaaaataatatttatattatattgtattattacaatatataattatatatatagataccttgaatacttcatcctttcacgataattttaataataataataaaatattgtcaacttaaaaattaaatttgtggaccagacttgttaatgttattattataccacaacttgaaatatatataataaaatataatgtaaaggagattatgcagttggttttataatataattaattaactaatatataatataactactcatttcttgttaattataatttcttgctaaaagatgtttttggaaaaaattgtgataaaaaatatgtttggtaagcagttaaaaaataattttttgaaatttttttgaagaagctacagttaaaagctaaagctgctccaacccaacttttagaataagctgttttgattaaaaggctataataattttttttttactaaaatcatatttacttatttattatatattaaaaaaatttaaaagatgaaataaataattattaaatctcttattttttttaaaaaataatttatattttattttaatattaaaagcaacatcaacctagaatttttcttatacatttgagtttttaatattttttacatttgataaaacataataaaaagtactataatttatttttattaaatgccctataaatttatatttgaaaaaaaattaaaaatatatagaaaataaaatattatataaaataaaattttatatttattataataaactagattataacattatcattattattataatagattttaacaacttacagtactttgaaatttataatttaccaaacaattagcttaatttttttttcatagttttgctacaactatttttttccacagcacagttgtgccaaactggccctgagtacgaccacacatatataataatttatatttcaactttcatcaataatttatttacttttcatttgattccacaattactgatgttactattttatatatatatataaattcaaggaaggagattcgaacttatgatctctttttttgtgtcgattaataaattactttgcaatcatgtaaaaataagctaaaaaaaattagtaagtccataacaattgaaccaagtaatataa

SEQ ID NO: 229574 - DNA, 800 bp, Cannabis indica
aacattaaatgttatttctgatctatattaataagtaaatctgattatactgaaatgagttttatttagggcataaaaccccacatattatggggtaggaaaataattgaaaagggtgttaggtggagggttcaatcgggtagagaagtgcgcatcaatgaagacaaatggctgcctcgttcctccacctttgctcttcgcacccctgcgaaagttaactgtgggacaactttggatcaaatgaaggataatgaaggtgggtggaaacaagatgtaataactcaaacatttcacccggatgatgttcccattgttctaggtatggctccttgttttagtaatgctaatgatgatttagtttggcactacacaccaaatggtatgtatacggtgagtagtggttataaagtggccaccaccaatgagataaatgcagggccttcctcggatgagaattataggagatggtggactgagatttggaagttggaagtccctcctaaggttcgaaattttgtttggcgtatctataatggttggcttccggttaacatggtgcttagggctcagggtaggaagatagaaccatggtgttgcggctgtgggactgagtaagaaacaatagaacatgggctatggttctgtccaacagtaaaggaaatatggcagcattttttgatgtggaagaccattaaaaggtggaaaggcgaaacaaaggacatgctcatggctataaagcaacaaacaactcaagcagattttttaatgttcattatactctcttggctcatttggaatag

SEQ ID NO: 229575 - DNA, 2066 bp, Cannabis indica
acgtctgcatcgtaaattcatgagtgattctaatcactttgtaacaaaaaaattagaaaaaatttattaatttttattttaattataaacatatatatcctttttttttaaaaaaaaaaaaaaaaaatatcataaattatccttggatcaactcgacctgcctgttgactgatctatgttacctattgaccccctggagcttcaaagggtacgaagttatctctgttttgcggaatataattctccacattaattggctgattgttgggtggatggacaaagtgtctgtccagtttcctctcctacgattcaaatcgtctcaaagattagccatgggctccatccttaggaagatagagttgcctagagctcttttgtttggttggctcgtagaccgaggaggattatcaccgttcagaggattttcttagtttctttcatgggtatgtcgattatcacgatgaccattattgtgctgtccattatcagctttgtcatcattcttacttttgtacgattgtctactatgagacctcgtttagtcttgtcaaggttgttggcgggtactctaagtctacccatagacttggacccatccattttggttgtatgctgtcacatgtcctcaagaccgcccagttggtcggtgagttacatcgtctcttcatccttcaggatagggacgaaatttgggttgatcataattcattccaagatagtgaccaagtaagacttggtcatctattgggttgccaacagtctgaccttggggcctagagttgaaaggtctgtcatgctggggtgattgcacataattacttgggcatgctttcgggtcgcattcttgtgtctcgctcgggatgtaaggtgcttttccccgattaggatctcttctgagtgtgagttttctagtacatgcactctcagtctattgatggaatcgtttgatcaagtcagtagtttcccttgattgatgattgattttctcttgtcgagcgcgcatggactcaacctgtctatcattctattcttcaaattcatgcctctattgttcaaacacataattcactacaacacgtgttttttcttgattatagcagagaacattgatatgattctgaacttaacctaccccttatggtctccatattataattttcccccaaattaatttaatatattttagaacccactctaattatactagcaatgctattagtatttttttcctccccaaaacccaagattaagtctacagtcaaacaagagactttttgtatcaactatcaagtatatcaccccttaaaactgttggaaaatgatttttatttatttttttcattgaaggggtaattgaattcttctccgtcctccttttatttatttattctttatgatgaaaataggcttatttcatgcaatcaactctcactagttctacaatataattatcaaaaattcaaatagagagattgtctttcttatttcacaaattactaataataaatatggtgtactaagtcccaccaccatcagttacgtaaaagtgttttttttttcctttttttgtagataatagttacgtaaaagtgtgagtgtatagggttggacatataaaattcttacgactccaagaaaaagaaaaggacaactaatcaaaattgagttgggtttggggctatttgcttaatcacataactatatccactaattagttattggtattagagttgtagtaagttttaagtaacaaattgtgtgacataattaaaaaacgcggctctaattcttattaccacaattcaccgccgccaaacaagacctaattttataacaacattaccaaaatattcacaattctcaaccagccgcgtccacaccacttaaattatagtcaaaacccaatagagagtttttgttttgttttattttctttttaaattattattaattattttccccaaaaataataaaaataattaatcaataatattttcaggggagactggatttagctccaagaaatcttgaagagccaaatcgtgaagaaacaaaaacccataatt

SEQ ID NO: 229576 - DNA, 1026 bp, Cannabis indica
aaaaatattatacataaaaaatatagcaaaaaaatatttgtaagaatggtaccgttcattgggtcatccatgcagtcaaacaagccagtactccaacccccctgttgtccatacgaaggctgtggagtttggaattgattatgcattgggaaccctttccctgccccattttgttgagcaaccgctccatttgggtaattttcctgtatcccaccaccaaaacctgctgctcctcccccgttcacttggtggaagttcagcggcgacggagcagtttggctagctggttgtggctgttgagaggtcactgttggtgggcctgggcccatattattttggaatggtggtggtgggtgttgtgggtaggcttgaggctgatgggccccattttggtacattgggttgggttgctgctgatatgggtatgggggcatctgatgctgatattgggcttgagagatctgattatactgaggttgtgggctttgaggtgagaaagtcctcccaggctgatttggcacattttggaagttgaaattggcttgtgggttgtgttgcgggaattgagagggactggcaggttgagtttggttagcttgaaaatggtattgaattggttgttgttcctgtgctggtgtttgcgccgaagagcattgacgttgaggttccgatggcggaggggggagttggtcatgcaaacggttttctgtggtgaatggtggctgctgttgttggcgttgatcgtgataattttgtttaccatcattgcttgatccattgtagcgttttctctctaattcactatgtgtatgactttgctcagcttggttgagggaaggatcctccattatgtgaatacgtctctgctttctgttcttaagatagagaaagagaatcaaggcctatattggacaaacacaatgtgtctaacatttccatatataggaataaaaagtctcgcttattttcaaaaagaaaaaaaaaagacagtaggaaatgcaacaccaaatattatggctggaataa

SEQ ID NO: 229577 - DNA, 2352 bp, Cannabis indica
aggagtttagaatcaaagaaccagcacctgtttttcattctttgcttgaaatagcgtcgtcgacattaagcttcagttttctggtctctagagggagccattccttatgtcttgtttggttatgagagggaagacgagttttcctctccaatcactaagagtgtatttaaaaattgtacctgaccacaccctcttaatacccttacactcaaataaagcatgttggacagactcaagatgcaggtcacgaacgaggacaagtgggggagggtgacgaattttgtgaaacaatttttagttgtggcaagggcattatgacagagatggtagataaagtgctttatcttagggaattgtttttcgcctagagggacttccaccaagacttgagaatgtcattgtttgaggtagagggtttagatatattagcaagggatttggcaagatgataccatgttttgacgaaatagtggcctgaggtagtgtgctgccagaagagggtattaatgtggttgatgtcaagagggggtagagacaagacatcatggacaatatcactaggaaagttgttgtgtaggaggggaatgttccaatcaccattaagggagcaggttagaatcattggtaaggtgattaggcagggagatgggaggaaaatggtaattagggatccaattatcatcaaggattcgagtggtggcaccattaccaattctccaacagagcccaactttgaggaaagatttgccccagtgcaagatttgccatacataagaggtggagtgtcctaggggtgcatcaagaaaagaggacctaggaaagtatttagatttaaaaagggttgctagaagggaagcttggttggttcgaattctccaagcatgtttagcaagcatatcctgattgaagggtttgagggattaaagccaaggcccccaaaagtctttgagttgcaaagggccctctaattcttctagtgaatttttacagtcaccattattcgatccccaccaaaatttggccatctgtttttcaacaaaattccaaaaagagattgtaagtttgaagacagacatgacataggtagggatagcgtggatgacagctcttagcagaatttctttacctcccttggagagaagtttcccttggcttttggaaagataagaccaaattatatccttaagagggttaaaagagtgaattttggatctgccaaaacactgaggtagtccaaggtactgatcaagatgattagtagatgagatttgcatataatcctagatgagggtttggtaagtaagactggtattgggggaaaaagattgaagatttattgaaatttactaattcttaagataatctcatacttggccagagcctttttaatggcattgcaggcctcgatgtttgagcaacaaaataagatgttatcatcagcaaaaagaagatgtgaaatttttgaggtaatgcgagcaatcttaagaccaaaagttgtttcagtgatttcagattgcttaagaatggaggaaagatccttagagcaaaggagaaagaggtaaggtgaaaggggacccccttggaaaatccctctcgatggaatgacattgccaaaggcttaaccattgatattaaacttaaaagttgcagaggacaggcaagtcatgattaaggagataaattttgaagaaaaccaaatttttgcataatcttattcggaaatctccattcaactctctctaaagtcttggccaagtccaatttgacagccatccatccaatcttacccttctttgtacttttgatagagtggaaaacttcttgggccataaggatatcatcataaatgagatgacccatgtggaaggcactttggttagggcctgtttctccagcgtagaattggatttgaggtccagttgttgttcaaggaggctgtcgcctcctgggtccttccttcactgggaggtgccaatggtggatctgctgctggtcatgccacttagatccaccgagatgctcacgtcaggttggccagctgtgatggccagacttgttgaacctattgtggtgacgggactgaccatatctgcagtattcatggggatcccagttgtgactggaacccaagtgtctagatctgcaatctgtggatccagagggagactcaaagatggagatggtgccataggagttattcttgtgttcaccatggcgtttgatcagatcacgatatccccgttctaatgaaagaaccaaatattaccctcaaaagtgatcaaccgacatcgggtcatgcagatctatgctaatgaagtttctgttggaaattagtttaccaggatcttagat

SEQ ID NO: 229578 - DNA, 858 bp, Cannabis indica
tactaaatatgtgttgtagcctattgttaatttaattgatttaacaattaaaaaagttgagattttaaattccaatagctttatttttctattgggctctaatttttatttttacctaaggctcgacatgtttatgatctatttatgatatgttaatgtactaaattaactttaaataagttaataatgaattaattttgtgttagccatacctgaatctgaagccgacatgtttattaagtctaacgttaatatataccgaaactcatttaagatgaatttaaatcccctacggactctcgatcgtactaattttgagttatgctcatgtttgactcaatgaccccttttgcccaccttagtgtgtggaagaagttagtgttgtgtctcatccacaaacttaatttcattttctaataataataaattcacatataataaatatctaataaataaatatgcatggtagatgtgtggacacgtgaaattgccctccccctctcccacgtacccaagggaattaatgccacatttattaataattaatgatgataataagtcaaaatttaggtattattattattattattattattattattattattattattatttaaggagtattgctattgaatattagcagtacttaataattttataagtgacactttataattagttaacgatattcgttaaatattaaaagttctttttaagttatacagacctaatacttaattattgtaatagtaatatgacactaaagataatattagataccagtattactttttagcaattctcttatttaagtatactaagcccttatgcatctataatatgtgtacaattaca

SEQ ID NO: 229579 - DNA, 1085 bp, Cannabis indica
ctatggcttctagtagtgggtccattaaggagaaaaaaccaaatgggttgatatttgtattgatggggaagaagaacatgaagtggtttttgataaagaaaaagaaaaggaagtcaagttcgattcgagatggtgtcttgttagttgtttgtttacagtgaaagtattagaattctaattttttcagaatattatggcagatctttggaaacgagggaagggtatgattgtaaaaattctcgaccaaaatctatttctctttcaatactactatgagatcgatatcgaataagttatcacatgtagtccttacacctatgatcgaaaataacttatattggaacacttgaaagaaggggacaatcctatccctcccaaaataaaaaatttcatgtggagaggttatgtaattagtctacctactatggttatgcttataactaagaaagtggttgtgaatagtttgtgtccaatttgtggtcttcgtgataaaattaccttacacattttggtcacttgtctcttggtgagtcagtattgagaaatggcaggagtaacaactactatagcagttggtatgacattaatggactggtgtatgattttctttcaagcagccagagctgagaaatgcaatctcattacaattctgtgctgggcaatttagggtgtgagaaatgacaaggtatggcaaaaaaaaagtcaattgatattccgtatcttttcgcattcgctaatagttatcttgcacatttgagagctgctcaaacttcagaaatggagccatttcaatctggtttagaatcaggtgatggtgtcgagtggtggtgtgttcctaaggctaatgaagtcaaggtaaatgttgatgtatcagtttatggagataaccaaggttacagtcattgtttagttgctcaaaatgagcatggcttttttatggaaggtgtctctcgggcctgcgatggagttgtccgtccgaagattgttgaagcaattggcatcggtaaggtgttaagttggattaaaggaaaaaagtggcgagctgttactcttgaaaccgactgccttgtagtcgtacaagcaat

SEQ ID NO: 229580 - DNA, 1745 bp, Cannabis indica
gcattgcgaagaaatgaataggtgatgttacagagccatctggttctaaaaaaagacctattccagataagattgagtctcgtaagagaaagagagcaaaatcttcgaaatctgccaaggatgtaagttgggttatgttgtgtaggatttttgttcctaacttgtccctacacacaacaacattaatcaataaaagccaaggttaagtctgacctttacccaatcaaagaaacttttgactccctgcttttattttaaccaatacgacaaccccactttttaattgtaacaggtcattttatatatatatttttttagaaaccctaaaagcacataaccctaaaagtacataacatcacacacatatatatattatctcatttcccaaatgcacacaaacagctgcacattaaaaaccctagcagagagcctatcttctccttcttcttcaatgttcttctatgaagaacatgaaaaaccagcagccaacacacccagaaatcaaagctcagcccagttagaatcaaccccaccgagccttagtctttgtggttcttcactgaagaacacaaagacaacaacaacaaataaacccagaaaaataacccctaaaccgattcaatacccaggaaacacaaacagaaattaaaccaacataatttcacaaaacagagagaaaaagagagataacaccagatttatagaggttccccaaagaatctgggtacgtcctcttgagctcgcctcttccactatagatcttcaatgatcaagagattacaaagcttggattccaactcaccacgttttgagaggtaatccgaatctatatatgtatatatacagtgttttactcctctattttcctctctgtttttctctctaatcacaatactaactttttgtgtttcttctcttctttaatgcatgaacaacacccctggctattggatctccgaaccaccaccttggttccaaagcttacaccattataagcctcttccaagaagccccaaaccagtcggttcctccttgtgaaaaaccagatttttacttgtgttgttcttgctctgatttttctgttttgatgtttgtactgatctgaacctgtagttattgaatctctcttactgccttgtgtttttgactttctagttatatatgttctgatgtagaggagtgcagagttaggagggttagttacaaagtttgttaaaaacctttgtaactaacttaactaatctgtctaggttgtttagaggccaaaggccacataagtttttttttactgctttgtaaatctctgtgtaaaaattctggtttgacagtgtatagttaatatggggtttacttcaacaatttccacctaaacccatatgaactgtgcactgtaatctctgtgttgtttgagtgtatctgagggtcttagctcgaacccattaagggttttaccaacctgtgtcaatccccaataagcttaagcaaagcttaaacttattgagggacacaacctttgtgccaatgctgctggattcatttagtaggcactttgtctatcccgatctgtccttgtgaaactttatccttgataaagtgatattttatctcaatgtgttttgtcctatcatgaaaaactgggtttttgcacaaatagatgctgctctgactatcggagtagattataggctcctttttcattaacttcagctcctccataagccctttttgttggaaataattttacc

SEQ ID NO: 229581 - DNA, 1148 bp, Cannabis indica
ttttggattctcaccaagattcccgtatctactctccagattcatagcttcactttcgaatgacaaaacttgtaaccataattaacaaatattcactttggtttcaagttgaagtcgcttaacaaatcgttattataaatactgttgttccctcagcccttccaggcttagctgactccagtcagcttcaagcagtgcttaaacttaccactcgacactacatttgttaccatgtcaaaaggattatttttagttggaactttggaaattttcacagcttctttctccattacttctcgtatgaaatgaagcttgatatcaatgtgcttagttcgttcattgtgcacactattcatggttaagtgaattgcactctaattatcacaatggacaataataatcttctagttgagtttcaacacttccatcaacctagttaaccacagtgcttccttcatcacttccattaaggtcatatattctgcttcagttgtcaacagtaccacaaccttctaaaagtttgcttccaactaatagttgttccaaatatagtaaatacatatctagttaaagacttttgggtatcaatacaccttgcataattagagtccacataaccattaataacatccaagtctttatttcagttattcatgccaaatatcaatcttttctcagtaattcccttcaaataacatagagtccattttaaggcttcctaatgctcctttctaggatttcttattaatctacgtaccatgctcagtgcatatgttatgtttggtctagtacaaaccatgacatacatcaaagagctagcaacactagcatatggaactctcgacatatctgacttctcaatttcatctttcagcatttgagtaacactcagtttgaagtgttgtgcaagctgagtactcactgccttagagttactcattttaaaggtaattaaaacctttttgatgtagctcgtttgatccaagtgcactagtctctttcgcctttcccttcttatgcccatgcccaaaattttactagctggacctaaatccttcattttaaacttcatctttagctggagtttcacgtggtggatctcttgtacactttttctggcgatatgaatatcatctatgtatagcaac

SEQ ID NO: 229582 - DNA, 1852 bp, Cannabis indica
gcttcaaattttcagatcattgccgataaatgtattctttagtacttgattttgtaaagaagctaatttcttttttatcattgcatttcaaccaaaacaaatagttttttttttttttttgaaagaactaattgttcattgattaagagaaatagataggaatcactgggggattaccctccccttgatacaaaaaagccatctcactagcgattctagcatttttagctgcaccatccgctactacattaagactacggttgatataaaagaaaagacaattcaaaaacttttttgacaaattaacaattgagtaaaaaacattagcaatcctccaatctggacttccacctggattagataaagcttggacaacagtgtttaaatcagagaggatatgaacctctcgccatcccagttcagtagctctggagagagcaagaaaaattgcccgaaattctgcttctaaagccgattgagcttgaatcttctgggactgaatagaccaactcccagtatggatatcaacgcttactactgctatgcctgcatcgtcctttgtccaagaaacatcagaaaagatgacatttgaattctgtatgttccctgcattgaagctattcgttgctgccttcaaacaagctgatcctggcactgtaagctcacttcctttaagattgatggataggttttgaagctcgaagaacctcttcccgattttgtccagagccactgcagtattgactgctgaatttcgaatgcagagagcattcctttgatgccagatttccgtaaaaacacacccaaaataattgagcaaatcggtcctgctaacatcaccttgtagttctaatacgttttccaacagagtgatcaaattatcagcattgatactctcagttcggatggaaaaaatcccaccaaaccagattgctctagaaaaactgcagcgccagaataaatgtaaggcactctccacttcaggatcacacaaattgcaagctttgtcatgtagaaagagtaaccggttcttggtggggattgcttcgttcaatactcgccataacatcactgatattctcggatggactccacttccccaaatccatttccatatcttttttcctgtgtcaaaccttgatgcattgtccacacgataagcatctttgacagagaattttccactttgattgttcttccaaaaaacctgatctggaaaaggatcaggaattctaggaatattgatgattcgattccccaactcagggccaaaaacttgctaaatcgtttcctcattccacttgtttccaatagaaacatctcccagggtctttatagtatatcctctaccccttaagctgttcatcaattccacaaactcagggtaatccgaccatgggatccacggttggtgccaaaaattaatagagtgtcctgaggccgcaactgtgatggtgcctttgagtatcgtttctctacagtccagtatacatttccattggaaagaatcgttgcttttcttcttaacactctagaaaatttcgtggttgcagtactttttgagcaaacaattcacccaaggcctatcctcatgagtggcaaggttccaagcgagcttagccaccagagccctattcatgtcctcacatcttctcaaccccaaacctctcgagatcttaggttggcaaatttggtcccacgccttgagagcaaggtatctattcttgtctaccttccctaaccaccaatattttctcatcaatgagtctaattcacggcaactagagagggggatccttgaagtagacatagcatagataggtatggccgaagtcacactcttgattaaagt

SEQ ID NO: 229583 - DNA, 2757 bp, Cannabis indica
tatttttgtaaaaaaatgacaaaagttagtataccatgtaaatttccctcatcttatccccaaaatttaacatggtatcagagccacttggaccaccagtccaaaaaaccgtatactttcgctgtctctcctttaacctccatttgagaccttttggcctgtgtcagtttccagtgttggatctttaacttgtttcaaaatccaaaaatttcaaatttctagacgtggttatacccaaggcccaaacgtgaggagagtgtattaagagttaatccccacattgctaatgtgtggaaataaatagtgatatataagatgaatgggctactcctcccattgtcaattggttttgagatggaacctcattcatcttatccccaaaaatctaacatataccaaaaaaaaaaattggtaaaaaaatattattggtgtttagatttttttttcagtgtcattccattattattgtaattaagtatcagtccatataacttaaaaaaataatttttagttagtatcgctaaccaaacataaacgccacctataaaaagtagtagacaccactaatattcactagcaatactcaatttatatatataataccaataagcagtaagtaaagacaatcactcttatcataagttatatgtatttatgtatgtatataaatagagattgacaaaaaagaatgtaataaaattgttattaataatgaattaataattacctcaagagggctctcattgtatagaagttggcggcgaagttcaggcttaaccatgatcccggttggaggctggtccaatccaagtccatatatcaactcatatgcattagcatctcctagctaccacagtgatacatttgaattaactagttaattttatagcttcacatttaatgtgtaattaataataccatacaattcattattgaatataattaggcttacacatcatatcaattatcacgtatagtatagaatgtttatacgaaccatttctcaacaagaaaccctggaagatgtaattgtccgtaggggtggcatttagggtcgacaaacgatacaaattcaatacgaattattgtggattagggttataagaaaatataaatgcaggctaaaattgagtcgagttcgaatgacacgattattatttaggccgggttagggttaacacaagtgacatgaaattaacacgaattgactcgtttatatccatatattattaaaattattaatttatagctaaagtgtaattaattttcataaaaaaaaatataaaaattagaaagaaaaaatgctttcaaaaaatataagatagataatttatatttgatatttaagaattttattcattgtattaataattatgataaattatttttataaaaattaaatatgtgatacaatgttgatcaacatatatattgtaacataagtatatgacatgtcgatacgagaacacgacaagtcgagttagggttgagattttttttacataaaatatatatgagccgaattaggattgtgttagaatttgaggataagatgaatgaggttttatctcaaaactaattgtcaatgagaagaatagctcattcattttatatataataatttatctccccacattaacaatgtggaactaactctaatagactgttagactaattaaatagatcaacctacgtaatacgtaatacgaacacgaatatgacatggtaacacgaattactacccctcattgttccaaagaaaaatcatataaagtaaagagagcaaatgatctttacttgctttgataaatattcattggttgaagatgaattgccaatatggatcataatagcagccacgtatatggcgatgtggactttgtcagcaaatttgtgtatgacgtccgtgacagatttacccccagcgctatgacccaccactatcacctacaacataaaaagtaaaaaaataaaaatatatatttaacaaataaaaaaatggtgataatagttataccttgtgatttgggggaagagaggagatgaaagaggtaagaggttgattataatcggcgaaagtgaagacagtattgaaatcggtgggatcgatgcctgagcacttaaggtcaaggcatgtgaccttgtgcccagcagcctcaagcagagtccgaatcttgtaccaacaccaccctccatggccagctccatggactagcacgaaatgaaattgctgctcttccttattattattattatcattactatttgaaccactcattatcttccttatctccatgtctacttctaatcttctaagccttatctctacttaagaaaatgatttgttatgtcattttctctaattgtgtaatgacttttatgatgtcagtacagatattctttggagcaccggcgggcccacatggagaaaagagtggctgaacttaaaccataaaaaaagagaattatatattggtattttagttaattagtgcatgtgttttaaattaaagagttttttacgacataaatacctaaattttatttaggtaatagataaatacttaagtcgtattttttgcggtaaaaatactttttttcacactcttggaacttccgtaagtacctctctgtttcttccaggtaagtgtccatgtgtcactcttttattagttcatatcatttaaattctatctcttatttaaaaattcattgaagcattttaaaattaaaaaaaaatacataataaaattaata

SEQ ID NO: 229584 - DNA, 1291 bp, Cannabis indica
agataaaatattagcattcaagtgattttcagggtagggatcccctgcaagtgctaggctatcaacccaagccttcttctgtctaagataatcaaccatagtcatattaccttttcttactgtttgaatggctgttcgagtgtcatccattttggattttgagtgagctccgtagagattttccaaggctttccaaagtgcagctgaagtgctacatcccataacttctgtggctatggattctgtcatgaactgtataaccagccatcaagagttgataactaacaacccaatgttcataatccggattgatttgaacagtgagcccgactccttcttcttctgaggaaacagcagcaggtatgaattccatgggacaaggacgagtgccattgacaaaaccgtcgagtctatggctacgaataatggtggagaccatagtcttccacaaagtgtagttgcttctgtcgagttttaagggaaagggctggttcaaggtgttgaaaggttgtgtgaaattagagacatagctcgattgagcagagggagtatttgttatagtagggttactggagattggaactcattgttgttggcaggggctcctgctggagtctgagactgatttgtagacattggcgttggcctaaattggctctgataccaagagagaaatcaggaaataaatgcagaaattaaactcagctcaaattatgctgagggatttcattccttttatagagaatattacaaacggatacaattgtaattgtgacaagtggcagtatttaatttgacaatgaataacagaaaatcagccttgggatttgtacaatcattagaaaatcattcctgaatcactggggaatattcggcaggtactgatgagctgtcattatgattcctctgctgtgatgctctgtgaatgcagcacactgaaagctgctgtgaagactcactcaagtcttgacaaaaaccttgaaaacaagcttgctggcaaactttccaggatgactgtcttctctagcattggcagttggaacttgtttcccaggtgttttttgctcgttgtttcacttggagaattattataatgtatttcttagctccttgggactcaaaaccatcaaagatttgaagcctaacacgtcaaaacaaagtcttcttcctcagcttcggtacatagtaaaaattgtgtgaaaattgcaatttcttattttagacgttaaaatccatttttttatatcggaagacttgttgatatggtcttcaacccattaggagtaccttc

SEQ ID NO: 229585 - DNA, 1027 bp, Cannabis indica
tctctcagtctctctgtgttataacagctctcgccctagctctgaaggttgcgatttcgaaccggccggccacctccgtaagtctctctatttccctctctttctctcttgcgttctctcactattctctcttttcttttcttttttctttgtatacgcatattggatgaatgatgtttaaattactgtgttatctatctgcaatttcctatcaaggaattgaagacgattatagttgattgagatctagttttcttatgtttcttcttcatttttctattgcgttattttttattattttcttcatttttttgttacattatgttttcaagatcatctttcagttatatccaccctatgtgacattcgtttctcaggtttctgtggaaatatgaggaaagatgaactcaatctgtatttgtttgaatttttattgtgatggttcaatgttttatactttggtaaatgggatggttcaattcaatcttcatgttgtatgatggaaatttgtaataaataggatttcaattttttgcaagtataaccctgtttttaatatttctaaatttctatgtgtttattgcttaacattattaattgattgtctgaaatgaaactactttatttatacttttacagtctctttatgttcatatacctgctaaacatccttcctcttttcctgagctggagttaaggaactaaggccaattttagacttgagtgcatatgaaaagtcattatgatttcatcagagcattgtgcatcactggtacccagcactaaaattttattgctatctaaagtcataaaatttatactgtgagatctatttatgtgtgtagtgctgaccattggtaatgctctttagtgtttttcttatttaatgggcaacaaagtatcattaataaattatttcattagagatttaaaatctataattacagttctagtggtggaatgagtgtacgcaagatggttgggaactaattttttgttatgataaatggtaattagaagtaagatg

SEQ ID NO: 229586 - DNA, 920 bp, Cannabis indica
atcatagttgttgcataggcctgtggatcatattcacagtcaagttcggttagaaaagcacgattgacattgttacccggtttgggagtagaccagttcttgtcgaatctataatggcaaatggcagccgtgtggccattcttcatgcacacttggcacactactttctggttggaaaacatgtaaacacctctgccacgtccatttgagaaaggcagctgattattggtttgggaaaaagatcgaacacctgcagatctaccctgaccaagaaccatatttgcctgcatcttgacagaaagatcactcatggttacgtggtgttctatacgactttcatgagaaagaagtaaggcctgaacttcctccattgttaagttgtcactgcgggaggtgatgccagaaacgacagagtcaaactcaggacctaacccgttgagaacttgcagaataacatcttgatcatcaactggagaaccagcaattgcaagggagtcagctatggcacggactttgtcgatgaattcagaaactgagagactgcctttgtggacatgagagaactgtcctttgagttggagtttcctggcttttgattgagaggtgaacttctgttcgagagcacgccataccgagaaagatgagtcgtaatttgcaacggaagctaagacactttcagacatcgaggatcgtagccaggagaggaggagttggtccttgcgccgccattgaaggtattctgggttggaattgccattaagaagtgttttcggaggaggcactccggtgaacaagatctcatcgagatcatgtccaatcaccgttggaacaacctgggacttccaagaaaggaagttgacacgatcaagtttgatcgtgagagacgaggatagagaatttgagaaaggattccaagatcc

SEQ ID NO: 229587 - DNA, 1300 bp, Cannabis indica
taagattgctaaaaatttgatcagtgtctctaacttaactagtaacaaaatgtgtttgttgaatttcattctgattgttgttttgtgaaggataaagcaacaagaaaggtggtgcttcaagggacttttaaggatggactataccaactcaacactccagcaactaagtctaattcccatttcatttcaagtcatcaaaccagtagccctacgtttacaggagtttcaagtctaattatattgatcagtttctatatatttccaagtagtgaatctttactttccaagaatgatgtgtggcataggagattaggccattcttaagctagaatcttaaaatatgttttaatctcatctaacgtaccaattttacgcaatgaaactttatatttctgtaacgcctgtcaatttaaaaagtcacatgctcttccatttaagttgtcaaattctagagcaactagagtcctagagctaatccacacagatctttggggaccatccctaattgcttccatggtactacatttattttcttgatgacttctgtaggtacacttggttgtatccactgaaaataaaagatgaagcacttgatgctttcattcaatttaaggctttaactgaaaaccaatttgataggaagattaaagctcttaggacagattttggtggtgaataagcatttgctaacattgtcaaaactaatgggcttgaaataaaacacaggcacatagtagaaatgggcctaactctcttggcacaagctacaatgccactaaaattctaggttgatgtttgaaacagtagtctatcttatcaatagtgctaacacctgttttgcaactcaaatctccctttaaaacattattccttaagaaaccagaccattcattattgaaagtgtttggttcaacttgtttcccttgtattagaccctaccaaacacacaaattttagtttcattcactcaagtgtgtgaatcttttggattcagctcaactcataaaggatataagtgtcttagttccacagggagagtttacatttcaagaaatgtaacattcagtgaaactgagtttttctttaaacatgggtttctaaataattatgccccaacaaaagaaattataattcataatgcagcttggtctaacttaccttttgtgcctttcacttaattcactcagaacaataattccaattctgttggtacagttctaccatctgattccctcacagcttctaaagcatcatcttccagcaaacacactgatcatctcactggtgaacaagaggtgag

SEQ ID NO: 229588 - DNA, 1661 bp, Cannabis indica
agaaatttgatactaccccaaattgcaccaaaacatgcggtgaaagaattggtcaagtcttcgtttttactttttctcatattaactcactgtataaatgattggaaaattctataatcggtaacccttaaaagggatgtaccgatatatctttatctgttttaatattacgaaataatattttagtctaaatattttttcatagtcatgtaaattatagttatttaagacatcctgcaaaattttgtagaaatttgaaaaagtttaacacgtcgaaaattacattcgaacattgtgttgtacgtgtgactattttattttacacgcgtgtaaaatagattgtttgaatattattttttatattgtaaattatttcgaatttcttaaattttgtaggatatcttaaatagctataactaatatgaatatgaaaaaaaatagactaaaaaattcttcaggatgtcgaaacaagtaaaaagtgcatcaatataacccttctaagaatgtgcattgtagaattactctaaataatttattacaaaattattaccaaaacaatcaattcatcaaaaaatgtacatatacatataaattaataggcaataatattaatagatttagaataaaaagaaagactaacaaagtataaaatagaaaaattacgttcatgaaattaaactcaaagaagaagctaataaagaaatctagttattaatatagtttggaatcatattcaaacaattagaaccaaattgcactttttgaaaacccaacaaatggcattgaatgactgcatttttaggggctaaagcttttactgttcaagagagaaactacccaacgtatgtcaagcagtagaaaccaaaacctcactgttggaattacgggcaactatttccaaaccacaactactattaagagaatcaagggtggcaacaacgctgactttcacagtttccaaagcaggaggaacccaaacttgactcaaagaaccaatcagattagagaataggcttccagacgagatagagccactgggagccatattcaaactctaataatcagcaagataatcacgaaacaaaaaaacaacaatatctaaagagagtaacttttcattacgaaccattttgtttctcctgaaccaaattctccacatatcaaccaaaatcaactctaataaagtcacaagcaaaggatcaagaaacttgatgatgaaatcataaaaatcaatacaagtaataagagggtcgttgagagaaacaccacaaagtttacgataataagctaaagaaggacaatcccatgaagcatggtgagttgtttctaagtgagaattgcaaataggacatacatcgtctatcaataagccatgcttggtaagattgcatttggtaggaatttagttagagaaaatttgtcaggtaagcatcttcacttttagcggtatattaagagaccaaacctttttccaccatcttgagaatccagctgtagaagaaacacaacccaaccccaaattacgaatagccatcctaataaccactctatactgaataaaaaccagagtaattatacccacaaattaatctatccgggtcgaaaaagaggaccaaggaatagagagaatggcaacaacttcatcaggacaaaataatacc

SEQ ID NO: 229589 - DNA, 2533 bp, Cannabis indica
gaaagggctattgttgagcctaatatcccttgccggcccccatactactggttgccaggatcttacagtttttgacatttgatctttgaggaaatgtatgtcctccttttagcaaggaaagatctttcctagttcctgatctattaacaagtcttccttaaagtggatctttgatgagatctgggcctcttctatcagttctcaagttgaatcaccttattagatcgctggcctctttgtgtcagtgctttggctctgcctagtgagatcgaaggatgtactcttggtcatccctccgtctcaaaaattcacgtctctgatgagcgagcacatcataacttagttcttcaaggaattttcatctttagtgagaaaatacattgcagttagcagggcatggttctacaattagcctagcttggcaaatgacctctttaactctggctaactcggggtattctccaaagtccccatggggctcacaaattcctagcctcgtctctcctgtatagtactagggacaaaacctgatttttgttcttgggggtgcctcttaagaattctttcttcaattggaggtgcatttggagggtcctccctttgaggcaagggctgattgcatagattcactaggatgcttttatcatcctagccaactataatggtcaggttcgtggtgcctgctatggggttatgattgaccacatctgttgtgatcgtgggaattccaattgtggttggaccatgaacatcgagatttgtattcggtggttctcgagggagacttgaagacatagatggtgcgactagtgttcttctggtgttaaccatggcatttgatcacatacaatatctacgctctcaatgaaatcaccaaacttttgacctcaaaaagtgattgccacgtgtttgctgttttagttatagaggttcgacccttttatgcatgatagttggtaatggccttctccccttttagttatattgatacctagagataatactattaagatcactataggtgggatttgatataaggatacaaaacatgaatcaactaggcagatctctaatgagagagatgaacagtcttagaggtgtgtggagatgaagtacaaagggagaaagaaagccctagtgggcgtgtacaagagaaagaaagagagactagggcttctgacttagagtaatttagaggcttaatgacttaggtttctaagctaggattaaggcatttatataggaggcataaaccctagattacatttcaaatccctagatattggcataggttcttacaatattacaaaagactaaaatgcccttgaacctacatattattaagccattccattaggattttatggcccaatttgcagcccatgacttgctattcaggttttggttgtacatagagtccttctaggttaatcctagccgcgtatagacctataagggaggtctagccgtcccaggcctgcaagatttgagaggtcaaggcctgtaggtcttggcaggtcactatagctctatcaagagtaggccagccttttgcaagttgaggacaactttgtacaccatttctttaaagatcgcttagctttaatttggaaattagcatataattagggtttaattatgaaattggcatgttagttgtgaattattaacttacgatgttttatttgaattcagaatgcattttaaatgtcatatatggaatttcataattttgcatgttttgtccctggtgaccttggaacacggtgtttggctattagaagtcctagtattttcagtatagcggggcaatatagttagacattaggaatgtcgggaatagtggagattttagagttcacaaaaatacccttaggtgatttttatgatttttagtgtgggcaaggtcattttggtctttttgccatatattggttttctcttttagtggacttagatcggatttattaatctaatttttaaagtttaataggttggtattagttaaatgaaacgtatgccatttactcatatttttttcaaaaatcaaatctagaaaaataaggaactctctctctcctaaaactctctcttcttcgaaccctatagaaccagttaggattctattttattcttcaaattctagcaatttctagcaagatcatagtgtatccaagccaaggtaagctcctagaaactccatctttagttttcttgagtttcaagttaaggattatgcatgattttgggtgattgagttctgtagctactgttgtttgttgtggttgttttctggagcttttctatgtttaattatgtggttttaagttgttattaagggctgttattaggtttgagcaagctttgagtattagaactcaagcttggctctttaatagtgttttttgattcttagcttctgtagttgttttgttgtttggaatacgtcaatggatttgttgctgggttccccgaaaaatttgtgttgtcaattcatattagtttcagagattttcttggttaattccctgtt

SEQ ID NO: 229590 - DNA, 1579 bp, Cannabis indica
tgcgagtgaggacaaagtatgttcggaaacactcgtcgtcttggtctgtagggtcagtcgtcagtcgtcagtccatgaagcagctagagtaacgtactcgtgtataagagccatatagaggcccaatggaggcttaaaacgggaacgttacaacttgaacttgattaatctcaaaagttagtatactaagatatctggaacaccaaccatgatggttgcattctttcttcatcaccgtcaatattttaatttgaattaactaggtggaatttgtgttatagttcctctaaatgaaaagatctccaagtgtagttttggttatggaaagttagctatctcttggaagggtgctctttagagtctaacttgtccatatggatgaatctcatagaaagttagatgtcgctcggaaaggagtttcagaagtctatcttgtccttctaagaagggtctccagggaaagccaaccttccccagaaaggacttccaggtggctagttgttctctcttggaagggagttttggatagtcgactctagctcccttctatcctatttgagaagtcccttccgcgtaagccttgggtctttcttccagggagtgtatatcttatccgaaagcactttttcttgtgttggcgtagagatattgttacgataagtttgttaagtctattacgtctaactaacttaacaacttaacagttgcacccaccgacttgggacctttatcctgagcctatatataccaccaactcttatcagttcgaaattgattcatcagatgagttttgaagtgattttaaagacagagattgagaggtaaagagagagagaggtacagagaaagagagagattgggtttgggtttgggtttgggttttgtataaagcatcttttgtagatgaagaagattcttgggtaaaagtgtgagagaaaacactttgagataactcagcagaggatcgatctcgactgtattgtaccctgttcttgatcaatcaataaagaaaatttggtagtattccagaactggattagagccatacatcacaataatttattggacttgaacatgtatatattctagtgttgattttattgtcttaatgctttaatagttttttattttagataactctattcatccctattttctccaatattgttcgcgtttcattaatcttgtcattgctaactgtttggtgattaagagtttagttgttttgattctccactttagtcttaattttctcacaacaccctataaataaattaatatataatcttaatttttcatgtgttaatagttttaattatagaattataatatttagaattatatttaagttttattattattttaatttatttgtaattgatgaattcatatcttattataattattaataaatcataaagttttttaggctaattagtaatttttttccccgaactttgacatgtaccaaatcatgctccttgaactattttggacgttaaaaatgccccctgaactattgagattgttagatttaaggacttttgtctagttttagtaaaaaaattctaacatggat

SEQ ID NO: 229591 - DNA, 1039 bp, Cannabis indica
tttgttttctatagttccaatatttatcttttttcaacaatcattttcgctcttaactcacttcatgttcttattagctaatagatatattacatatcaagtgggaatatgtatcttatagaattttcaataaaaaatattgataaatctagatttgatacataaaatcaacatagtgaatccaaaatcactatcattgatttgaagtatgttctcataaattaatataattaatttttgttacttttttaacaatttattcttaactttatattctatataaactttataaaagatacacatattttcctttactgtcacgtactcttttagttttaattatatattattataattctcaaattaattttttattttgtatatattaaaaagatgtatatgttggaagtgtattagttgattttttattataaacatatatacattaaatatttttttcataataaaatatataattgcaaactaacaaaattaatcgttagttaatttaaaataaactttttaatataattttattatgcatagatatttaatgtgatttttttaattttcggttaggtatatattttaataaaacagtgttttaaatttttagtagttagttagctatatgttctaataaaaaatattaatattataattattagtttgttgtatatgcattatcaatactttgttgtagttataatatattttttaaatgaatttgagaatttactaatccatcatgctaaagtacttgaaatatgcaagtgataaatttataatataatgattcacttatgtataaaaatgagtagttaactcattattgtctcatttattttatgtattgtaaataatagtgacgactacacaaacgagatacggtgatgacaacaactttaaaataataataattacaagtaagatacggtggaaaccgattgacaacaactttgaattagtaattatattagaatgtgctagaaaacaaagttatattagcttattattagaatatttctaattaaggaaa

SEQ ID NO: 229592 - DNA, 1507 bp, Cannabis indica
atttttcaataagatttgtactaatcttcaataaaaaaaatgaaggttttgagggatggaaaatggagtgagcaagaggctgcaattttggtaccaggagatgtgatcagtatcaagttgggagacattgtccctgctgatgcacgtctcttggaaggtgatcccttaaagattgatcagtctgcccttactggtgagtctctgcctgttaccaagcatcccggcagtgaggtctactctggctccacatgcaagcagggtgagattgaggctgttgttattgctactggtgtgcacactttctttggaaaggctgctcatttagtggacagtaccaatcaagtcggtcactttcaaaaggtaagagtgtcttttatttgtcgtggtcagccaacttcatgtcaagttagtgacaaaatttcactgttgttttgaattgtttgatcaggtgttgacagccattggtaacttttgtatctgctcaatcgcgataggaatgttggttgagatcattgtaatgtacccaattcaacacagggcatacagagacggtattgacaatcttttggtgctcctcattggaggtatcccaattgccatgccaacagtcttgtctgtaaccatggctattggttcccaccgcctttctcagcaaggggccatcaccaagaggatgacagcaattgaagagatggcaggaatggatgttctttgcagtgacaaaactggaactcttactcttaacaaacttacagtggataagtctttgattgaggtgagtaactatgctcaaactttagtactttatagaagaaaataattgataatttgagcctttgttataacaacatatgtaatgaatgtattgcataattctaggtcttcaacaaggacatagataaggacactgtcgtcttgcttgctgcaagagcatctagggttgaaaaccaagatgccattgatgcatcaattgttgggatgttaggtgaccccaaagaggtaaaaagatttttttccctaacatcatttcgattctatagcaattgaagcatcctactcttgtttattcttgctggtgtgttataggcaagagcaggaatcactgaggtacatttcctgcctttcaatcctgtggataagcgcactgcaatcacctacattgacaacaatggaaactggcacagatgcagcaagggtgctcccgagcaagtaagctaaaatcctcctcttgatcaaccatttgattatctccaagctttgatggaaactaaccatatcatttcttttatgtgcaagattattgatctttgtgatctcaagggacaagtgagagaaaatgcccatgctataattgacaagtatgcagagcgcggtcttcgttctttggcagttggtcgacaggtaaatctagcacaagttactttattgactctattatctgaagatgaaataagttttctgattgtaatgagttggattgtacattatgtcaaattatagactgttc

SEQ ID NO: 229593 - DNA, 1322 bp, Cannabis indica
atatttatatatttattacatagtacatactcagctatagatgcttgatcttatcattaccttattattacatacaacatgcagacttgtgcaggtgctgttattctcacagatattgtattttggtgtatcattcttccatttgaatcgaattcacatcttggactaactttggtgagacctacactctacaatttaagaactatatacatatagatacatcagacatataaatatatatatatatatatatatttaaatctttataaagagagccagccctgagataagccttcatacataactttttaaatttgagtgggtttttttttcctttaatgtatataaaaatgataaatttggaagcttcttgtttatgctgtatttctttttagttaggtatccttacaaatatatatgtataatgtgtatatatattttatatgtatataactgactgatctttatacttggcagttgatgggttgcatgcatactttgaatgcattttttcttctggtagacaccatactgaatatccttgtaagtagtagtattataccatctattttcttatgcctagctagatttgccaattaattacagaaatattaacaacataactcatagccttaattaatggtctatgtatatactaactatctaatctcttggtctcttcagccatttccttggtttcggctggcctattttgtcctttggagttgtgtgtatgtcattttccagtggatcatccacgcctgtggcttctcatggtaccaaccaaaaccttacatatttttgactcattttgattaattatatgatttggtcatcatatagtttttggtgtcttttaggtggccatatccttttcttgagctcgatacaccatgggctcctttgtggtaaactcctcaaaactcatattaattgttttatttatttatgtggtgtgtgggaataaggaatctaaagcaattatttgtttgtacattgaacaggtatttttgcttggctttgattcacataccttgttatggattgtatgcactgattataaaagccaaatatacaattctgccaagactgtttccccatgctttcgtgaggtctcattagtttttcactcttgtcattcactgctattccatatcgtttttcatttttattttttgggtttttggtttttgatgctcgttaaatttagaaatgtgttccacatgtctaaatacttttgattttacagttggcaatgccgttaagatttatattttcttttggttgtattaatatagttttgttattccttttataaagta

SEQ ID NO: 229594 - DNA, 622 bp, Cannabis indica
ttccttcctacccacttgtttgttgttatgaccctttagtatgaggtaaggtcacttattgaataagtgtaaaagccacaatgataaaaaaaattgattgaaaattttcatgataatttcttgtatagagattgtcacatttttgacacttttttattgaataatttttgtgagcaggccaagcagtaggtgaagaagaatagtaaagatggcacagcttgtaaaatatagagataataaatatggtgtggagagatatgttgaatcaactatggaaattttggcagtcaattttggagtaatgagaatgagtatatgtaattgttttgatcactttcacatctttcgcttgagactttgacgagtttccctttcaaaactaatatttgcctttttgttgaacagaccgttctttcagaaattgtaatattgtactcattctaggggttgcaattaaggaaatttaaagtatttcattattactttttgtttagaagtattattaagataataattatatagtaataattacattataatatatactgggtgtaataattacataataattacatatcagacaaatatatcaaattggattattattttcaattacatacaa

SEQ ID NO: 229595 - DNA, 771 bp, Cannabis indica
agtctagttggataattatttttaaaataataaggattaaggggtactcttaatttcatttttcagcttaatttggttaatgcatgtattattttcaccataagtaactcccagttgctttcgttgatcttctaggagcttggcccgtattaatagatgacttcgttgagcacatgtacaggtttgatataatattccatgaagtatttttgttttgtttcgacgtttctctttgtactgtctatttatttgttcacaatttacatatcatacctcgaaatcctcgtccttgttatgcccatcagtgagtcgactttttgatttttgacaacaattggttatcagttcatacctatctgttgctagatgaattggtaaagaaaaacaattaactagcagtgaaagataatctattatagttagcttatgtttgaattttattatgtatcatcatataaattatatctatgaatcataattagactgacatctcatacttatggatcaaatcaaggtttaggaaaagatgaataccgaacaaacatgtggtatcataatggcagaaagtaggttgacattgttttttgttttaattttgattcatgaaagcaaaaatactcacaattttttaagagtacgaattctctttccgctttagggttacagttgcatgtagtcactagtgtggctaggctctgtgccattaaagtgtagcctaaaatacttgtcatctgctattcattcatagttgaaggcaggttttgatatcgt

SEQ ID NO: 229596 - DNA, 1803 bp, Cannabis indica
cggcgatcctattcccaaagcctccctgatcaccctcatcaggacagagggagtgtttctactaaagaaaatagaggtttttagcttatttactcgttgaccagcccaatcacagaaactctcaaggcacttccagtagttcctggcttcaactaagttagctctacccaccaggattaagtcatcaacaaagaaaatatgagagaggatcggccctcctctacttaacctaatacctttaatcaagttcttgttgagggcatcttggaggattctcgataaaacttcagccgtccaaataaataagtaaggagacaaagggtccccttgtcgaagcccgcaagaagttttatttgaacccaccgaccctccattgagacatatattaagcgttgttgttgtgatacactgggagacccatgtgcgaaacttcaaaggaataccgcaacaactcataacctggtcaatagcgtcccaactcagccgatcataggctttcataagatcaattttaatggcaaaaaagcctttttcgcctctttttcggttgaatgagtggatgatctcctgcacaattacatcattatcttgaatattccttcctagaacaaagaaagcttgtgtggaagatatgatattaggcaagataggcttatatttatttgcaatgatcttagaaatgaccttgtacatgacgttgcaaagagagattggcctaaaatggttggttcttttcgggttttggaccttggggataagcacaatattagttgagttgatgcctctgtgcatcttgttggtcctgaagaaatcagaaactgcatcacagaaataaccacccaccgactcccaataatgtttgaagaataacacggacataccatccgggccgggggctttatcagggttcatcgcaaaaaatagttcttttgatttcctcaacagagggaatactttggatcgcttccttatcctcagagcagatactatcttggaggaattgactacagttaagcgcctggcgacaacccgaccctgagaatatccccttgaagaaatcaaggaattcgtgaccaattaattcccgagaattgatccaattgttgtccttgtccaagatgctttcaatcgcattccttcttcctttaatagtggcagagaggaagaagaatttagagcatttgtctccctccttaatccaggagatccgggccctctgtctccagtacagcgctttcctttctaaggcctctttaaggatttcctgatattacattcagtgttccaatccctgtcgcctccaggtaagctttgaatctcattcagttttccttcaagtacttttatattagtctctaagttaccaaattgggatcggtgccaatgacgaagagcaaccctagtagccccaatctttttgtaaacccaagcaggggcccaagggtggacaacagatttccaggcgtggtcaaccactagcttgctcctatcatctctcgtccaaccttcttcgaacttgaaacatctcttaaactttgaatctaaaccttccgaaaaaagacacagcagtctgtgatccgagttgcaagtctggtaagaacaaatagtagcttttgggaataacttcagccaagcaccattggcaagtctcttgtcaagagcagacttgacatgattcatactagaccggtggttatcccatgtcatcatgtctccctgaataggcatattaataaggccccgggaatccaccagattggatatgaacagggcgaactgatcccttctagtattcccctctcg

SEQ ID NO: 229597 - DNA, 1077 bp, Cannabis indica
tctctctctctctctctttcaagttgttgatggtgagaactcgtcagccaacttgtggccagaaaatcaacttatgcttcaagataaaaaacaagatgaagaaaaagatgaaatgtaaactcaaattgctatcatgaaatggagagaataatggagaaatgtctattgctctcaatatagtgttacaagtaagattttccaatccctcctcacatttggaaaaaaagatatttatacgctctaatggctcgaggtataaaatggtcccaaggggacaaaatgacgctctcacgctgcatgttgcaggtgtaggaggtggccttgcatctcatacctttacttggtgttaggtggtccttggttgcaggagggtagtcctctgttgcaggcatgtgacccctagttacaagctgcaagaggtggtccccggttgcaagcatgtgatccttggctacaggttatagaagggtggtccccagttgtaggcatgtgatccctggtcataggagggtggtctccgattgtaggcatgtgctccctagttataagttccaggagggtgactgtagtgtacccttgtcgagtttttagaccttgtaggtccgttgtcaccgctactcataccttctcatttttagagtctttaggaggcgtggttgtatgctttttccttgcatgtcctgtcctttgattcctcctccaatgtcattcttgtcgatgtgcattcacctctcgctttatacttacaacccctaaaacagattcacgcaacacagacaacgactcgcatgcgagatctctaatgggctcgcatgtaaacccccaacacccaacatatgcatacacgacttgcatgcgagccccccatggactcgcatgtgagctcccatactcttcacacacacatgacaccccttccccacacacacgcgacttgcatgcgagccccatacacttgcacggtcgcaccaacacacacacacaacaccccttccccccacacgacggctcgcatgtgaccgcccccagtcgggctcgcacgtcccgaccgccccatacactcgaccaacacacaca

SEQ ID NO: 229598 - DNA, 1242 bp, Cannabis indica
aagagtataaaatgaaaaaaggatcaccctctcattacctttgccatttcaaaaattctgggaattttttgagtttttctgtagaaaactgtacccaatatatctcggaaccttgcaagccgtgtttgtcattgatgttcttcttgtaagttttgtctgatttgattttcgacctcaagcattccgagggatcatcaagtcgttcattgttccgtcgattgtaggtcctttcatagctccaaaaacaaacttcgaacagtaagtgatttctctcttcattttcttacatacttttaattttgcatttcagggtttgatcactaatttcttagttagcaccattgttacgtcatttggttttagcaatttttgggttgaattgtatctgggtaaatgttagggtttaggtagaacgtgggttttttagtttctccaatttaccaacttctggtttaatgaatttcatccaagaaattggattgctttctccttgcagtaatgtcccaatctggtttggaagtttatcgtccagaatatttagaaatagagtgtcccactgaacttgccatcccatatattctcagaattacagaagccaaatccaaattagagataaatgatgcaaaaattagggaacacatagtcaaaacctaccaagatgacattgccagtcaccacagacgcttcttacaagaaattacagaaggtaaacgtcgtttcttgcgagatgcttcttggcctgaatcccccaatttatcatctattcctctagctaggcctttatttttacccagagtcacaattgattttgaaccaggtgacctggactttgaaatcatgacctccaagccttgaaaatcaaacactccccaggatcctaacgtcaccttcgaagccgaactaatagaatcgaagttgctagccattggaggttacgtaggcaccatcctaagaacttgcggtattgagattaagcgggaatgccgagtaagatcagtggttgttggcgagttcagttgttacccaccagtatgacttactcgcgaagcatctgaggggatcagtggtgaggccagtacgagtggctcgactgggataggcacttggagcctcgagcacatcaggctagagccattatgcacctgcgagactacttcaaggatttcctaaaccatctcgggcttgccccattccaatggaatcccatttcatacagtagcctcgcaagtttgaaggttcagt

SEQ ID NO: 229599 - DNA, 2265 bp, Cannabis indica
gagatgaattgattatgcaagccatagttattttgattgcgttggtatggaagtctttatgtaaataaattatttgtagatagagtttgtagaattgacatgcacaatttttaaaaaaaacaatatggaagctaagtttggttggttgaattctagtcgttagtttaaaatgcatgttgaataattgaaagagtttaatattgagataaactatccttggtctaagatttgcaattttttcatccaatcattaaattgttttttttttagttttattttttatcattgcttattgcttttggagatgtgatgaatgctcagttgtacactcgttcttggtcattatttagatgaattattatgttatactttaagttttgtataaagtgataaaattataataatattgtcatgtgtacactatgtttatgtgaataataccttatatatacataaataatcaagctggcagttaactgctaaaagtaaatagaaatggttaaatgctaacaaaacgtgaatttgaaagttttgctgaaatttaaatttttaaaattaattacagtaaaacaaaagtattagggattatagtatacaatttactaaaatttagagctaatagtataatttaatattttggtatcaatacctcccaatatacacttctacttgcaaatttgaattgtcccttttaatagtattttaatatacacttctacaacataaaaaaaaaatatattaacaggcaactcagatttgctaacactgacagtatagatagactatgtttggtggattttacctgtgtaaatcaatatcttctttatcttttttaattaaaactaattaaaacagaaaaacaaaggaaaaaaaaacaccaaataaatacactgattgggcattttttgttttcatcacaaaaaattgtaacagatgatgagtctgacaggcaaaattatcaaagacaaacctagataccctatgatctactggactcgaaccgaacccacagttgtatttctcctctcagatcaactgcaacagcaagaaaggggaagaggaaaagtcagtagcacttcaactaaacctgacttaagaactagctaaatcaaacacaaccaagataaattaatatcaaaataattgtacattcaagcttggagacgtataaacaattgaaattctaatcaattaacaagagaatgttaaatttctcaataaaaaagaagatattaaaaaaaattcatttgcatcttattttgtatttgtagacctttactatttgagcttgtggtatcaaagtaaagttcaagttttaaaccatattcttttatctaagtagacaagagtgaacttttgtagctattgcgttctttgataagattaaacacacatgaagctctgcagagaaagaaaccgtcccaagttatgtctccaattgatatgagtgttgtaaaaccaagcgaatcccaggattactagtttgtacactgtccattttcaaactagctagaagagtttggtacagattgctggtgttattgaatattcaagaagtgtatcatagttcataggaatctatctcaagtgggtaagggaccattacagaattggtacagaaaagaaacacgaaataaggaacttcgcatgtacgaacatgagttagacaatatggtctgaaagaaataagacaatgttcgaggtgcttaagaagattttttaatatttacaggatttgaactattggatggctttttgatacaaaaggatttagcagtatgttgtttcaagggatcggatttctattctgtaatctatattggggaacctcgtcccctagcaattgcattttgcatactttttattattataaattcattatgacttatgacaaagattctcttattttctaatgtattccccagtattaaataaataaataaaacaaaagcactaaggaacctgatccaaccaaaacaatcagacaaggcatcctccattacaaatagactgaacatataaatatttatataatacaagataaagaataaagaaagaagaaaaacaatgccaatttgtgcaggtttgtgattacaacaggcaaaccagccctgcagtgccctaacattaaaaactacagtactaagatatagacttttatgcatcctaaaactacagtaggaagccaaaataattattttgccaaaatgataaaaatgcagatagctaatgtttaatagtagttttacaattacgaacataatc

SEQ ID NO: 229600 - DNA, 1381 bp, Cannabis indica
aatatttagagtatttctttcttactttttattcataatttcttattattttctatttaactttatattatatttcaatgtaatattatgatattatacatctaatattctaaaaacaaacttatatgtttttggaaaaaaaattatgctatgcttttcaaatatgagtatatatatttaattaatttatttattttctcaacttgtgtttatgctaattctctttttaattaattttgaattctcttaaaataaaatgataatttaattttttttaaagtagatcttttctattatttagtttatctaatatgaaaaagattgttatctgctagttggttttgggtgtggaatttaaggttacaacctcaattatctcaagccaaggtaaacgtaggtacaacaatttttcattctcggggttattatgggattaggtgggctgttagggaccatgatgggagagggatggaggggcgtttttgttgttttgatggagtgtttgatgagggtgtaactgaagttgttggtattcgagaagtattgaattaaatacaaatgtgatttcggttattgttaattactgtaaaaaactgttactactatcaaagagtggtgtctctttgatttttatttatctgtttgcgaacaagggcgctcatagtgttgctagagctttttattctttctctaaatcgtagtttaaatggaagtgatgttccagctaagtttttgtctattattgctggagacatcaattgttattaatgtttgatagatttcaaaaaatacgaaaaagattaagtatttgtcaaaaaaaatattgatatttattttatagaaattagaataaatgtttaacaataatatatttcatacatttacttaattataaaatttaaaattattcgttcatttattaagaacatataataatatttttaatatcttcaaatttgtgagtattattctgttaacgcgaattttcgttaaccaaatatgactcttgaaggtgataaacttgcacagaaaaataaaagtagtaaagaaagaagtatgaacctaaaggtttttgacgtagttttgcagttaaaattctgcatagtccacgagtcaatcttattagatttctgatagtattttagggccttttctcttatgaatttttgtctctttttcagtctaacttgcccctatttataattacatagtcaggcagttaagtgcatagttggctgttatctttacaataattatcccctgaaatcatggggtttgattacatatcacgtaaaataaatgcggttaatatttgaaaatgacacatctgtgattagtctgcttttactgggtcaaagtaatcgtgtattaaacacgttat

SEQ ID NO: 229601 - DNA, 2849 bp, Cannabis indica
  modified_base (2844)..(2844): a, c, t, g, unknown or other
cattccaaaatctctccctcttggtgaaacaacatcaacctcagcttctttttgtgatggaaactaagctcagagctgggtctattgatcgtttcaagactcaactttcttttgattttggttttgaagtccctaggaggggtcttggtgggggtctttttcttttttggaatgatgttgttaatcttaatgtgttatcctactcttgtagtcatatagactgttttgtacaaatgactgataatattaattttcatctttcttgttattatggttccccttattcctctggtaaattagattgttacactttgctcaatcgtttatatgatgtagcaccttcttctccttggctaataattggtgattttaatgattatcttgctcttgttgataagtctaccaatacaatgcccccttccaatgccatgattcattttaacacttttgtctctaagtattctctctccccgatgcccttcaaaggaaacagattcactttcaagcatggaaaaactcttgtaagactcgattgggctgtgatcaatgcgaactggtctgcccttttccctagagcctccctaactcatctccctttcttcggctcagaccatagatgtctcaaagtcttactttctgatcccagtcaatccctgtaccactattcgggttttcgctttgaaaattcttggttctcttaaccagattttcccaatgtcatactttctaactgacactcacctcctcactcccaaaacggtcattgtctttcttccttccttgccactcaatctcattgtgtcgaccaactcaagcagtggggtaaaaacaagcaacattttaaacataccattcaacaacttcaacattctctcaacaatatctattcctcccctactcttactgatgcagatattaatcgagccaaggcccttcaaaacgatcttgactgtgtcctctataaagaggaaatcttttggaaacaacgggctcgtgcttcctggcttaaggcaggcgacaagaataccaaattcttccatcaccgtgcctcttctcgtcgtagacataataatatatctcatatcactctggataatggtactgttatccatgatttcaatcaaatctgccagcatttcagaagcttctatgcttcccttttcacttcccagggcattgattcaactgctgtacacactattctccctggcatcactcgcactctcacctctagccaatattcacttctcagtcacccttttacccccgatgaagttcatactgccttgttccaacttcctggagacaaagctccaggtcctgatggtttaaatgctcaattctatcagaagaactggtccacagttggtcactctctcactgaggctgtcctagatgttcttaacaatcaatctgatctttcctccatcaacaacactaccctggttcttatcccaaaaaaaaagaatgtttcctctcttaaagacttcaggcctattagcctttgcactacaatttataaaataatttccaaggctattgctaaccgactcaaacttgtcctcagtgatctcatttctagtaatcaaagcgcctttcttagtgaccgaattatttttgacaatgtgctcattgctaatgaaatcattactgccatcaataatcgtaaaactggaaaggtcggctgggttgccttaaagctagatatggaaaaagcttttgaccgtgtagagtggggtttcctacaatctattcttactcatttaggtttccctcctacattcatctccttaatcattcgatgtctatccacagtcacctttaccatttctattaacaatcaccttctcccctctttttctcccaccagaggaattagacaaggggaccctctctccccttaccttttccttttagtgtctgagggtctttcagctgccattcgtgttaatgcttcccattctaacttcaatggtatctctatttgtagggcagccccttccatttctcaccttctgtttgctgatgatagccttctctttactaccacttcccacaacaattgccggtcaatcaaggatattctaaccctttaccacaaatccactggtcaatctgttaatctttccaagtcctccattttgttttctcctaacacctcttcttctgataaggattttttcctcaccactcttcaactcgaaaacaaaccttttgtttctaaatatttgggagtccctcagtgttttggtcgttctaagcgatcctccttccattacattacccaaaaagccagtgccaaactccaactctggaataacaaatttttctcaaaggcggggaaggaaactctcataaaggccgtaatccaagcaattccatcttatgcaatgtcatgcttccgcattcccctttcaatttgcaaaacccttgacagacttactgcccagttttggtggggttcttctggcaaccataataagttacactggaaaaaatggtcctctgtttgcacttctaaattttttggcggcttaggcttccgcaattttgtcaaccataatcaagcactccttgccaaacaggcttggcgtatcctcactaatcctcattccttggttgctagacttttaaaagctaaatacttcaagcacaatgactttctctctgcttctaaaggtcactgcccctcctacacttggactagtcttttatggggccgagatcttctttcttcaggtctcatttccaagattggcaatggtctaacaactgatactctccgtcactactgggtccctggattcaaaaacatcacttacaaaacccatgttcccccccccnccccc

SEQ ID NO: 229602 - DNA, 1167 bp, Cannabis indica
atttttatttttcaaaaacaaatttttttaaaacaaaaattttactttcattttgtgattaaaaaattagaaaacaaaagtgttaccaaacagcactatagtttcctattttatatgtaataaaatcccaatttaaagagatttccatacatgtttctcataattgaggaatgtcatgtattccatattgtcatggattgacagtttttgtgaaaccaatacctgctgtaaacctctcttataaacagtggaacaattccattgcaaagggatttgaatcattttgtttgagagagtcattacgctactcattttctttgtaaacctttcaagagagattaaatccgttttgcttcactactcacaagttaaatgcaacaaaaataggagtaagctttaccagaataatacggttgaacctctataacatatcgtgttcttagttttactaactattgattatattctatttgaatctcattcatttctcgttgcttttaagactcggtttcgttgaccaaaagcgaggttaatattttggtgcttttattgggagcaaaactcaagaacacaattggaataattttatttaattcgaatggcgataacaactcgaagaactcgacctactgattctacatatcccatggtaacctgaatgttcaaactcctaaaaatctaagaaatcctcctgtgattaatctggacaacacttctcttgggacgggcattactctaggcactcaaaatatactggaaatgacagtaatgacggtgttggggagactagccaaggctctggaaaccctaagtgacggttgatgatgatattgaactgcaaaagttgagggaagcagtatctcaaattcaaaatcaaaccaatacccttcatcataatcaagctgacacccaagcaactatgaatgaagaatttgcataggaaataaggcttttccaagaatggattgataggaaagcaggatgtatgagatttcaataagaggcaataaacacccagtcacgtgaaaccacagagttgataaggcagttcaatcaatatatagaccagacaatagttgtaggaggagattgcgttcatcagagattccaatagaggaaaagagatatatgttctacctgggaaccagctgttgggttttgtgccct

SEQ ID NO: 229603 - DNA, 2102 bp, Cannabis indica
aaaaaatatgtatattatttttaaaaggtaattttttaatttgagcctctaaaataagtgggctttaggtgcgtgcctagtctgcctataccagggtcgacgagtatatatatggtacgagatgttggaggatctagtaccatttccaagatgtcaaatttgtaataaatttaacataaaaataagtttatattatatttagtgtattatttacaaaattgtgaatcaataaccaaaatgtaaaatataatgattattattgataaacatttaatattttattaaaaatatttataaaaatatattaatttttatttttatttttattgtctaaataataatatgggtaaataaacaaagttataaaaataaatgaattataataattaatttttagtaaataaaaaaaaaatcataataattaatggaatcataataaaaaaaaattttaaaatttattgtaaattaaatttagtacaatattatattttatgttaaatttagtacaatttttagtatggataaaatttagcacactttttagaacaaataatattttttttttcaaatatgctaaatataataatacactacttttttttaacactttaatccctaatcatattcatcattaatgatgctattaagttgtatatgttattgtaagataattatttctttagatggtgaactagctatactacctagttagtctttatggatatccaaattatatcatattttaacacttatttgaagaaaaataataattaacagttcgaacatcagctatccaacctcaaagtaaccaaaagaaacctcatcattcaaatataagaattagttatttttatgtatcatatatatcaaaataaatatttaatattacttagtcttaacctgccaaacgtgaatttaagagttctaactaaacatttaattataaatatataagaaataaataaataaaaacttataatataatgcgtaataaataattataaatttaatataaattatataaataaacgtaattatattataatatgtatatatgaattataagtgaaactatgtgtgtatattgctatatgtaatacacaatttaagtagttcggcagaatattatttgtatacgtctacggtagcatttaaactatgattaaattttattaataaaatagagatctatagattttaagaatttatttttaacaatgctcttaattgtatgtaaatgggtattttagggaatagaagcggtattaacgtaaattttgcttgtatagagagaaataagatgaagaacaaaaggaaaagataaaatgaaaaaagagcgtgtttataaacacgcttgtttgaagtttatctttttgaaggatttgtggtgaaagattcaatggagtttgtatacaagcatgttgttatgctttcacgtttacaagtagcctgtgtagaggaagagaaagtaaagaaagtttctttcaagattgataagacaagcttgatgggactaaacgctttcttttcctctttctttctctctgtccttccctaattaatagcttgggtgaatgtgtttatagaggtatagcttatcgtgcctcttcgaggtgaactttattttcgtaaaagaatcaagtggtagctacttttacctttatgtattcacacctaaaatcagatatatattcatctcaggttttgtacagctattattcatgttttttttgttttatactacatttatttattattttatttcttttactgttattattttatttttttcacacaatttttttttattcattaatattaactcattgtaagaaaaaaaactgctcaatatttttttttcacacagacaatttttttaatgttcaaagttgattactcaccattctatatttttactacgtggcgggttggtgttcctcctccatagatcatgctcttctttcacttccatgcatcacactcaatcttttattgctcaaagatgatactcatcaatctgtttatttccatgtatcacacaattttttttactgttcaatgtgattactcatctcttcaattttttattacgtggtaggcat

SEQ ID NO: 229604 - DNA, 1182 bp, Cannabis indica
aaaaacctcaaaatgtgctacttatttaagtactctaattaaatactgtctgatcaggccaaaggacaaaactagaacaatccatctgaaatcgcagcttacccaacaaccagattatcaattacaagaaagtaaatatgattgttgttacaaacggtaccaattcaacagagagttttggtgtttcattcatttacatactagttggatagctttacaattacaagtttgtgctgattatacatggttactaagtaaatgttgttcttttgtgttctaaatactatatttagtttttttttttggtaaatactatatttagttaaaataacatctaaaacgctaataagatcatggtaaacccaaataaactcaaccaaaatcaaatcatttcaactaaagtaaataaactagagggaaaaggagaggtctcacacagaaaccagtcttgatcatgaacaactccattgaagctccaacaagcgcagccccaaatgaaattttcaggtaccaatctagaaacttcattctgactgcatatcaattatcaaaaatatatcaagggaactatcacatttgcaatattagggcattgaaaaatgattaaccgtgtaagtccaagcaaattctataacctaaattgagccatcataaaagtatcaaaatcacacaaatcaaaagaatttcaatatggcaataatatgtagtagttaaaaaacaataacagagcaaatagataaacagcaataatctcatataaacattttaacaaaacacaagggcaaacaaaaaaagttatatttagggacacactttctttcattggttgacagtcagtgagtcattttaataaaatgcattctacagagacatacatcttacagtttgactcaattcaacagattgttgtgcaaacggaattcctcctaagtgaacgaggttgataatctttctatgggtagagccgattgtgttagtgacagaagaaagcgctgatagagagagagaagaagaagttttggtctgacaacatgggatgaaaccagatgtagctttgggtctgctatcataattgggcttctcatattgggctgagtcaaacagtacaacattccccactctatacttttttttagggaaatttacatggtatactaacttttgctatttttttacaaaaat

SEQ ID NO: 229605 - DNA, 2361 bp, Cannabis indica
ataaaataaataaacattttacctaattctatgtatctatagtataataatacttaagttatataaaattttgtaagtacatgagagttaaaaaattaagtcatattccacgtgttatttttttattagtatatttaattaattttttttaaaataaaaatttaatgatttactaactgaagttctaaaattataacttagagtattattaccgcaaaaaattaaacttgagtatttatttacaactgggagttaaatttatgtatttatatcacaaattactttgaaatttactatcacctttaaaaatgaatctctactctttctctcgtcattattaatgataaatacaatttttttttttttagaaaatagctttaaagaacactaacaaaaagcaaagagttcaatgggtcgagagctaagaaattcattattttaaaacatctgccaaaataaggtctctaatacagagtagccaaatcaccagattgtgcggtagcagaaaggaaaagcttcacaagagaattagcaataacaatgatagttctaagataatatttgaaacttacaactaaaaaataagaataaaatgatctcatatcatccaaaattaaattcaaagaagaatttaaaacaagagaattattgagcttgtagactaaatttttgcaattagtgtcgagttgaatgttggtgagactaatagtgatgcattgagaaatgacattttgaattgcaaggcattcgaccatctcatgagagagaatactttgaacctttcatagatactctccaacgaagttcctcacgaccatgctaagaccacaagtcttactcatattattgatggcgacattcgtgttgatcttaaatactaaattgattttaatcacaatgattttttttttaaaaaaataaataaatgaataaatacatgtatcttatacatatacaaatataaaaaaataattagtaaatttatctcttgaattttcgataaatctgatcatgccccttgaaaaattatactcgaatctctatttttttttatacaaatcaaaaagttctatcattaagtgctcaatagtcaatagtcacttaatttgtgtaagttagtctcgcatcgcatgtataaaaatataatatataatatgtggtctattaattctattatttcaattgattttgagataaaatcttagggtaaatatcattttggcgttgtgttttataaaaattactaattagaccttctttttattaaatgataagataaactctatattttttaaaatagtaaaaatatgaccttgaattcaattttcaacaattttattttttaatataatcaactttaagaaaatttttaacacgaacagatacagaaaataaaactagttttatcataccatctctagatcagattactattaaattttaatttgataaaaaattagttcaaggtcttatttgtacaaatttagaaaatacattgtctattttttcatttaacaaaacagatagtccaattgataacttttgtaaaacaaattgtccaaaatactatctactctagaactttatccatcttgtcttgcacactctattccaactttctcgacatacaatcttaaattctaacatgatattaaaaataaacataattttaatgtgtattcgatccaaatccaataattagtctaagaaaataaactaaaagagtcgtttgcgattcaaggatagtgagccaaaggtgccaggtcaagaaagacaaaaaaaaaaaccgcttgtgattcattgtgagccaaaaatgttgcaagtccaaagagataaacaaaaaaaaaaaaacactacttgtgatacattatgaacaaaagaattttaattaaaccattcaagattaatgagtaaaaattagtcactatccttacctagaaataaatttaagataatgtaagcatatttaatcaaattttccaatatatatataacaggctattaaatgtgtggggaatggggatgtgattgaatcccatcttgtgtaataccttactatacatttattaaagaaatatgacaccaattattatatttattaaaccagttatgaatttagtgcaaaacaaagtattattttttttttaaaaaaaatatatatttaatctttgcatttgatgatgatattgggctagctggtagataagatagggtattaatttttcattcatttttttcaccaaaacttgattgcatagtaaaagcaattattgtttaaatatagcaaaaaaacaaaacaaaaatcaaaacttgattgcatagaatgaactattatggagttaagaatgttatacaaaccaa

SEQ ID NO: 229606 - DNA, 1072 bp, Cannabis indica
aaactcttcggagtccgtgcaggagtggttatcgataaccattggattgtaagaccttaggcattctcttgccacatgtctccatcccaataaatgtgggatattagtatttaaacttccctatatgttttgatcccttactcatttccctctcatttttctttttcctcttcttgtccctctgagtttcgaatcctcaaaaaaccagtttacattttttctgagctttcatcatcaaaggagaagtttggagttcttgatatccccagaatcagttgaaaaaggaactacttttcaaggttagtggaaaaatttttgtaattgtttttctttctctgagaatttatgcatattttgtatctttgggggtagaaaatgtatgagataatgggatgtacgcacgagaatttatttatttttgacaaaatacctatttttctgggaaataggtacctgaaacttgaataatcacgggtttcaggaagaacaccctgagtgctcgcatatttcttgctgagtatgttgaatactcgtgagtttttcgatgaatatctcgaatgctcgcgtacacttctgaatatccagaaatgactcgattaaattgttacctagccattttaaccctcttttttattagaatttaatgattcttagggttttttagccttcaggttatatgtacttttgttatgaaagttgtctgagtcttttaaatggtgggtgtgtcatagtaacttaatgctcatgtaacctttgcatgttccttgggtcactatgaaacacccaaccatttgagacatgttattagtttttcaatttttatttttttgtagtcgcttattaggactaactaggttcttcaaaatggtgggtgtgtctcattaacttaatgttcatgcgggaatgcatgccccttgggacagtgggataccccccagttatttcttgaggtacacagtaagttttatattttgcgactctactttttgtgaggaattgattgaattctcgaaatggtagtgtgtttcagtcctaattttcatgtattgactatgattcatttatgttattt

SEQ ID NO: 229607 - DNA, 1590 bp, Cannabis indica
aatatagatccatttaaaaagatgtgccttgcatgaagtatgccgtaaacatgttgaaacatgttgaatgttttgatgagcttcccatgatattttggtaactacatcatcaaaataactatataaataagctaatgatgtgccattatatagtttttagcatagcctagttaattgttaatacaatgcatattatagatatttttaaaatattaaattttgaggtctcggctgtttttagcatattatgcaatgcatattatagtttttagcatagcctagttaattgttaatacaatgcatattctagtaataaatactctgaaatgagtcctgtgtcgaataaggcatatttgtatctccttgaacattctcgttccccgaatttgtgtattgttccaaagtgtggctggttgtggctctctctcttcccctagttggttttgttccacgattaggacatgatctactgttataacccatctcacaacaaagcccgcattgcctttgtgtagagcctgtgccatttgtaggttctccgtcccttcattgtgcattacctgttccttttgttctaaccctagttgggtcttgaatgatgttaggattgtcacgatatgatctaggggcaagtgcactaagacttgattcaccaatttcgaacccttccttgaacattgtcgtgagtctagcaatttcctcctttgcgatgttgtagtgagttgttgattttgatgcgtagtagttcatcatgtatgcatttgaatttaaggcaccatatctagcatactaacattgatggctatttaggtctaacggatggcttaactcagtatcttcatcaatagttttagcatcgatgctccaccgttttagaagaagtgaatttggaatacttttgcaactattaatgtgagtgataccattaacttgtatatactgtagaaatttataaccatattaataaaagtcataatccaaaattatgtatatagaaagaaagacaacaactacaaaacataagtaagaaaaaacttgtatgaatactgtgcaaccattaatgtgagtgataccattatcttggaattttttgatcgaagacatcaagtttcaaaaatagtgcattgcccaattatattgagaaatttggctagaatcaagaacacaattgatgtagttagtgcgcaacttgttatcagaccaccaccaagacaaagaatgtggcaaagtaatcattagctacagtgctctctagcagttgaccttctaaataacacaactcaatattgttgggttttgtgccctagataaaatttatctcaatataatcaaatttactaattaataaagatcagaaatcgcttttatgttgcatggttcacatgatttattttatgattatgtttaatgtataaattctattaagtccaaaacatatacaaatatttatatatttgttcatgattatagtatcgtcagcacagtgaaatataatcataattatatgttcaaaagtttaattctcatgatttgtcagttaactggatttagactggcataataatcagcgataaggtatacttacacctt

SEQ ID NO: 229608 - DNA, 1380 bp, Cannabis indica
tagataactacttcccacatatatggtgagttggtaaacttcctaatttcttgtagtgactcttatatcattaaagtatttttagaagtaagagtagaaaaataaaataaaatattatatgaaaaattttaatatctttagagaatattatcattggagatggtctaagtaagaaaatgtattctaataatgtatcaaaaagtgatacaaatttttaatattaactaaggaacatacaaaaataaattatataaattaaactatatgtgagttattagaatttttggataacttgattaaataagtttctttaaataaagggttaattttcttagtatttttcatcatatttttcttttatttaatttttttatgttattgttttttatatagaatttaataatttatcagagtgagaataatagtagataattattcttttggtgtaagaaaaattttatatttactaataaacattagctaataataagtaaagtattatgtctcgtaaccaagagactttatttaataagcattagcaaataataagtaaagtgattaataaacgaatattcattttaaaaaataataaacgaatataaaactgcataaatataaatatagaaatgggtcacattgatcaaatatactaatcataattaagaaaatttatttaatcgtgtatttaaaatgaatcgatcccattcatttcttcattattaatattacactcaataatttaaaactgaattccttaattatcctcacaatcattgaaatgcttaatcctaactcaaaatatatggaagatattataattaattagttggacctttttatgtacgcaattagtttaaacccaatttaacttgctttataaataactaaaattaaattaatacaaaaccagtactaagggtgtagccaaaatcatctcattcgaaagagaagaaaaaaaaacaacatgcttatatgtacaaaaaggtagatttaaataaatttcaattaataaaaacgattttgatttcattaacaaaaaagatagaacacaccataaaattacaaactatatacataggtacatacatatatatatcaaaagaagacatcaaactatttaatgcctaactgttaggcttgccttcaatatatatataagttgattatgataccacagtggtaagtggtagcaaaacataataaaatatcactatccaaaatcatatcctattacaccaaaataatttctaaacaaataaggaacactagggtggacgacgaaaaatactgactgcatcttgcaactgttcaggtatcctctctactgcactcaacagttgagtcatggattctacagtaattccatttagctggatgtat

SEQ ID NO: 229609 - DNA, 1527 bp, Cannabis indica
acccacatatccaatttatttagactgactgcttttggatcaccacccctcggtaccctactgaaaatcaaaggaagcctattgaaagtccaaggactaccattgatgactctcttaatatcaatttcatggtaaaactgaaataaaaataaattgggacccaactccttgacaaaaagacccttccccggcttccacagcccagccaatgtgtgtttcatagcttcaaagtctaatgatcgagcattcaaaaatctacccaccaagcaccaccgatcatccaccagagccatctcctcaacatcatcatcgatctcaattccaaaactctcctcatcctccaactcaatgttcccgtaactctgctccatatcctccatggcatgactgcttgacgccatgctccaccgttagaaatcgcagcaaacagagaagagaataaacccagtcacaaacaaaccaaaacacaacacgaaatgaacgatcacaaccttgaagaaaaccaccagaaaatcgcaccaaaacagagaagaaacaaataacacagccgcaccaaaacagtgacagacgaagaagacgatccaagccagtcgacgccaatccccaccagtgaaaacgcaaaacaaaaccggaccaaaaacccagtcgcaacccagcttcacacgatgaaaagaaccgagagaatacaatcccaaaactcaatcgtacgtgaaacgtttctggaagccggagatgagacgacaatggaaccgaccagtcgacaccgtgctccaccgatgaagccgcaccaatcggaaccgaataacaaaccaaacgtaaaaccagtcgcacacgcagaaccaatttagagagaaacgatcaaaaccatgccagtcccaaacggaacagaaaaatccagtcgcatacgctgaaacccaaaccttctagactcctctgagaaccgacgaagaaacctgcaggctcgacgtcgtgctccaccgatgaagacgaaacaaacggaccagaaaaacaaccagacgcatacccaggcgcaaacgcaggaaaccttcgacgaaaatattttgagagaaaactttgactatgccagctggcaagacttttaaattatcttttaaaattaagtttagagttatttaatctattttctaaaagagaatggttcatcccttatttaagttaaattcgtaaacaaaaatcaaatagaagaattgaacatttttgtttgtatgaatgaatatcttaatttaaactagatgtattcattgttagattattgacattaaaaccttctattcttgtagcacaactctctaatcttttttatgacaaagcctttcaatagatcagagatgcatatggagacggaacagttctttttcccgcctcctattacattccccgttcttgctctatcccgcacattttccaatggtgaactgaatagggcggaatcaaagaacaaaagaaagaaaaaaaaatacaaaacggcaaaataaatgaaacaaaggctaaaagcaacaaaacaat

SEQ ID NO: 229610 - DNA, 1009 bp, Cannabis indica
ccattctcattggtataaggatcgaaagaagtacttgaaagaaatctaagagagcatactcagagatttcattgtgagagcttcaagagaggaaacattgtattctttgttcttgagttaatacaaatcaaggggagtaggctattaccgaactgaacggggccgaacctccttaaaaccttgtgttctttattatttattcgttcatacttcactttgattatatttcttatcgctcattatttgactcattgtcgttggctaaaagtgaggtcaacaattatttgaaattattaccttaaataattgaaaatgacagaaattattcaaaatgattatatcagctggttttcgaaaaatctttgttaacatttttgctcatatgaacgattcaattgaaaaaagttctgaaagtatccaactaggagaaaatacatgttaatttttgaacttactttcttctcaaaaaatggaagtttcgaagtccaaatatgtattgatgtatttattcttttaaaaaatttcatgtcacaatttttttttccacaaacccaaagagaaattttatgagagagagagagagagagataaatgatgatgatgattaaaaacaactttgattaatttattggtattattaacaaatgtattggaaagattatacatggagttatttttatttattatcccttgcttccaattttagtcgatacaaacacgctgacttcttggagcaattggactaagtctagtgttaggtcagctgactttgatagatagatcgacaagaacaactagtctatggttgcttatcctttttggacaccactccttaattcagtaacactttggtataatgattataagtacacatggctaccttaagtaccgtaaattgttcatcaaaacttcaaaccaaaaataaataaaaattatcgtacttgtcattccatcaaacattctctaatcacatcaagccgcgtaaaacattccaacacatatttccctt

SEQ ID NO: 229611 - DNA, 1150 bp, Cannabis indica
tcctgccaagtgagaccgattttggcctgagcttcaagctgacacacaatggtcaaatattcagcatccaaacgactaagaacattagacaccaaatgtgcctcaggatactgatctccagccagtgcaagactatcagcccaggatcttttctgtcgaaggtaatcagccattgtggtattgcccttcctggtagtttggatctttgttctcgtatcatccattttagctctcgagtgcgctccatagagattctcaagagccacccacaaagttctagcagaggtgcaacccatgacctcagttgcaatcatctcagtcattgacccataaaaccaacccatgagcagttggtcacaaacaatccaatgctcatactcagggttgagttgaaagccaaagccaggtgtattcaccccccaatctgtttgtaatttcttgattttcctctcaaattgggtttcagccatgtttttaaattggataaatgctgtaagagcatcagacttggattttaggggatatatccatgtgtatcgactaaaatcatcgataaaatggatataataccttaaggttgtattggacatgactggggctggaccccagagatctgtatgcaccaaatctaaagcatgcttggctctgataccaagtgaagaatgcagagaaatagaatgcactgaaatctcagctcaagtggaggctgagtactaatcattgtatttataatgagggaatgaaaccatgatgattacagcagatggtaaaaagagaggacagctggtacatgaaataacagaatgaataagacaaaatagtacaccagaaacgtgtggaaaatagatgcaagggcagagtaagagtaagagcagtaaacacagtaatcctagattagctattctaaacatgtgttaacaagtgtaactaaattgtccctaatatcccaatataatataatataataaatacagcccttcaattgttctaagcatcaaaaaaaataataataatattaaaatttttttttttttgtaaaaaaaaaagaaaacaaacggaatgaaaaaatttaagtaaattaaatgctgaaaggaggaattattttctaacgaactatctacgagttgttaaaatggaattcgaaagaaag

SEQ ID NO: 229612 - DNA, 946 bp, Cannabis indica
atactcattgtgtcgtcattatctcgtctgatacttccttgcttagaatgttggtaccaggagggaaaagaagattaacaaagtgtaggaggctgagcgcagggagcaggcatggtgcggggtgcgcgagcgtgagggagcgtaagcgtgagcagcgtagggcacggaagcgcgggcgatacaagcacaagggaaagcaggtgcaagtagcgtcaggcgcgcgggcagtgtggggcgcgagggcgcgggggcacgcgggtgcaaggcacaggagcacgtgggtgcaatcggtacgcagcgcggagtgcgcgagcagtgcagagcgcgaagtgcacgggcgcgggcggtgtagagcgcaaggcacgtaggtattgaggagcagcccaatgtaacaaaagggtcgggggccatcctttttcccttttggtgtcttggacatcttgaattattcatccttttatttgttatttataagaatacttcaatgtagccgcgataactaaaaaaatctcaaagattctcaaaaccccatttacaaaattttataaaaatacattacttattaaaaaaataaacatcatgtattgcacttaacatcacttaattgaacttattaaaaaaaacaattaattatgcgtacattccacgtaacatcaatctagtatatatataatatcttagtaataaataattttagaaaaaataaactatctttttaaaattaatagttaaaaaatatctaatcatacataataactaagaaagtaaagtcaaattatctatttatactttttaaatttataattaatcaataattaaataaattaaaatttctaaatatcaattctttaattttttttaaaatgttttttgttatactttaaatttttttcttaattcttttattttcttctatttttttattctgctttatttaattagagat

SEQ ID NO: 229613 - DNA, 2093 bp, Cannabis indica
gtaatgggttttatttagggcacaaaacccaacagtctgaacgggggtaatatttagctttaaaaacttgactaacaagggatgactctgaccacccttgcttagcaagcattgcaaggttaaagtcatgaagatgacgaaagcccatgcctcccaaatctttgtgaacagccaactgatcccaagacatccaaataattccttggccactagcactttttgttttccaccaaaagcttgccataagcttttcaatatcattgtaaatttttagaggaatcagaaacacactcatggcataagttggaagagattgaatgacagtctttaaaagaatctctttgcttgcacgagagagaaatttaccatcccaactatttatccgagtgatgatcttgctcttaagaaaaccaagaataatagttttctttctaccgactatatttggcagccacaagtagaaagaaccatctgtagcttcaggcattccaagagttgagcaaatttgatctttaaccgctccattggtgttagaactgaagaatattgaagacttggttgcattaacacgatgacctgaaagcaagttcaaaagagtgaaggagcctgttcatgctatcagcagcattttgagtcgcttggcaaaataaatagttgtcatcagcaaaaagcatatgagttaccgagggagccccattagccacacgacacccctgaatgatcctgtcagcttcatattttctgattaaagatgaaaacccctcagcacaaatgataaacagatatgttgacaatggatcgccctatcggataccacgagaaggagtaataggatccattatatgactgctatggataacagagtatctcaccgaagtgacacatttcaggataaggttaatccatttgctagcaaaacccatacgagacataaccgctttcaagtaaccccattcaactctgtcgtaagctttactcatcaagcttcacggccatgaaacctttttgacctcttcttttccgcttaagatagtgcatgatttcaaacgccaccataatattatcagagataagcctaccagcaatgaaagcactttgagtgggagaaataatctggtcaatcatacttctcattctgtttgcaaggactttagccataatcttgtaagatgcattacatagagcaatagggcgcagatcacccattgtggaaaagttttccttcttcgaaatcaacacaagattggtttcattaatgtctaggggcaagtcttcggtctcaaaaaagtttgtaacaagatgcactatatcaggaccaatgacatcccaatggtgttgataaaagccaggacccatgccatcaggaccaggagctttatcaggatgcatttgaaaaatagcttgttttatttcttcgggcgtaaccgtttgtaagagagcttcattatgatcatcagtgacagaggaagatataccattcaccacagaattacaatcaataacatcagtagtatagagagcaagaaaataatcaataataatctgatcaagtctcgaagaccaattgacccctgtatcatcaaagtttttcagttggacaatttggttgctatgtctgcgagaactaacagttgcatgaaaatacttgctattcttatcacccacatgaagccaaaattgtttagaccgttgcctccaatagatttcctgttgagctagaatctcaaaataattacattgttcagcagaaaaatcttgatcatgggagctactactatccactttcagctttgccattttcttcttgctttgcttcaatctctttttaaaatttctagtaatcttaaagccccaatcggttaaaacaatactatagcattttagtttttcagtaagagaaagatgacaattatcggcccaacaacttttaacaagctcggcacaaagaggctcacgagaccaagcattctcatagcgaaataaatgtatagcacgggtattagtcacggatctagctcaagaaatagtggtgtatgatcagatgatgagtaatcaaagtttcataattttgcatcaggaaatagagaaaacca

SEQ ID NO: 229614 - DNA, 1082 bp, Cannabis indica
atttttatatttgtattttttttgtataaaatccaataaatacaataattcatattaaaacataaatttatatagactttagcgtatatcaaataataaaataaatttgatgaaatgtggagattaagaactttcattagtagccttctttgaaagaacaaaaaaagaaacataaaaaaaactcctaagaatgatgatgggaatgtagagattaatcactttgtaacgtcctttcaataaaacataaaaaataataataatgatagaaactcgataaattttgccatagaatggtttaataactttttatcttcccatttagaaaaaaaaaattgctttcccaatattttatattaaataatctcaattttttaaatacttttaaaaattaatatttaatttaatgcaacacaatatgtacactcaatagtcatataaatgaaaagttaaaaaaaatatattcctatacagtatgaacaaaatctatcacagaattcttctacttatattggtataatttttttgggtcaaaagttattggacagagtatctatttatactattttgaatcttctacaaaattatataaaaactctataatagccctaatgggcactgagttgagttgggcttaatcaagatgatcacaaatatttgcaaaaacttttgaaaactaacgtaactaactttgagaaataccaacatttggaacctgcctataaaacaagagatagggtggtatttcaagaagattttgagactaagacaagttgtaagcgaagcctcattaaacaaacacgaaaagagaggtaagtttagagcaaaacagttttacaattcacttgttataaccaatacagttacttatgctagaattgtttaaaataaattcattgtgccttagcatagattcatttaatggcaagttgttaactcacaatttctaactagggatctgtttggaaaacctattgcaattaaccacaatatttttcatctttgtatgtcaaaaatggggtacttatcaaacaccacaacaagcaattattaaatatcaaccaaagtaccacaagcaatataaa

SEQ ID NO: 229615 - DNA, 767 bp, Cannabis indica
acggatgttgtagtacttgtctttaggaggaaaaagactcttacttacaatcttcaattacaactttttaatcaatctttatatttggaattacatattaaaatatttttttatagcggtattcgttataaatataatattatttttgtaaataccgccataaaaaaaataatttcgatatacattttcagacatagaaattgattaaaaaattagtaatagaagattaacgataacaatcctatgaaaagaattcgaagttcttaattgagtttgttcaggttatagttcttgaaaaaaaaaaaactcaattttatatcatgaattttattgaattgtcttccattagatgtgtttcaatatagtatcatttaccaattttataaaaaagagtgttaatgttaatctcttattataatcttttaatcaactttcatccacgaaaatatataacgaaataaatttttaaaaaaaaaaaatacgcatgatggttttcattatagttattgttgagattttgtgctctaaatataattcaatttaatataatcttatttactaattaataaaagatcataaatcagtatatgttgcataattcacttgattactttcatgattgtatatttaataaacaaattatctcaagcatatagttattcatgattatagtattgtcaacatagtgggaaataatcatgattatatagttcatacttttcaatcccacaatttataagtgagctagatttacactaatgtgataa

SEQ ID NO: 229616 - DNA, 1567 bp, Cannabis indica
agtttttcaaaaaattaaaaagagcatatggcgtcagagaaaaatagtgtctaattaagatagaaattagagcctaatcaaagcagcaaggtaaatatatacagaaaatacacacgcataatggggatatcacaagttgaacagccttaaaacaaccttcaaaacacatcctactaagtacaacttttcattctttggaacagtgaaagattacacagaaaaatagtttgagtaccacatggaaaaattagacggattagacaaatgcataagactgtacttgaaaaaaaatccgttatgagaaatagtcaaggattcacagcgaaaataagagatgttgcttgcagcatgacttttaacatagtagaagaactaaactcgacaaatttagaaacaatggagcttccaattactattggaaaattgttgtgctctaatagaaatatcaaaccaacaagattacaactcaatgacaaatagcacaaaggacaaaatcacggattaaataatgttacaacactaaacaaaatatacacataaaatagagaatagagatgaagagagggattacaactcaaactaaaatgctacacataaaacaaaatatataaatagcatatatataaaagagatgtgagagaaatctcaacgccacatacaccacaagtgtataataggggaatcacaaaactttaacaaggtcttacacctttgtccaaaagcttatttcccctaccacgagcacttagggaaaagaaaagaatcgaaatagcattctggatttatcaagcctatagtgtttctagcaatgtgttctcttcatagaaacttgttctctttttttcccgaagtgaacccaagatctctatttatagtgttttgaggatcacatgtaaaaatcaaatcctttcatcacatgactgttacccacactttattttgtatttaatgggataaaaacgttggacaagagagctggaaacatgctcaattaatttatgtacgtttatgaatgttttcaaaaactggttgtaggtgttcataaaaccaccatgaaacaaaatgaaaacaacgattaaacaactgtttccagagaactcaaaaatgtaactcctctccgagttaaatctttccccaacgtcccaatacccatttaagtgatttaattgagtattgtaacagtttctaacagctagaaacttatcccattaattacataacttgtgtaataagtcacatattataatttgtgatccttaagttacaatctattttcagatttgtaactcctcatatgttacaacttttatgtgtattattataatatatatgatataatacaacctccaacacataatatatattaatctcatatttatatacaatatagcacaattaaatattttaatatatattatattataagaaataatataacattcccccactagattaaaatttgtgacgcaccattgtaacattatttaatcaatcaaatattacatactccccactttgattgaataaatcaaacacttttatagagatcttgcttagatgcataaag

SEQ ID NO: 229617 - DNA, 1571 bp, Cannabis indica
ctatttcagaaaaggagaagtgggagactggattaatcatcttaactcggctacagtagaacgtgttaaaaaactagtccataagaagttaaattcttgtggtttgatactttaagcttaaattattttacatattaacaaaaaataataactaaataaatgaaaaacagatgtaagttttattatcgaactaatttttatttacatgtttggtgcatgaaaagtctatatataaataacttctatttggttgtgtattgtattagtgtgtatctttaaagtatttctaaaataaataaaataagtatttattgtgttatgtactataccttactggactggatactagtttgaatttttcaagctttttattttttgttaatatattatttgctatacttaacaatgtgaatatctcctcaccatcgaccattttattacttgttggatttgggcacaagagttagctctctacacataaacatctcttaattagatgcaattttatttatttggatccaaaagcttcgaaagacacaaaagaagttttatcagtcatggtttaccgccgtcaattgtttgaaccgtctcttcaaagacgggagtacttaacaatttcggttgatctaccgtttcgggaggagaaatcgacaaatcccgttggcattcctggaaacaatattggcattggctaatttggtgacaaataaacttctcaatctttattataggattatagttgttgtgtttgttggattaacatagtaaataaaatttgcctaatgtcttaagaattaataaataaatacaacagtcaaacatttgagacatgagtcaaaaataagaaatcacatacacaaaatgttttatatgaaaattatgtaccaaaagttgcagaatattgaaagcttattatgtttttcacaagcttccatgctttcatttcctttttgacatcgtcattattcgatataatctaccaacaaattatcaattaaactttgtatttttcaaaatagtataaaatagatgcaaaactcaattttcatcaaattaaataattaataataacctaccttagaagtgttattacaagaattgttacactctttgcatttattcgtgctagaaactaatttcaagttggttatattaaaaaaaaaaattgacaaaaatcaagtttaggatcatttctataccattctggaaaacaaaaaatctgaattatcatttaacaaaataaaaaattgaatctgtaacttttttataaaagactgagtatttaacctaaaatctatacacacatggtatctatgtaatatattagtaagcaatattactacatacatatatgaataaacagaatgagaactttgctagcaaaaaaaaaaaaagacaaaaaccaaaaacagataagagataatagaaaacaaaaccttgaactgaaaatgaataaacatagtttttaccaaaacaaaatcatcatcaaagagaaacagttcttttgtaaagtacttcattgtcactctcttcttcttcatcatcagacacaatctcactaccaggtagct

SEQ ID NO: 229618 - DNA, 1165 bp, Cannabis indica
caatcattaaacattaccaccttttccattggacttattttgaatatgtgatcatcataacaaaattctgttaattctggaactgattcaactacaccacatcttatatataatggattttgaattttcaatcttttcaagtgatataaacttgaaatttttaaacaatctaatgcccaacgacatcctctcaaagacaaattctgagaggaatattagaaataaatgcttcaaatatgtgttgatttgcatttggccaaagcattgagagattctttattttcttgcaagaagagatgtttattgtgcctggatcaacataacgtagaatcaaagattcgagattaatggcttcaatatgaactcgaggattctcgttctcataatcaaatctaagttcaatgatcttgacacttgaattttgttatcgaaaattctcatcaataattcggtaaatatattgatctatatgcaatttctcaagaaaagtgcaacgcgaaatacatttagatagccaactgtcgtttgttgacgatgaaaatcgacatgacaccaacgatagagtttttaactgtagaaaattaaatgaacaagaagtatccaattctacttctttcaactccaacacggtccaatattttgcgctctctactattttaggtaagcaatagtagtagcattcataataatagaactcttcacatatgagaagacttattttcttaacctttttgtcaacaacgaaagttaaccatttatctaagaggtggccttacttcttggataagaaatcgtcatcttaagattaaatcttgttatggttgaaccgaccctaaaatgcataccctttttgcggtgatccaggcaatttttaaaaagattgaaggatttttccccttgtattaaaaatttaaatgcagggaatggatgccagtaacgctttaaaagaacgcatgtttgaatcacatctttagtatagagaaacgaaagaatgttaaagattactccttcaggaagttccgaaattctatcatcaatcgttgtcgttttaaccattttttttcccaaataatattttatccacaagttgatcaaaaagattccaagtaataaattctgaaacgtgaacagtaaaagaaataatccaaataaaatatcagtgttt

SEQ ID NO: 229619 - DNA, 1011 bp, Cannabis indica
cgatccgagtatctgatccagcggggcggggcggggcaaatccgtgtatgatctggatcaggtcggatcagatccgacccgccccattgacattcctaaagttaggtatttgatgctcgatggggccagtgcttttcgtcgaagagtcgtgactctaaggagtgagggtggcagtggtttcaaacgggtggctcggtcgggtttggtgaaatatgcatttttttggcaatcttgaacaaatttcataatagcttatgtaagtcattgtgattgattcaatgttttactactcactcctattgatttgcttatagttgttattctttaatatttgtgtttttctttcccaatttttgagagatatacactaaaaccccaacaacatggccatcaaaagcaacatcctcgtcagattttttgaaaaaaaaaagaagctaggcttgaataaaacaaagactttttgataatttacactgcacatgaaaataactgttactaacagaatagattgataaaacctttggttactttctatttatgttacaattcaccacaactcaagtcaagtacgatggtacccatatactaaattactaattaagaaaaagtagaattttaagctttattctttgtctatatataccaaagttaatttatttaatgaaaggggtaaaaaagttgaatacttacatattgtaggggaatttttaagtaggggcataattgtaaatacgtgtataccgtattagctcgacttatatattttgagatttttaaaatatgagtcgttctatgacaggccataaaaaattataggtcgtgtcgagcgtgttataaaaaaaatatgagtcgtacagtgctgtgcaacaattttatagagtaggtctgccacgacccgcaagcccgatagtttcgtgacgtgctttgtttgggccggcttttttttctaaataaacgaacccattttttatagggctatttacaaaaatatgggaaaataaagataagttt

SEQ ID NO: 229620 - DNA, 3050 bp, Cannabis indica
aaaccccttaattttttttttttggacataaaatctattataactaattagtagcgtttagttaagagaaatgaaaatataaaaataggaaagttaataagaatgaaatataatcaaatttaaaatgcataaaataattaataaaaaaattattaaaattttctcatcatacatttgaatgataattccttccattttaaaatagattagtcattctaccaaaataatagaaaaatcatttcattgaaatgtcatttaaatatttcaaaatacatctaaataaaaaaaatagaataaaattattttctttatttcatttcattacctataaccaaacactattttaatgcttctatcaaatcataggggcttgtaagaaaaacgtttggacagaaaaaaaaatgtataattatgcacactcaaataattggaagactctataggttgctaaggtcctctttagcacttctctttgttaaatgaccatatacattttaaaagaaataaataatacatatattgtacaaatagtagaatagaattagtatatgtacagctagggcaactctttgtttttgtttaatatttagttataacattctaatattattataattatcccattactaattattaagcaaaaacaagcattgctcaaaatataacatatgttatcacagtaaacattgagtgggcgagtgttgagaaaaacgataaacttcaagtacagcgaaataacaaaaaaataaaacaaggcaatttactcaatttggtaaaactaccaaattcacaaagatagatatatttcacttatcacttcaaaattacgtgtactctctatcttaatctctacccaaatctcaatacaccatttgtttcttcctcactcttaccacacaacaaactcacacacacttttctttttacaactcactatttttctctacacacacatacatctctctcacacaaaacacatatttacaaagttacaaaacttgggcatcaagacaacttgaggaccaaaacattccaaagcttctttaagagactttttaaaacttggcaactaagacttttcttttcccataattaataattacacaaaataaaattgcaactttataaatataataaataaataaataatttgagtcaaactccaactgaaacagagagaattctttatatattttgagttgattaacttcatcaaaacaaataaaaaaattagtggataaaattatatattgtattatataatattttatatttattattatgtcattttaaataattttttattaaattttaattaacatactcttttattaaatttcacatttaattttgtattattattattattttatatttttaataaattatcaagtgaacattaactaatatattaaattttacgttaagatttacaattatgtattagagcacaataataaaagttaagtaaaaatattataaaattactttttgtacaaaacatagctcaacttttaaatctctcattggaaatgtctaataacaataataacatgataaattaaggtacgaggccaatgagttcttcgaccaagctactgtccaaggcaacgtagcaatattctgtggtaagcaaaccataccacccagtgccgaggccgcggccgcattcacttccactgtcgacgatgtcttattagctcttcaagccgcgacgcccaagatcaatgggtatttcgcggcggaaaagaggcaagtgcctgtgagtgtagcaggggaccgaaacttgacagtttatggcgtggcgcaatgcgcgcacacagtgagtagaagtggctgccttgattgcctgaaagtggcctatgccaacctccaacattgccttcctgacttggatggtaaggccatcgatgcaggctgttttctaaggtactcaaatgcttcattctttgatgataatcagaccaccaatctagctccctacttgaatggttagttatttgttttcttaattaattaactaatgttttgtttattttaattattaataaataatataattaacactctgtcacataagtccttaacagaattaactaactcaagatatataagtcagctgccatgcaaacttagacttaagtggctaaattaattaccacatttacaatgaattattattttgactcagccaagattagactatataggtcaacttcttttagtttttttttaattttatatatatatatatatatatattacaataatttaagaccaaaaaggaaaattaggggacccacttttagataatgaatgttgctgttagatacaaacaaaacaaagtgacgtgttttaaatgattaattgttttttttggagcaattattgaattaaatatctaatagagattgatatttaattatacgacaattatagtggtaccaatatagtatctcttcataatatttcttttagataattcaatctgttttaaacttttttcatatgaatcatcatcataatttattgagaaacgttaaaaagattattggtatttttttagtatagcgtaatagtattttataattaattaataacttaaaacttttaaattcgaactcatcacagctctttttttctcatctcactctcactactaagttagcttagtagcttaagaattatcggtgcatagtattattttggtgttatatcaccagttcggccctggcatatgtgcctagggtcagtgacgaagctagaaatttagttgagtgagggcttgaataaatattaagtcaaaactaataaaaataatgataaatgtatctttcaaattttcatcttcaacaaaataaaataatactattgacaaaaataaaataaaatattgtcaatggtattaatttattttttaataaagtattattttttttattatttgtattggactacttttaaaatgggcttgattagaataagagtaggctcatgaatcatgattaagatattgagtgagggcttttgtgaattggactttaataaat

SEQ ID NO: 229621 - DNA, 2122 bp, Cannabis indica
gtgatctccacaaaatccttcatagatctcatgtatgatttttttagcttcaaagttcgagacacatcttgggtatggcatgcttaaatatttatagtaaaggataccttcgatcatgaggtaatagtgggattgatactggatcctcctagaggccgcccgatcttggggaaactctccttttatcaaatagatgataattagatccatgcagcctgacacttgatcagttacaacttcagacttgaatgtgatactaggctccatgaggtactcgataggaactacccctggtttttccatttctcaatctgatgttagcttggctaggcagtccccatgagcattcttttctctgggaatttgttcaattttttaactcttgaattcttggagtaagtcctgcatggcagagacataggcaaccatcttttctcgacaggtttgatattctccgaacacttggttaataactaattgggaatcattgaacacttctatcttgagggttcccacaagtttggccaatctcaaccttgctagaaaggctccatactcgacttcatttgtagaagctgggaatttgaatctcaaggtagcttgaagcctgaacccttctggagatatcattgttatctctactcctgatccattatcatttgacacaccatccacatataccttccatgtgggaaacagggtatggtaagtcagtcgttgcctctgtttcattgcattcaaccatgaagtctgctagggcttgccctttaattgaaatgtgggggacatactatatatcaaactgactaagctccatcacccacttaaggagtcttccagagacttccagtttgtgaaggacttattggagtggaaggttggtgaacactttaattgcatgcgcctgaaaatacgaccacaactttcttaatacaataaggagacagaaggctaacttctcgattagagggtaccagacttcaacgctaatcattcatttaataatataatatatagggtgctgaacttaaatttcctcccaaaccaaagcaacactaaccacattcttggagtaatccaaatacaagtataggtcttccccatgtactggtttggataggataggtggcttggccatatgttctttcagttttctgaatgcttcttcacattctccactccattcaaacttcttacttttcttcaagatgttaaagaatgggacacacttgtcggtagatctgaagatgaatcgactcaaagcaactatttttcccgttaagctctacacatccttgtgcttttggggggaaggcatgtccaacaaggcctatattttatctatatttgcttcaatccctcattggattactatgaatgatagaaatttcccagatttgacgttgaaagttactttctaggtttgagcttcatcctatatctcatcactacttcaaaacattctttgagatcatctgaatgatcttccctagtattagacttaactagcatgtcatgcacatttaccaacatatttcttcccaataaatttttgaacatccaatttaccatgcactaagatgtggctcctgcattatttagcccataaggcatgactaggtagcaatatacctgaatttggtgcactcctagtatgccacatgcattttgactggctatacctgaagtactcatccatgaaggataatagttcgaacccaaaggtggcacccaccatttgatcaagttttgggtaatgggaaacagtcttttggcaagccttgtttaaatctgtatcaattcatattttccatgtcccatattgtttgggcatgagaactgggttagccagccactctgggtagtaacgtgtcacaacccaagccctaggccgtggcaaatatgtaatatccataatttgggtagtcaaaggtcacactttgacccttgtaggaagataaagcttatgaatgatctttttatttatatcacaaaataataatttaaaagtaatggattaactcctatattaataagaaaatattagtaacaaaatcaggaccactcatcaatataaaagaacaataatatcccacagttatgtaatcactgaatagataga

SEQ ID NO: 229622 - DNA, 2029 bp, Cannabis indica
ccactgcaaatgtacgctggtaagactttgatctctttgccagcgcaatttgtgaaatgcgctggtaaaagttacttttaccagcgcaatagcgaactgtgctggtgaaagtgacatttcttgtaatgtatgtgtttcattctatcatgaattcaacataggattcttacataaagagatactactctggctgtttgagtagatagtaggtactttcttagctaggtttagctcttccagctagtaaaattacctccagtagttataaaaaaaataggttgatgtagatcttatagtgtctctatcccttgcatagtctgcatctataaatccctcaatgttttgatgcgcctagtgtgcttggtatatcaatccctttaagtatctgataagccatttcatggctttccaatgttctttccctagacatgaactatgggtggcaattcgtgttcgcgggtcgtgttcgtgtcgtgtcgagacccatgtataataggtatatgctcgacctgaacacgactcgtttaataatcgtgtcaaaaaatgaaatccgaacatgacccgtttataaacaagttgatacaacacgacccgtgtaacccgtttataagcatattttgtttaaacatgtcaaccaattacacgtttatgaagtattcaacacgtttataacccatttatgacatgttaaagtactaaaataattttaaataagttattaatgagtcaatttcgtgttagccgtgtcaattcgaacacgacccgtttattaaacgggttagacgagtcaacccgaacctatttaaggtaaacccaaacctactaactctcgtgcggattttgaatcgtgttatcggatctgacacaatttttcggccctaacatgaacctacttaacacattgattgcataaagaaggtcaagtctattgttgaccataagatacattatattgcatttgagtagggtacttctgatattttatctattccactttattcttaaggcacatagatttggacatgtggtattaattggtaattggttgtgcaacaaccttagcatccttcctagaatatttttttatgattttgtcaatgtagtcttcttggtgtagcttcaatctccccttgtctctgttccttaggatggttatactgtgcagaatcttagttgctacccatccttcatctcaaattctaatttgagctttaattcttttaattttgtcaacattagacttttctttgttatatcatctacatagagcaataagtagataactttaattactaaaactaacatatttttagtagataactttaattactaaaactaacatatttttagtaaaactatattatatttgtgactaaaaaattatcacaaactattttttttaacaataaatttaatatcaaccataataatacatactaattttcttttttgtgaattttcaaaatacaaaaaattttaaagtaaaaagagaaagaaaagaaaaaaggagacaaaagttataataatataaagaattgtgtgtggaccatattaataaatgtatatataaataattatttggataagaaacgtgtggaagtaaatgaaatcaaagtaataagtatgaaatattgagattgatttaattaattttacattttttattaataaatgattagttaatgcagagaaagagctatggtagtgttctctcatcatcaattgcaatctaggttctcaacgacaccgtttcacatgaagcttgatgatcataatgataatgatgagattgagaagattatgatgaagaaaggtagaaaatcattcatggagtttccatacgtgtcaagtccacaaaagaagttaatggttgatcttgtatcaacggtggagaatggtcttaataagaagctccttccatctactcttccaccaaatgtacaatactatcaaaatcaaactaacacaactcatgcctctcttcacatcagatctggcaaaccatcttcacatgtaagatatatactct

SEQ ID NO: 229623 - DNA, 1061 bp, Cannabis indica
gtcatcacacattttatatatgcattgaagcacaatctcagaattgtttctattatatttatactgttactaatactcatatcttcatgcaatgccactgattttcttctggttactttctgttatacagactcctactgaaaaataaaacaagaatgatattactgaataaaaaatttagagttgatttacatactaggtcgctctttttaagacgttcacgacactgcccagaaatgtgcaagtagtcgaaaatttttggtcgtccccaagataaaacaacccagtcgaaatatcactgtatcagaactctactacacgatagagaaccgtcgaaacaccacacccaaaaactactgctcgaactagttatataatgtaatcgtaaaaaatacagtaaataattttttctgtgtgaaaaaaatgtatttctcctattagttttgatgaggtcataacaggaagaaagacattgagtgagatcgtgagaacgatgttgaaaataagaacatgtctcattttaccaattaatttaaacatgtataaaactgtttaaattaattaaataaaaataataagtaaattttctccaagaagtaaagtatcacaccacaccaactggttcggttggacaatgcgtgtcgcgcgtgcggtgggtaagtgtgtatgtcctcacccattcgcacaaaattggataccctttggggccctatcccaagtggtagggaaggttttgatgcattatgtcctcacccataatggtttgatgcattatataaggaatacacagagatagtaatgggaagaaagacgttgagtgagatagttttagtatatctaaatagcagaatcataaataagaaattatactagtgattgtggttcattcatctgaccatagactagagccactttattcggtaatattttgttcatcaattacgccaaattcttttattttcatctaacgattattccttcacaagtacgttcacctactccgccaaataccaatacacccccatgaactttgccaacattgttgatcaattccataatga

SEQ ID NO: 229624 - DNA, 2027 bp, Cannabis indica
gaaactcgagaccggactcctatgaaaatgactcgtgtactcactctcctcgagggaagttgagatgtcatcaagagacccctcgaatatgaacctcgcctggactagattcagcgagatgatgtgacaatgacagagtctagtcgcattcgtacgactcgcataggataggatcaaggaacggtttaagactcgtatataccggaatatatgcgagaattcccgagatcctcctgcgaattgtagagatcgattctttactctgcgagctggtccaaatgacccaataaccttgataacccgataaggactcgcattcctcaggttaccgacttgctacaagatgtctgtataagcgacttgaacaggatgcagacatcttagactcgactagtctcgaatgcatcttaagcctgcgagtttatgcaagaatatgaacagccatctcgcactataaaagtcgcatacgttgctgtatttagtgaaataagctgaaactgtccttcatttattgtgtttacattttttagtttaattattgtaattcaatgtataaacggattgataacaaattcaatctctgtgtaaatcaaaggacggttgctttttttatataaaggagtgatccaacgtgaaatgaacaagacataaattcttgcaacagtggactaagtagaccgtgatatgactgaatcactatactctcttggtttttttacatttttcaattttttttagcattttgtgtccttggtttgaatactcgccactctaagttaagtactcgtgtatatttctcttatattattatattatttattttggtgttgttaaaattcgtaagttaaaacaagtgattatttagctaggcggcaggccacctatataaatatttctacttaattatacttgtttagtttccaattttgtttacagatgtaacaactaatcaacaaatataatcaaattttctatctacgtaattccttttctttgtcttttatttatatatgcaggccaaatccggttattgctaataatcgatactatatactacaacaaaatacaaatgcacggtattaattaatctaatatgcaattattatattttaaccaattcttaacttatcattaccaatcacgcaactgttttgagtaaatattataatagatttaagaatgttattaattgcttgatttattatgaatgtaatagtgctatattagaaaatgaccattgttattaggcactagtggtgcctagcactttctcgacatgtcgcgttgcgattggctagcgatactccctaaaagctattatattaaattatttgggacccaatatttaattgaaacacatagaagaatactaaacaccactaatgacctttaacatttcttttaaatataaaattaattaaactagataatattggccaaaatctcttgccgatcaaatctcacacttaaaataaaaaactcagtctaatcattaatatcattgaaattaatgttcattagtataatagcattgctataaggtactagtggtgcttagcaccttcttgacatgctgcgttgcgattggctagcgatactctctaaaagctattatattaaattatgtggaacccgatacttagttgaactaatagcaatattaacacatgggagggtgctaggcactactggtgccctttagcatttctcttagtataatctcagacataaattcgaataattaacatattattaagtaattaatgtaatttaataaagctaattataattttttctccaattttgacataaaccaaatcatgttactcgaactttgatatgtactaaaaatcatgctccgtgaactttcatccatatcagaatttttttactaaaattgcacaaaagttcttgaattcaacaatcttaataattcaggtaatatttttaaccatcttaaaagtttagagggcataattttggtatatgtgaacattcggttgaaaaaaatccatattagccattta

SEQ ID NO: 229625 - DNA, 889 bp, Cannabis indica
aaatcacgtaatacgcctaaggtagttagggtgttacaattagcttcttattacaagaatataaaaccagccaaacaaacaaagaaactctcaaaaaaataagaaaattacacacaaaagtactagtaacactcataaaaacatagcaaagacaaatatatgtcaatagagtaattgatcaataacaaaaaagcacaacaaaaagagagaccaagaggtaaaaccattaaagcacaacaaaaccagatttagaaaatgtaaatagaaaacttactttttctcctagccttacaatcttcaactcaactacttgagcaacaatattggtactatcaacaacatttggtgcaattttactgaacgaaaaaggattgatgacattaaagataaaatttgtgcaaagtcaccatgacaagtatccaatgcaaaaatccaaaaaaataaattcagctataacttaagcgtcaatggaagggttcagatgcatgcgcaactttagcaccatgaaccaaacctaaggcctgttgacctaagaggaaataacaatcacatcataggttagaccttgtaattatgagtgtaatatcactttgagtttacattaatgagtgatagttcaaattttcatattagcttatcatcctatgaaagatttcaggaacttattttataacatataaaattatatataatgactctatagggatagcaaatctcatccacgcgcgaaagcatagaacacctaaaattatagcatttgactaaatttataattgtaccaaaattagtggccggcaatgacaaggataatgggccttactttacaattttttcattttgtcatttcttaatctcattttctcaaaaatgtcaattttctaatttaacc

SEQ ID NO: 229626 - DNA, 1946 bp, Cannabis indica
ggaaacaagagacaaagcctcctctatcttccccgcttcgagtatccagagatcattgtgttccaggatacaagcgttctgttgggcattctatcaaacacatcccgggtaacatcaagtcggccattacaacactgctcagtgataaaagcgtttgtgagaatgatgttgtctttttgagtactcgacaaagcttgagaaaatcccgaaaataatatggtacatagagtttgtttccaagttccaagcaaagaagatttcaccaccataactaagaaaatagaaaatggtgtcgtctctgcattcctttctcttctcccaatatcaagtcaatgctacatttctgtactcacagccaatatccccatgtgaattatacaaagaaaatcttaggcctgaactaactaaatttcacaagttcaaacatttatggagaataatataaatctctatcataacttacttgtttcataaagaagtgttcaactcagaattccaccgcttccaaagcttttggcgactcgaaaaatcgagactttgagaattgagggttccttctttgacactcatcagaaagggttggagaattcattgatgggccggttagaacaacccggcccaaagaaaatgaaattgaaggtcctaagagactatctaaggggtattacaatttctttttaattcttttttctctttttggtgggactaatgggagtttttagatgttgttaactaagttctgggtagtttttaattttgtgaatatttgaagtaacatgttctgcactctgttttcaatttgttttaggtactttagttaacacagatgttgaaattattgttgatgatgataataatatgtatcaatgtggatggttcttgccttttcaatttataaataaaaatttacactcgtttcaaagtggtttatatgatttgcaggtgtaattcatgttcattatactcaaacgctacagttttatcccactaaaaaattttctctttgaaccaaatccaaaatgcaaactttttcaatttcacttcttgcaattctcctcctcctctgatcagtcatggtccatacctggtaagcccttgatcataccatttgaatatattatagtaatggcattatattccccctctcactcgtaatatttatattttataaaattaacatatatatttattatatatatagtaattgcagttagagttcaaactgacagagctatcatctttgtaagtttaagttatatgtgttctttttgtttatgaaatttctattgtccaattcaatcttattattattctatatttatctttctaattttttaatttacgtgatattatttatatttattcttctaaaacaattttgaatacaggaactttcccatgaacaatttgtctgacccatggcccctagaaatagagattttaaacaaattagaagtatcgtatgtagtacggattgtatatcattccatttatctattccactgagataaatcctaatttctttctttatattgcttacttgacagtggtattaccaattgtggggttagtggagagattccttctacctttgaaaatctctaaaatttacaagaattgtatactgtttattctatgtaccctctcatgatgatatgacatgatttaaaataagtttaaaaagtttgttgtcgaattataaaatgatcatcttttatttaccagttatttccttttttctataacttgtgtagatgggcattagatattagacttacaggcaagatacctgatttaatttcataggaagttggtcaaatcttactaccttggtaggcaagatgaataaatatctgtattttgatgatattgcaatatctatatccttattaacaatagctaactacttgtttgtcttgatgcaaggtttcctaagggaactcttt

SEQ ID NO: 229627 - DNA, 1183 bp, Cannabis indica
ttacgacgtcgtttcgttgaaactgaatcggactaaagcgaagaagagttatggagagtgtaaaaagacggctaaggacataacattctgttagcctgtacagacgtcgacgaaattgttattattttatttttatgtttctctttctcttccttctctcaagagaaacaaaaaattttaagatatttattttttttttttttgaaaaaacaacaaaattttaaaatatataatatattgtttcagtctcgtctctcagtaaaattaaaaagaaaatgactgccgtaacgtgccgttaacattaatttacgttaaatagacaaaaatgcttaatgctgctgctggtgatcatggacacgtccaatttgattcctaaattgttgttgataataaatccaaaagattattttattattattattattaattttttttaaatgtccaaaaagttattttggtacgtgaaagtaacgaagaataatgtgtggtagtggtttgtattggattactaggttgctttttgaagatacgaaaatacaaatcaaatttatctttctgtattgttgtcggtagttactttatttaccatttgatttggtaaggtgtgattgtctaccaacattacaggtagcttggcttcaaatttaatacatcagttattattagtagcagcagtagagtagctgaagcaattaaaaattcatctgtttgtgttgtataattttaaaagaaaactttaatgattcggggaaaattgtttagacagaaaaaaaaaaaaaacgagtttgtgttatatttaacttattatttataattgtattctaatataaaatgtaaaattgataaaaaaattaattaattatattaatagttatttgatattttattgagaatacatataaattattatttttaatttttattatttaaatgatagtaatatagtatataaagaatgtaaagtttaataaaagaatgaattacaataattaatcgtagtagaaaaaaaaattagtatttattgtggttaaatttaacacaatgttaaaagttatgccaaatagtttttgttaaaatatctctaatagaatgctataaatgtggtgtataagaacatctgtaaaaattgtgctatatttgtcacaaaaaaactagctttgtggtggtttacatcaggaccgtc

SEQ ID NO: 229628 - DNA, 807 bp, Cannabis indica
cttcaaacccatgtcttatatataatctttgatatcatcaacccataatatccacaaaccaaactaataactatctaaaaaatacaacattaacatctcaaaatccttccaatatcatacagttacatctatatataatatttgcaagatgaagggccattatagtaaagtcatgttgattttgtttataatgtcacttggtttagttgggacgttagtgaatgggcagggcactagagttgggttctactcaagaacatgccccaaagtagagtccattgttagatcaaccatggagactcattttaaatccaatcctcgaatagctccaggaatcttgagaatgcatttccacgactgctttgtccatggctgtgacggttcaatccttatcgagggtgcagcaactgaaaagactgctccacccaatagtggaatacctggctacaatgtcatagacgatgctaagcaacaagttgaagctgcatgccctggtgtcgtttcttgtgctgatattctagctctcgctgctcgtgactctgtcgtcttggtaagcacatcacatcaatacaaaatacaatattagaactttcatatattaatgaagcattgttataagccatcgtagtccctaacacccttatgagaagatgaggttgtataaataattagccgttttttacaatcattattaaataaataggacaaaatataaaattgatagctcatacaggtggcacaccatggatcctcattagcatttttctctttataatgtgccataatcactataaaaaattttacttt

SEQ ID NO: 229629 - DNA, 2598 bp, Cannabis indica
tttaaactcttatgcggatcggattggatccaaaatatgaaatccgtacttagtgcgaattggatattgtttgaccaaaaaagtgcggatttggatcggatgaacacccctacataagaggcataccccaactaagttatagacttaagagatgagtttacttgcaatctactataataataagttttactccccaaattataacctatgcatgattgtgcctttgaatttttgagtccattaaaatagttccttaataatttacaatattgtaaagcggtaattctcacaagttttgttacatgtgacacacataatgatgacgtaaatatttatatcattgccacattaacatcacatgtgtaatttaaaattaaaaatatgtatttatcagaaattattaagtaaaaaaatcaattaataatttctttaaaaaataattaaaactaaattagaaaattaaaatatatttttttttcaaattaattacacacgtggtgttgacatattaattgtctaaactgccacatcatcattctgtttaccgcatgtaacaaaacttgacaaaaagaccactttacgtcactatgaatagtttgggggactattcttagttgaaaaactcaagggcccaatcatatatatatgtcatagttcaaagggtaaaaatcttaaatagcaataataataagagtaacttgtggcgtatatcccaaagcttaactcttagttgcagataaatacctaagtttaactccagttgcagataaatatctaagtttaatttttgacgatagtaatacataagttatatttataattaagtgtcaagtcaatggccacgtggcaacccctaattggtcatagtcattcaatttttatttaaaaagtaatttaaatatacaaataagaaaatgacatgtggataatgatttaacacttaacaactatgtacctactgaagttccagaaatttaacttaggtattatttcataatgggaatagtgggagtgcaatggaccattataatgcccataatccaattgacagaagcttgagggattatgtgctacctaccatgataggggtccagtcctgtataagaccacttgccattgacgcaaacaattttgaaatcaagctagctaatcaagagttaaacttaagcatttacgccgtaaattactataacaacaacaacaataataataataataataataataataataataataataataattagaatttttgtctcctgaactttgacatgtattaaatcatgctccataaacttttaagggcgtaaaaaatcccccttgagttattgagattgttgaatttaaggatttttgtccaattttagtaagaaacgtttaacatggatgaaaattcagaggtcattatttggtacatgtcaaagtacgagggacatgatatagtagattcaaagtttgaagagcatgatttagtatataaacaattaccaaattaataaaattagacaaaagttcttgaatctaacaatcttaatagttcaagagttttttgccaatcaaaaaagttaacgggacatgattaggtatatgacagaaaaaaatcctaattagcctaataataataatgtggatccatttgagatgagtgagatggcagttataaaagtgaggagtgctaattacaacttcttagtcaatctctatgtctaaaatcacatgccgaaatattttttttttcatagcagtattcgttatagttacagtatcattcatgtaaattcttgaaattttttgaatagtttacaatgctaaaaacagagttactgatattccagtttaccatgcgcgtttaaaaaatttcaaacgtattttcagcactgtaaattattcgaaaattttaaaattttgaagggatgatgttgtaattataacgaacacctctaggatcggtaaaatgggttagacacgataatacgacttgaagcccgcacgagagttagcgggtttggatttacattaaatgggttcagatcgtgttcgagttgactcgtctaacctatttaataaatgggtcgtattcagattgacacgactaatacgaaattaatttgttaatgacctatttaaagttattttagtactttaacatatcataaatgaattataaacgtgttattggttgacatgtttgaacaaaatatgcttataaatgggttatacgggccgtatcatgccaactcgtttataaatgggtcgtattcagatttcattttttaacataattattaaacgggtcgtgttcggatggagtatatacctattatacacgagtctcgacacgacctgtgaacacgaattgtcacctctaaacaccattatcaaaaaaaattataaaaatattttcacatatattttcaaacatataaattgattaagaagttgtagtaggaggttgagtgtaacacttcgatatatatataataggacacgattttgtctcatgatgtcacgaaatgtatttcgtggtatattagatgggtttcagggtacgctaccattttttttaaccctaattacctctagatcaaccccaac

SEQ ID NO: 229630 - DNA, 1665 bp, Cannabis indica
gaagataaataaaaagtgataatacataggagagaggagagagaaagagaaaaaaaaagaaaaaagagaataaatgtgagtaattatataaatgggtctcattatattaaatattaataaaaaatatatttgaattatgataattttattacatgacacattgtattggagacacatgtcataatagacctttccttttatttttaatctactacatgcaactacactttatttaatgtgtataatcaaaagtcatacatacatatcaatgatcaagaaaatgtcttcatagaatgaggataaaataggtatgtccaccataaaaattttcaatatatataatactaaaagattaattttttcttttctaaccaatgacaaaaaaaaatgatattaaagaatttagaaatgaattcactaattaaagtttaaattttaataaaatttttatcttctcatatgcttgctaatatatatgtgagaatttatttcttatgcaagttacaaataaatacaaataaaaaagtagtacgccgacacttactattaaattaaattaagtataattattaattaattttttgcaatttattactatagaataattttttagcaatttatacacataatttttatgtatgggaatgctttaaatggattttctcataaatgggtaatttattattggtcattaaatcaaatctaatgattcatacttataattattaagtcaatttcaaaaattaatattactttttttttattttaacttattacttgattgacatggcaatttaattttttttcctttatttttgtttgatttctttgtattccatcctcattcctaaaataaataaaattattaaaggaaaaactattttgtgtatgaaagtgttatcaaagaaaaaataagatttcctaaaaaattatttattgctgagaaaaaataaaaaacaaaaaaaaaatctcaaataaaaaaattctaatttcactcaaaaggttcatatttgatcttaatcaatgttatattaaaattacatgaaatccttaaaaaaataccaaaaaaaaaaaaattgtagttgagcagcatataacatataattaattatgttaatttagagtaatataaatgtcatgaatgaaaatcaaagtttaaaacctttcttcaactacatataaactaattatatatttttttcaagacctattaaatcataatgaatgcaatttaattaatatttattattggtgtaaagataaagtagtaatttcagcaaaataagttagtttctaaaaataacttctaatttcttcaaattatttgatgaaattattgttcccaagtttataaaaaaataatataattttaaaaaatatttttagttacttgctatagcaagaaattagattcccacattataaattattttagtacctattgttattccaaaattgacactctgacgtggcatcacgagagtggtgactcgtggactccacttggagcatttgttcggaacgatatgccgagcaggatgcctcgctggcacatccaaaatggaaatctcaaacgagccgtgccgaatgatcaacactaagcgaattcagcttaacgcatcatgaatcaccagctcaatccctacagcttagggatccaacgtt

SEQ ID NO: 229631 - DNA, 760 bp, Cannabis indica
aataataataatatatgttttcaaactatttcttgatatcaaaaagaattggtatagtcacaacaataataaatatatgtttatgatttgattttagtattttgtatttgtgttttggtataagttgggaaactgtctgtttcttcttcgactgctacatggtcattttttaggttgtttgaaattaaatgttaatgcaacaataaataatcatacacaaaaggattgaaataaaagctataataaggaatttaaatgattctattaagtatatatatattcttattcttttacatttttacgtatataatttttatttttattgtttttattagcataagctaacaattatgttttgttaatttatcttgtactagttttttggaaattgatgttagttttgatgatttgcaggttttagctgtccaaacaaagtgttgtagcattagattggactcttactgtgggtctttctttacattttgttgagtctgattatttagcagttgtaaatattctaaatgttcttctttccttaatgaacttgattccttgttagaggatttagctaatttgatgtccagttttcttaaagtatccataatccatgtatatcggacagccaatgagactgcacatagattggcttggcatgctcttcgaatagatagagaactagtatggtagaatacttgaaatttgtatgatattttgatttcttttttcagtaaacgtattctttattacaaaaaaaaaaaaa

SEQ ID NO: 229632 - DNA, 1158 bp, Cannabis indica
taatatatggaaacacaataaatttcaagaaattatgatcattatctcattttaatgagttttaaatttaattacgatgtttatgaaaagctcaagcatatcaggatttagattcttttaatcttctcaactgaaattattatccccttttttaattttctttaaaattaaaaaagggaataatatattaatatacagtttaaataatatttaaataaaattttaataaaacatacatttaaaatatatcttataaatcatagttcaattttttttttgtacaaataaaataaaatagtacgatatcaaaaccttacaatattcattaaaaaaatatttcgttccagtaaaagaaaaaaatatatatattatataacaccaatttctttctaacagaaaatcctaattcctacttaagtacttaaaagtactaatgccaatgttaggcttccaaaaccataaatttctcaaatggattctagatcatccaatttgtcctgatatggccggccattattactgagtaatttagggaggactactcactaaatattttattctcaacacaaaaaaagtttaacagtaacttttattcaattttattagctaattaaatatattgagtagtcctccctaaattagtttttaaatattttttatttaaaaacatactcctgcaacaggttggatttgatagttgaatgtaggatttatttaattttaaattaattaataaaagaattcaaaaatagtatttaaataaaaaaatattttggattttaaaaaaaaataatgtaacgcccccgtgatctattaatatatcaaaaatgtacatttatttaaaaatatttgtgattgtcccgcacccacaatggagaaataaaataacatgccaacagtttattcaaacgatcataaaattaaatcatgatcatatacacatatagatttagtacaataaatttacttccaaataaaatttaattaatctgtatgatagattaataaactaacataaaatattacactaaggcttcttgttgaccttgtgcaagttatataggaaaataaacgtaataaatttaggtatagattttaattcacccttagttatatagaatgctctatatgttccacaaaaaatattccgagattggt

SEQ ID NO: 229633 - DNA, 651 bp, Cannabis indica
ttacttaaataaaagcctaatagaatttttatttttttttattttaggcccccggaaagtgtgggtcctaggcacgggcctagctcgcctatgcctagggtcgaccgtgtgtataaataatcattggtagagtacatatgtattacacccaataaaaaagtataaacaattctctatgaagataattaatattaattacatcgttcaactaaaaggagagtattgaaggagatagaattaaacccacttcattcaaattcttctttgatcgtgatttttaagataaaggtaatatcaatgtgtaacaagttcaatcaagtgacaattttataaatttattcataaaatcattaccaacatcaacattttgaaaagatagtacacaagatgagaatacaccaataaaaagatctccaaaaacgtcaaaaatgaagggaagtgattatacagtgcaccatttttccctttggttgagtttttgacccgtcaagttttctggcaagattttcaaagcagcaattatgaacatacaagaggaagcgtatgaaatattgtatatatatatatattatatagattaggctaattcgtaattttttcccccgtaactttgtacatgtacaaaatcatgccccctcgaacttttttggt

SEQ ID NO: 229634 - DNA, 1235 bp, Cannabis indica
tttaaaaatatatatataattaattgggaactggattggatcgttactttatgaggtcaaataatattcaatctgcacaagtgcggattttagattttttaatccaattcaatccacgcaagtgtagatatccgtatattttacagcttagattagatcgaatatttagtcaacatccctaaactataaaataacatataaatggataattatgtgggggagtgtcttgttattgggacacacttaagcatagaactcaaattttcctatacaaagtacaaactagtttcaattttatttcataaatatatataaacttattacgcaatctatgtatattattatgatgtataaatggcacgacaaattttaagcgtgttatacactcactatttcagcttcatcattgatatggatatatatgttccattccgaaagtcatgacacattttcttttcttctattaaaaatgtaatctcctacttatatggtgctatatgagaagagatgctgtaaatttaagcaatatatatcatctttaaattaagtagtgactcgtcatacatcggagtacatgatgttttataatcaataattaatgcattattggtaatactccacctctgattgcaacatataaacaatgtatatatcctctatccactcattgccaataaattaatcatagtagtagactagtaatagtcatgtaattatctagagtgagagaaagactatagtaatagtcatgcatataattatttaactagctagagtactgagagaaatacattacaagaaaaccaaaaatttagtattacgctagtaaaataaaatttatttctgatatattagcaaatcaacattggtattaaaatttttgccagcataaaataaaaaacgataacaaaaataactttttcaagagagtaaaattttaacttttttaccagagcagtttacgaaatacactgataaaagtaatttttactaacacaatagtaaattgagctagtaaaaatgacatttttttgtagtaatacatgcttaataaaataatataaatttatatatatagtgcgtctttctgcattagttcacccactacatactttcatgtcatgtctctagataagtgtgtgtgttttgagtggtacatagcaccaaatagaagaaataaaaatggacattaattcacgtaaccaaaatgactactgtcacaagagaagatcaag

SEQ ID NO: 229635 - DNA, 1329 bp, Cannabis indica
attttaatttctaccaaatcaaactactcgaacaatttgatatgtataaattatattccatgaacattcattgatattagaggtttttttactaaaattagaataaaatccttaaatctaacaatatcaataattcagagaaatttttttaacaatcttaaatattcaaagaaaaaaatttaatatatatcaaaatttagagaataaaaatcctaattagctaacataaaataaatatggtaaaaaaagaaaccttgtgttttatttagtgccaatgatgagtgtaaagacttttatcaaagaattaattacgaacatactcaagttcaatatatatattaagaaaatcttgcaaatttaatcagagttcaagtaaaattatttctgattattgtaaacatgacaactcttaattatataaatcaaataatgatagaaaaacaagatatcatattatattattataattattttctattttgggaagtgcaataaggactaatttgatagttcatatatatataaatatatatatattatccttttctctctttttttttttattaaaataaatgaaagatatggaaattaattattaaaagtaatttactataaatatttaagtttagcttacaaatgaatacatctaagttatatttctataatttctttaagtatttgaccgataagtatcaagttaatggtcatgtggctgtccctaattaatccaggtcattatattcttatttttatattaaaattaatttaaataatcgataagacaatacatgtggataatggcttgacacgtaatagtgaggtacttacgaaagttctaaaaatataacttaggtatgttattattaaatattaaacttaggtatttatttgtaaataagaattaaacttaagtatttacaccgcaaattactttattattaatccaaacacaaataatgtttattgtatgaatatatatttaatatatcattaacaacaaaaggggcggtggcgcagttggctagcgcgtaggtctcatagcttagagtgatcctgaggtcgagagttcgagcctctctcgccccatttttcgcttctttttttacacataatttttgaaaagatttaataattaaaatgatcagaatattatttgtttttttttttttctgggaggcattatcactattattattattattttttaaatactacttatttttattaggataattgactgtatgataatttaaaaaaaaaattcttcttctattattctaaaaaatatttatgaatgaatgtattttaaaaatttgaccaaaaaataaa

SEQ ID NO: 229636 - DNA, 689 bp, Cannabis indica
tacctcgtggtgccttatattatggatttactctcataatataaatttttctcttgacgaataatgatagcttatcaggtcagataagactacttctttccaacgggtatttaggattcatgtgatattgtcattgtttttgggattgaactttagtcctttggtttcaacgtgtaacatctataaacttttcactttgtgcagctacaatatcttaatactccttttttttttcatttaattaatgggcagcgatcaatttctaattttgatatcaatttctattcttaggctttgacgctttgcatgtgtttgaaaagaatctgagttaagttggaatttcagtctcaacttctgcagcacaacaacaattgtctctagatttattagatcggaggtatattttctataattgctatattatattacatatagtttctgtcatattggttgaagttgaaaccttcatatttgggttttgtatgtttttctctagttcttttttgcggtttagttactcattattttctttgttgaactgttcttgacaacctgttccttaatctggttttcgtacactcagctcaagccaaaaaatgtttaagaaaaatacattttcacctactaatttcatatttagagttgcagtacagtacaacctttttaagtgtaaattgtgtgtagattca

SEQ ID NO: 229637 - DNA, 863 bp, Cannabis indica
ttgcattgcattgttgtgtatgctacacaaatgcattgcatggttttatagggtatccaatatctcttaggcagggttagaaaaataaaaagaaaaattattggactttttattagaaaaatatgtagtatttttaaaaattactaaaagacatgtatattttcaaaaatataaaaaataggaattaccctttattattttttaattaggttggttgatatgtagattttagttcctctgttgcttgttatgtgatctgttgtttactatgtgagttgctatacgaatttttataaaaatataaaataaaataaaaaaaaatcctaaaaaattagatcctaagttataatatttaggcacagacctaactcaccttaactcaaactcggtcctctcattatattgcacaatctaaaattcgatcccaagatctcacacacactctcccataactccatagccacttgtactcattgtcattcctacctattttgtcttaataaatagaacacaatacaattatacaaaaaagactagcatttgaagtctaaaattatcatttaactattatattatcaacattgttatgttattggttctatcatctatgttaacgatatttcataatatttattaaattaaaatttgtaacaatacttaattataccaataatctttttcatattttgtttttcaaaaacacatgcaggttttgtaagagaacaaattgggatcaatatcaatgaagaagggacagaaatctctattagtggggagaggccagttagggagttggtaatgtctggatggatgatgcagaagaaggaagtggagttaaagggattcatcaaagtttttcgcat

SEQ ID NO: 229638 - DNA, 2111 bp, Cannabis indica
agagcatttctagagtttccctaagtgtccagtatgagggaggaaatgacttttaggacaaagctccttgagccttggtcaagctttttgtgtgttatccttcttcttctcttagatttcttgtaatcttgatgaaatatttttatttgtattttgagtattttgattgtaatcctcctattctatcttgtaatgagaattttttccaacatattgttcgctttataatgtataatatgtatacttgaaatgaaaaattatgaaaaagaaaagatagtgctggcaatccatatttttgcattagtttttataattggagcgaatttttatttttatagttgttaaaagtataaatttaaaaaaaaaatgacttttttttcaagaaaattatttttatgaaaatttttagagaaaataaatgaaaaatatagaaaaaccaatataaggtacttagttggtaactggttaaccctatgtttactaaggatacctggttactcttacttaatttttctatacctttaaactttttctttaattttcccataaaattatatttttgaaaaaaaaaaaactgtatttttattaaaaaaacaaaatgtataaaaacccataaaatttataatttccttattatttttgtatagagtgctatattctaattttacaacaaatgttgttaaaaagtgcaatctataatggaagagacattagacgaagaaaacaaaagaaatgcataagagcccattcatttaagaactaatacaattacacaaagatttttacactattgaaatttttaattatttttatttttttattcttaagacggaaattttcttcaaaaatactctataaattttatactgtatattgtattaacttttcacggttgttttataattgttctactgttgttttaattgttctattttgttattttacggttgttttatgaaaagactatttttgtaaaaaaaatcaaaattatagacttttactcaaaatctaattcaatatttttgtaaaaaccccaaatatatatcctgtttaaaaaaaacatataaggcccgtgtccaaaagtctaagggttcatctttcaatcaagtggcccaactcacttttctcacataacccaacaacatagcttcaagtcttctttaaataacttgggctcttccccaaatcacctaagctgagcattaacaaacttttcaaatttatgttaagagaaatatcatataaaattaagagatatgaaaactatatcggccctaacacttattgggcccagacaaaaaaacaaattctgactccttttattttaaatcataagataattgtacgatattaaatgataattttaaaaaatattggctaagttttcggatctaagtgtgggcctagcccgccttaacacaggatcgtgactgctattgaccagaaaatggccaaccacaacaacttgtctagttacgtaaaattcgagaacaataagccaggattgaaaaactaaagaaatattagtggttcacctttttaagcagtaataaactaaggactagtttctttcttacaattgtgttgtggaaaaaaaccgttgtagttgtaattgtgaggaaaagcaaatctaactgagctatagaataaaattttggtgagtgtttagtaacttataaattttattgtactataaaaattttaagattttgttagttataataatatgatatataatctagtttattatttaattttttttgtattttatgataatattaatttattttaaatatatttttatttttagtaatatataagaaatatattttagtataaataaatttagtatactttgtttttttaatgaaaaaatattttctaaaagttgattgttttggcttttagttttgttccataaatttttgagtttatatgaaaatttaccttgaattttggttgggtacctatttgggccttacatttgaataaagtagtttttgaaccttgtgtttcaaaaaaaaaaaataccaactatcctataaattagagtgtttattggtaccacatctaatatttttaggtcattagatccaattatatatttaatg

SEQ ID NO: 229639 - DNA, 3502 bp, Cannabis indica
cagattgaaactacaaaagaacatatccggttggttggcttatcagctacactgccaaattatttggatgtggcattgttcttaagggtcgatcacaataagggacttttccattttgacaatagttataggcctgtccctctttcccagcagtatattggaattacggtaaggaagccattgcagaggtgtcaattgatgaatgatctctgttatgaaaaggtgttggctgtagcggggaagcatcaagttcttatatttgttcactcaaggaaggagacagctaagacgggtcgggcaatacgtgatactgcacttgctaatgataccatcggtagatttttgaaagaagatagtgccagccgtgaaattctccataggcacacagatcttgtaaaaagtaatgatctcaaagatcttgtgccttatggttttgcaattcatcatgctggtttgaacagaagtgacagacagcttgtggaggatctctttgcttatggtcacatacaagttttggtctccactgctactcttgcttggggtgtgaatcttcctgcccatacagtgatcattaaaggtacccaaatctataatccagagaaaggagcctggacagaactaagtcctctggatgttatgcagatgcttggtcgtgccggaaggcctcaatacgattcatatggtgagggaataattattactgggcacactgagcttcaatactatctttctttgactaatcaacaacttcctattgaaagtcagtttgtttccaaactggctgatcagttgaatgcagaaattgtactaggtactgttcagaatgccaaagaagcttgtagttggcttggatacacttacttgtatgttcgcatgattcgaaatcccactctctatggtttggaagctgacgttctcaagaaggatgtgacattggaagagagacgagctgatctggtaagtttttatcttttctacataaacttgctttgtgttattcaagagtaggtttcttatgtagcagcaggaattagaagggtggccagggaatcatctttgttcatagtgtgctttatttttctatttttcgtgtcatgtttgtttttcttgaaaattaactaattcttgcttcagctcaatatcataggttttattttaatatgcttactcttttttctttttgtgattctttgcagattcattctgctgctaccatcctggataagaacaacttgatcaagtatgacaggaaaagtggatatttccaggttacagatttgggtcatattgctagttactactatataacacatggaacaatagctgcatataatgagcatttgaagcctacaatgggagatgccgagctttctcatctgttctcactcagcgaggagttcaagtacgtgaccgtaaggcctgatgaaaaaatggaactagcaaagcttctcgatcgagttccacttcccgtcaaagaaagcttggaagagcctagcgccaagattaacgttttgctgcaagcgtacatctctcaactgaagcttgaagggctttcactgacatctgatatggtgtacattactcaggtttttatcttaccctttgttgtaatttatttttctcttttctcatcagagtaataactgcctgcagtttgttatatctgtttattattatttatttatcttatgtatgttattctttttctttttagagtgctggacggcttcttcgagctctttttgaaatagttttgaaacgaggatgggtgcaagtagcagagaaggctttgaacttgtgcaagatggtaaccaggagaatgtggagtgtacaaacacctctccgccaattccatggaatatctaatgatattctaatgaagttggaaaagaaggacttggcttgggagaggtactatgatctctcatctcaagagcttggggagctaattcgtgcaccaaagattgggaaaacactacacaagtacattcaccagtttcccaaattaaaccttgcggcccatgttcagccaattactcgcactgttttgagggttgagctcactattacacctgatttccaatgggaggacaaagttcatggctatgtggagccattttgggtaattgtggaggatagtgatggtgaattcattcttcatcacgagtattttctgctgaaaaagcagtatattgatgaggaccacactttgcattttactgttccaatttctgaacctctgccaccccagtactttattcgcattgtgtcagataagtggcttggagcacaaactgttttacctgtttccttcagacacctcatcctacctgaaaagtatcctcctccaacagagttactggatttgcaaccattgcctgtcactgctttgagaaattcattatacgaaggcctttacgttgattttaaacatttcaatcctgttcagactcaggtcttcaccgttctctacaattcagatgacaatgtattagtagctgcaccaactgggagtggcaagaccatatgtgcagagtttgccatattgaggaatcatcgaaaggggcgggatattcgagcagtgtatattgcacccattgaagctcttgctaaggagaggtaccgggactggaaaaacaagtttgaggagcgtctggagctttctgttgttcaattaactggggaaacagctgcagacttgaaactgattgagaaaggaaatattataattagtactccggagaaatgggatgctttatcacgccgttggaaacaaaggaagtatgttcagcaagttagtctgtttattatagatgaacttcacttgattggaggtcagggtggtcatgtcctagaggttattgtttctaggatgagatacatagctagtcaggttgagaatcagattcgcattgttgcattatcaacctctcttgcaaatgcaaaggatctaggggagtggataggagctagctctcatggccttttcaatttccctcccggtgttcggcctgtgccattggaaatatacatacaaggagtggatataacagattttgaagcaaggatgcaagctatgaccaaaccaacatacactgctatcgtccagcatgccaagaacgaaaaaccagccatagtgtttgttcctaccagaaagcatgtccgtctcacagctatggatctgatagcttactcaaatgcagatggtggaggaaagccaccatttttgttgggttcgttggatgatcttcagccccttattgatggactccaggatgaaatgttgaaagtgactctgagtcagggggtcggttacttgcatgagggcttatctaatttggagcaagaagttgttgctcagcttttccaagctggacggattcaagtgtgtgtcgtgagtagttcaatgtgttggggaatgccgttgtcggctcatttggtggttgtgatgggaacccaatactatgatggccgtgaaaatgtccacacagattatcctgtc

SEQ ID NO: 229640 - DNA, 701 bp, Cannabis indica
aaatattcacccgcaaaattttttatttttaagaaaacaaatttttttataaatagaaatcaaatacatatttacttatatatcgaataaagatatccgaattgataattaaaatcaaagactctcatgcttcaatatatttaatcaataatatattattttatatgtatattattttataatcatttccttcgcgaggagctggatgagaagaaactctcatgtccagttctgtagtagagatgtaattaataaaaaaacctcaactataaccccaaaaaaacccgattccgtaaacaccatagaggaagaatgaaaagaatatcttatcgaaataatcgtatttgctttgatagatatgctcttcaagcacttgaacccacttggatcacatctagacaaatagaagtagaaagacgagcaatgacacaaaacgcccgctgcggtagaaaaatatggatacgtatatttttagacaaattagttacaataagacctacaaaaacacgtatgggttcgggaaaagaatctctcgaatatcggatagatgtcgttaatccaggtagaatcctttatgaaatgagtggggtagccgaaaatatttattgaaataataattaaagtgaaaaggacgaatctctttatgacatatttgaattctcgaggtagattttaaatagtttgttattaaaatctaaaaa

SEQ ID NO: 229641 - DNA, 605 bp, Cannabis indica
aacaaatttggtcattagcggcgagttttttagcggaagaccccatccgccactaataacggtggtattagcggcggaactcagtgtccgccgctattagtggctgttccgctttaaatatataaaattattattagcggctggcagtccgccactaatgcccgccgcaattgttctgccgctaatgaatgggcggaataaatcccgcccgttcagttcgaatatttatagcgacgtggtattagcggtggaccaccgccgctaatactaattcaaaaattaaaaaaaaataattaatgactattagcggcggccgctacaccctctatatataccccatcagccccattttttctattcttctctttaaatttcaaatttattttcccccccatttctccaccacccacaaccaccacctgacccccttggcagcccaccaccccgacccccacactcggagcagctaacggtccaccaccgaccacctcttggagcagcggaccaccaccatcggccattgttctccatttttggtaactattgattttttattttacatttgataccaatatacaatgtgtacataaatataaatctatata

SEQ ID NO: 229642 - DNA, 3357 bp, Cannabis indica
tgtttggcaaacggataaaaaacggtgttgaaagaatttttatgcatttgccaaatgcaactttagttttcatgtgggactttttatcccagtttttatataaaatttgggatgaaaagtcccataatatctggaccttttaatgttgttagggctttacacatataaaaggaacattaggttttagggtttcatttacacatatcagtccctcccagccgcctctctctcctatccctttctaagcgactgtgcaacatttctatctaccattttttttcttcttcatgctcaagcagctcaacctccaaaacggtctgctattttttttcttcaacctctaaagctcgagccacgacagaaccaaaaaatcgacgacaaatgacaaagtctctgctatctttttcttcatctgatatctcaatccaaccactccaactgtagatccaagatcccaatctcgaaaactcaaggttgacatcacttgaactcttttttacttctttgtttctatgtgcctcacttgctttttattcgagcagtcggcgttgaacaacaagcttcggcgtggtgtatagtttttaggtttattttgttcatatttattttttaactattaggaaaattttctaggtttgtattgagctctacactcatattcttgagagtgagtcacgtgtcattattataggagcctggtctcgagtttctaggagagaaattctcactataacagatgcataattgttggagcacttcagaatatgcttcaaatggaattgtataaaggaggaacggatcccagtgaccatctatccaagtaaagcctaatgatgcaggtagcaaaagctagaaatgaagcaaagtacctttgcttttcattaactctgtcaaagtccgcagagaattgatgaaaagattatctcctagatcagttcgtaattggaagaatctgtagacaatgttcaagaaacgattcatagcagcgaaaaaactatacattctcacttgtataaaagattctattatagtaaactaggcttttgttgctctcatttcaattcattaataaattccaaaatagtaaattagaggagaaggcatacagacgaccataaagaattttctctaatagtagtgaacatatgaaagcttaaaaagtctacttatagattaaaataaatctctcacaattaatatttcttcatgtcaacttttcatttagttttgaaaagaatatcataaattaattatatatataccggaaagaccgtgagagtaatgtttgttttatttgtggaggatatattacttgcaaatgatgataaaagttcctatataaggtgaaataattaattctaaaactattatttttgagataaataatagaattgatatttctataattttaattaaatagagagtagtcacaccatctctgattaaataaaattatatattactcatacatcatgttacttttatctttaagagtgatatatccaactcaaaccaacatcttgcaaatttatttaatgagaataaattatgaacattcattaatttacttctatctttagaagccaaatatatgcctaagtttttataagacctagcattgcatttgttttaggaaaatcaagaaggatcagattaattgatcacttgagttagagtaccacatataattgcatacaaagtgataaggtatttttaagatactaaagattacatacatattttatttagatgaactcatattttagaaatttaattaatcatttaaattatcttcactagttatattaattcatgtaaattaacatttgattacgttcttaatattgctagtaagttgtattgtgaagaactatgttatttccattatagaagtcagatttatttattgttttgaggatacatctcatagtgtgtattatagagtttcatacatactaggcctagagttcggaattatattttcaaggaattaagaaaattttacgacaaattcagctacaatatttatggctatgaactataatagttatgatcaaagctagtacatatatattaaatatttagccataaagaggggtgataaatgatcattaagaacgcaacactaaattgggtaatcacaatattcttgactaataaagacatgcggcaacataaattcaaggaacataaaataatgacgggattcagtttcccttatagaattcttttgttttacaacaaaatgaattattaaaattctaatttcgatattttctgatatcaacctaataaaaaacaaaaattaaatatttaatcctcttttaatatccaatttaagtaaaagttagtataatttcgtcatatatatatatatatatatggagttatctcatattcatgtcctcttaatgtatgcacacatacctatatagtatggacccgtaataactaataataatgatcaggacagagaatagataagatataataagatgatttttctatcattaatattaatatcttgtttaggaaaaagaggacaaataaaaatcagcaccatcacctcatttattatgagcatatacaccaaattgaagtaactagtgttattataaataggatgcttctacaacttatatatttacacataataatagaacgtacacaataagctagtgagaatatatatataatcaatatggagatcaaaagtaaaattggtgtgatgatgatgatgatgagctatatagtagttgttgctcttgtgtttaatcttccatctactactactgcagtttcagctggaagaacttattcgaatattattcaacaacttcgatcagactcagaatcagataatcatgctcgtgctcctattgagatccatgatcataatggaaagatggtgactgttatcgaacctgcttctattgcagaagcaatattgatggaaatgctatcatcaccggaaaaaaatcaatgctggggaaaattttgcgcgccttggagtccttgccaatctggatgttattgtgttggaccggttggtactggagcttgcgttggccctccaaaataaactacgtagtttaattatctatggattgacatttttatatataaatatatatatgaaatattattaataaagtcaatcttttaagtagttagtaatgaataataataatgttatacatgtacttaatatgcatacatgcctgtatgtatgtttgtttaagtatgttatatccatcttatatatgggtgtaactttatatcattatgtatcctttatcgttaatagaatggaatactattatatagaaattattattgtgttatgttgggtacaat

SEQ ID NO: 229643 - DNA, 1310 bp, Cannabis indica
atttcatcatcattattgttattattttcccaggacttccttttatccagaaccccccacaaacagttatcacctgcttcaattcatttgattttattatgcttaatcattctgaattttgattagggtattttgctttttatgtgaatagtgactttgctcttatttattttgatcccaatggaatttttttctttttgtgtgaattgagattctgcgtagcagtttaaaatctcatatagcaataacagtctatataaatcccacatacaattctttttaaaatctcattgatttgggtttctggtgattaattccatttttttcttacattaatattcaagatgctgatagatagcagcatgaattcatgtttttaaactattctgctaataacattaatattctacatgctgagtcaactcgaattttttagaactatgctcaaagccattttgactgaaaatggcatctaaatctaacaagttttgagtgctaggatgatttctgaattaagaggtatcactatgatttctgtcaacataagtttaaatggtggtaatatttttttaaaataaataaacaaaattaaaaaaaaaaaaaaaaaaaacgggtacgggcctaacccggcccgattatctcgggtcgggcttgacccgtcaggcaaaaaaatgattcgggccgggccgggccgggcctaagtgatgtcgggtcgggccgggtttgtggcgggtcgggcccggcccggcccgattgacattcctacatatgctccacattagctagggttgtccatgtagagagttcacatagttataatagagaaatatttcttcaatacatagttttgttgaataggctatgcatccatatctttatttaataaattaagagtattttaatttgaaaaaattacggtgtaagttctcaaaatttttattttgatgtaaataaatctttaacttcaaaaattagcagcaataatctctaagtttattgttttcataaattcgtcagtcctcttttctaacaggtacatttactaataaaaatatcacatgttaataaattattggtacaaactatatttttaatttaaaatgaaaaaaaaagtaaacatttttttttcttattcttattgctgcttagagaccaccccctaaaagccatccgaagacccagcatgtaacgccctaaataattaggcacgttacccaaaaatgattatgaaaccctaatcccctaaccgggattactaattaaaaatagcgcagaatttaaacttttatattaaacagactgaaaataaa

SEQ ID NO: 229644 - DNA, 2222 bp, Cannabis indica
aatcattctttaaatacacctcattttacttacccccaaaatacccctcccattcactcacctaactctcacactctctccctctaaatctctcccgctccctctcactcatcacacctttgaacaaccaccatcaaccaccacacccaccaccatccctcttcctcgaactgcccctctctccctctctttcttttttcttcatttggaacccacgaattgcctcgaatcccactcacccaccaaaatttgaaaagggtttggtgttttagcgaaggattcgatgtacattggaagacccgagaatctaacacagattaaatcccatttttgggtaagattttgatgtcttcttagaaaattgagaacaagatgatgatgaggcaccgtctactccaatggatgggattatcacgaccattggtgatacacaatcacaggatggtgtcctactccatactggacccctagaaggggtaccatttgtgagaaagaagaagaagccttggtatttgctggactacatagaggagaaaaagaagaagcgacttcttccggaaaatgtagacccaaaaagaccaccagatcgtagattctacgtacattcaagaggtgagtgcttggggacatcccaatatccatcctaggaatctccacaccatcgtcggtgatgtgagtttctttacgaagttgttagtggtcgggaaatagttggaggatgatgtttttattggttttgtctataataagaaaaatactgaaaaaatgttattttatcgactttttgtcgataactaacccaaaacaccaaaaatgttgttttagtgactagtattttagttgtggataactaagcaaatgttgatgttatgtcgatacacattgctagaggaatcgtctaatgtccctgaaagttcatttaattcttcattttaaatgatcattgatttatgtggtttatcgataacatagtctttacatgtcgctaaatgtcatcaaaacatgtcctagtagtcaagattggcattcttataatatcgatgatatagtcaacacatgtcgccaaacttgtagacgactagcattctaaccatgtcaacaacattgtcgacacatgccgacaaatatcgttaaacatgtctagatagcaaaaaactacaaaaaatagtcattctaatttaatcatattgataacgtggttgatacacgttgctaaatatcgttgtagtaggtccaacttgtaaaaaattaataaaaacaacttaaaaaatagatcataaaactgtattactaataaaaagaatgaaaatactaaaataatgctcaaactcgggccttgcatgaagctttgttgtggcctaagttgccacagttttaacaatggtgagtaccacaactttatcaccgttagatggatattagttactccatcttcttcctgcattactcttccttggatgacctatgagttttcctctccactggtatcccgactctcatgttttgcatatattctagaagcactcaattgtcctcctcgtcgataatattagttgttgcatcgtacgtatacttccatgtatctttgtgtaataggtggagcttagagcatataggctcacaaaatgagtaatcgttgcggcacatgcatgggtacaaggaattttcaacaattggaacatgctacatgtgcatgttttctcaactaagtttacatcaccatctctctgacccttaggacctctaccgaagttaaacaaatgtgcaccattatgttggacgcttctgaacttaccatccttgtgttacgttgccaaatcatcctcaaaagtagttgccaaagggatagcacacttacttgtctctttgagacggtcaatgaaccaactttgtagtgtgaaccctatgaacttaaccagagtagttattggatatttcttgaattcttctgtcatgtttttgaggctttcaacagtgttgcttatcattatgttgtacctatcacctatacaataaggacgagcctacttttccagtcttatactctaagtgtatgcatcaatggcaggatccttccgttaaagcacctaaaaatgtttatcacattccctcttctaccatgcataagcggtgagccatatttgcttatggcatacatcagtcttgagcgtgtgggccacattcatagtaatatgtttatagcatgcatagtggcatgcttc

SEQ ID NO: 229645 - DNA, 1178 bp, Cannabis indica
cggtaataacagtactaacactggccaagttaatattattgcctctgtattttttttttttttttgttaaaagatgagacgttgatttggttttatcattagaacaaactattgtttttaacatatacccgaaaaatgaagcgaacatttggtgaatgcaggtaccttaggtgacagaggaggttgccatggctgttgtggatttgtacccatgatttttgagtttggtacatttttgtgctcagctaaatttgttttctcattgtaattttcttaactttttgactaggagggtgataattccgcacaacaggagatgcttatgaagcaaactgacagagtttaaaaaatctatatgtttatatttaattaaaaatattttaatgattaaccatttaacatcatcgcctgaattccttttaaacttttaaaataagtaatattaataagaaaatatattattattaatgagtaaagcacgaaactttggtatcaattgcttcttctctaaccatattcttaactaacaagtccagatgtatattaagctctgaaactttctagtggggcgaaatcccgtgtctccggttctcctgtactctcacaaatctggttccattccagcgttttttcatcttgatgatgtcgttttgaggcttcaagtcgtgtcttttacttccttttcaagctttgcatttgacttttcttcgttctgtttgttcatttattactcctccagtcatctgttagttattaattgctctggtgttttaaatctattttagatctttttttagatacttcgcaggaaggtttatttgtctcttgcactctctccttggtttgttttggttccatttaatgcctgccgtcgttttgagaagcccaaggatggaggcgatcattgctcctactagctatggcgatcctacggagataccgaaaggactgatatggcatctgcagatcaccttcttcagcaagcctcctctctccaggtatttctctaaagtcctctatttaaggttttggtacatgctacgttccctgctcattcaactgttggtacctagttctttccctgtcatatttcctttacttgactttctgaacctatccatggattctcttgccctcaacatgtctgaaattcttaatctaactgaccgcgaagctgt

SEQ ID NO: 229646 - DNA, 2017 bp, Cannabis indica
gagagagagagagagttgtaagtaagagaaataaatacctgatctttattgtccaaacaaagcccagaagagaaaagatatagggcaagctgtaattagggttttgagatatagaaagaggagagggagatgaaaattcaggtcctgactcctcctcctgatcaagatcatcttatatatgtgtgtacaatacaaaacaatacatattctttcttacatgacattacattacataacataacacctattaaattaattaaaaaaaattaaatatttatatataataaatttatgaggagaggaacaaagaaattggctaattggatataattaatgtaagtaaccttctctttattaagaaactacgtaaatgccacaatcattatccaacataaaataattttttaaccacaactgtaattctcctcatcaatccatttcatttcttacccaaaattttcatttttattatgttttttttccgtaaagactgaatttttaataactaaaaacaaactaacgaaccgacccttctgtcctctgttttcttattctgtgctaaaatcactataaagtctccatttttcgaaaactaaacacactcactcacacacccttttctcccattaactcagttcaaccaaatttatcaacttttccctcctaaaccctaaaaccctagtggaagtggtggccaaatccatggccaccatccaatcattgccccaacctcttcgtacttcactgcgctctgggatcattctttttgacattgccactgtggtcgaagagctcgttttcaacagcctcgacgctgctgcttcaacggtatcagtttttgtaggcgttgggagttcttatgtcaaagtggtagatgatggtgagtacccgtttctcttatttctctctctgtcggaagaaaatgcattttttgtaatccttttcgcacattttgtaggatcaggcattccgagagatgatttggtgcttttgggagaaagatatggtaataaagttgcttacttttcttttcaaattctgaaagattcatacactgtaactttactttaataatgtgtgggcagcaacatcgaagtttgatcatttagctgataaggataatgaatgtaagagctttgggtttcgaggggaagcattggcttcaatttccgatgtatccttgttagaagttgtgacaaaagcttctgggaggcctaatggataccgcaaagttatgaaggtgtgtctttttctttctttcttacaaatgatatagtttaagcagaaatgcctgtattgactttcctctatttgttgcagggaagcaaatgtttgtatctcggaatatatgatgataggaaggatgtgggaacgacaggtgcagaccctattcctaatattgttatatgatcttataaagatattcttgtgtctcaagatataacgccctcccatcccatggacttgttgttggaacttgtatatggaaattgctatacctacgttgttgttgtgtaagtttaacttgtgatcaattggtttttgagtgagtctactatttacattggttgatggatgaagaatgctagttgctttgtaggttaatcgcttatgatgttgtagttttatgttaatttccttagaacaagtaaagttcttggtaattgttcattacctcaagttgaaatgggcttgttttacagtttctgttcgggatttattttacaaccaaccaattcggaggaagtatattcaatcaaggtaccttgctacttgggttttctctttactttgttgtgatttatatcatgtgatggtttcttccagctctctttgtgttaatttcattccacaaacagtaattggaatggacatttatgtgttgttttgtttgtttattaactgaaagccctaagaaggtcttgcaatcgatcaagaaatgcgtacagagaatttcccttgtgcattcaaatgtatcttttaaagttgttgacatagaaaggtaatttctagtcac

SEQ ID NO: 229647 - DNA, 1725 bp, Cannabis indica
aggatgtttaatgtacgtgatggcgagcacgagactatatatagctcacgttctaagcatcctaagctagttcatgtccaatttgggcattgaacattggaaggtcgttaaatggttattgagatatttgaagggcacttgggattatgatctgacctatgaaaaatctaaaggagaattagaattgaaaggattcatggatgcgggctacgcctcgaatagagatactagaaaatcaaccacttcttacatttttttgacaaaccataactatataagctagaaagcctagttacagtctgtggttgttctttcaccacggaagcagaatttatggcaattgcggaagcattcaaggaagctttatagctttgaggagttctttatgagttggaacaaatcaaagggggagtgattgtattttcgaatagccagtcatccatccatctttgtaagaactcagtttatcatgaaaataccaagcatatagatataagactctactggattagagagaagatagaggaagggctagttgatttagagaatgttagaactgaagataatcctactgatgttgggactaaggtcttcacagtaaacaagttcaagtagtgcttgaacttgatcaatctcaaaagttagtacactgagattcctagaacataaaacacgacggctgcattctttcttcatcatcattattcttttaattagaagtaactaggtggaatttgtggtatagttcctccaaatgaaaaggtctccaacatttgttcttgaaatgttaggtgtctgccaaatgttgttcccagacagctaacttttccatcctgaaaggagtcatgtggaatgatagttgagtccgaaagaaagttctcaaatgactatcatgtccactctaagttttgtcttcaggatagctagcccccctccaaaaaggagttccaaacagcttattatattcttcctggaaggcagttccggatagttgactctagctcattctatcccatttggaagcccctttagtgagtgcctttattccgtgatcctggaagctcgtatatgttctcggatgcactaagactgatgctgatgtagggatctcgctcataggagattttgttaagttagttatttcctaactaacttaacaacttcgtttattgcggctaccgactttaggatcttaatcctaaggctataaataccatccacactcaagcatttaagacggaatcgaaaggacgaagattagatgattcagattgagattgagagttagagagagaaagagattgagaggtagagaggtagagagaggtagtggaaaaaagagagatcgggtttgggttttgtatgaaaaatcttctatagatgaagaagattcttgggtaagagtatgagagttgaaacactttgagagaactcaacataaatcctgtcccggtactgtaacgtacatgttctcgctcaatcaataaagaagatttagtggtgtttctgaattggagtagatccataaattacatcgatctatcgaacttgaatcagtatatatcttagtattaatttttttattttctacctttattgtttctggttttccatagtatgttatttcatgtgattattgttctcaatttgtaattttctttttaaatgaaaaaaagaagataaaagtctctcgccttgccttatattcgtttattattatttttt

SEQ ID NO: 229648 - DNA, 1768 bp, Cannabis indica
accacggtgaattaatctgactattaaaaaccgcaaaaaaaattaaaatggacaccagggattttatagtagttcaccctcatgtcgcgatggtaatgggactacgtctacttgtagtttttattaatttagatccgacacactagagttatgttctcaagagtgtgtggataaaagtacagcaatggatctaggtgaaatcttaatcgagatttattaatataaggttcatgggagacttgatattcataaatctgatctgaattaaaggttgtaaatttcttgggagcaataaattaataatttgtggaaaaaacagtgtatcaagggtgttttgaagtttggcgtcgcctaagtatggtggacttaatgacaaagatgaaggaggcaatgtggtgttcttggtttccttttagtaattttctaggagaagattttcggaatagaagatccaaaagagaaaaaggtctcaaaaaagaaaaagccaaaaagaaggtccctttcttagcctctacttgatgtatatataggctagagggtttgttagagatccctcatacatcgggatatctcattaataaatcacgtaaaccactctttttatgaataaaatattacaaataaacaaatatcaataaccttacatctaggcaaatatcccaccaatatttgacaattggttattttcggttggggatgcactaatttgaaatagagtgttgaatacatgcatttcgaactgccgatgcttgcacacaacaccacatgggttgtggcggtgtgctccaccaaccctcacttaaccgcatttcccaattcttgagtaaaatggactagcgataacttcagaattgagtcatggttttaacacaatttgatccatctcaaaattatctttccaaaacatgttgaaccaggtcatttggataacagctgagagagttatgcctattttactgaaggtagtttatgctgtcttgtaccagttgcgagcactgccatggccaaatggtagaggtcggctaggcatgttctcagacccctcagggtgtgttttgacttgttttttcatggtgagtcatattttggaggctcgggacccaaaaacctcatttcgacgtccgaaaccctaaaaagtgaccattgccactagttgggccagataatggcacaggtcacccatgacttgtgggaagccatggtggtgtctctcacttgtatttggtacatggatgttgaaaataaatttagtcaataaattcctcttcctggtgtggtaattgacctgtgccacttcactatggcactggtctccaatttggagagcattgccattctcttatggcacaggttccctaagtcgactcctaggccaaaaatgactttcctcacttgtttcttactccttgatgtcgtgggaacccactcgaacaattttcctcccacaatttgtgaggagtgacctaagctattctcttatggcacaggtcacctaaggtgactcctaggccagaaatgaattttcttaattgtcccttactccttgatgtcgagggaccccgttcggacaattttcctccaatagttttcgaggagtgacctgtgccattctaccatggcagaggtctccaaaactggagagcactgccatttccttatggcacgggtcatttaaagcgactcctaggccaaaaatgacttttctcaattgtcctgtactccttgatgtcgagggaaccagttcaaacacatttccttccatggttcg

SEQ ID NO: 229649 - DNA, 1514 bp, Cannabis indica
tgtctttgacgtcttgtaatccgacgttgaacttctttctcatatggtcttcaaataaatccttgacttgacttgatcaaatggaccacccaagtaaggcttcaatatttttccattcaccttaaaagaaccacctgaattgcttctaacttccacagaaccatatggaaaaattctaacaacaataaatggtcctggccaccttaactttagtttaccaagaaacaatctcaaccttaagttgaaaagaagtaccttttgtcctagttaaaattctatcttgatcaagtttttatcatgtcatgcattggttcgctctttgtaaatcttggcactcataggctacattcttaaattcatcaagtttattcaactgcaacatcctcttttcactagcaacattccaatcataattcaacttttctatggaccaaaataccttgagttctaactcaacaggtagatgacaagctttatcaaacactaatatgtaaagatacatatctattggtactttaaatataattctataagcccaacgcgcatcatctaactttttagaccaattctttctagatctgtccacagtcttctcaagaatccataacaagccacaatttatcaagatgcttgttcacaaaatgtttctcttcattgtcgagatgtactaaatctagtaaaaatatgtttatgaaggaaattcaacacaactttaccatcattttctctaatagttgcagcctccacccatttagacacataatctactaccaatagaatgtattcattgttgatacatggtggacaagccccatgaagtctatacccaaaacatcaaaaggtcttaattcaagaatcccatgtgaaggtattttattccttcttgcgatattaccagttcagtgacaacgatcacaagccttgccaaaagtgttagcatttttaaacaatgaaggcaaatagaaaccactttgcaataccttagatgtttttctaaaggaaaaaaaatatctaccacattattgagcgcaacaatatgtgataacagagttcatctctttttcaagtacgcaatgtcagattgcttgatcaacacaatgcctatatagaataggctcctcccaataataatgctccacttcataataaaacttcatcagctattgtcttgtcatgtcaggcagtacaatctcgaaaactaaaaaattcacaaacttgttgaatacttcagctattgtcttgtcataaatgggttataaaagtgttaaatacttcataaacgtattattagttaacatgtttaaacaaaatatacttataaacgggttacacggatcgtgtcgtgtcaacccgtttataaacggaccgtgtttgaattttgtattttgacacgattattaaacgagtcgtgttcgggtcaagcatgtacctgttatacatgggtctcgacacgacacaaacacgaaccgcaaacacgaattgccaaccctactttcttgtatcataccatgtga

SEQ ID NO: 229650 - DNA, 2067 bp, Cannabis indica
acataaaaatattgcataaaatacaattcaatataatactatacaatacaataccgtgtaatacggcataccaaacaaacccttaagttgttcttctaaacagagtttaagctcttccacatactatagtaattaaaggttaagttgttagagagtttcactagggatgtaaacggggtgggacgggggcggggatcgctccctcactcccatacccacttcataacttcacccccatatcctcttcaatacctgtttaaattaaagcggggacgaggcggggattatccggcagaggaagaatttcatcgggtacccattacatatatgtttttgaaaagaaaaatgatgtcttaaatagaattaaaaaaaaaacatcataagaactcattagaaaaagaaaaataagtagaatgtataataaatagagttagtagatacataattggcaatcgaaaataagtggttaagtgtcattttcttaaagcagttaagtgtgattattaatatgcatcaccgcaagtattttatgaaaactgaaatgtctcattaatgtaatcaataaaaaacttaaatatgaaattattttaattgtaatatttaagattttaaaatttaaatatatacatataatatatcggggcggatatctactctcccgtccccgacctgatcctgactcgagtatgaacatttaaatccatacccacccccacccccgcccgtgtagatataattgtcatcccttagtctcacattgttaatgtatggaaatatgacactatatataaggtttatgagttacttctctcattgtcagttagttttgagatagaaccttatgcatcttacaattctaatatggtatcaaaaccaaataaaactctaacgagtatctgatcaaaatctaacagctggtccaaaaagacagtcaaaagaggcgcttttaattcgagaatagtgagccaaaaaaaattaatgtgaatcaaaaagtatcgcttatgaacaaatcgttcaagattggttagcaaaatataatcactatcttgaaagaatcttagaaaatttgacattgttaatgtatgaaaatataatatcatatataaaattcatggattacttcttttattgtcaatttattttgaaatgtacatgcatcttacaattctaacataagccatgtcaaaattaccacacccttttggtaacactacttgaagttgcgcactcaaatgaatctatttcaaaaccaaaaccttgaggatagtattgaaacggtgtaatgtcatgaaaacggtaatagtcacattccattttccaaaatagtagcaaaatgcttcttgtggcctttggatcaaatatatatcccttaaccacttattattacttttgaatttggaaagagatcaacgaggaaaaaccagctttttaaagccatctccaatgagattttaaaattctaaatatgatgtaatttttttaccagaagcttccaacctaacactaaaagtaaatctattttagtgggagtctacagtgttccacaaataatagtgggcactgtagacaaataattaaataataatctaatttattaattaaataatataataataaaaaatatattttttagtgtaatttttagtgttgtagttagaattgaaaaaaaaaaaaaaataagtgttaacatagtattcttttagtgttaatttaacactaaatttaagtttctccattacacttgccctaacaccttttaaatattgtgttctagtgataatataaggtaataaacgaatataaacctatcaacgtaaaggaaaagccacaacctcacaagactggattatttatattctactttaatgaacaacatcgctattacatctatacaaactaggtaggtatacaactatgctagaccaaaaaaaaatggatcaaacaaagtcgtgctcacgtaatttacaataactggcattaataatagaaagctttacaaattactcgccagcaactaaataataaattaatgcacatctgtataaaagtgatgttttctttttttat

SEQ ID NO: 229651 - DNA, 1985 bp, Cannabis indica
ctgtgacaaaaacatagtaattagatacaagttgtcactaatttagttttagttacaataagtattgtgactaaaaatacatttagtctcaataaattgtaatttttgtgactaatacttttagctacagacattttagtcacaataattatgttttataattaataataatttatttacttttcgttatatataaattttgttttgaataaaattaaaactttttgtagtggcactcacatatatggaattgaatttacgcatggcacacgtaaattctttttgattatctattactatattagttagaaagaaaaaaaaaattgcagacaaatgtattaattaatttgagtattcatttcaaaaaaaaaaattgcgtatttattaaatatatacatataatattagtctgaattaaattaatatgtctacataataagttttattaggactattactttcaaaacaaaaaataatatatatatatatattatgttaatccaaatatttattaataaatatagtatgtgacaaatattattaatgaattttatcgctagtatgatttggggaaaacttgtttactcatgccatgatgtttctattatattatttgtgaccaagttgataattggcttgggatgctgccttcaattgctcaaaggctaaattcaatgcaatcattgaatatgaaatggtcaaaattaggtaggagacttcgttctcaagttctgaagccttagaagtatcaaaaatgggatctcaagctcgggagtaagtacccaacgtccaagttgacaaatgttctgttaggttgagttcttcttatctgattctgatgccatattgatcgtctttcaagtttttcacaataacaaagatccatgaaggtagaaaagtcaaataattcaaaactttgcatttctcatttcctactcacctagaaatgaagagttttgagtctctcatttttgcaaaacagtaacatctctgagaactagtgaccagcttcaccaaaacgtagaatcaggctaagtgatgtcacaatataacttgggcatcttaaaatacctcccttggacatttttgcactctcctagcgtctaggttgacatcatatgtcaacctaggcgttggattttaacctgggtgctaggtcatgaagtgtgtttagtaaaatagccataacacacttaattttgatctgattcatgcgacacaacttgcgtttcaaagataattcaatactatatcaagtcatgtctcacaccccagacgtaattatgaagttatcagcgttaaaattcacccccaagagagttacgaaaataagctttgggtaacttgtaccagaacctgtcagactccaaaaaatggccatcaccactagaagctaatttttaccgttatattatcatctaaggtaaagaaaagtctaattagtatttttccttatttttgtggggctttttcacgtataaacggagagctcgcttaggtcatttttcacattttaaaactacccacaaggtcagagcatctctctctagaaactagagctcaaatacttagcctttttctgtgattctcatgagaaataaaaactcaaaatagatatagctctattaccatcacgacatggggagtgaactactttaaatttttgtgtgtctctaagttcactactacaaaaatagtttttcccaacgtttttaaaccgtcatttaaagtaatattcttgccagtttctataaccgtcgcctacacgaccgttgcaaaatgagaaaaacaggcgactattaaaaactgtcgctaatgtcgacttcccaacggcttaaaactatcgcctataacaaggtatacacgatggttttaagtcgcgtatagtataggccactgtttaaactgtcacctatagtatagggcacgatttaaaattgtcacctataccttataataggagacaattttaaactgtcaggaat

SEQ ID NO: 229652 - DNA, 1311 bp, Cannabis indica
aaaagttggattgtgacaaaaaagagaaaaatggaaacatattaaaatctgtgactactcaatttataatatatggtccttttttttggacgtttttcttttaattctttctttctatctcgtaaacagctaaagccaaaagtcggtcacttaatcagtttctttgaccttaaaaggatgattttaatatgatggataagtaaattaaaaaaaaaaattttgatcactttttctttctgttgtgttggtccaattataggttgttacttggcatttcatggttggagcttgctcacctcagccatgcttaggccatcttgtgatgagttgtcattttttgttatggtttgttagagcatctctgatcaaatttttattttttagtaaaaaatagttaaaaaaattaaaataaggagctatttttattatttttcttcaatcaatcctctaataatattttataatttaaatttattaaatataaattaatttaataaaataatgaaaaataataatacctttgattaaaatactattaaaaagatttagtaaaagaataaggagctcattacatttagatagctccctactagtaattctttattatagagagctatttttttatagggaaatttgcggcaaaagtccccaaaaagttcacgttgatgcagattagtccccaacttccaaaaatagcggcaatagtcctcaaggtcacactttttatttgtccgtcgatacccagtttgacagccccgttaagtactggcaagagtgccacgtgttgaagtattattggttcatattttaattttaattaaaaataaaaaaatatttaattttttttattttcttatttaaaattaatttctttctttttttttttttttttttctatcttcttcgtcttcttctccttcttctcactgccatcaccatcaacccccaaccttaatcccaaaccagcagcaccaccaccttcaaataatttccaatgcattaataaatttctaatgcacaaataaaaaataacaaagcgataaagaagtacatttgtacctgattcaccctcggcaagcttctccaacttcgctccaaccaaacgcctatcatcaacaccaccagctttgagctcgtagattaccgaataatccatagatcaaaagtaagatagaccagagatcgattccccagtttacggatgagttgaataggaagaaggagatgaaaaggtacctgtcgatgttccaattccaaacggaaatctgatctgatgcatcggcagtgaccatccatggaagtattggatgt

SEQ ID NO: 229653 - DNA, 1729 bp, Cannabis indica
cgtaacactaaaattacaactaacatataggaaaaatatgcatccgaaagttaaattaacaataaagtcttcgtatcaaaaaatatttcctaactcattcatatacatttgagttatttagtgttaaaacaaacgatgtagaatcttaaaaaatagctcttacaattattattacccttcatggtgcctagcaccactgtatataagatcgatcattgttattggataccagtagtgcctagcatttttacacatgttgttttacgattgacaagcgatactctctattatactaaactatgtgggactcaatacttagtttgaccaatagcaatattaccacaagatagtgccacgctaaaaggcaccagtactagacacaactaatgccttttagcatcatctctataaaatgacgctctataattattatttactagctttgttgattaccaatatttgcaaaagtatacattatttgtttaaaatgtttctaaatagattaattttcttgtgcccatgcacactactacataaaagagtattcatgtcggtcaaaatgttagtttttttttagaatctatcgatgctataaaaatttagtgtcagtaaaaacctgacgttattattagaattgtgtttatccaaaaatttgacccgacgacatggacaacacttttgaaacgtgacaagaaggaaacaatcttgaggcccagccaccgagactaaggtggtcaacttgggcattggaaactataccgatgccctagtagacaatagtgggcacccggataggcaccgagatccagcaaagacgtttttaggtgccatcctttgacaaagttcaagtgaacatgtcttatagtgaccttcaaaacgatgaaccatgaagttaaggatgtaacaccctactagattaggcacgttatcgtattttctaagtattgtgcagttccttgctaatcaagggatttgttgaaaaacgtgaataattaaattttttataaatacacttaaattaaataaataagtacaatacatattctaggatcctttttttttaaaaaaaaaaggttacgtacatatatttacaaaatactgatattacaaatttcgtcgtctagtaactatcaaaataaagcccatttatctcaaaaatttgaacactccaggtctaaccacctcgatatgtacaatcttcatctaaccctaggttttcatggctttaatctgctgacaattcaagcatatggacacataatcaatcatatcattcttcatatcgaactttatcaagaatctcttgtctaagttcaacattattcaaaatgcaaacttgagttttataaagtaacattccattatttaacactaagaaatctttatcttggccaactaagacctcttcttggacccccactaattttgaatccaccaattgatcattttaaattcttctagcaaatcagattggagtgaaaaattattaagtctgccaactacaaactcaatacctgatttgatcatgtcgctagttgaggagaaatcaaagttttattgagaacttgcctgagacattttctgcttagggtatccaccactacattggccttcttaggatgataaagaatttcacaatcgtaatttttaactaattccaaccgttgcctctgtctcatattcaaattgttatgagtaaagaaatatttgagactcttgtgatcattat

SEQ ID NO: 229654 - DNA, 1413 bp, Cannabis indica
agtgaagaagagaagaagaagaagaatacgaagaagaagaaagtaagaaaagaaaagaaaaagaaaaaaaaaaagaaaaaaaaagaaaaaaaaaaggaatttttttttaaaattatttatttttatttttatttttaaattaaaataataatacccaccaataatatttcgacacgtggcatttgaattgggtttaacagatctgttaacttggagaccaacggacaaataaaaagtgtgaccttgaggactattgccgctatttttggaccttggggactaatcagcatcaacgtgaactttttggggacttttgccgcaaatttccctaataataataataaataaaggataattgtggaaaagcctccaaaaatttagggttgatatgcattcctcaactttaaaaattgatagttatagtccctaaggggacattttcggtaagttcgttggtcatttttctaactgatccgttaaacccaaataaagtctcacatgtcaattttttattggttcaaataataattttaattaaaaaatttaataataaataaattattataaaaaactttaatattatttttaatttttatttgtttttctttcaagtccccttcttcttcgtggagcatagattcatcactttgaccacttttatttttgtaagctttttgttctttttccgcttccaccaccaccttctttttttcttgagcgcaaagcacgtaaccatctctgcggagcacagaccatgcatgcataaaaaaaaaaatacccaaaccatgctttgagcttgggaccttgttgtcgccgtccccgagcccgttgacagtgagctaatcaaccctcacctctaacgttagtggagaatcttcaccaaacggtccccaacggtgtgagctagttcctagtggtgagtaaaccgagatcattgaagtccaatccctctttcgtctctctcctcgtgcgatcgaagcttccgaaaggagacctggatggatacgaagaagaagaagacaaatttcagtttggatatagtttgattttgttcccgatgtgtggattaagatttgggtttgggttcactaggatgatagtttctatactaatctgacatattttatgaattaaatttatttggatcaacgattaaaatgagtttgatggatatattgataagagtttgattaaaaaaaaaaaatttatggcatctactttgggtatcttcttatgcaatttaggaattttttaaacagttgaaggttagggtgtgactagatgaagaagacgttgacggtagaaggtgactgtccgcagtagatcttcagagagcttggggttgggatgtggctggggatggggtgggatgaggatcaagagggtgagtgggtgaagaagacgaagaagaaa

SEQ ID NO: 229655 - DNA, 1238 bp, Cannabis indica
ggtaataaataaaagatttggacatccacataattattaataacaacatataaattatcatgtttatatatccatcatttaagtctctaagaattattcttttaattacatatctaatttatgaacccatacataagcatacatgtatgtttgtttgagtaatagcaatgctattttctaatatcatgttaagaattgttagaatttttagaagaatatatccttcatttgatgagaaataaaaaagaaatattgaaaattcaagtggctgaagttaaaacagctactttcaaggtaatagggagaaaaacagaataacggtagcaggagtgtcaaagtcgaaaaatgttagcaaatagttttaagaatgaaccaaacgtaacaaaaatgggacatttgcaaagatttttatagtgcaattgtaaatttttttaaaaaaaaaaaataaaataaaaaaattgaagtaaaaagatttacaggagtcttagttgtgagaaaaaatttcaatttattcataaataaataaatcgttggtgggtaattgttaagcattatatatcaataaatatataaatatatgagagcaattttaatgagtattacccttgaatggataatattagaaaaaattaaatttttatataattgttttatttaattagaaaaaaaaatctcatttttacattatataagattggcttgttctatcggttgaaaaaaaagttaagaaaaaaaaatgaaaaaaaaaaaaaaaaaaatagagtttgacttaaatattttatatgtaaacatattatatagtgtaaaaaaagatatatttatatatttatatatttttataattaagtagctaaattaagtataaaaattcaaattttttttatattatttgttattggatcaaaatttagtttaatattttaaaatcaatatttataattaaatttatttaatcactatctaattgagaagtgttatatatatatggaacacttcttaatgggtattactcatttatgcttactaaataaatttaactataaatattaattttaaaaatattaaattattagattttgatccaataacaaataataaaacagaaactttaatacttatgcttagtttagctacttaattaaaataatatcaaaaatatctttttttacactgtatcaaaaatatatttagatacaaaatatttaagtcaaactcaattttttttaatcttttttttt

SEQ ID NO: 229656 - DNA, 923 bp, Cannabis indica
tatattgtgcagtagtatatatattagctagcttaagtcataagataataatttaagggtttaatctttatcaaacctgattgagactgagcctgtaccaggagcagtacagagatgatcaggataaaagcacattgaaatgaagcaagaaggaaattcttatacatgatcatgatgaccctcatttaaacccttattaatttcttacacttagatcttatatgtgtataattgatatgctcattactcacttccatttaatttattatagcaaacatatattatgaatgttatatttgatgggatgagagatgaagtactattactaatttcctttctttcttctttttttttataagtcaaatgaaatatttattagttaatgaaattagtggcctatttgattattattaaattgttttatgtatatttttgaaacgggcccatcagggtttaacaaccatatatgtcaagtcattgtgtattttaagatgtatttattagtttgacctaattaaatataatctaggaacctaatacgataagtattttagaaagacatgcacacaatgtatattctcctgctgcctctagctcttgatcgatcacatattttattttacttatactgcatgtaattattttttggatttttttttaatttttacatttaaaagcagtttttttttttattatttatacgaaaatcacaatccaaatccacgttgcaatccacacacctaatccctaaaaataataaagaaaaagattaaaaaatattacatgaggtgattctctttattttcaatttaaatagctgtcattaatttacttattattatgtcaatcgatcattattataggagaaaattttaaagtggcgtttggttggaggtaatgaaatggaatagaatggaaaagaa

SEQ ID NO: 229657 - DNA, 862 bp, Cannabis indica
atttagaacattattagagatgaaaacatcagactccaaacccgtcttaaatacagcagcatggagagaaagaccgcctcgtagtagcttaacaatggagcaacggtgtaaaagtgaggcgatgctttctggtttaagcattggaacatttttctattcgttttcatgaactatttacaattacaaggccactcaacacactatattcttcttcttcttttcaattctcatacacagtttacttcactcagctcaactaagctcagttggccccaatcttggtcgttggtagaacgccttttgtccctgatgagaagaaggacgagttcattcaagggctttgggctgcttctggggtcgatgattttcacagcgaattcaactcagtttgaggagaaacaatacccattagtcccagccccgtttctgggtttcaaggatgagaagatatgccaagcctctaagatcccagacacgaagaaaaccttcttacttgttttctgggtaaattggtttttatagaaaaatgttcttttatatgatgattttccagtttttaaaatgtgggttttatttattgattattgaagttgttcgttcaaatttttgtttctactttattttagagcactctcaatctatcattcaaatacatcactaaaatttattttctctatacaacactttaatattatggttatattataccatacatgaatgttaaatgggtaaagttagcgctagcctacactgactcacccttaccacggtaacactttggctcgccccgacctgccctgttagcgccattgaagtggattaggttaggcccaacccggaataaatgaataggatttgatcc

SEQ ID NO: 229658 - DNA, 1014 bp, Cannabis indica
gaggaagcagttagacaacaaaatatattaattgtagattagttagcttataaaatgtagtaaaactatagattagtttacttacgcaatgtgtaagcttttcttgcaatattaacaacttccaaaagaataatggaccgtaatcatcagttttcaaatcccgaagccaatgcttgggaatgagtccagaacaccacttccgaaaagtatccaacaatctctcatccggtgatgacaggggatcaaacgtcgaagaaagcctctgtttcttcttcatgtccgtgtaatctttaaaccatataggggatttctcttcctcttcccacactcaacccctccaagtggtgcctccaaagccaaaatttcaccctgtggctcgctgtcacctatgcagataatacctgcaccgataggggtagctggagcatcctcatagggatcatacccgtcaggaaagacctcatcatctccacccatagcaaatggtgagggtgatgtagctactagtgggggtgatgcatctgatgggggctccggtgttggagctgttgttggcgtacgatgaagcatgctcaatatagttctgagttgctccataatgaggttctgaccacccttcagctctatatggctattttgagatgcctccttcagctcggcgtgagaagcgtacagacccttctgctcagcctcaatcttgtccaacctccccaccaattctctgtactcgacaccaccaagacctgaagatgatgcactgggctgagggtctgaagaaatgacctgataaaatatatcccaaaaaaatatggttagcatatagtaatataacaaataaattacataattgtcgacaacatgtcgataacatgtcaacattgtcgacatggtatcgacaatatctaaaagatatttaaaataaaaaaccaaacaattatcgacaacctatgtaaattacaacaactaacaaagtaaattacaactaaccaagaaatcacaactaatgacaatcaa

SEQ ID NO: 229659 - DNA, 908 bp, Cannabis indica
tacccattaagtaattggttatcaaattcaactgccaatgcacaaaaaaaatgttttttcttaaaaggtataagatgaagtttaaaatactataacaacaactaatctttctattataatgtagaattgaacaccaaaaaataattgttgttgaaatacaatggttattatttttgtacgagagcatataattcatccccataatactttcggtctgcttattatttatataatgaccacataattataatgcagtaatttctatttcttttttaaaaaaatagtccctaaggaaagaatgaaaggcaagaaacatggatagaataaaaggagaaagaactagctaatttcaatttattttatctttttataacatacaaattttaatttaaaactaaaataaagattacaatttatttaaattttattatgtattatttcctcttgaaagaatattctgttaagaacacaaatttagtcttaattaattcaatataattaaacaatagaattacaaatttgcggaagcgtatcaaagttcattgaatcgcgtgaagaacaaaaaaagatatgattttctaattttgcagtgaactttttttctgtaacctttgtctcttgatgatggggtttcaaaaaaataaaaaaataagatactgcaaacagttaataatatttattgacagttaaaagattattaagaaatgtcttgtctattgacatgtgtttgatgtttgtttgagtattttgattggttttttctgtttgtttggctttctatcaatcggcttggtttctttggagttttctgatttcttgtctctgagatggatcaccaatatgctgcaatgagtttgggagaggatgatgagggatttctaatgtatgaagatgtttcggtggacaca

SEQ ID NO: 229660 - DNA, 1108 bp, Cannabis indica
ctatctattttgacatttagcagagcttttttgtgtatttttcatgtcatgtacgttgtggctatttagaatcacctataaatttttagaaaattcttaacaatttatggtacaaatataaagtttaaacagttgtttaccacatgtataagaaaaaatagtcacacgtgcaataaaatatttaatattttatttttcgcgttgttaaatcttcaaaattttctaaaaatttgtaggtggtcctaaataattacagcgtacatgatcatggaaatacttaaaacaaactaggtaaagggtctactggaacaccccttttagtgggtgtgctatatattttcccttgtttattttatttcatatatagggtaagcctgtaatatatccccttaaaaataaatattttggtagacctattatttgtttcagcatatataaaagtctttttttttcaaatcatgtatgttgtaattatttagaaccatctgtaaatttttagaaaattttgaataatatacaatgtcgaaaataagatttaagtattttgttgaacaagtgactgttttctttatatgcgtagtaagcaactgattgtttttttcggcattgtaaattattcaaaatattattaaatttacacgtggtcctaaataattattacgtatatgatcatgaaaaaaaaattaaaaaaatctcctagataccataacagataaaaaatttatgggaatatcattttagaaagtgtgcatactttcatctatacatattaaaatattgatatattcagtaatatttatgcactactaagataattttgttatttttcttaaacaaatatatgttttcgatgtttattggagtggtttgcctcttctacttatttaatgagtttttttagttggatttatataagggaaatttacacccattactgttttttcttcaatttttttcgttttatactgttacacgctcaactttacttttctactgttttttttttttggttcagtatactgcctttcaaactttattattcaatgggttaatgcttcccacttgtcacgatagggttttgccacgttttttttttaaaaaaaaattt

SEQ ID NO: 229661 - DNA, 1290 bp, Cannabis indica
tatgcaatcaaatttttggggagataagtttgagtacaatttgaagttcaacttaatgatctttgaaatacatatccatcaaatatttctccacccctatcaattcgcaagatctttaaccacttaccttaatgttttccaacattactagaaattcatgaaatttctcaaacatttcaaatttttttgtataagataaaatctagagtgattgtgtaaagaatttaatgataacttatatccacccctgaatatacatccatatgttcgaatatagatgatcctaccttcaagtttaaatattaaaattaatattttattttgatattcgggatttgaaatgggaaaatttcaaaattggtgaaaaaatcaccaaaaatttggatttttgggtgaaaacacccatgcagccgagaagaggttgcttgagcctgtatgcgtcctcaggacgtgcacatgcgtgtttgagcaagggagcatcagcggcttcagacagggtgtgtctgagggatcagcacgcgcatgcaacttgtccgagtaactggtgcatgcggcgctcgaccctcgacaccctttggatcgaattttcaaatggccatatctcctttgtttttcatcagaattgagttccgtaaaaacaaaaatcgcttaatttttcacaaggaatccaaataaaatattttcacggaaaaattttgtaattcaaataacatcatcaaatagcacataaaccaacatgaacacatcaaaatcaacaaattcatcattttgaatccatatttaatgaaagtaaaccattaccatggctttgaggccagtttttggaaatattttacaagatctagatttactatcaagtatgttgaattaacatcctaaatatgaatatctctaatacgatgaaaattaaacacataagagtttagaaaaccttacatttattgcagcgaaataatatgactccttctgcttagatctctaatccttgttcctttatgttgcacagtattatcaggatttgagcctggatgtaaagaccgcttatgattaatactttggagtattaaataattagggtttatgcatgagatttaattattatttataaaatgcaaattgttgaaatatatttaagttcatatgtgtttattatgctattttatgtaaatttctcaatctttgtgtttgtgttaggaagctgtggaaagcgactttgggcctttagagagtcgcattttatatgttttagattaatattgtcggggtatcattgttagatattagaagtgt

SEQ ID NO: 229662 - DNA, 1881 bp, Cannabis indica
ttagttttttaatattttactcttgtatttgtataaataggggctcaccccattggaataaacaactaagaaattctcattcactttctctttctctcttcatcttcttcttctttattttcatctactttatattattttataacaaaaatataatttacatgtaataaatataataattttaagagtgtatactcatacataggtccttatcgtgtcatattcgggttaatgatccgtttaataaataagttggatgtgttaacaagaaaatgacctaaagccatttaaagtaaactcaaacttatttattttgtgcgagtttcgagttgtggtatcgtgtttgacccaaattgccaactctagtgactaatagggtccaagtgaagaagcgttatagttaatgttacttgttatatgaacctgccttctccaaggttgtaagcttagtatttgcaaattaaaccttttagggtttttttggtacgtcgtattagatcttgtatactattatactaaattatgtttcatatcatatttatgtataatattatgtgaaattttaatttatatcaaaatattgtatgtgtatatgtacatacaagtcaatgtcaaacatagtagtatataaatatgatatgtattataatttaatataatattatacaatacgatgtatacgttgtaccaaacggactataaagattcaaattatgttgttcgatagtatgaatgataatatatatactagttatatattagttgtagacttgtaattacttagtttctaatttcttcctagttacctatttagtctccctagttttgtacatatatacttgttattctattgaataaaatacactttttgatccaccatttacaacatagtatcagagcacaattcgaaattcaaaattagggctttttcaaaaaattgagatatacaattaggtttttttcttcctcttccttaaagtttatttctcggaaaacatacttaaagaacacgtgaactctcaccgcgggtacccacagactgcccagctgtcgatttgcagatccctgaagtttggtggtcaaaatcctcgcgcctgagaagctttattccgacagtttctccttttccatctttctgaccttgtgttgcattcatttcgaccattatttcttcttttgcgatcgttgaggtttgtctgtcattttttggtgtgattcttcgtttctttgttctgctttgatgtgtgaggcataagtcagccattgtgatgaatatggtgccggtaatgtctaaacttactgaccataaactcaatggttcaaactatttggattggagcaagactatttgcctctatctatagaatattgacgaagatgttcacttgactaatgatcatccaaagttggattcaaaggagaaaactgatctgacatggcttagggaggatgctcgcttattcattcagattcgaaattctattgaaaatgagggaagtggtaatcaatcactgaatttttttaagaactaatggattatttggaatttttgtaattcagaaacgaaaatctctcccgctatgtatgatgcgtggcaaagaatttttcgtgtggaaaaacaagatcaattcctcataaactattttatgaaattcaagaagacatataagcaacttaatatgttggtgccttttagtcatgtgaaggttcaacaatgtcagcgggagcagatggctatcatgagctttctggggggactctcttctgaatttgattctgcgaaaacacaagttctttctagatctgacatcttatctttgcaagatgtctttagacgcgttcttcgtactgaagctactccatctactctgcttactgtgc

SEQ ID NO: 229663 - DNA, 1171 bp, Cannabis indica
gggctaataggaaaagaactagatttaggcataccttttgaactccggctcacaaacgctttgacacgcttccaagtcttggttttttgtgctttgataagaggttcaaaagtattttgaaatgcatggctaaaagataactcttgttgagaggaatgatgcaaaatgccttttcctttatttttttattgtatccgaacattactgggaccctccatttcaatctcatgaccactatccaccctctccccagccgaagaagtacccacaccagccgagacacgtggaagcctctccttgacatgcagcacctcggttccagcatttaactcatcaactttacacaccccaggaggcattaaatccacttttccattgtcacatgactcaccatcaacacatatcaccttcggcataagctccaactttcctatatcagatgactcctcatctccacacactacagtgggcaccctcaccaaatttccactatcaccatgaccacattcagataaatgaccatccatcttcccacttgatgatcgaactcgtagctctgtatcaccattgcccccatgttcagcaacaacaccatccatctcttcttcatctcgttcccgtcttcccaaaattgaggtaggagccaaatgttcttgagttaggcttgaaaatcgtggccgagatctctccaccgcagagatgattttcaaagcttcccccatggacatgatcggcctgttgtttggagactccgcgcgcttcttattgaatctgaaattatctcgaggaggtgatgctggggcacataaccatgaaccgaacctcccaccatcaaaccgtggattatctccagcaaaatctctaagaggacaatccaaagccttgtggccaatgatgccacaatcatagaaaaaatcaggtaaatgctcatattgaaaaaggagagaaacttcattaccttgatcatcaatagccaccctcaatccccttttaagaggttcagtaatattcaatcttaccctcactttcatggtgccattcacaagctttatatcttccagcttaccaatccgctccccccactctctagcaaagagtttcgtcatgcacgctaatggcacattattgatagaaatccaaaaggaagaaaaatcaaaattcatcttagaaa

SEQ ID NO: 229664 - DNA, 1105 bp, Cannabis indica
acaacaagttgaggtagcgggtatgacacataagcggaatgcaccctgtagcgccctactagcttaggtgcactgtaatgcttttcctaattaatgtgcaagcctttgctaaccaaatggtttattgaaaaatgtattaacaaaaacttttaataataagcataacttttcttgcataaccaaaatacagagtttataaattctgggatctcgtcctactttcaaatgtaacaaaacacactataacaaaagtgtcgctcaacgaataataaactgagcacatgctgtgctgaaggtctgaacactctaaatctaaccaccctgatatgtacattcttcatctagctcaagactcactgctgctcagcctttgccttacccttacctaatgaaaaacatatatgtgagtcaatacactcaataagaaaagcatgtaacataaacatacaatcaacctgtaaccaggcgcccatacactcgatcaaaaagtctataactaagtctcacacgttcttgacaaagtgcaactaactataataccacatgcactctagaaaatcccttaaaaccaataatatcaactttaggcaaaaataccataatgcccctttacttactacttaagcaactaattacctaggggtaaaatagtcaaaaatctttaccccgcataaactcgatattccaaatgtctatacaatcttgtcccactaatcaagaaaaatcaactctctctctttctcgagctccttagaactagctagggtttaagatttttcaacctcatttcagagatttctagcaagtcattagtgtattcaaactcaaagtaatgttctagctcatctcttgttgatttccttaagtttcaagttaagttttatatgattttttatgagttaggacctgtagtgattcatgttgtttgagactatattctgaggttaaaattaggttaattgagctgaattgaagttagtttgtggcttgatttggtcgttagacaaagtttgagttttagaactcaaactttggtctttaatggtaatttttgattctggttatgttgtggtctttcattacatggaatatgctctctatggta

SEQ ID NO: 229665 - DNA, 1250 bp, Cannabis indica
tgttaatttctttatttttttacatttattgtttctagttttatgtactctgtttgctcttgttttacttccaattgttgttcttattttgttaattttgtgcttgattgtttaaagtttaattattttaattgtgtactattaattatataattttcccacaattacctatagtttcacttaacatttgaatcttattttactattagttgaatctgttttagttatgtattgtttcacttaacatttgaatcttgtttaatcataagcattaataatatatttaaatgttgttcgttttctatttaataaaatttatttatgtactttcatatttctaaatctaggaaagataaaaaaaaaaaaactgtctgaaagttgaataaacttataaatatttatatgtatttgagtgatcattggaataatttcaaacactcaacatatatatgatgtaagcctattagcaagtcaaatatgtcattaaaaaatacacacaaaacacaacaaatatcatcattcttgtgcaaattgtaaatgaagaataggaaaaaaaaactatagctctctattgataagagtcgttgagacttgaggagcgtttttttttgcataaataaactattcttgcttgctcacgaagacaggggagaaaattctcttgtcttagttgaacttaataataataataataataattaaaggagaagtgagaagtgagaaggtaggaggagccttcttttggacattatagctatgatttgcttggcttataataataaaataatctcgtgggcggctcaaccaaataataatcaacccataaacataaccccactcaactcaggcttttcttttccaagcctaaaaaagtaaaaacgaattaagaaactacaaacaaaggtcaagatattgggcccataacccaatatttttgatgttgggatgacagcctttgacacctcttctcttccattatcaataatatcgaatagaccttaacacttctctttcccttctggcatttttgaaagcttacattttaatctcatatgggcttggcctatccctatggtcttcttttctctctctctcatcatttttgtttttattagtagcaacactacctaaaaattcactcaaacttaataatggatattggaaaataatacatgttagttagaagaacgtagtaaatagtactaacacttttttgtttctaattttggaatttatagtgacaaatgtag

SEQ ID NO: 229666 - DNA, 1246 bp, Cannabis indica
acaagccataaattgaaatacaaattttagatcgtaatttttcacacaaacccaaacataaacacaaattcatatctaaaatgattacccattaagtcaattagtccacattaatgacacacgacattatttttagtagctggttccatggcattaaaactcaaactaaaacgttacgagctcaaataccatagaactgagagaaaattgtaaaagataaaaataatcctaagagtaaataagtaatcattcaaaaagcacacagattcttgatcacaccagactagccaaaacactgttggaatacacccttaaattcacacttgagctcaagaagcaggtgacccagacctgattgatagaattgagaagaaagttgtataaaccgattgataatgtattcgactagctcgaatttcgtgtaaggaattcaaagtcttaataacaatttgttgttgatccaattttcaacatcaatactctataataaatttatttgtactaaaatatgtttaggtatttatcatacattactaaaaataaaatatttaaaataattatattaaattaaataaattatttaaattttaaatttattagatattttaaattttcacaattttatattagcaaatcacataaactagagttttttctttttttaaaaagcctagagtttcttcgatactttttttcttacaagtgacaaagaataatttgaaaatgccaaatgtgtaaaaattcatattttaaaataaaaataataaataataacataaataataaaaatttgtataacataaatttttatatatttgtaattataatgaattgaattataatatattatcattataatcaaaattgtatcaagacattttaaaaggaaaatttgataaaatatacttaaaaatttagactattcttttaatataccacttttaaataaatactctaaatattctccaaacaccctaaaacccccaaaattacccttacaattcaaaagctctcttctcccactctctctgtctaacttccccccctctctctcaatctgttattcccatcgagctccaaacctttcaagcccctgactgttcacgagctccgaccgaccaagacgacccacgaccgagaagactcatgacgacttgcgacgacccatgacgacccacgagaagcacccaagacaacccacgacaaccgcttttttttttttctggtttctgacccatctagcgct

SEQ ID NO: 229667 - DNA, 1080 bp, Cannabis indica
atcatcatttttcacaagatcttgaaaatttggctaattatgagagtacatgacttcttttccagtcttgcttctctttggccgtataaggctaattgttaaactcgactttataattgttattttagtttgttaaaaaaaatattggtacacctacttatacttctaacatttaaataattataaattaaattttatttatatgatagtttatattataattatagcatacattaattaattttttaaaataattaaatgatttacagtactaaaataagagttaacaatataaaaaacaagcacgcaacaagttatagtaatgttaaaaatttatatgaatgatgtaagatctttgtttttttttcttttttgacaaattagtttcaatcttgtctagagtgtgtgtataattagaactttaagtatgtacttagttcacgttagttaagttgtaggtatttttagttacaactgtcgttaatttttggtcttgtctctcatctctagagagaactaacatcttagatcgaaaaagttttttgatattgttatcatcgttgtatttttctctctatctttgtttttgcaagttcatcaagattgatgatccatggtaggtgttcttggttagatgaagatgagcttggactgaggggatcttagaggcaacttcttcattagatctgaaggatttcagattgaattgaacattgaagggattcaatgtataaggcaaggggatcttgcttgtaaggctaagggatttagctattttgggtaatcacttaatttaatattagaattgtaagattgtacaaactgattgtaaatttacaattggaaatagtggaattattaccctggttcaaaggaacccaagtaatatcagttggaatttgttttcaatgtccgaggaagcttgtaaattggtgttgttaatttttttctgcttttgcttttaaatttctatggtaaagtgaagttgataacggattaatctcaaaattggtaataagtgaatcgatcttagacattactagtacaagaactttcaaatgatatgaaacatatatgatc

SEQ ID NO: 229668 - DNA, 1022 bp, Cannabis indica
aagagtaaagctaagctagaggagcagtgagatgggcttggcaaggattgtacatatcgccgcagtacaacctggagggttttggtcttttagcattttgagttatattttgtagtttcctcgtagtttgtaaaaaaatgtattacgtaactttttatataatacttgtattttcaacaatgattataaactcaggatctcgatttacgagtttatataaatataatataattagattatttttgaattatcatgttttaaaatacaggcattacattatgtgtgccagttggtcttcttgcttggtatacatcttccatactagaatcttgaacttgggctagggtaagacattaatatatgccgagaatggtgatccccttgaattgtctagttaaaggtctgaaggttttgggccagctatgcccttgatcatgtcccttattttgtccaattatgcttgcacataaggatctattactgcagggacttggctaattggccttcttgaatgggctacaaccctgaatgggaaaaggtctggtcagccactccttgtaagctggactgaccttggtaggccagccctatgctgggtagggtcttgtcgcttgttctcatctgataggctggtgtagcctgtgcgttgatagggagtagatcacacaagttgctcgcgttcgaaggatctagatatttgaagtgactagactcacttctcaattagatgtcttgggtggttttacccattctcggacctagccgactgaagattggcctcttggttactcgctcctagaggccctaggactagagttcaccctactgggctgccatgggtataccaccaagggggtggccgctcaaaggctgaccaattgggggtgttgtagagcctgagatccctggctaccaccaaaccactggttgtggagatctggctgttcgcgccactagaccttcgtagcaaagcttgtcctccttcgggtaggggaagatctgtcctagttcttaaggaacct

SEQ ID NO: 229669 - DNA, 1544 bp, Cannabis indica
gccatgtcacgaaactcttcggattctgtgtaggcgtgcccatggataaccgttagatgggatgaccttaggcattccttttgccacctgtcatgatcctaattaataagggctattggtatttaagcctgataatacaaacacaagtcacattttccctcttatttcgatcttccctcttcccttatctctctgatatatttgaaacccctttccagatttctaccttcttttctccaaaaattccgagtttcataagtaatcaaaaaccaatcaaagaaggcagtgataaatcccaaggttagtttttgaagtattttctgtaaattttctttctgtttttcgaaaaataatctacattttgagttttagggaatggaagatgtatgtcattgtagggaatgcatatagaactctatttctctactaaaaactgggtaatatttaggagaaaataggcctgaaatttgcataatcgtgaaccttatgaggaacattttgagtattagcaccttttttacttgttgtcttgaatattcgcgagtattgagatgaacatcttgaatactcgcatatatatatatatatctttaggaattttggggatttggtcatcccaacccattgtttaaaacttaggattttccttgtcttctctgtatgtttttattgtgaatattggttaggtctttcaaattgtgggtgtatcaccgtaacttaatgttcatgcgtgcgatcgcatgttccttcggttactgtgatacacccagccatttgcgacgtgcggccagttttctcttttcttgcataatcgcatgtttcaactagttggttttctcaaaacaatgaggagttcccattgacccaagggttatgcgagaagggcatgccccttgggatactgaagactcctcagctgtttcttgaggtacggtactagttggatatgcgtgatgtttttgcatgttgcgattggttagatttctcgaaatggtgggtgtttcccagtaactcgatggtcatgcttaagaacggatgccccttgggtcactgggaaacccccagccattttttgagacactctactagttgcacatgtgcgatttataccttgggagagttggctggatttatcgaaatggtgggtgtatctcaataccttaatactcatgtaatcgacatggtcatttggttattgagagacacccaaccatttcttgagaggccgagctaacctgaatttttttgtatttttcgtgcgggtgaggtcacttgtattattctcgcacttttgccacactaaaaagatcttctatctttcagatgagcgacttgttggatagccaaatgctcggctcaagaggtggtgccttcactgacgagtaggacaaagaagatagctttattccagcttcactttttcatgaagaaaccccagtcgctagaactgagactttaggtccattgtcctctgaggacatagaaagaatggttcaggagctcgctgaaccagggacaatcgagattcgtgatagcgaatccac

SEQ ID NO: 229670 - DNA, 2923 bp, Cannabis indica
ttagggcacaaaaccgaacaataatatccaacatccagtttattaaattagcaaaagactagttgaggcagagaatcagtaccccctaattgaaaaactaacttactgtcttatcgtagccactagaaagttaagggcctatttccaggttcatcctgttcaagtgtacaccaactaacctttacgccaagttttacaaaagcctgatgcttatggatggctactcaaatgggccatagagttgggtcagtgcgaaataacttttctaccctacacaattgtaaaaggacaagcttaattagattttgtggctgaatgcacgggaatagaatcaaattgttcaaaagataaccctgagccagaaaaaggaccagaataggcatccccacaagaacaaaatgtaaaagacaaacttatctggaagttacacgtagacagatcatccatcgatcaactctctggtgcaggaatcgctctcattacacctaggggcaacctatggatggagcaattaaattgggttcaaagcctccaatagaaaagtagaatatgaagcactcatttctggactaaagctcgctcgggaggtacgtgctgaatacattgaagtctgcagtgactcacaattggcagtaaatcacgtctcaagggaatacatggctcgtggggaaaaatggtggcttatcttagtaagatccatgacctgctcgcacaattcaagggttgtacactcaaggaaattctaagagaagaaaatgcaattgttcatgccctagcacgacttgcaagcaacatagtgacagataaggctaacctagttccaattcaatttttgaaagaacccagtatcacctgcacgaaggaaatcgaaatgatagacactacaccaaactagatcactcccatagcagcctatcttaacactagagaacatccgagcaacaagaatgaggctcagaaaatgatgagaaaagtgacacggtacatcacagtagaaggtgtaatgtatagaagagatttctccatgccactgttaaggtgtgtaacgaatgaagaggctacacaactcctgtttgaggtaatgaaggattttgcggtaatcatgctgggggcattgtctatctaagaaaatattaaggcaagagtatttctggcctaccatgattgaagattaaaaggtccatgttaaaaagtgtgacaaatgcaaaagattttccaagatcccccgagcaccattaaatgagttaacatagatgcaaagtccatgggcctttgctatatggggaataaagttgatcggatagttgcctaaaagcaaaggtggagtacaatacacagttgtaacggtagattacttcaccaagtggacagaagctgaaactctagaaacaataatgtccaagaaagtgttggatttcgtagtgaaaaacatcatatgccggtacgaacttccacataaatctcagcagtggtacaccaccccaaacaaatgggcaagttgaggcagtcaacaagacactcaatgacaccatgaaaaatagctcaaggaagctgaggggaattggccggaggaattaccataggtattgtggtagcacagaacaactgaacgaacgacaatcgggcagacacctttttccatggcctatggttatgaggtaattctacccgtagaactagaacccccatctcacagaagattaacttacgaccaggagactaagcatgccctcctgataaaatcacttaatgaaatcaaagaaaaaagagcttcagcgaacctaaagctagtggcccaccaacaaaaggtagctcggtacttcaacaaacaagtgagagcaaggatatttttttgtgagagatatggtcctcagaagagcgttctcaaatacaaaagacaacacaactggtgtgctcaaaactaactgagaaggaacatatcaagtaatagaagttacagactctgaagcatacaaacttggtcggtatgatgagaacatgaaactagttctagtaccaatatattggaacgatgaactgttggaacttattttaccaggatttagatttactgacatgtatgttgattataattctataatctaacatcctaaatatgaatttcctaaaacaatgaaataaatacataagagatcgataaatgcttactttgatggcagcaaaatcataatgactcctttcattcagagctttagcccttgattcctgactatagcagagcattattaagatctaaacctggatattctcccttcactttggttagacacagtcttccacactatgttaggtattgctttgacatgagtgggcatactctcaatcaacatagaccacgaaattctatgaagaaatctcaagcaaaatttgaaaattataataaaaaataataggtttgtctttcattcagtttgtcaagagagagtctagagtcttctcttgaatcaaaagccttaatgttctatttataagaattcattaggtttagggttagagctaaatgggctgattagaaagattcaatggcttagattcctcctcacggccgaaccccttaatgaagctaatgagttagaattttgccattattttgtttccttaatgaaacaaacttgtctttcatcaataatgccatttttcggctttagttattaggggtgagcaaaaaatccaagaaaccaaccaaactgagtacatcaaccgtccaaacaccaaaaaaaccaaaataaaaaaaaattgcctttggttaaaactgcctttgcacgatcagttttagtgttaatggtaaatcgaccgattaaactgagaacccaccaaacatatatattgtacactatacatatataatataattatttttgtacatatttaatatacaattttattaaactagctttacttc

SEQ ID NO: 229671 - DNA, 940 bp, Cannabis indica
gtgcaaaattggcagaagcaccagagaaatctgccatttgagaggcagtattggcttcgattctcatctcttggttttgcaggaggtattggacttcttgaaaggttaaatgatctctggaactgagattgatgacaacggcttcatagtcggtgccaaggccagccaagacataaagaatcaattgttcttcagtaatttgatttccagcagctcgaagtccgtctaccaagttcttcattttcagaagatactcatcaatggcaagagagcctttctttgtgttctgaagttgattcatgagatgaatcatgcgagctcgagatgccgtgccaaagagaagctcaagagtgcgccagatatcatgtgccgattcacaattcacaacatgaccaagcatagattcagaaatcgatgagaaaagccaagagaggagaaattgatcaagacgatgccaacgaacgaattcagggttactaaccagagtagttgattcaggtggctgacgaattcgttgttgaggagggtcttgattcagcaagattccttcaagattgtgggcgcgaatggctggaaggacttgggatcaccagaagaagtaattgttgcgattgaggcgtagaggaggcaagaacatggtggtgggtacgccatagtttttggtcgagtcactaactccagagggtgtcgccatggaaggaccaagggtcgtctgataccaagttgagaaagtagaaaagagagagatttcttaaaggttcaaatcttattgaattaattgaatgaatttttaatacagaggagagctttatatactcttttaatacagaccaacagaaccgacttatatggatagagtacaactaatcttttaacaaactaactaactgatttcctaagttaacagacagctaactgttatgtaacaaactcctcaaca

SEQ ID NO: 229672 - DNA, 1426 bp, Cannabis indica
ttttggagttttgaaaaaaaaagtatagtttttttaaagtttagattttcgatttaataataaatttttttaattttttaagcatataaaatcaaattttcctattgataataagttatgctataatataataattactgaaaaggtagtagtttcgtgggaacgaacccatgtagagcaaagcaaacagaatgaaattctaattctattagtagttacgaatgactgtctatatatatatatatcaatgtaataataatgatggacagtcattctatatattggggaagttcatatattgatatagagtgggacccatcacgtggaccactttagctggcaaagataaagatactaaagaatatggtcataaaccagcgtgcagttattaattttttatttttttttcattttcgattatgttatttttctttcattttcctaaaaggctcatgaggttattttagagttagggagcatcaaaataatcctattgttgtttactacacatttaacgatcgtcaagctctcggaatctaaaagaaattgtcaaagctatataccaaacttgatatagacgaagtaatataatataatatagaactagaattaggcgagattaaaggttgtttgacttcataatttaaaaactgttttcagttttaaaaagttaaaaacggtttttaaaaatttataaggatcgattagcaaaatttttttaaaacagtttataaaactcaaaatgttgtttttaattttaaaaaataattttttttatctaacatattatatttattttatatttttgcttgcatactcggattctaaactcggaatcatacttgaattcgaactcagatggattcatgtcataatatggtgttaaaatattaattttttgtaagaaaaaatccaaaaataattttaaaaaatttatgtcaaatattattaaatttttaaaatgacgaaaagctattttctattcttactttaaaaaacacaattttaaaaaactgaaaactgaaaacacagccaaacaggctcttagtcttttttttgtcccattgtttaatttttttgtagaattttttttttttaacaaaatttatattttcatttttttttcacagttaaaataactaattataaatatactgtactttaatttttgtaatttttatttatatttttttaaaaaaaaataattgaaaaatgtagttaaatttcaatttaaagtaaagagaaaatgtataaaatatttttgttttatatatcagtttaatgcatttatttttatttgtttattagtgaagcatctctaaggatacacaaaatttaacgtcaaaaaatattttcactccaacgacaacactaaaaattacactaaaaaaatattttccattattatattaattattgaataaaa

SEQ ID NO: 229673 - DNA, 1685 bp, Cannabis indica
gacaacctcaccactattacccaaactattcctatttctagcatagacactactaccaatgctaccactttaccaaactcattccctaatacattaaataatccattacctactgccaacctaccgactgtcccagccgaacacacttttgactcacctttacactcacatgtccaaacaactacaattgaaactgtgccattgcagcagatagtgacacatcctcaacagttacatactgtgcctcctagtggtgataaggacactacaagcatgggtactacaactacaaggactcactctatgaagacaagatctctcaatggcattacaaaacccaaagcctacacagctaccaagtatcctctacccgagtcccttataccatctgagccaaaaaacactacaactgccttaaacaatcccagatggttcaaggcaatgaaccaagaatttgatgctctcaaaaaagcaggtacatggtccttggttccttattctccacatatgactgtgattggcaacaagtgagttcacaaggtgaaacttgatgctcatggcaatcttgatcgactgaagtcaaggcttgtagctaagggctacttgcaaacacctgacatagattatgaggaaacattttctccagttgtcaaacctgcaacagtaagaattattcttaccttagccgtgtcccttaactggcaagtaaaacaattggatgtctctaatgcctttcttaatggtgagctacatgacattgtctacatgagtcaaccagaaggttttgttgatcctaccaaacctactcatgtgtgtcaacttcacaaggccctctatggattaaagcaggcccctcgtgcgtggaatcaaacacttagagacaagctactggaatggggatttaatgcttcaaaatcggacacttctttgttcacatatggctcgggtaacaacataataatactacttgtatatgttgatgattttttagtcactggtcctaacacttctctcatttcaaagttgattgctgatctcaacaagtccttctctttaaaggacctagggccggttcactatttccttggtattgaaatttatcgtgatcaatcaggcatgtatttgtcacaaataaagtatatcacagatttgcttgttcgtctcaacatggaaggagccaaaccttgttctaatcctacaagttcttccatcaaactctctcttacagaaggagaaccttttggtgatcatactctttacagaagcacattaggtgccttacaataccttactcttacaagaccagatgtggcattcattataaataaaccaagtcagtttattcatgctcccacaagtcttcactgggaagcttgcaagaggcttatgcgatatctcaaaggcaccattcatcatggtcttcatatcacaccagctccttctttaactttagaagtgtattcagatgcttactgggcatcgtgtgttgatgatagacgaagtacagggggttatgtgatgttttttgggggcaatcttgtgtcatggtcaggtaagaaacaacaggtggttgcccggtccagtagtgagagtgaattcatggctttagctaatgccgctgctgagataaaatggctagtctcactactttctgagttacatgttacttctactcaatgtccaat

SEQ ID NO: 229674 - DNA, 952 bp, Cannabis indica
aaaattttaaattcaacaatttcaatagttctggcagaataattgtaaccacctgaaaagtttaagagacataatttaatacatataagttcaggaacaaaaattctaattagtctaattaacctaattattatatataatatagtttatttacagcaaaaatctcaccttgtggcgtgctaaaaaatttatttaagaatttaagtgcaacaaaataaaatttttgataacaaaaaatttgtataagaattttaagtacaataaaattgaactagatataagaatatttactactaaaaaatttttataaaaaaatttaagtgcaacaaaataaagtaaataaatatttatatggcaaatatatataattgaccatctttgtcctataatttgagggtgtcgatctgaatctaccatgggtagtttggtcatatacttatattatatgtattacgtaccccaatcatgattaattttgatgcattatatattgtcacgtaaatatttcaccaaaagtaataattatagtaaatagtaatgcaacttgtaaaacaaggcttattcatttgttttaagtgtactaatcttattcgataaaaagataataataataataataataataataataataataatatgtctttggttcacaaaatcgtggcaaaatcgattttagtcgcgtgtccataaataaataataagaataactcttttaatcctttataataaatatatatattaagaattttcgtcaaaaaaattatatatatgcatttatttatatattagactttaagtaaattatataaatatttatatactattctaatataagtacttatttatataaaatgatgttgctataacaaatcttttagtataaccgtccaataaaataattaatttgacacaagaatggacttaattcaaatccaaataaatggattta

SEQ ID NO: 229675 - DNA, 1026 bp, Cannabis indica
aaaagtaatatatttgtatgattattcctgattttgaagtagacttgcagagtgttaattgtttatataggggaaagggaagtggtactttgatacttgcccccacgttgggtgtgaagctaaaagatgatatgtttatttttacataaaagtttaacctaaatttagggtaagaagataataatttggtgagatttcctttgcttaacatagaatataaaggtttttttaaagtgttaggtagaatggaaagaaaataaaatagaaagaaacttttacttatttgtttttatttttctatattgtttggtaaacagaaggtatgaaaataatcttatattataaaatttactattttattcatatatttttttttaattaggttaatttagtaatttaatttatttgtgtcttctctaaatttccggaggtctacatctttattttatatttgtttccaattgaactattcacttacattttattttctcacctatcaaacacgctcattttattcacttttcttttctcttgaaaatttcttcctcattaacttgtcgactctaccaaactcaatctaagataaatgggtcaaaatagattctcctgtattaatcaaacaagggttttactttttgatacaaaatgcttaaaaagaagtatatataatgatggtaaagttgagactactaacaagcttttgttagctaatcaacgccatgaagtctggtcatgggatcaatacagcggtggaagtacaataccagcttagctttttagcctaaaaaaatattgtattgccaagtaataatgaattggtaatacgcggaaattaaatataatatatatatatatatatataaaatttatgacctattcatagtatgttaatttattttaagatgtaatttcatgaatcttttttatcttaaattctgaaaggcaaatttcaccattcaactataataaaatatctcatatcaaattttagacccttgactaatttggacaaaataattctactat

SEQ ID NO: 229676 - DNA, 1712 bp, Cannabis indica
tggaacccatctgatggaatctacagccatgtagagaaaaaagatgatcagaatgtacagctgtttgaaagcgtcacacatagcatagaaaaacatgcacggcaaggaccgggaagagaatccttcccttagaaaaaattgggcatcactgagtcagtttgggcttaatgttcttattcatcactaagtttgtactgtctagaaaaagaacccttgtgaaatctagcatgcagtcctgtttcctgttatacaattttctccagcatttaaaaaaaaacttgatcatcacgtaacaaataacctgtgcgtctgtaagatacaacaatgctgccttaaaatttcatttagttgtcctactgtggttgaatgaattcacattaagagcacgtgaataatcatattatcgtgtgaaaaatacttaaaccaggcaacagctaggctacttaaatgttcagaagttagattctgttcagtctgaaaaatagactgatcgaatgagccactaatgagaccagagaaacttttagttcattaacataaattctaatgctatttatattggtataatatgttaatttcacacttccattacgacgcataatatgtagtaacacacacacacatatgcatcaccttacctgtccaagtgaattactttccaatttcaaagacagtagattgggaagtgtcttgaaaatagcaccaggccattccttaatcttgtttctggacagaatcaaagtctgcaacattgggacaaaatttagaaaattattagttcacagcagcaagtttccaaataacctgcccatcctatcagcagcagcagcaactttctaacaaaccccttgccaaaacactcataaacaacttgaactttaagactataaaaatagatcaaattaagaaagaatcgtgttataagacttgtatgagagatatcaaatgtgcatctgttattttccatgtgtattaatatatatcataagtgtattacattccaaggtgttggtgcctatatccttgctatgttctttgtctctaacaatagatagtagaaaaccatgataaacttattaaccgtctccagccaaaacctaacctagttccggtttaaatagcacctaggtacccctaaacagccaattttctggtgtttcccagatatgagcagctgtggaagcagccccaattcattattgaataaattataaatttgataatgaaattagtagatttttaatgaaaagagacaaaagaaagcacaagttcatttactctggttacaacttttatttccaactactaagcgaacaagatatgctgtttaattaacttacattgagggatgtacatgaggaaagttcaactggcagttcttgaatagaattcttagaaagatcaactttaatgacctcacccgattcccatacttgtgagggcacagcactcaaacccaacccttccaatgaaagttcctgagagtaaaaccatttatactggtgtaaatgtcaaagtcaagtacaaaaaactatgcataggaaccaatagtgaattatgtgctctcctctagcatgacaacttaactataaaggagaaagaaaacaataagaaacactattcatcagtcacatgccaatataaaccaaaacatatgtgctaggaataaactgcggaagagcctttccggttcaaagaggtatctataatga

SEQ ID NO: 229677 - DNA, 1261 bp, Cannabis indica
cactattaacgccattatttctccatcatgcatggtgcgaaatttgccaccattcataccctaatttttgccaacaaagtcccttatttcacgggatatctgatttccagtatcgacaccatgacctgcttcacctgaggactcgaactcatctaaaaaaatgcttatcagtctccgttcagtatgcaaccattgtgcaccaatttttttctttcttcgacgtggctcagccatcatccataaaccatatagcttctcaatttgctttagtggtacctcaaataatttgtgggaaaactttctgaatgaccaattatcccacatataaaacaaaatattgaaacaaactcatatttaaattggcaccacagccacttcccattagtcctctttagtttaattcttatcttcaggggttgctctatattcacagtaaatctaatgtgtaagtaatccctccagatgcccataaaattcttgggatcggacttaacaaaagagccagtataattaccaacgttcctagcattggtttcagtcatgaatcccattctaagattatgcagctgaacccacatgtccaaacgaacactcctcggatcttcctctgccttcagacgttcaaaaattaatttgaacctattgaaggtccaaggactcccttcaataactctctggatatctatctcatgatagaattggaaaacataaagattaggttccaactcttttacaaacatacctttgccaggttgccacagtgaagccaacgtgttctgcatggagtcaaaatctatgactcttttggttaagaactttccaactagacaccacctatcatcgataggttggcctacatcctcaacgacatcacagagtaaccctcctcttcttcttcctccaactgtatattgtcgtattgatcattcaattgaccaacttgttgactactagaatccatcagaagaaacgaaacaaaaacaaacgcacaacaaatcactaaatcctcacagccccacactcatgtcaaaagacaagacataaacttcttctttttattttaatttcatgtaaatgtaaatgtttttggaatttaataacgaaggctgaattttattttatatgtcattttgaaaaaatcttttttgaagttttaataaacacaaaatatatgtgtaaaatttcgaataatttccttgcccaagttacggatccaatataaaataaggcccattacaatgttaatgggctactctccgac

SEQ ID NO: 229678 - DNA, 984 bp, Cannabis indica
ggtaaaataattccaacatcttgttctttactgaaattgcgagttgcatagctctgcaccaggagacatagttgtcttgacatgtgaggggttgtgacaccaaagcacttcctggattatctccatggtggaggaagtaaggacttccaggatcttcgaggggattcttgattgtgggaagctgaacagcttgattgagttgtccaggaacattcccaagatcagtggtggtagttgggatttcaggttgaattttgactgttgccatcgcaagaacacagacgacaacgaagcagagaagacgaaaatcaaccggagaaaaaatgcggaagaacacagcctcaccggagaagatgacacagaaggctgaagaaaaggatcggacaggaaagcctatctttcccgctctgataccataataagaaaattgaagagtagtctttttattattttgagaaagaagaatgaaacatattgcaggaaaaagaaaaggaaagcctttaaataaggaaaggacttcaactaagtcggtacaaatcataggaggagaaagaccaacgaacttaactacctaacgaaagatctcaactaacttctaacattttcccttattaataggaagagtaaaagaggaatacaatacaaaacaggggaaggaaatagagtaaaatagtagcagtatgttgtattgtattctttaatatcctcaaagctcaaaatattgtttaaacttttgtaaatctcaatattctgaatgatgaatgaagaaagacccaaggtttgaaagtggctgaaaaatggcttttataagaaacatacctagcttgaggaattcaacgatcagtttagttatagtaatttgaattgtaattttttttttaaaataacactttatcctctatagggctgaacattttgaacgggtttgacccgaacccgagcaacccgcccgaacccgaactagtgaacccgcaaaaaaaattt

SEQ ID NO: 229679 - DNA, 1149 bp, Cannabis indica
atttagggcatcaaacccaacagttatgtctagtggatttggtactttgtttcctactagggaaatagtaatctctaagaggtgggtagatctcttccagcattggtggaagggagagaattattaatggatctgattgaactagacctacaagactttaatgtgattctagggatgaactggttggctaagtataatgctatcgtagattgtaagagaaagatggtgaaacaccatttgtttttatgggaagggttcaaggattttaaattcctataatatcagcaatcaaggccaatgatttgttatgagagggatgtatgggatacttggccaatgtattgaatataaagaaggatatagcgatgggactagttaaagtttgagtagtgtacgattctcgaatgtgtttctagacgagttaccaagattgccactgaagagatagagagatcgattttgagattgagttgatactgggggctgagctagtttctaaggccccgtatagaatgccaccgatagaattggatgaattaaaagtctagttacaaaatatgcttgatttgtggtttacgagaccgagtacttctccttgaggtgcactagttttgtttgttaagaagaaggatagattattgcgaaactgcatcgattatcgagagttaaacaagttgacaataaagaataagtatcttttgccaaggatagaagatttatttgatcaactgtagggaaagactatcttcttcaagattgattctttcccatgattaatatatcatcaacatacacaagtaaaaaagttcatgcttgtgagttcaaatttgtaaagtagaggcatgtgtcatattttgatcttgtgtaaccaaccctttgttgggattttatgccctaaataaaactcaatacaatctcatctgatttgttatcaataagagaattagaagtgatttatgttaacatgtagttttcatgcttatggtttaatatatgcacaaaatctgttaagtccagaacatatattcattcacaattacagtgatgtcaacgcagtggaatgtgattgtaattatatgattcaaaagactaagtccatgtttcatcagtgttttggatttacactgatgtgataatcagcgatgaagt

SEQ ID NO: 229680 - DNA, 1313 bp, Cannabis indica
aaaatgctctgtctacacattctaaactcaaaaattcatgcacgaaactcaaagattccaagcgaaaacttccatttcagaaatcaaagtgaaacctaaaattacacattctataatcatccaaaacttgccaacaacaataaagatgcacaccttacaatcctacccacacaatcatgcatagaacaatacagttcatccaattctcacacacatgcattcaagaacataaaaaaaaacaacaacatgcttttcaagctttagttatcaacacttaaactcagcaagagaagaactagaggcttacgttaaattccaaaagcttcaagccacaaataccaccaattcaagctttgatttcaagttcaaatttgatttagaaaatggaagagaaggtgaaggagaaagaggggttggtcaaggcttagaaatcggaaaataggtttttctcaattaacaaaaattcattttagtaaatatatcacatatggtaaaatgaccaaaaggccttccaaggccaaaataattactcactcatcaagggcaaacttgtcatttcatcacacacacacacgtaacatataaattttagatttctcatttatccaaattatgccaaaataaaattccaaaagtgtattttgggccccgaacctagttcgccccaaaatacctgggtatgactataccgcgccggtttgtcagaaaacacctccagataaacagaataaacatactaaataacaatatagtttataagcacaatatatcatgcaaattacaattttacccttctcaggtcaaaattacaaaaatgcccctagtacaccaatggggtcttaaaatgtcacttatcagtataattcatagattaaattatataataatataatttcttattaataaacatttaactagttagggtttgctaatccaatttcttaatattagggtattacagcaacacctttagcagaatttacccaaaagaatttgaagtttaattagacggatcagtgcgagaaaagtttctaggagttaaagcaacgtttaattactgttccagtattaactcttccttctgacaaggaaaattttgttatgcttcaagacaaggtctaggcagtgtacttatgcaagctggaaaggtgatagcttatgcttctcgaaagttaaaagtgtacgaacagtggtttccctactcacaatctagagctcgtagcagtagtatttgtgctaaagatttggcgacattacttatatgacaagaaatgtgagatttacactgaccataaaagtctaaaatacttctt

SEQ ID NO: 229681 - DNA, 1600 bp, Cannabis indica
tatatatttttttataattgctttattatatcacatataatttatagaagagtttgaatatcttatatattcattcatagcaaagtaggttttgcaaaatttgtgtgccgcggtgatgtaaggatgaaatattgtgtgttatccaatatttatagttgaaattgacagatggttaggttaataaaatagggaaaatgctgtatgatttttcgtatatatgtttctcatatttttaaagcaattgcatggattaattgatagatatgtgaatatggtgttaatataggttaaaatagaatgtctggtcaagtcaattttaatcttgaggatgaggttgattttgtgccatcaattgcaaatgaagtacaatttgttagtaatacagtagacgaaactcagactacagggacagtttaaaaagaacctctcgtgcatgagatcatttcacacggcaaaatattgatggaaaattaaaacagtttgtaattattgcaagcgtaagctggtgggagaaagttctaaagggactaggtatttaaattctcacgtagagaggcgtccagtaagaaaggcccaacttgccgctaatcctagtgcaactgcaagccctttagttacttttaattttgatcctgatttaggaataatcaaattggttcaaatgattgttaagtatgaatattctttgtctatggttgagcgtagcgggtttatagaatatttaagtactttgtgttccatgttttaaatggtgttaaggaatacgtttatgtctgacattattaaaatgtataaaactgaaaaagaaaagtgcaggcaaatttcggataaaagtaggagtagaatagtcataactagtgacatgtggactgcaaattattagaagagtggatatatggctgtaatagctcattttattgatgattcttagaaattacatagttagatattaagttttaagtatgttttgtgtccttgcgatgctccaacactacttgaggccttaagatcttgtcttaatgaatgaaaaatagaagacaagatcagaatagtgactctcgataactgtacttcaaatgatgctatgattgagcttttaaaaggacaatttgagcctgacagttttattttaaagggaaagttgctacatgtgcgttgttgtgcacatattttaaatctaattgtcaaagatggcttatctgtcattggtgataatattgacaaaatttgagacaatgttacttattggtcgggtacaccaaaaagacatgaaaaatttgaggacactacttgtcaacttggagtaccatacaccaaaaaaaatcacttgattgtgtaacgaggtggaattcaacttttctgatgcttagcacagttttatcgtacaagataatatttaaacatgcaaggttgcgtttgttgcgttttggagtgtcccttcggaaattgattggcaagatgttcaacaattgtgtgataagttagagttgtttcatgaagtgatgattattttctggaacaaaataccttaccgctaatatttttttcttaaaataatgtgaattaagacaacatgtaatcatggatgtcatcagatgtg

SEQ ID NO: 229682 - DNA, 1138 bp, Cannabis indica
aaaacatatttgtaaaactattttacttttaatttaaaattgagaatcaaaattttaaaaattttagaaacaaaaaaaaaaaaatcaatttcaaaatttttttaaacatattttctttaattataatctatttgtatttgtgtcgggtgtactgtccattctattagacgagcctacaaactcataagtcgggtcgttcaagtagtgatcataattgtatactaatgatcgcataacatggaaacttaagcatacacttattcaactatcatactgctaacatgcctctaatcatgtatttctaatcatgctatcatatttaaactactaaagtacatacaaatttactgaaccgtgagttgaacttgtctatgatggctgcttttcggagaacaacttggcgcatctgatacaatagtgtaacgctctactaatcaaggcatgttatagtgatttcttaattactgtactaacccttgctaatcaaaggagttttaataaaattttcataataattaaaactttaataaacataaaacacttttctaaatattacaattcgggattctaaaatccattaataaaacattcataacttacataatcacaaaagttttttctgacgacataacaaaactaagcatgtattgtctcgaggatcgtaaccctccaagtctgaccgtttggatatgtacaatcttcaccaagttcgtcttttattgctattcaatttttactttgcctttacctacacatggaacataactgtgagtcgataaacttagtaagaaaaatataacacatacaacatatataaaacatataatttagaactcatacacccatgatcctgctaacttaatttactataaattataattttcgatataagtgaataaataagcgtaatttattaattacaattatttatttaaaatatgtagatataatgtaagttatctatgaaatattttcaagttcgacgaccctgaagacccgatcggaggctaaaaatatcacaacgattttagttagtaatgttgatgagattattaagataagttgataatagaatttgtaacaccctaactagcataggcgtgttaacgtgattcttaacgtactgtgcagctcgttg

SEQ ID NO: 229683 - DNA, 1603 bp, Cannabis indica
tctgctgttatagaagaactcaataattgttgacaagcatccgtccaaacacaatcccctaaactagtaacaggggttgttagtgtgtgggcaacaccattcgccgataatggaatggcgctgcaagaactaccactaacagcagctaataaagaatagatatctaataaaatagagtgtaaaataaaatttatgtgaagcttattaatctaaccaactattgataatagagatgctgaaaccaaattgatgcgcaagagtcaggcccagacgaatggcaagcagctccgccatattaaccgaaaaataacctaacacaatagatgaccacgccaaccaaaccacgccgcatcatcccgtatcacttccccataatctgagaaagcccctccccagaactattgaagcatcagtcgctagagcaaaggaatcaagaggaggtggcatccatagagtaagtcggttttcaattgggttcgcagggccaatcccaaatgaagaccacgcaaaatatactccttaaactccgagaagtgataataggctaaatttggaacaacatctaattttgattgcttattaccaaacaatactgagtttcgatcatactaaagtcaccatagggtagtcatcatcaatttaaaagcctcacgggatagcctatcaaagagaaataggagaatttcttgtcttggtccatatacacattgacggagcactgccacactggaatcgaaccagagcaagaaaatagatcatgttcaagagtttcagattcttctccgcatcgagaacaacaaagaggtacctaaactttttgcgagataaactgtgttgctactagtaataccaaatgaaataaatgacaaacaaaaacattcacctttggtggcatagcaagattccatactccattctaccaataaattaacctgaatgaatctgtgactccttcctcaacctggagcgaccacgccactggtacccactcttaacattttaaatctcgtctcgctcatagtgccaacacaaaccatcttctacctctcgcctcgctaatgaaatagacagaattatatccacattcattggtaaaaaacttgttgaagcttccccacgtcccaatcattagagggaaggataaattcacacacccaaaaaatcatcattaatcctccttgtgatttgctaaaaagacctcgaatgcgggagccacgggtccttgaatgccaaacttgtgttcaatctccaatggatctccaaatacagcatttaagcaaatccatttcccagatcaaactcgaccaaagatgagagaaaccatcattttcagtggctcttaagatagagcaatttggagtttgggcaggcaatgaatctggatataagaatcatctccacacttgttagccaaaagagcttgattaaaaagttgaaaatctcaaaatccaagtctgcccatcgccttaggctgacataccatttcctattgcacccaaggaatcttcctttgatcacaacatggacctcaccagaattttctgacaataaactttgtttttcacaagttaccactaagagctcaaagacactcatcatataa

SEQ ID NO: 229684 - DNA, 788 bp, Cannabis indica
ccaacctttgatcgagtcaccattgagtgtgtgttggggtgttgtgtaacagggggaggggttggattactagactgagtagatgcagcagatgcagaagtggactcagggatggagtgagtactggtgtgggtggtttgtggagactgttgtgtgatgttattggatgaatgggaaggctgggagtggttaggggtgtagtgaatgtagggacacgatatgcattgatgtctaggagtgtggaaggagaagaagttgcttcagattgggaaggaaatagttgatgataggggaattcattttcgttaaaagtaatactcctggtcatgtagatacggccactgctatgaagacacctataaccttttgaagatggacaatagcctagctaaaaagaggcattttgatgatctgaaggcaactttatggttttcatatggtcttagtaatgggaagcaggagcatccaaatactttgagaagatagtagtcaggggcatgtttaaacaatttctcataaggtgtttggtagttaagattggggacaggaagcctattaataaaataggctgctgagctgtaagcttcccaccaaaaatgaaggggcatatgtgtgccacgttccgcaatagtgtagcccatgtactataaatatgttataaatatgttatatatttatttggagtgtcaatttggagggatgcttattctcgttttattagtgcttctgtgataatttcaattaatttattaatttaataaaatacttaactttcaaaaaaaaaaaat

SEQ ID NO: 229685 - DNA, 1585 bp, Cannabis indica
atatctaaaatttgtgctaaattgagcctaaaaaaaagaagttgtgctatttttaacttactatttataattatgttttaatgtacaagatgtaaaataataaaaaaaaaataataattgattatatttgttattctaaattttgttcacttgacgtgcatgtctacataagtaagactgaagacacgtggaatacagccttgtcaattgcaggataaagtcatcttacaaggcatgacaactgttaagcaacaagcaaaaggaattaagcaagtcgtcaagaagctgtacaaccatatctagccgaccaaggggagtacataggctggccagaggaagcttgtattgtcgactagggtttgagcccaagctggctagccaaagagtgactgtaacaccaaaaagggcctgttcgaccaaagagtgactgtaacatcaaaaagggtctgttcgactaagaaagcctgacctttgtaaggaaagttgtataaagaatctagaaaggttgaccaacgcgtaccaaggctggccagcatgtaccaaggctagccagttcgtaccaaggctggccaacacgtaccaaggctagctagcacatggaaaagctgacaggcacatgaaaaagctggtaggcacatgagaaagctagcaaacacatagaatgttggcaggcacatgctgaggctataggaacaatacttggccggccataaaggagcatgtgtcggctagtctcaaacgaagggtaggttggccagctcccctgttggcagacacaattggtgtttctgcagctttcaccctggacagacaatggtttactctcaaatacgaattcactccaacaacccacggaagtaggggtttaacttcaaatatatacctattctttaagaatagttaataggttattttctgtatattttatatgtgaaaaagaggtgatatctcctcattttaagggatattaagctactttaaactagatctattgtaagctctcatctatataaagagcactaagctaaactaaaatgggctaagttctaattcatgagttctaagttctaactctggaaatcctagagcacttgcactctctccttctctctcccacacactacttgcatcatacaagacactaagtctatttctcatctcactcgattgagatcttcctagcatattgttctcgctattgtagtattcatagagagcccttttagaaattataaggtaaagtttataatttgagtgatattatccctcaaatcaatacagctaaaaggagagtaagtcattaccccgttaataagggggtcgagcctctataaatctttgtgtctcttttatcatttattgtacttatttatgtgtggtgattgtctgtcataaataaggctccgttgctagttgaccaaattctaagtcaacaatattgatggttattaaatattttattgagaatatacacaaattaatttttattattcaaataatggtaatatggtaaataaaaaatataaagttagttaaaattaatgaatcataataattagtgatactatagtaaataaaaaaaaaa

SEQ ID NO: 229686 - DNA, 1903 bp, Cannabis indica
tttatctatacattaataattttttttttacatttcgagaccctgaagattcgagagtctgagtcgcacacctggtttgcctaccctcaagaccggccctatgttggaatgaccaagtatgattagttttatattgtaaggccactatagctaactttatcgtttcgagtagcttgatgttgtaagattactttagttaagtttatcgttttgtatggccataatagtcagtcttattttggtagaattagtatggtctttatatgaccagtggtcgatttgattagggttgagcatgggttgacaatgggccgaccaacccggccaacccaacctgaaatggtccgaaccatggtcattttttgtgggccgaaatacatatgggttgataaaaatacaacctgctgctattgggttgatttcggcctggggtttttctaacccaatgaacccaacccgcaccgttcagcccagcccaagcaaaaaaaaataaaaagtatatacatatattatatacactagaccagccggccccaacccagtccaaataaaaaaaaccctaaacatatatatatatatatatcattttattttctctctattcaaaccctaacacacaaagtaaagcagcagcagccacaatttctccggaaaaaaaaaccctacgattcactctcatctcagtcagcctcgcctcagctcagcgccagttgtgcgcccacccaggctgccaccagtcgtgcgcccagaagttgtgcgcgaatctgaaggttagtttgattttttataacgatgaagaatggggatgagtgtgattttaaagtacaagtattttttttttctgtgaatgtgacattttcgctaaaccatatttttgctcagcaataattttgtaagctttagaaccttgtattgtatttatttatgatgatgatgatcaagggaaaatgtacttaaattatagcttgaaaagcaagacataaaacaaccatttcgattacatggtgagtaagataggattgcattgtattgtattaggaaagaaaaatgaacacaaagatgctaggatgaaatcgtcccaaaattttcaatgactaaatttatatgggtggattaatatttctaatatgctctgtaattacatgatcaaagaaagtaaaatacttacaataaataaacaaacagttagcaaaacttactagttatcatcccaacccaccataaaggctcatgtaagtaagaaaatcctcctgcccctgaatacataaagagtcacaaaaatcactaatacaaaacaaaaagagcccatgtgcaaataccaaaagtacttctggaattcaggtttaatatattatagcaatggtaatgaatatgaatgtctaatttcaactgttcggtatgataatttcaggtcatttacggagttatttgatcgccgggaatacattttgtcactgctcagctcagagcaagtaaaggtggacaatttgttatttttgaattttggtggttgtaatcttgtgaacgatgtttgttaatcaattggagattttgatatgagaaagtttagaaattaagagttttcttaatgtatatattgtatatattgtatatttactcaatgttatatattgattcaccatatgttttatgaatttattaatttttgtaaaagagagaaaaataacctatatatttcaatctaaaaaagtcactaataaattaattatatttaaagtatagtattatttgctacattggcaaataaatatattaaattagtgtggcaaataaatatatcaaattagtttggatttttgttgttcgttagttttcccaaatcaaattttgcataaattaagtatttatttttcatgtttatcttagtaataattttattttt

SEQ ID NO: 229687 - DNA, 1940 bp, Cannabis indica
ctctctcacacacacacacacatgcccaagcctaggttgtacaacaccgtaggctgtccagcacttgagttctaccagacatcaattcatacattgtaatcctaagggtattatagtagatcccacctttagcgatctggagagtaattccctcagtataaggggagtaggtcattatccgctatcacaagggggccaaacctctataacaaatcccattgtctattgctttttattctttgttatgcacacacttggcaagcagatctccacgaccccgctgtcaattgatcacttttcaaggttaacaaatctcattacatatggagagtcctagagtggcactctttgctaggtgacaattctaggacgaatgcttaattcttacgaaggatgcatgaattacattacagatggggagtcctagagtggcactctttgctacgtggtaattctaggagtgatgcttaaatcctacgaaggatgcatgaatcccatcacggatggagagccctatagtgacactctttgctacatgacgattctagaaagatgcttaagtcctatgaaggatgcatgaattccattacgaatggagagtcctagagtagcactctttgctacgtgataattctaggatggatgcttaaatcttatgaaggatgcatgaatcccatcacggatggagagtcctagagtgacactctttgctacgtgacgattctagaaaggtgcttaaatcctatgaaggatgcatgaattccattacggatggagagtcttacagtggcgttctttgctatgtgacaattctaggatggatgcttgaatcctaagaaggatgcatgaattccaatacggatggaaagtgtataagtgacactctttgctacgtgacgattctagaatggatgcttgaatcaaatgaaggatgcatgatcccaatatggatggaaagtccaagagtgacactttgctacgtgacaattctaggacggatacaagaatcctaactagtgcaggccatgtttgtaacaaactctaagctacatgaccatcttatagatacaaaagtcaagggaagaataaatcctccatctgaataaaacatcgtatccaatgaaaacaaaccaatgatattcataatcctacatcaagaaaaaataatacacatccagaagctcaatacatagagcagattcctacattaagaaggctcaattcacagagcataaactcactttaaaagagctcaacatagagcattacacataaaatgaaagtccaaaaaacaacaaggttcccatcataaataagacaaaatatcgatcgaataaaatgaacatacaaatagattcaaagctgtaaagtcctttttggcaagttagttgaaaaaatattttttacttaatggtaagatatttttgcatttatgaccgattgtcttaccttgtatatttggatttagttgatcttttcttggttaggaaagatgcttttaatgctggatctttcctttgtttggaaatttcttgtaagagaatcttttctcttatggaaagttggtttttaaaggaaaccttaattaaatgccttatcctcattaaattagattgtatcttgatacaatcagaatatataatctgtttatgacaggaatcaaaaattaatggaggatcggacccgattatagcaagtttcctttttctggtctgatttgctgcgtcagcttctgattttgatgctacagatcgtgtttatcttaggaaatatttgtacaactgtagattcgatcttgtggctgtctctagggtttctatgttctaaaaataggacctagagaacagttattcgaatcagctcttctataattcattttttacacttatcttatttgagagaagagagtttctttgttatgtgagagcctagttgttcat

SEQ ID NO: 229688 - DNA, 3141 bp, Cannabis indica
gatttaaatatgagacagaggcagtagttggagctggtcaaagattatgattgtgaaattctttatcatctcgggaaggcaaatgtggtggaagatgccctatgcacgaagggtcctgaggaaatgtctattatgattatgatttcaccccagctagtcgatgacatggttagatcagggattgagtttgttgtgggtaaacttagtaatgtgacgctataatctgatctgcctggcactaccaaaatgtatcaagacttaaaacctttctactggtggtgcgagatgaaaaaggatgtggtaggttatgtatctcggtggttaacttgtcaacaggttaagactgaacaccagagacctgtagggtttatacagcctttgactcttcctaagtgaaaatgggaggtcaacatatattttgtggttagattacctagaaccacagggatgttcgattccataggggtagttgtggatttaattttaccaagtcaacacattttctaccatcagtagatcaatatgcggacttgtatgttaaagaaatagtcaggttacatggggctccaaagtccatcatatcaaatagagatttgaagttcacctcaaatttttggcaaagtctccagcgagccgtgagcaccaagctaaagttcagtacaactttccatcctcagacagatggaaaatttgagaggatgattcaaatattagaaaatatgttgcgagcttgtgtgatagattttgaagactcttggagtaagtatttaccacttacagagttttcatacaacaatagctatcagaatagagatggctcctgatgagatgttatctggcaggaagtgcagatcttcaattcactaggatgaaactggagaaaggaaatatttaggtctggaatcagtacagcagacaactgaggcaatagagaaaatatgggccaaatttcttgcctctcaaagtaagcaaaagagctatgtagatctgaaatggaagaatgttgaatttttggtaagagatcatgtcttcctacgagtatctctggtgaaggggattaagcgtttcggtaagaagggcaagttatgctctaggtttacagggccattcgagattcttaaaaaggttggattggtagcttattgtctagccttgcctccagcactatcagtagtccatcatatcagcaagatttgtcctatgaagagcaaccggtgctaatccttgatagaaacgataaagtcctttggaataagaccatagctttggtcaaagtaattgggagaaacactatggtggaggaagccacttaggagttggagtctaatatgagggctcaaaacctggagttattcaggttagattttgaggacgaaattctttttaatggggggataattgcaatgaccgcttagctttattatgagaattagcagataattagggtttacttttagaattagacttttaattattaattacacaattatggagatatatttaaattctagttgtgctaattacattatatatgaattttatgttttttatatttttacgtctggtaataatgcaatgtatggcctatagagtcactttattatgatttagttccttagaaatagcggggcattatgaatagacatttggtatgtcgggaatttgtggggttattaggtttgaccaaaatgccctttggtggcaagtttacttcttggtggaggaaaggtgtaacaccttaccaacttaggcgtgttagtgtgatttttaacttaacggtgcagctcattgctaatcaatgagtttaatgaaaatcgtgaataattaaaactttatttaactatttcttattaataaaataacatgctcatattgaaccgggatcccatttgacaaaatatttaaaaaagtttcactgtgcatattacaaaattttgtcgcctagcgactatacaaaataatcccagctgtcccaaagaccgtacgctcatggcctaatcacctcgacatatacaatcttcatctgctcgctctcacggctgctcaaccttggccttacccttaccaacgcatgcaaacaatatctgtgagtcgaacgactcagtaagaaaagcataaattataacatagcaataacttggattataatcaagctcccatacccccaaccataaccctaacaagtcaggaacattctcgataaactatgactaactgcgaatccagcctatacttagtgctctagtcaactgatgtggtagcagttagttcatactatctgatagcctagcatatatctgttggcatcacggtgcaactctatgtacacctcaccgatgccctgatatgctactctgatggctatagatttgcttattctgacagcaactaacatgtacgctaaacatgtatacatatatacaaccattatactgatcttacctcattttaaaattcacatgagttggctgacctgaacagaaaacttcgtgttggatggatgctctaatcacataacataaacgagtaaacgacaagccaaaaccctaatccaggaaaaccaaacctccaacttaaggttctaatattaataactaataccccaataccctaagtatcaaggaatcaaccaaccaatgctttaaaactaacacaaaccgacaacacgaaaaattcaggaaaacccgtttctgatccaattaatcgattttacaggacctgtgaagccggttaactggtttgccccaggtaaccaaaaataattcaaaacctagtccaattcgtatccaaaccacaccaaaccttccaaaacacctataataacctcaaacaacaaaatccaagcaatagaattcagaaataaatccagaatcaaaatataccatgaatgaaccaagcttgagttttcaaactcaaatttgtgcatccaccacaaaaaacccccaaactagcaactagaactcaaatctaactcaaattaaacttagaaagcaaactacaattcattcaaaccctaatagccactattataaaaaattacatgccaaaaccaactaaaacttaaggatatcacaaaataagagtttctaggtgttaggttttatgccctaaataaaactctttacaatctgattagttatc

SEQ ID NO: 229689 - DNA, 1515 bp, Cannabis indica
aaaaaaaaaggaaagaagaaaacaaagacttatattattcccaagcaatccattataaatgaagttgagcatcataacaagtgtagtttttttttttttcctcttaaagagggcaaatgcaacacagataaatagtacttttcaactcttctgccaaaaaaataaaaaagattgtgttgatatatacaagttggttctctcctctatggtcaattgtgggaaagctaacaaatgtcttgattttgggacattgttttatttctagctttgatatgaaaggaaattttcacaacacatcatcatcactttactgatcaccaactggattacaaagaaattcactaattacagaataaaattgaatcttatagtatactgataggaattttcctatcaagattagtcaattgcagaaaatagagaaagaacaatagtttttgaataaaaatggcagaatgcctctcattaatactcaggatttcgagaacctagttctctccccataactgttacaaactaaaccaaattcttcacaccctttctttcactattctttcctatatataatgctattacccccattacaattacacttatgccattttatttaaggtggcatttggttgggaggaatgaaaatataggaatagaaatgggaataagaataagaatgttattaagaaacaggctctgcattagctggtgtagtttcctttcggttgtttggtttcttcttctcactctggcgcaacgccttatttgaagactgatcagccttggaaacgattttggacacagtaaaacccgaaacttcaaaatactgtgatctttgaggaattaatgaattgcgaagaacaacatcaattccatcgtaagtccacacgcctagttgagcttctcctttgagtccaatagcaaaccaaccgagaccagcagctgagatatcaacagagctagagtcccagctattgccacagacgcgaaactcctttctcacccactgcccgagctctttaactctagcttttccaattggtggctgaagttaaagagcagaaccgaacaaaagggtgtcaaagtataaataaacatccaaaatgatctttcaaatgataacaaagcgtatgagtatgttgataagttgtacctgcaactgatgaccgaaatgttcttctaccatttcacatgcattttcggttttacccatgtgtaatggaagataaacggatgcccataccgtaacatatatagaatcgacggataattcctctacatctagcctcataagaccagcaatatgaactgaatgaccagcctataataccatcatgaaacatgaatcatggcacatacaaagcaaaacacaatacaataatagttacttctaagctttgactgtccaacagtgcaagaaatatagcaaacaagggggcgaaaagtgtatcacagatgaaaataactgaaaattaaaaaggcatgaggaaaaagcaactcaactaaactaaccttgatcct

SEQ ID NO: 229690 - DNA, 1951 bp, Cannabis indica
cttttcattcagaaaaacctgagccttctctctctatacctagacgccacttcttctctttcttcttccttgaaatttcaaaatacttgtgagtaaatctaagatcctggtaaaataacatcttaaagtacatataaaaacagaggtgggccgcggagcccaaggagctaggccgcagcccttgggtttcaacctagaaaaacccaactttaaggttcgaaaatcaactccattcacacccaatccaacccaaacctaaacacaactcaaattaatctttcaccaactgataagtacccaaataggcattaaaatacataattctcatgctctaattccagcaaacacatatcaacaatttcaaatcaacaacagaaagattaagctgcaacattaagttcaattccacacaatcccatcttcaaacatttacacattcaagccaagaactcatacctcaagcaactaatttcagagctaaataacagaataaaaacactaataaaatctctaaatttctatctaaacttaatgcaaaacaaaacacaaaagctccaaacacaaaacatgctcacaacaacaagaacatcccaacatgcatctcaagatcataaacacataagaacatgcttaaatcactacaatttcagcaacaattgaaaggcaaaaagagataaaaactacctcaagatctcaaatcactctagctccaaagattatcacaattcaagcttgaaaccaagcaatttccaacaaaatccaagaacaagaaagaagagttttgagagagtgagggggtcaatttaaagggctgagaacaaatgcatgaattgcttttcatttttgcaactaattctcttttgttacaaataatccactttgccaatttaccaaagtgcccctagggctatataacactcataaaagcatttaagggtaaaatagtcattctcatcacaaatatactcaaattaatttctatttattcacatataaataaaataccaataattcatcccataagtatattttggccccgaacccggttcagcctaaaatacccggttgtgactataccgcgccaacttgtcagaacacacataaaaaaggacaaaaaatgcataccatataataatatagttcataagcacatcataacataaatttctcagttttacccttctcgggtcaaaattactaaaatgcccctagctcaccaatggggtcttaacatgtcagatatcatattaattcacatataatatattatataataatataattccacaatgatacacaattaactatttatggttttcttatccattttcataaacttagggtattacaactaccccctcatagaaatttcgtcacaaatttacctgaacaactttggatatttctgctgcatatccgtctcgagttcccaagctacctcttccacattactgtttttccataatacatttaccagtacaattgtcttgtttctcaagactttctcccttctatcaagtacttgcaccagttgttcctcatatggtaaatttggctgtagttccaatgcttcataactcataatatgggacgaatttgagacatacttctgaagcatcgaaacatggaacacatcatgtacagctgctagcgctgggggcatagcaaccctgtatgctacttgccctatcctcttaaggatttcaaaaggtccaatgaacctcgggctaagctttcctttctaaccgaagtgcttgatgcctttcataggcgatattcggagaaataccatgtcccctatctgaaagtcaatatcccttcactttggatcagcataactcttttgtctactttgagctgcgagcattcgcgctcggatcttatccactgcctcacttgttctttgaacagcttcagggtctaagaatttcctttcacccacttcatccca

SEQ ID NO: 229691 - DNA, 1652 bp, Cannabis indica
cgaatttagggctagttttgatactaaatattatatataaatttcatgtagattaaaatatgtattgcagtgtttgataaacgatataattagagtgatctaatcattaaaatgctaaaatgaatgtcatatgtaattcattaaaataaatttactcatactaaataaatttcaatataagtattatttaataagtattttatatattaaatatgttacaattagaaataaattttaatacacccactataataaaatatatgatctcatcaaaaaaaaaatatatatacacatataattaattatgtatatataatatgataaataatggatgtagtatataaaattctaattctaacggtaatgctatattacaattaatttaatttatataatgagaaaatattaagcaaaatactctttttctgtatctttattttttttttctaatgcataaactaatatgcacttgagaaatcataatttgacaatattatagtgtaaattattataaattatatattaatgtaattttaaatatatatataaaagagtaatttgtggtataaatacttaagtttaactctcgattgcagataaatacctaagtttaatttttgtcggtaatataatacctaagtttatatatatttttcattaaaaaaaaaactatatatatttttagtttttgtaagaacctaatcgttaaatgtcaattcattttatttttagtaatgtataagaaattaagtcattaaatttattttttttgaaaaaataaatacatttattaaaggaataaaaagctaaaactttgattgtattttttgttgtaaattctgtataaattctttaataagatactttaagactgtgttaccaacttatattatttcttaaaaaaattgtcaaactatagctctagtaggacatgtgcaagagaccttaaataaattaagttaacttttgtgaacaataaatgaggtagcacaatctataaagcttaagctaattcatgagacttgtgaaaaattaatgattagtgtaattttctagtaatgaatgatgctatagtagaagttttgaaaatttaagatcatgaaaagttgtggaattcactttatttattataagatcatttggtacaaaagtgaccaataaatacaatagtgaaaagcagtcttcttaatctcataataaatacatttaattttaaactaattggaactatatttattagcaattgtgtactagagaagactctagttttttttaatacagtaaaacatttgtctagaaatattttattaaagaataatttttaatttgttataaaaaattgagtctcaatttagatcagttaaataaaaataatttttaaattataattaattatactttttctaagtcttgtattaacaaagtatacttctacataagaataattatatgttaataatatatatacatatattttataactttatttacatagaattaataattttattctaaattgtaatacatgtataaatattatatttactcaaaaataattttattatgatatagtattaagaattatttattgttattattgttacattgttatattttgatgttttaaaatttttttagtgtaattctattta

SEQ ID NO: 229692 - DNA, 982 bp, Cannabis indica
tgtccttggtctcatgcagaggggcgagagtttgcgatttgaggttagattgaaatctctactaattagaacgcataacatggctaagaatttttttgtttctgcatcaagacttatcttattgtagaacagatggttctggctaaattgactgaatgcattgttagcaattaagagcttgaatgtgttctaattctctatcagcccagagatggatagacattctgttacctaattcctatattatcctatgatgtttgttgccgttgataagtggtttacactttgcattccatctgagtggagtgttaaaatcttgagaaattgatcattttaaaacaggcccaacaacttttgacatcttaacaaccaccttggctttagaccagagatacatcttcctccgtaaggcaggcttgtagatgttggcagcaattggtactcgtatattttaaaagccttttggattagaaagtcaattaggcagtattcagaaggggcttagagagcagggagcatattggacttcacatttttcaccacatcagctccgaagagaattggatctttctctttcgtgggttaaacgagtacacaattctttaccttttattgccacagtcaaagcacctaaggatgacttttaaaaagctattaatttttacttcttgcacactcttgacaaatttgtgatctgaaaatggacaatgctttgctttttggtcaggacgttatgatacttgacccctctgtttttatgggagtggctgatatacatgatcgtcatagggatatgcgactagatgtggataacatgtcttatgaggtaagctaaaatgtgaacagaattttaattcatactcatttatgtttacacttgtttcactaatgtaatcatggtgtaattataggaactgcttgctcttgaagagcgaatcggaaatgtgagcaccggattaagcgaagaaaagatacttactca

SEQ ID NO: 229693 - DNA, 1081 bp, Cannabis indica
ggtaaaataattccaacaggcagcgtgggttcctaagtcgaagcctggaggtgtcgagcccaaggtttctggatttggtaatggggttcaagctatttctttagagcaggtaaaaggctctgatttcattcctcatttatcgttgagaaaggctgttgaccgttcctcatttaatgtgaaagatttaaatctttcttgtggtcctgaggcggtcaatgtagggaaccatgtgattaatagtgatgggccgggttcttctactcttgggcctaatctaattaattcaagagaacatgggccggtttcctacgagactaataaggtgggcctcccacttgtctctgctgggccgagtggtagtgggaaagagattaataagatatatgctggttcagtgggtcctactctctcagttaatggatcaactatgaaggagttgaggcttggtgggcctgagaatgttacccgtggaccaaaggatttgatgagtaatattaatatgttgggtgggattgctagatatacccaagatggtcacggtcttcatgcagctttaggctctaatggcccatctcaagattcggttgaaggtcaagatgtgctttcggggttagatgagaagcaagctcttacttctttctttcaagcccaagagactatgttgcatgagcttaaacattttgggaatcttgacttatatgagattagacaattgggtggtgacattggtatcaagcttacgtccgagacaaatgagagaaccactcctttcaagaaaagtaaattctttgagtcttctgcttctctctgctcaagaccacataaaatcatttgtaggcatccgggagttatcagagacttccattaggactctgtggaaaatgagagggcggataaagtggctgtggaagaaccttctgaggatacctcttgctcgttgtcttgtcctgagggtgttttgaagaacccgttggttggctcgttcctattgatgatgctgattctagcgaatccgttcactttggtacccctgtggaggagaatgaggtctgtcctccacagaagccatgagaggcagtag

SEQ ID NO: 229694 - DNA, 1570 bp, Cannabis indica
tttttacaacaaaaaaaaataattaaaagttaaacttttactctgacatgtaatttttttttataaaaatattattttttttatgaaatatccgcaaaataataaaacagaacaactgaaaagtaattgtagagtaacagtaaaaacttaatatattatttacacgtattttttttaaatattctacccacaataaaaaaataaaaaaattaaaaatttcagtgtaaaaaccctacttaaaatctcatttttaatttattaaaggttagagccactatttcttttttgaaattatcacatatttgtaaaagatagtatttataccatttttatgtgtttgtggggaaaaaaattaagtgaaaagattggaaccatgttaaacataaaactttttttttaaaaaaaaaaaaaatcttaattctaattattaatttttttaaacctacattattgtacatacaaaaataaaaaattcttctcaaagaataaatataatttttattatattcttgttgctatgcataatatttatttatattaagatgtagttatacctaatcttaacttgttggggaaaaaaaaagaatcatagatattttaatgtataataatatttatgttcaatagcaaaacaaaaataattattttatatacaaatatacagtgtgtttggaaataatttttaattaaaaaataaaaatatttttaaaaacatattctataaaattattttcactttttaattttttttattgagaatcaaaatttcataaattttaaaaataagaaaaagttactttaattttttttttaaaataatatatatttttaatttatgagtctaagtaattattacctgtagcagatttgagtagagtacactgggcagaggtacaagaaacattagagtaagtagaagatttggagggatcatatatagtctccttttggtcatagcacgacttggcacaaggttgacattgtgtccaagttatgtcactacctgtgtcgaaaatcaaagatagatcatttttaggtgtgcctagccccacggtcactatatagttacctgatcccaccactgcccccgacttggccgggagggtggtggcgtccttcttagctcttgtgttgccaccgcgaccgccacgagagatcgtagcgtctgcagttttatcagaaaggcgagatcgaatggagttgactcggtattcatcttgttggaggatttgagtatggttagttttggcttggtgtggagagcatggtccatgcttgtgtaccactttcaatgtagcatccttgttgtccactattgaataaaataaataaattaataaatttcgtatatttaaatttgtatttaactatattatttttgtaaatgtaaataaaatttagcataaagtgagagtatattaattttcatttttaattaaaatgaggcatcatataataaaatcacaataagaacataagggacctcaaaatttagaaaaatacaaattttcaaaaaaatctcaaaatgtagaaatttatcatttatatttaatttgaataatttacgtac

SEQ ID NO: 229695 - DNA, 1674 bp, Cannabis indica
ctcaaatgtaggccattcaagatatctttgttaagcagaattttttgagttatggctccttggagcgccctcacttgtcttttatctcgtctatataccgactttgccccctgtctgaggtgaaattttgaaaacatattcatgacaaaaaagcttaaaatctcacgcacttaaagtggtgtatcagtaacgactttgagatttattattaatattttttatgcgagcacagttatatctattctcttttgcccccgagtgtttataggttaagtattatcctattttactctttggtgggtttggcataatagtaaaagatctagttattgtagcactcttataaatgtgagtttaactacttacattccagaaaataaacgtaatagtttaataactaaaaattgaaaagagagtgtctttgcaaaaaccttgagaaatattatatgccttctcgctccattggtggagtttcaactagttgacatctcctccttgaaaattgtgttgtgcataatgggtaagtgtcccattaaggactagagtctcaatttcatctttgaggttttggcactcattagttgtgtggtcgatgtccttatggtattgacaatatcttgaggcatctctcttggctcgatcatgcttcatgggtttaggaactcggaatggtactcggtgctcactctccacatagatggtcacttgggcttctataaactcggtgtagattaaatatatagggcgtttagggccatcactcctactcttcttgggactttgatcctcgccatctatgctttctcttttgttgttctttaaagagttagaagccttagtagcattcgtaagttctggcggcactaatgcagcttgagtgagctgcaaggattggagagggaggttgtttgctatccttgcctcttcagtgttcatgtatttttctgcccgcttcatgaattcgtcaatggtgtgtgtgctcttgccttgaaggctattccaaaatatggaaccatgggcaatacctgcccccagtgccatcagtcttgcactatcgtcaacgccatgggttttggtaacttcaatgttgaagtggctgatgtaggccattaaactttctcctggaaattgtctcacattggccacggaggaacattaaagcttacaagttctcgcagcctgaaactcctttttgaaagcatctaagagttggtcccatgacactatggagtgtcttttaaactttttgaaccacgaggatgcgactcgagataaggtagaagggaataacacacatttcaaatctccaaccacttggtgtgctagaatcagagtattgaagtcacttatgtggatcccagggtcagtggtcccatcatacttggttgtagttggcatttcaaactctcgatggtaaggttatgcaaagatataaggcacgaaaggctttgtctcttcattagattcatactccattttattgttattcaaaggttgttggagttgttccttaagcattgttaagcgaggattgccatttgatataccacaattaactccaatagggagaggaggattgttggaatggttacctgttgggttttgtgccctaaataaaacccatttcattataatcagatttactaataaagatcagaaataacattttatgtt

SEQ ID NO: 229696 - DNA, 1032 bp, Cannabis indica
tttaaccttagcaggcaaatttaaaacccaaaaagtcttccaccaagtgtcctgtgaattagagcaagaagaaaggtcaccttcttccaatgagtttgcaaaatgacaccctgtacttactaagtagtcacccgaaacatcatgatgccaaatccatctgtcattagcagcattgaaagataaaggaatcgcaagtatgcgatcgacatcaggtggtgaaaaatcagcttttaaaagctcaacattccactctctttctgctgtaatataatctacaacattgtttgagggagaaccagtatagcaaaaaggcttgaagttatcatgaccaggaatccatgagtcaacaccacatatattactttgtccagtccccactttcagccttaaacctttagctaacaattccctaccccaaacaataccctcccaagtcaaagaacataaacctcctgctgaagctgtcatgaactcagtgtgaggataatatcgacctttcaaaacacgactgagcaaactattcggttgttgaaaaatacgccaagcttgcttagccaataaagcttgattgaaatgcacaaaagatctaaatcccataccaccatcaccctttgacttacaaagaaatttccacttcttccaatgaattttcttgttgtcagaggaagaaccccaccaaaatctcgccatcattgcctcaacttctttgcaaaacttctgtgataaacaaaaacaactcatagtgtatgtgggaatggattgaacaacagctttcaataacacctctttgccgcctattgaaaaaatcttgtcattccaagcatgcatcagcttccaaatcttttctttaatgttgctgaacaattgagatttatcacattcactataagcaggtacgcctaaataagtttcatgacaatcacaaattggcatgcccaagatttgttggaaggaattttgagcaacgaccggagtattaggtgaaaaggacatcacagatttgtcagtattcaattcttgtcccgaagcaca

SEQ ID NO: 229697 - DNA, 1600 bp, Cannabis indica
cccactgtacggaccattcaccccacgagagagatgttgtgattttatgccttaaataaaatatatttcaatataatcttatttgctattagtggaagattagaacttatataaatttacatgttattttaatgtttatggtttaatatacaatttctattatatctagaacatatagttattcacaattacagtgatgacatcacagtggaaagtaattgagattatatgcttcaaagttttagtcccatgatttattagtgcactggatttaaactgacgtgataatcaataataacatttacttacacatgaataagtggtatctcctttttagggcattagtaaagtgttatcccaaattttgtccacctcatgtggcatgtccacgtaatccaagacagagtacatgtggaattaatacagccttgccaatagcagaaaaaagcctccttataaggtatggcaaaatcgtcaaacatcaagcggaaggagttaagcgagcactcaagtagttgtactaacatgtctagctagccaaggggagtctataggctagccaagttagcttgtatggccgactagggtttgagcaagagaaattctgttcaaccaagggagccttcactcttcaagaaaaaggtgtacaaaggctggtctccatctccaaaggcttgccaccacctctaaaggatgccttccacctctaaaggctgacctccacctccaaggactgacctccatctacggcctgagcatgaccaaccagacctcaacctgcaaaccttgtatggtcaactagcctgcatcctgtaggtgtatggccggccaacttttcccttgtaggacattgatgcgtagtcttcatctgtggacagcaagccaagctacaagttgggccttgacagcccattaagatgctacgaaaatatctacattcaaagaaagatttggtcatttatatttattaatttaatttgtaaatatctcttattttatttgctaaaaagggtttaagctctccaatataaagagccttaactcaatcctaacacccctaagtctcattttaagcaagaaagctctaagtctgaaaccctaatccacttctctcgcactcatagacgccaaaagggctttttctccctttctctcacagacctccaaggcttcatctctctcattagagacctacatactgattcatgcatttcaacctgaagagagaagatctgaagttagccaaacttagagaggtggtctgccaagccggccaaataatagaaccacgcgctactgattacaatgtattcgctctgtagagtgcaaattcctaagatggatggatgaaaaagagtacatcctttgatctcaccaagtggagctggatcaccgtaacagagaagccatggacttaataaggcggttcaattagagaactaatagaagaggccaggatctcatcgaagatccactccaaggaagactagtttacagatcagggaggtgttgggttttatgccctaaataaaactcatttcaatataatcagatttgcttattaatatagatcagaaataacatttaatgttgcatggtt

SEQ ID NO: 229698 - DNA, 1200 bp, Cannabis indica
ataaaaataaaattaaaattaaaataatatgagaaaaaaattaaaaatattaagagttatttttataaattatttaagttttatttttatatattttttaataggctaattgggatttctgtcccctaaactttaacattaaccaaaccatgtcccttgaacttttctggccgttaaaaattcccctgaactattgagattgttagatttaaagacttttgtctaatttcattcaattttattattttagtgattgtttatgtactaactatgctccccaaactttgatatctactaaattatgcttctcgaactttgacatgtactaaattatgtcccctgaactttcatccatgatagtctttttttactaaaattggacaaaattccttaagtccaacaatctcaatagttcaggaggtattttttaacgaccttaaaagttcaaggaatgtaatttggtacatatcaaagttcaggggtaaacatcctaattagcttttttaataatagggtgtacttattattttatagaatacaaatagaactctcccaaaaaagctagagttgtattatagtatggtagttttgtttccaccaaaaaaatttataaaaaatacttattttaataatttttattttatataaaacatatattttaattatactaggtttttttttttaaaaaaaaaaaaaaactcttccaattcatattctatttgtgacttttgtctagaattggtatatactgggctcgagatttcttttggaattatcaaaaagtcagggaattttaaggccttcactaactttcgcctctgggaccggcagcttctttgtcctcatctcaggctttattcaaatgatctctccctttgggtattttttgcaaagttaatattgatgttgctattgatacttctggcaaatgtaatggccttagtatggtggtgcgtgaccacttaggcgtcgttcttacttctgttgtttggctctcagagggttgttttgaacccgaagtaacaaaggcttcggctctgcagaatgtcatgtttcaatgtcatttattcaaatatgataaaattagttttgaaatgaattgtttgagtgttgcgcaaaaactggtaaacaaagtgtctttgattttcttgttaggtcttgtcttgaatgccattgataatctttgtaatagttttaaag

SEQ ID NO: 229699 - DNA, 1453 bp, Cannabis indica
ccatccacattattatattcccaaaacaaacattataagaatcatcttctatgagaaaatttaatgagtgaaccaaagaaactaataacatgaacaggacttcatgattactcaggattcagtctgatctactattaatcatctttatgatatgaattaggtctttataataaacgacatgtttgataaagacaacttaattacatattgatcattgtcatatataatctctattatatcggcacattcacttagatgtcatactatactctgaatctagattgcttgcaccaaataataggcatcagtgaacggtattagtaatcgttgattaaaaattcaaaaactttaatatgttgctggctattttattcatggctaagtgatcttaattctccgtacaatacaagtcacagcatcatgtatgaataaggaattttttgaaatttatatataaattattcaatattaaatattaataatttaacatttaagcagatatgaaaatgttcaactcttatttataaacagaaatatatttacaggattttcaggacatagaccctaacatatcttgtagttgatttacaagtatcgtgatctcctgcatagtcagcgtcacaataacctaccagtttccaactttcacctttcttgtacagaagatccatagtctatcgtactttttatatatctaagtatctaccgaactatttctaaatgagacttatttgaattttgcatgtatcgactcatgactccaactgaataggaaatattaaggcaagttaaggtcaagtagattaaagtacctactatctgtcgatacatggatgcatcctctaaatcttttccttcgtgcacacatatgtttccatttggttctatcagtgttgaaatcggtttacaatacagcatcccaaacctccctagcaggtctatcacatacttttcttgacaaataagcaacccttcttttgaacgatcgacctctaatcccaaaatgtgtttaagctctccaagctctttcatctgaaggcagactgaaaaattgtatctcgtttgacaaatttctccttcaccatctccagcgatgatcaaatcatggatgagggcgccttcttcgaggtgaagttggaggagggcgtggtgaaaacggcaaaggatgtcgtcgaagaacatggatttgagaaaatcgagcatcacttttggcttcaaaagagtgagaaatccaggaaatgcaagacttggcgagtatggtttgtagggcaatgagttctcggtccaaatcgaagtagttgtggtcaagctccgaaaggagacgaggagctttgtgaggaagatctttagaagtttaaaaaagttggtgtagaaaactcagttgttcggaggagaggtcaatgtgtttggatttgagattttttttattgtggatttgatttgggtttgtttg

SEQ ID NO: 229700 - DNA, 761 bp, Cannabis indica
atttctacataaaccaagaattctagttatatacacacactttatatagaatagatacaaaaagagtttaattacttaaaaatattaaaaaaaactttaaatatgtatatttgtaaatattttatcatttttgggtattatgaaaatataaaaaatatatataaaccaaaaagtcgtccattacaatagttagtaattcatgggacattttttgcaaaatacgaccttatcaaaaacaatagtcacacgcaaaataatagacaactttgcacaaagtgaataaaaacattacatgaagaaaataagatatgttgacaatcaataaccaacaaaccaaactcaaatatgtaaatcacactaaatagcataaacacaaactaaactatcagtttttttataccacatcaaaccaagaatgctactgaatccaattcaatgcctcttcaataccaataatttttgcaatttcgggcaaaactgcaccagccacctatggtaaaagcctccaacaccttctacggtcagcccaaactttagacagtttggaccattacacaagaccttctatatttaaaggctaaatttttttcaaaaagaaagaattttattattattattactattatatatacataaaacaaaattataattaaaagtttagaaaaatatctttaaaaaaagaaaagaaacaaaaaatagtaatagaattgtggtcataatgtatactagtttttttttttttttttaataaaaagctcaat

SEQ ID NO: 229701 - DNA, 894 bp, Cannabis indica
ctacttgtcaagcaatatggttggaaaacttcatttcagcattgggtgtatagacactaaacctcgaggccgctgaaattgtattgtgataattttacaacagcgactttctctaagaatgctagaagtactttccgctacaaaacacattgacataaagtactattttgttaaagagaaagtttctgagtctcttatttccattgagtacacgcctatcactaacatgttggcagacccactaacgaaaggcttacccatatgtgtatttgtagagcatgttgttgctcgaataggattgttaggagcctagcttgttgagctaagagggagtttcgttattgtgtattaaacatgttagtattttgtatggaatgttcatggcttgtgttttggacatgcataatgatattgtagtcacttatcgttgttgttgtcatatttatgtatatacagtgttgtttgctgaagtgacaggtacaaagggagatgaatgcgcacaatctcaacttgttgtacctcatgcatatttggtttgagtattaatgattgctattgtatcaaatatcttcaagatcaattcatacgtaatatatgtatcctatcgatatgatattatgtacaatttatttggttaccttatgtgtgatagacaatattatgttgattgattatattatccaagtgggagaatgttaaaactattcatttgtggactaatataataccataattacaatcattaattatgtgcacaatatttctcaacaactatagtgggatggttaataactattaattattttagaggcacataagagcacccatatgactataattggctcattgaattatagtccactatcaattaatctttattaacccaataaacta

SEQ ID NO: 229702 - DNA, 1086 bp, Cannabis indica
aaaaaaaaaaaaaaaaggacatttagccttaattaagtcattttaagcgtccttaaccgtacccatgtttttcttaggagtaccaataacccacaataaagggacatgaaaatttttcagtgtacgtgtccctttaaattaaggatcactaaaatgtaatattgtagtagctagtgaatagtgatgagtctgttacaacatgataaagctccactccagtctccagctattgctttggaggctataaaagagtatcattacttttaacttttacttaggtgagtagctgccactaacagatttggaaataaggcctagctagatagttactttaacttcacctttataatctcgaatcatatatagcaccaattcccacaattgcacatcaaaagctgtatcgatatttaatttgacataacctctagcagaacctgacaactttgcaatgctttcttctctgctctaaattgacaaaaatctccattgattttgaaatatatatgcccccaacatttatttgccttataataaaaaattgaaatggtgtccaaaatttctcttacgtgtttgcaagaaatatatatatttcactacttaattacggattgaatgaattgaagcttttgaggtttgttacattgttgttgtcattcgttatttataaaatttaagttggttgagtaaatttaaaatggatattttatttaatctactatactaatgtacactgtattaatttatatatgttggttgggcttaaattatgtgtcgatcgtctcggttaccacaacattttaggtggagttggattgccaggttgttactacgctttcatgtaagaaagattcttgtttggcaatatgatattttgttactttgtaagaaggttaatgtttttaagattttattttgtaaatattgctctacgttattgctcacgacttggccaaaatggttctctttttagaggaagcgagagtttggtgatcgaggttaccgatttttgtgtaagtttttggtatttttttttttcttgccattagcttaatgataattatctttcattcaaaaaaaaaaaagtac

SEQ ID NO: 229703 - DNA, 1840 bp, Cannabis indica
gtgtaagtaagctttatcgctgactatcacatcagtgtaaatccagtccactgatgaatcaccagacattatcttttaaagcatataatcacaatttccttccactatgttgacatcactgtaattgtgaataactatatgttctggacctaacagaaattgtatacattaaacccataaacatgaaactacatgtaaacataaatgacttctaatcttctattgataaaaatcatattatattgaaatgtgtttcatttagggcattaaatcccaacaggttatgcttttcctgacacagaatcagatctggtcccctacgtcaagacatggtaatgcgtctacctcatccactttttgccatacggttattcaaagactctacttttaaaggtcgaaccttttggcaacacgtgtccactacgtacaatggtcctccaactgttgcacgcacaagcactattatttctaaggggcccaatagttcagctctgttttgccatgtaatttaccccattagtgggctttttgagagaaaccctaggcaggtcataggcatgtccataaccacccttagcttataaatacccttctatttctatacgaaggggggatcataacctaaataatcgaatctctaccaatattgttcgaagtcttctacttcttcaagagaaactaagagcaaagagttagaatttcctacaaaatattgtaaactcatcatataagcccttaaaggctaacagactgattcgtggactaaaattaattaacacctaaaccacgtaaaaatctgtatttcatttatttttacattttactatttcttttgcttctaaatatttagtttccaaaaatatcggttacattcttcgttcttgaactataatctttcttcttgattgattttgttattttgttattctgctaaatgattgtactttattttctgttttgtgtcattgctttcaaagtcttagttatttagccgaagggcatgtaattcatgttttgtatataactgagcttctaaagatatttacttatgtttattaagttagctcttcaatctcggattttatgaagaaagttacctctaagattatagagattaattttgaatatatgttcacggtaatgtatgttaactataatatatatggtactattgttaagcaaaatatttagaatctatatatatggaacacttcttaatgggtattacctatgaatggttactaagcaaatttattgaaactcaaatttaatttccaaattcaaataatttacgaaatatatctattataattaaataattataatatataataatgactatacatatataagtgagctacagtgatgacatcgactttaaatataatggtgataataaaggagatacggcgatgatgattatttttaaattatatatatgatgagtttctttgtagatttattgtctttttttaaatatctattcaatacatatatataaaagaaaagtatgaagcgacgatgtgttaatctaaaatcacttcacataactttatctcttctctcctttttttttttttttgaaaataaaattatcattttattaaacgattaattcagttaccaaacaagacaacaactcaacaggaacattgggtcgagttggcctggatttacatctaatttctcacattttttagaaatttatatagaaaatgaataaatttaaaatttgatacaattttattatttagttatgatcaaataaaatacataattaattttatagatataatttaaaaaaattttaacatccaaccgcgaagcgcgggttgtttac

SEQ ID NO: 229704 - DNA, 2518 bp, Cannabis indica
attttgatctaggccaagagactactatagaaaaccaaattagaagctacaattttgatgatcttataacttaagatttttactttttcagatcacgtatgtgttttcattgatggcaatggaaatagactttgaggatatgaactcttttaaagttgatcggttattagctgataaccttttcctagctagggcttttttaaggattgtttctctctcatacaaccttaagggatgagtattttgttctaatctacgttgtctttcattttcagctcatttgtctgctaagatatgtatttgatgggattaatcaaagttcattaattcaagacattaaattttattttatgagtttagtcattggtgagaactcttatagttaaggaagaaccctgtcaccagtggaaggaataacgttttgcgccgttgaaagaagatgaggccattaagcatgtttcaagctgtagtggtcttggatgttgagtgagagaaaagcaagaaacctactacccatgcatgttttggttttatacataccaaccagtgttttctggtctggttaaaattaattggtaataagtagagtaatccatattgttatatatagctcaatatttttatatttaattcatttgtgacaataatgtccaatacacttttacaatctttaagagttcattaatcccattgttgagtttcttttgttttttaatttatttttcaatatatattataagtattttttttagcttagtgaatattaatgaaatacgtcttccattagagagaagtggagattctttcctccgaattgtttgtagtgggcataagaaattcgcaatcgatccttagcgatttccttctctattccttttaactaagggttggatctgatccggctataatccgacctgatccaaaacatgtaaggatttgccccgccccgccccgctagatcagatactcagatcggatcagatccgacccaatttattcggattagatcagatcagatctgacccgactctttttcctttaaagaattttaatattaacttataattttatatccattttaattttgtattagtattattaacatgtattaatagattgtgtaaagataatacattttcaataaactctaccctaacaccaactatgggtcgggttcgggtccaagtttaggtttgggtcctagtttgggttcgagccagggtcttaggtctgggtccgggtccaagtttgggtccgggtcctgggtctgggtctgggtcccagtccgggttcgagtttcggaggtccgagcccgaggtcagagtcctggaccaggtccgggtcccgggtcagtgtccgggtccgagtccttgatctcggctcgggttcgggtccgggcccgggtccggtcccaggtctgggtctcaggttagggtctgagtctgggttcgagtgccgggttagggtccatgtcccgatctcgggccccggtccggatctgggtctaggtcccaaggcatcccagtctggggtccgagtcttgaattaagtttttttaaaataaattaaaatcaggttggatcagattcgatccaaaaaaagattaagcggggcagagcggaggaagatccaataagtattcgaaggtttcgaattataggtgatccgtcagatcagagctccaatccgctccaactaaatagatctttttgacatgcctatttctcactaaacgaaaataaagtcatttcctcctcttatcttcttttcctgtttactaaacaaaaatagcctaagcaagaactttcttattaatgcgataagagcactctctcgatgctctaaagtctaaacttagtctgtctttctctaattaattatttaatactgcagctaaagttgccaatttacaaaaaatatcacacaacatatctatgtcatcacctccggttctctggtacatctcggcgatgattgagttgaagatgctctcaagctccttcttcttgtcatcaaactcatcaaacttagcaagttggttacgatcaagccattggattgctccgtcaatggcatcctcgatcttctttatatcggcttcagtaagcatcgatgcaatcttctcgtccttaattttgttccttatgttgtaagcgtagttctccaaagcattcttggaatcgacgttctttatgtgctcttcatcctcggcctggtacttcttagcctcctgacttttcccagccatgagttcagatatataatatttgaagagaaagagaagcaaagagagaggctgtcagcaaggttaggatttcgagtgtgagtatgaggggatctttagcttagtttatataggatttttgagttggatcaatatatagtaatatatggttcagatttcgcatctgctgtgagtttttgactagttgagcctctttcttacatatctgaccacttccactgtggcttgaggccctaattaattttctgtaatacttttcttttcttacgtatc

SEQ ID NO: 229705 - DNA, 2198 bp, Cannabis indica
gttatttttattatatgtatgtttatttttgttgtttatttttatgttatttttatgttagttttcttgttgattttatgttgtttcgtgttattttttggaaaaccataaaaatgtaaaaacaacattctttagaacgttaaaaatgtaaatattttataaaaaatagtgccttataattatttacaaaaaaaaacctcaatataactataaatcaactgtaaataaattataaaactaaaaaaaaaaaaaacaaccagaaaaatgacttcataacaactataaataaaacaaccaaaaaaacgatttattatttttaataaaaacatatttttgtaaataaaaaatttcaacgagtaaaatgataatttctctgtgttaaacatatttttgtaaatttttcaagaaatacttaagcttactccttacagtctgtggtcgtcctttaagtgctttataagtatttttataactttttttttcatacttaattagtcttactccttccttacacctttccttgttttcttgatgagctattagattgagtatgaaattgagcacttttgctctatcagaaaaagatatatagattgttcttcatctgcaccatattttaagtatagtacacttttagtattgctcaaaaattgcctgctcttgcccacatgtatcatgatgtatggtatttttatatttatatacatatataagggcattatatatcttatttgaacacaaaaattatattgtagctgtgataataataataattaattagttgttctttcaataataataataataatattttgtgagattatactcttcttcccaatgtagttttatgaattatgactctatatatgtcatcgtccacccactttatatgtttatttaatttattattttttatgaatttcgtacatatatataaatgccatcaattactgataagtgactttgagtaataacctataataaatctcaacaagaaagtccctgagagatagcatgcatgagctacctaagtatgttctagttgattttgtagtacatcaagtggagaaaggaatttcaaaagtagtggatttgataaaagagaatcaaagctttattaggtctttaaaatatgggctcactgaactaacatttaggccctatacggccctattatatcgtcttcgatacataattacgtacaataataatggataggctaagagtgggcttgtcatacgtcgtaatccaacgtaagaggctgtgtttttcagaactggtcttactttctgatctgccctcaaatcacaccctcttcttttcttccttcccagttcacccatgttaacaaatgcaagtaaataaacaagattgaattgagatgtttcctatgaaattaaataggcacattattcaattgtttattgtgtgtaataatttgttttataccatatatttatgtataatatggcattatgtcacattattaatatataagcatcactattaagtctgagtggcacacattatcatcgtagtcctaaattattaatagtgtaaacagttaataattttatataataattattgatttaaaatatgtaatataatacttaattactttaataacaatataatatataatagtgtagtgatttgaaaacactagtctttataattttccttataatgtaacattactattacaatattaggttttagttttggattttttttcaaccattaaaaaagaaaaggcaagacataacctttcaacatacaccactatcagtcgctcacacatagattcaatcacataacaaaatcaaagttaaaagaaaaaaaataatattatatatcatggaatcccttaatctttggttattgaaaaataatcaaaaacatagattaccgcgtgttactttatgactttacttattttcaaatactaaagtctaagggtgtgggcatttttaaatgagcttcaacccaaaataaaatcctaatgaaaccctaacgaaaacccaaccgcctcactcataagtgtgaaggagattagtttgttaaatctattagagttagttacaacatttaattactggtagctaggtaaaagttaattatacaattgcctcttttctttgtgtaacagcttgaatatatatacttgtatctctcttataataaacatgagatta

SEQ ID NO: 229706 - DNA, 1399 bp, Cannabis indica
gtaaaataatttccaacaagtagctggttgtagaacgtctgtcatcagggtcaacaacccaatctgcatcacagtagacttcaagattcataataggcgctttctttatgtggagaccatagtcaagagtgccagcaagataccttataatctttttgacagcaaccaagtgagattgtaaaggattttgcctaaattaacacactttgttgacactaaaggctatgtctggccttgttattgtagcatattgaagggccccaacaagtgatctataggaagaggggtcttcaacaggatcactcccataatttgacaatcgaagaccactgttcatgggagtactttgtggctttgtaccctgtagctcagctttgcaaataagatcttggagatatttctgttgagacaatatgatgccttcagtagtagagaacacctgaatgcctaagaaaaaagataaaaggccaagatccttcagaccaaaagtggagatgagagctgcaatgagggatgtgacttgatcattattggaaccagtgatcaagatgtcatcgacatagacaagaatataggtgctgcttgaggcagtgagttgaacaaacaatgaatggtctgatttggcagattggaagcctaattaacttggtgaaagtagaggacaatttttcgaaccatgccgtgggatcttgcttcaatccgtagagagctttgttaagtttacagaccttgtttagatgttctttgtcaatgaagcctggtgattgaaccatataaatctcctcttgtaggtaaccatttaaaaatgcattgttaatgtccaattgtcgaattggccaacccttggaaacaataagagttaacatgactctaatagtagtgggctcgacaactggactgaaagtttcattgaagtcgaagctatgctgttgatggaatcctttggcgactaatctggctttgaactggctaacactctcatcaagattttctttgattatataaacccatttgcagcctatgggaattctatttgggggtaaatccactaagatccaagtgttgtttcttcttaatgcagtaaattcacagtccattgcagcaaactactttagatcttttaatgcagcaattatggactttggagtcagggatgccatcaacgccattggttttcgaattcttgactttgctcttgtttgcattgggtgtgtgttggtttgagactcaattggttgttgagcagtaggagcaatgtcatgtgtaacagctaaagcaatgacatgagctgtattgacagtatgaactgtggctaggatttgcatattattctgtatacaacctgcattagaagcattagtgagactaataggagaaatattaatgttggaaacatgtg

SEQ ID NO: 229707 - DNA, 1216 bp, Cannabis indica
ttttattatatataatttttttggtgtatatacatattttaatagtagtatgtataattttgttagcatgatatatttattcggttttgttaccatataataatatgtaatactaaaaaaattacatgacttcatttaattattatatattttttaaaaaaataatatataataaatgtattttttataatttttaatagttaatttattatatttcgctattttttttattttttttttaaaaaaaacatttactaatttaattttcaaaaattaagattattttccatctcatcccataaatatttcgatatcatcatatcaatttatttcgaaaagttaatatttaaactaatgcatcacaaattttacatgccatttttttttttgtagaatttaaataccattttcgatgctctaaatcccattattaaaacaaaaaaacttcagatttgattttgttgaagaaaaaaaaaacatagatttgatattatttatatgtaataaaatccaataaataatgacattaataaccctgcatctaatgcatgtcaccaccgacaaaaataaatatccacttatgttatttatttttaaaatgctattattttttttttaataaatatttgtctacattaaacattattgggtgattctacaatgcaccccttgacctgtttcggtattcagaaatattttttattctatttttttttttcatattcatgtactttataaccatttaagataatctacaaaaatttttgagaaattcaaaataatttacaatatagaaaacaatgttcaaacagtttattttacacgcgtataaaataaaatagtcgcgcgtgcaacacactgtttgaacgtattttttgacgtgttaaactttttcaaattttttaaaattttgcaggatgtcttaaataattataaagtacatgactatgaaaaaaatttgactaaaaaattatttcgggtactaaaacaaataaaggtacatcaatgtatccattttaagaggtgcataatatatgatatttaaaaaataataaaataaaaaaaatctaaaagctaaaataaataaattgcatttatgttattcatttttatttttaatttttattgtaaataaatatttaagtttaatttttagccgtaataatatataaattataattctgaaactctgtaagttacgtatttagccgttaat

SEQ ID NO: 229708 - DNA, 2729 bp, Cannabis indica
gcgctagcttaagggagggtattcaaataattgatatttattatttttttttgaaagaggcctttgtttaagactgacccctcccccgttatatatagatagtctcacttgtgacggaggaataccatgattacaagtgctatatcaaaaacattttaaacatttgaaacaaaaccaaaacaacgagacataaacaaaaccaaaactaatcgacatttattagattagttgagttgttagtagttgttagttgaagggtaattaatgtctaaagtttgtactcagcctatttaaaggctttttccaatagtaataatacatctcaagtgtattttatttctacattgtagacaacttattatagtgtaatacaatctaacgaagacaacttactatattgtggtcttactcatctcttgtctcaaatgagtgcaatccaagggtgaattcaaaacttggcccaacctattaattattctcaatagtgtaatacaatctaacgaagacaacttactatattgtggataaaatgtttaaagcagaggaagagatgggtgatccaacctacaatgtgcctcgaagggggattgtacactagaacaagcaactgattaggtattggtgtattaagaatgtagatgcttccagattcatatcctttaccaatacagtttaagatcacgagtaagttatcgaaaaagatagaaattaaaagaaaattaggtgacccatggactaaggtaatagtagaagaggaagcatgagcttgaagattaaaaaagaatctagaattacctgtcatatggtctgtaacactagaattaatgatcatttggaagacgaggaaagaaagacacgaatttgatttacctgaatcgactatagtagtgatagaagaatatgaatacttaagagagactcagataatgtaagaattcggcatattcaattgcagaacaagaactggtcttctagaagccattacaaatattatgttcgtccaaccaaactaactcaaacaacaaaccaactaacaaattcgataaatgagcaaacaaaatgagaacaaatcgacaatcaaaatctcacaaccaaattaggaaagcctaaaccaaaccacaaacagagaagagccctggagataaagaatcacaccaaaggatgatgaacaaacctcaacgatcacaaaagaagaaaataatggtcgaaatagatgcaccaaaaggttagaaacatcggaaaaggcaaccggcaaagaaacgactgcgaaaaaaacctcatacgtgctcacacactagtgcgtgtgtgttgtcgcctatagagaacagtgaatagaattgtatgttgtattccatggaatagtttatatttatatacaaagttaggagactaaatagaaaactactaaatacaaataggaaactattaaatacaagttaccctaattttctacaactaatattctaacatcggcgaagcttcaaggggcacgtctagctcacgcgtgacgattccgaccaccaaatttcgggaatctgttctgcaaatcggcagttgggctgtccattggtgctggcagtgaaagctcacatgctctctaaatgtgtttttcgaaaaatgaaccttagaatagatgaagaacaaatcctaattacaaacctcaattttgggataaatcctaatttctaattttaaatttcgaattttgctctgataccaggtagaaaatggtgagtgatttatatgttctattcaatagaatatatttatataagaaattagagggagtaaataggaaactacctaaattagagactaaatagaaaaataactaattagctaatatattctgacaatatgatttgactgaccccatgatgagagctcatgggtcttccaggaaggaacaactgtaattcagagagtaagaacacattttgaaatcatagaaattacaaagaaaaagaaagtttcacctccattctcaagaaaacaacctatgttgatatgaagattgagaagagcaggaagagtgttggaaatatgttatcctttcaaggttgtacgacccagatcccatggtactgacgtagccaactcaccttcccgagtgtgtggtggtgaaggtaaaactggcctggcgaccactgctccccctgccgtctttggttcccgatgcaagaggacagttcccctgccgtctttggttcccgatgcaagaggacagtcctctcgatggagaagaagagaaggttaattgggctttaccagggtccgatggaccaacccattaagtggagataccaggtttagggtttgaggaaattataaattttattggattttacactacatgtgcaataatattgctcttttcaaaaggagttattttatggtaaaaattcaagaaaacgctgaaaaatatgagaaatccaagtaaaggttaccagttatcttatactctcatactaacacttttgataataaaccatatttttgtaaacttataccttaaaacccataaaaatgaaaattgccctaggattttacacatgtgggccgtatctgaaataacattaaatgggttaggcttccctaaaagaaatagggtttaagtgaatgatttgaattttcttttaagttgcgatcgttttatgctcatattaaaaggataattacataaggcattattttttgtaaaaaattacatttttacgttttaagaattt

SEQ ID NO: 229709 - DNA, 2608 bp, Cannabis indica
ttttttgtttttgtctttttgtcttttatcctgctttctaaagtaacttggtacctgagaatttaaataaaatatcattgcattcctttataaaatataatatcaaaatgttaatttatattcaaataaataaaaaaaaaatactttgtaataattaagttaaaaataaaataaaccttctacatatattaataaatagatttctttaaagaaaaaataaaatagaaatttaagttaagaaagaatgattatgtagagttaaaataaataaaataattataatataaaaataatataaatgtatatatattaatgatttgctttaaaaaatattagaaatctctaaacataagttaataaaatgaaaatgtggctttatttaataaaaacttaaaaatatggaaatatttttccatacaactaacttaaattgtaaaaaagccataagttaagtaaatctctaatttttccatatctatgaaatttaaggaaaaaatgccatattctacgtaatttcctctattaaaaattccccaaaaattaaggactagcgcagttcattacaggccgttcggcccatatttgttgggttcggcccattaattgtgacagtgccaccaacctctctcccatcactatcaaactacctcagccgcatatagcttcctctgtgctctgctctttactccccctttttcttctttttatttgggataataataataataatatgacgatgtgttttagaatccgacccaataccacactttctctccctttctcggcttccaaacacctcctcaaactcaaccccaaaccctctctttccttcacaccccactctcactcttccacctcgtattactcctccaagataacaatgtcttcttccccaacccaaaccatcgagcacatcgtcctctttaaggtcaaagacgacaccgacccgtctaaggtaaacgccatggttaacggactcagcagcctcaaatcgctcgatcaagtcctccacatcactgccggaccacttctccggaaccgatcgtccacgctcaactttactcacatgctccatagccgttacagctcgaaagacgaccttaacgcttactctcagcaccctaatcatatgagcgtagttaaggaatcggtcctcccaatctgcgaagacatcatggccgtcgattgggttgccgaggatcttcaaggtccagcttccctatctccgggctcggcgttgagggtgacttttttgaaattgaaggagaatctggaggaagagaagaaatctgagattttgggggtaattaaagggattaagaatagttttgggcagatttctcagctcacttgtggggagaatttctcaccagggagagccaaggggtattcgattgcgtcaattgctgtttttcctggtcagagcgaattggagactttggattcggatgaggagttggtgaagctgcagaaggaaaaggttaaggagcatttggaaagtgttgtcgttgttgattatttagtgtcgttgcctcaatctgccagtctgtgagttttcaatttcattgttgtgaaaatagaactgagatgagagaataaggcttcagcttttggaatatcaatgagatgactttctcttcatatcttttcaccatattgtgatctgaaagtaaaattatagattgtaatgtggtttaatgcatgaaacttagctcattttcttcaaaactcatagctcattgtatgacaggttgctatctaacacaaatgagtgtaaaatgtggttgacattaacctgtgacaatgtcacaaaattaatatgtgaaaacaactatgttgggaaggaaatcattgttaaatttacataatttttctcttttgaagctctttaaggtcatctctgaaaatgttgttgttaccaataacaacacacccttttatattgaccttgtggtagatataattcaatttatttccacaacagtggactatatataggtgatttgaaatatctggatgagataatccatattgcaactcatattaggtaactaaaggcaactgttctgtagtatatataaacattgtttgcctactattagggagtggtctgactaggttaactcttgttttattatttatttaaaacaattcagtttatatgattgcttttcaaacgacttatggtgtttgtttagatgacttttgtttgtttgtctttttcttttttgatccatattagctagaagaagtttactctttcaatagtgaagttgcgattctttgcaaatattttgtttagggataaattaagattgtattaatcactaatttcaatgtgtgctgtcatgatatgactgttgtttagtagctgtattctactgattataaacaatggattatggaaggaaaggacgatgactgctcaatctacaatctcactactgatttttgtttttcttacttcctttttcatataacgagttttcaaaagaaccgatgctaaaggttatatatgattttgcatatatgcacaagggagagacttgaacaatttctaatgtcaccatcatacatcataactgatataattgtgacactcaaattt

SEQ ID NO: 229710 - DNA, 883 bp, Cannabis indica
ataacgataaaactaactattaactaaatacataataccaaaattattaataaaaacaatcctaaaacttatgcattcacatgtatcatataaactaactataaactaattacataatgcaaaaaagttcatagcaataatcataaaacttatagtacatgtatcataacaaaaagtggtaactttgtactgaatcaataatcaaaggccattgtggtaaggagattcgtacttgtttggtgtaagtgggatgagttggttttgtaactgaattgatggtgattattatcttcactcccatttttaaacaaaaaagaagctaggagaacagttctcaaaatttttgagacagtttacactccatcatctgaaagagaattagaacagtgaagatgaagtaaaaactggaaccataacaagacccaaaagctgaaaatggctcacctttaagaaccaaaccattcagtaagggaacaactcagtgaaaccaccaaaataggtgaaaatataaatactattactaatgtttttgttgtcctattgaaactaagcacataaaacttgaaatggaatagtttgtttgttcttaaggcaatggatgattgaagtttcctagcaactgatcaagccaaaaaaaaggttgtagagaacactaaaaagacaaagttatgtgagacactttagattgaataagatgagaatgcttgactagtattgtgttaattgttgtagtggatgatgatatatactttcaaagtagcatatcatgaatctattaaaatttttatcaatttttcatttttattgttaaattttttaaatagcagtgagacataccaaagttaacaaaaatattttttttttgatgaataagatcattgta

SEQ ID NO: 229711 - DNA, 2064 bp, Cannabis indica
taaaaataaaaatttaatgacctgaatcaatcaagaattatcacgtgacatttatttaacacttaacagtcaggctcctacagaagttttaaaattgaaacttagatattattattgccaaaatattaattttatttgcaactggaagttaaagttaagtatttatacatcaaatcactcaatatacatatatatttttagtaaaataaaagttcatgtgaaaaataagaaaaatatttttaagttgaaataaaaattaaaaaaatgactattttgtctacttttaattgtaaattttctatttaacctaattcaaataaaataaataaaattatttctatttaaaaatatttttataattttaaaagcactattaaactagattaatatcaaacaacaattgacataattaaaaaaaaaaatatcttgtgtaaatttctcaacaaaaaaattctacttgttcttatactatctaaagtagaagcaaaagctttaccaaacatgtttgctttcttaaaaatattttttaattagaactaaaactaaaatttattggttactcaaccactagcacaacacttttggagtttcgtaagtccaagacagcttttaataacgagggagggcctttgtatgcatgcatcgatcccgtggcttaaaaggttccacttaattacactatctcaattgtctctattatatattcttactcttttcttttgtacccaaaataggtgtctcataagttctctcttacttaataataataaagataataatcagaaataggttaattactttttttaaaaaaataatcctacaatatatagctgagtatgatcataacataatctccccttataaaaagtgtaatctttctttcttgttctttttgctaactaccatgtagaataatcttatgagcatcttaaatgagattgttcattgaaatggttttactacattgcaatttaattttcaagattaattttatgtgaagtgttgcttaatataaacaatggtcacatgatatttttttttaatttttttacctaaaatattattaatttaatgtgatgtgagatgataattagagtatttttcttaaaaaaatatgataaatcttatatggataaaaaaaaaaatatatatattttaaaataatatatgtattttgaacaataacaaaaagaaaaataagttaataattatacataaataatttctttttaagaatcattcgacaccaaaacttcaattcaaactaaattgaattagtggtccacctctttagataaatatcatcaagtctctttgccactcttgaaaatcttctttatatcaggacttttgagacagctaactttaaatagcagctctatctactctagccctgcaaagaagatttttttaatatccaaagaaaacacatattttgttcttactcttctccatactatcactaaagactaattgtgacacatattcctttgattgtcctacactgaaactgaaaggatgtcacatgggaccattttgaaatttaacccaaaaacataaaccagtctatactcattattgaatttatgatggcccccttgaccccaaaactagtagtgtctgtggacttgaaaaacaagtcatggcagcagaagctgccgcttcataaccgttggcaccctctgattccggctgtggccgaggttaaaactggtgaggtctttagagtagaaatggttgattggacaggtggtgctattaaagatgaccactctgctttagatgttaaattcatagacctctcaagtgtaagtagaaaagattaaaaaaatccaatctttgatgagttgaaaggatcaagtttttgagaaactttgactcttgcaggttcattatcttagtgggccaatcagaatagtggacaaagatgggataccggccaagccaggggatcttctagtggttgaaatatgcaacttgggtccactcccaggagatgaatgggggttcacagctacctttgatagagaaaatggaggtggttttcttactgatcattttcct

SEQ ID NO: 229712 - DNA, 1591 bp, Cannabis indica
tttttttttttaccttggttagtgcttgagaatccctagtcgattgtccctttgagagttggagggtggaatggtgcttttgactgttggtgagtgaaaatttaaaaaagtgatgaagtgttttgaaaaaaactatttagcttatatttgtaaaggaaaaaggccttagtcgctgtgcattctaattgactgagggtttccaaaaatacccttagcacaattagcacatgctcttcatttaatatgttagtggcactcctctccttttgacacttgtcatttgtgttagtaaaatttgtttatgtgaaagaataaaaatttgttgtccttagagaaattaaatttcttttcccataattaaatttaaatttcacaaattttgagagaagtcgccaagaagacacagttaactcgtacgacgaaagtctcaatcatgaactcataaagacaacaaaataagcgaaagacgatacactttttattttcaagataagaggggtacaataacaaaagtctttcttgaaagtttttgacaaacacttttggagggcaaatgttatacccatttttaaaaattaaaaagtcaaccttgtgactttgactaggacttataaatatcaaatgagttaagatatccttcttgagggtcccatggcacctctagagggcttaaaatcattaaccaatcatttggtgtcgggactcacacacccaagtgtgcccaaactagggttcatgggcccgcgccagcattttcactacagggacctcaatctgccaaagaaaccaacaaggacttgactcatttaggcatgaaatgacttacatttgtgcataaagtcaaaatggcataaaacccccatggaataaggcctatgcgcccacttcaatatggaaatggcagtgttctccaatttttggagagcactgtgacaagggaatggcagtggtcgccacatacaaaacaccaagggaaaattgttcaaatgtattcccttaacaccaaggagtgcaacacaagtgaaaaaaaactatttctaccaagaacaagcatagccgaccactgccatctttgtggcacaatgagtggcagtagtcggccatgaagaagggggatgagatttcttgccaagtatgcattttcatcaataatatgtcaaaaccaagtggtgtggaaaccacttggccgaccactgccacacttttgggacaattggtggcagtggtcggccaccacataagaggaggagtttcattggccaaattatatttccaaaatctatgtatcaaaaacaagtgagaaaagtcacccaaggcttcataagccccttatgcaaccaactgccccctttttttggcaaaaatggtggcagtgctctcctaagcaattgtctaagaaccaatgtgaccaaactggttttctagcatccatgtgattgaaataagcaagaaacaccatacatggatttccataagccatggccaaccactgccattttctggctccaactggtgacagtggtctcccgttagggtttcagacattgaaatgagatttagggatctcgggacccccaaataatgactcacc

SEQ ID NO: 229713 - DNA, 1296 bp, Cannabis indica
ggtgtggatttctccttgccgcaacaagtagtaatttatttttgctatccaagttacataaaaactttccagaaaaaaacatcgctaacaaaatgtaccaaatacaggggctgttattgagatcataggtgatattgaaaatgctcatacaatgatccattctgtatatgttagtccttgtttattgttatgatataccggagccattatataagttataagttacttgcatttgcatccaggtaaattctcagaaaattactcatttaatatgtgcatggtgtacttggaatttgataaaatacattggcttatttatcttcaataattatgttatccttgtgtgacaaaggcatatgtttctatttaatcctgcaaaatgcaaaagtggctaacatcttcattttctttcccaaactgcagttgcagtacctttcttcattgtaaacagaagtattctaaccattacattaatttttagggcctggtcattgaccaaatccgagcttttgcagctgaaagtgggagaagaagatttatttaccttggagatggaagtggagattactgcccaactctaaggctttcaaaaggagatcatgtcatgccaagaaagaactatccactgtggaagcgcatttgcagcaaccaaacacttatcaaggccgaaattcatgaatggagcaatggagaggagcttgaaaagatccttcttcatctcattaacacaagaaccactgaagaaatcactattgacaatggaaatcacttgggaaactgagtcttggaaaatcatctcttaatgggtttttttattattctatgacttgtgattcatctgctgagtcaggtaggttttcttgaattagcaactactttgttctatttcagataactcaaccaaacatttgcctaactggtaagtacttctgcgctaggatggaaaccgactggctatgttaggcatgtacttggagaaatccacatgatttggtatctgaccctccagcttaggaactattagctaaatgttgttgtattaattgcttgttgttattccattatttgtttatgaggaaataacacaaatatctcttaggccatttcatagaataaaagagcacccttccttgggttaatcatagtaaatgtactagtcacagtgaatgttctatttcagaattattgagttctgagctctatacctttaaggtcttatttgggatggggagttgaattggattggattggactgggctaaaaattaggattagactggatatattagtactatgt

SEQ ID NO: 229714 - DNA, 1052 bp, Cannabis indica
gttgttattgtgttggataggtcaggcggtgtgattgatgctttgacgactcccgtcctattccctaaatggggttaaggctactactctagttcagtctttgtctttgtgtaggactagaggatgacgcaaaccagtgttcttctttgattctctataaaccatgttattcatctcgagtatcccgaccactccaatccacgtgacagatgcgggttggtcaacaagtccgaccttccgaccaacccgcatacaccatgcaccacgtggatcgagtgatctgaatactggggatgaaagaactggattggctatgtttggtgtaggaggagggttgtgcgtgcaagaaagacaagtttgtgttgtttgaattatttaattagtttaatatggttaaggatgctgactaactttttttggattcccataaaggttaatgctgctactatgaacttcctgctttttcaactaagatggatatctttggttttcttacagttaaagaggtgaagccttttatctctcttgtaaacttggggttgtttagcttcataaccaaaaattgttttcaatttttaaaaataaaaaataatttttaaaaactaataggggtcgtttggctaatttttttaaaaactgaggtctaaaaaccaagaaaacagaaaacattaaactgtaattttcaatttaaaattttgttttttgtctaacacattatattttacgtttttgctcacatacacggacctgaacccccgacccgacccagaccagggccaggacccaaaccccaaagcccgacccgaaccccaaaattggacctggaccccggtccaagtctgggtcctggtttgggtccggggttcggggttcgagtctgagtttgtgttttggggtctgggtccggggccgggtctgggtttggatcggagttcggattcggggtctaatatgagattggattggtttatgttatggtatggtatagaatattgattttttcaataaaaaaagaatctaaaaaatagctttaaaaaacctaagccaaacac

SEQ ID NO: 229715 - DNA, 1980 bp, Cannabis indica
ataaatattaattgctaaaagaggtcttgttgaatatttaattaattattttaagaaaatagttaattataattaattaattctaaaaaagaatgtcttcctaaagtaaccggttattataggtaaaaaaaatgtaactattgaatagtcaactcctatatatagagagagtgacttgggggatgtcatctatgaatcaagctaatgagatgtcgaagggggttgggtgcctttgccttagatggtttgctgccttcaacgatcgatagtggttagggtttccattggcacatggaagtggtggtgcaattgaaacaaagatggaacgtatgtacttttcagttaaacagaatgttgttgagattgagaaatgataggagaggtagtcatagtaatatgtgttattatttagtattcatttttatatatggggtaacttgattttatgggaattaattaggcttacaattatagttttatttatttttgggtaacctgttataattatcatgtggtatttttatttatttatttattttaattttctttttggtttaactcgagagttaaatgtatcattaattttaaaaatttaggttaaatgactacttttaatatatgaagctaaatataatattgttatttatatattttagaaatacacattcttattaattggatttgtgtgtaattagaggtaattacacaatttgacatgtttgtcagaccatgtaattacacgtgtaattgaaagtaattgaggggttccaattatactctccaattctcatagtcccatgagaattgaatgtaattacaccgtgtaattactaaaaacttcccatattaaacatattattttctcatgtaattactaattattttgtcaaacaaaatataatgaattcatatataattaccactttatattcaatcacatcttgcattttaaagtatagtgtaattactgtgtaattaccaccctaataattattctacctaataattacacatttacttgcaaacgcaccctaaataattatatatttggacacatcctaatgcgtaattacatcccatgacagcttcctaataatattttatttttacctatgtttgagatctctttgtcgttctcgttcaagtatgtggtgattatactaaaggcggccaccgtccaaccaaaacccaataaaagccattacaatcgagagttagtataattatttattacgtatcattgtaaaggattacattagtccacctaaaattggaattaaatatttattttggcagtatttatatttactatattatatgtccctctatcaaatctttataagcaatcattgttggatgttcatgtatatttttttttaaaaaaatattaaaaggtactagttttagataattaggcaactaagcgcgatagtcttataatatttttattttattattattgtaattataaaatattagtattgaacgagtggtatattatacaatatattattttctcaaaatcatatagtttttgaaaaaaaaatattttacaatgatgaagatcatattaatatataaatattttctcatgtctataggttaaaaattagttttgtagtttttatatagtaatatttttttcgctcctctttgtatctatttgcaaaagtaagcttatatagatagtcaaaatttaaaaagtaagttctctactatcttataattatcataaatctatatttttcaaattataataaattattaattaaagtagaatatgtaaatagataataaatttaacaatagtagaaaaaaaatacatataaatttactacttattaatataaaaattgagaaatatatataaaaaaaacatgaatataaagggagaaaaaaaaagagaaattaaaacaacatatataaagatgaaacatacatataatatatgatatatatatatatattaaaaattaatgt

SEQ ID NO: 229716 - DNA, 1171 bp, Cannabis indica
ttttctctattagtgagctattttacacataaaaaccctaatcaggtttggatatgtccgattcataatgcataacagtttatagagttttaccataatgtaaagggttctgagactcagaatttaaataggatattcttgagagaaaagttgtaaaaacaccattattacaaaattcaatatcattgactcgtggactaagactcattaacacttaaaccacgttaagaattgttttgtttattttcttctaattctttctttagctttaatcgttcttttgattaagtttccaaaaatctctagacaattataagttaaacctaaaaaattattaactatataaaaaaattgtcatatatatgcaagttttttggttttttgataatttaatttaatttgtttatgtagtttaattaattcttaaaataaaaatatttagatgattaattaatatttacaatatatttgttgttaaaaaaattaatggtaattaattaacataattccatgtaaatataaacatattacatatatagatgaccattgttagtttttaaaaattccaatttatagtataacaaatattatattctcttacttaaaagggataaaaattattaatttaaataggaataatgataataaataaagaattaaaaaatgataataaaaaatgtaaatctagtttaattcaattatactttttaaaaaatatatataattcattttaaaattaaacttatatcatatttgaatttaaattcaatcatatattcttataaatttgaatttaaattttactaatgaaaaaataataatttttttataaaagatataaaatatcttaaataattataatgtacacaaccaccttttatttaataattatagtacaaaattataaaataacttttatttaaagtagacctaaatattttttgtgataattaagtcctcacgtaacgaaaattttaaatttttactgtacacaactatggaagaaacattatattaaaaaaattctcctaaataccaaaaacatggctaccatagaattttttaatataatttattattgggataattacacaaggcactattttttgtaaaaaattatatttttacgtttaaagaattttttttttttatatttttacgattttccata

SEQ ID NO: 229717 - DNA, 1639 bp, Cannabis indica
tctgtaaggatcattgagatattgttggagcggatgttacatcaacgcttatccaattcttcgaaacaatggaatttgttaaggaaattaataagactttcgtgttccttattcctaagaagattggactgccttgttttgatgactttatacctattagcctgtgtaattttacttacaaggttatgtttaaattgttggccaatagactatgtcctcttctgtcgaatttaatctctttagtttagtttgcgtttgtgccaagtcattggattgcatagaatagtatcaagtctcatgagatcatggactctttcaagtggctcaggggaggttcgagttgtatgggccttaaattagacatgtctaaggcttgtgttgaatggctatttataatatgtctactttctttctgcctaaaagtcttttctttgagctcgattagatagtttgtgaatttcggtgactaaggtgttatgataagactcattttttggctttgatatattggaagtgtcttctgttcaaaaataagtggcttagtttcaaactctttagtgatattaacctagcattaattaccaaactaggttggcggattgctaatgttgagaatatgttgtggtgtgaagtgtttaaggaaaaataatgtcgagaaaatagtaattctgttttgtctatttctatctcgaagagatctacctttggagataaaggaatttttcaatcccaacagttaataaagaatcagtcttattttttcattggtgatttgagtgaggtgaatttttggaattctccatgaaaaccatggctatcttgggaccattttagagctgcctttaatccattagaagcctcaaattcttgtcgcatctcagctttgattagagatgacagagagtggagcatggagctggcctgtttttggtttgttcctagtgttgcagttctttatgtctaatttctcatttacctgttgttggtgagagtgacaagctgaattggaaggatgatgtggatggttgtttctccccaaagcagcctacagttccattattaaaagttgtttgagctgattatgatcctgcatggaagaggctttggcttctcaaaatacctgatcacatgaaactattcttgtggaaattatgtcaagatggtttaccatttgggaacagaccgagtacaatttttggtaatgtagagagttgcactatctgtgttgaaaatgttgattcttttgccaatctcttctacctttgcccattggctagagctctttggttctttagtccttagtcgattcatagtgagtctctcggtttcattaactgataggatatttttaggtgcatttttataaagtatttttagaggcgtatttcaattgattatattcattttttgcagaattacgcttgttttctacttgttttaagtttaaatggtaaaactcataatgtgaattaaaaatgagaagaaacatgttaaatgagatgaatatgatgaattcatcatggaatttgattaatcggtttctttctttcattgttgtgacatagggtccgagatcgttgatctttctccattttggtcgactgacatacttgaattgggacttgaggtaagaaagtac

SEQ ID NO: 229718 - DNA, 1253 bp, Cannabis indica
gtatatataagagtgtattaaaaagggttggggtgtgaatgattttagttaagtgagcttttagctcttgggagagagctgggtctctcgaatacccagcaacttgttctcttttctttccctaataattatatcagctctattatctctattttgctactgtttgtatcgaaatgataggaaattcctatcagacagcatagaaactataattaaataaattctagcaggaatgaggaattaatgtaaaaattctgcatattataggagcagttaaatgtatgagcaagcgataaactataaaaaaacatatttatagttaaagagatcaactgatagattaagtcaaaacagaaaaactaaccgaatctcagactcttttctttcacgaggcctaacctgaaaagatcataagtttaggccatcaaatttctgatattgctgaaacaatgtggctgtggaatacatagaatactaaattttacctcactcccattcagaacttcaacctttgccaaacgcgcaatcaaaacaaaccttggtattccaccccttccaggatcagctactggattatcagagagccgtatatcctttaatacacaaaatgggcaattcaagggccatcaacaaccacatattgaatgttattcaactaaatatgttttggctcatcaataatctctttctcgaagtgtcttgctaatgtaaaatacaaattgtttcaaacattaaatgcaagcatggttatttcaaattttgctagtcatcttgctgaatgcagcatcagtaaggctactattattcaaggtatcaaatttcctagatttatttatatttacttctccttcctattgaaaaataaagacccaaaacatataatcctaacaaaactacagaatcaacatatacaacataataatagcagatagtttgattcatatagtgacagccactggttgaatttggattgaataattgcagcatttgaatgcatctctccctgaaactatgtttttctaataacaaaaataagagggttcatattaaagattcttaccactagttttggaaataagttcagtgcatcaattgaagccagatcttcaagattgttgtttcctacagcatgtaatagctaagatatgcattacaataactaagataaacgacaaaatacaagtcaaagtatcatataaaaagttccgaaaatttaccgagaagaaggcaacgcaaattttgaaatggcttgt

SEQ ID NO: 229719 - DNA, 1206 bp, Cannabis indica
tcaaaagtccagacatcaagcgtgtcaagcacttaatgcactctggaatcgaggcacaaattaaagatgaaaatgcttttcttaatttccgtgccaataacaaacacccgccaaaataaaagctttcttagaaagtaactcctcaataaacgttctcatccaccaacagatgattccacgtctattttccaattctgaagacggaagttcatcttccatgatcagttagcacctgcaaagaaataaaaaaatattactttcaaacctctacatgtccactcatatggattggggcaagcttccacaatacacaacattctgaaagtttgagggataaatgttatccgtgtttttggcaagggacacatggactccacgtcagcatcaaaagcccacaagtgggcccaaagaagataatttgggtcaagcctgagttaaacaggtgcttttaggaggtaccttagctccataatcagatgagcttccgccaaggacagtctgcatccggaagtagttctagtaccgtgatcccggagggctaaacagcgtgttcctataagactagcctggtttccctttttattcaagcgcaccctataaggaattaactcacctcaaatctcgtataaaaataaaactaaaaagagaaactacctaaaatggaggtcaaacaattaatgtccacaatcaaaggacacgataatgacagcttaattgtatcctatctgcctagtcaatagatcaatctattcatgggctgagccttacgaaaacaaactaactttgtgtattttcatgtaaactccccattagagggaaaatggaaactaattataattcctataaatattataaaaacccaacaattcattcagatgaaaggttgaattctctgacaacacttgctcaggaaaaaataaagaacttatattcattgtattctcaaagacttttatagcaaaaaatatataataatattgactcgtggactaaggctcgttaacatcccaatcacataaaaatccagcttctatattatatttctttcattgaattgtttattttttcaattctaattgcttataatttgttttccaaaaatctcagtaaacaacaataaagtacctaatatggctaagaggtaaaaaaatgaagaaaaatattcttccatcaaatgacctacgggtgctaattataacctcttag

SEQ ID NO: 229720 - DNA, 1706 bp, Cannabis indica
ctatcaaaataatgaatatgaatgtctttttctcctattgacttggttttggagtataatatctatcattcctttcactcttcattccatcaccatactatttatacatagataatatactgtgttttgtaaaaattactggttataaattaaattttttattttctaaaagagtactaaaaagtaatttaaagtgattttttgtcaaaaaaaaatataataataatttgatttagttagacttattgtaacaaaattggttaaattaaaaattatttttaagtatattatattaaaaaaattgtctaaaattaagttcagattttattgatactattttaaaaattacagggcttaatttctcatttaacaaattagaggatttaatcgataacttttataaaatattgatctaaaatataagtattaactcctatttatatttagagaattgttaaaaggtactaatgatggtacttaatactcttatcatactgttattggtataattaagtatcaattctcatgtaacttttaaaaaatattgctaactaattatgagattccacctataaaaagtgttaagaaccatatatctgtatgcatcaaaacgaaaaaataagatatttttttttggaaaaatatgttatttgtgatttaaatgaagtacacgtttttgtccacctttcttggccggtggttactaatttgacaagtttagtattttgatttcaatttttgaaattaattaataaaatggattataagttagaactaaacatgtttaaatttagaatgagtggtggtggtgatggtagctggttatactaaatttactttactataaaataattttgtttcaataaaaaatgaaaattgacactaaaataataaaccaatgtattggtttgcttccaattttaagattgaatctcccattggtaaagttttgctaagtgaactcaatttcttatttattttttcattaaaatttatttcccaaatcaccctttatgtttcctttaaatatctaatatacaaaaacaattaaaactaaatcctccaataattattaatgatgctaatcaaaaattcatttgacatttttttttaaaaaaagtagacaagtatgattttgattaaattggtcaatcataatatatctaacaagttaaaataacgagtaatttacattaataatactttaattatatttttagaattttcgtacatatttaatcattaagtattaagttaatgattacatgatcagacatgaatgttaacttgacatacttacgaaaatatgagaaatataatttaagtattattactataaaaaattaaatataaatatttatctgtcactaaaaattaaatttaactatttatatcacaaactattctaatataatttatatttacaataatatttatttatttgtgaaagagatttcttttttcatttaaagttaataataataaaaagaagaagaagacagaaaaaaaatggcaaaagtgtaaaaatatgtaaagttagtgtcttttcttaaaaaaagtctttttaatggcctctctcacgcccaacattgcctacttcggttgcgtctgtcttcttctctattaactctcttctcttctattctctcactgcattccctttcttcttcttctttctcttctttgctaggctcatttcatcacat

SEQ ID NO: 229721 - DNA, 612 bp, Cannabis indica
aaatattgctccatcggcaaatctgtataattaaacactattggatgacaaataaaagttcccaaaataaactagttataagtaatcatactttgtacgttttgttttggctaaactaatatatatacattgtacgaattaaatgcctgattaattacaaagatttttaaggacaaaaaatatgaatggtatgttatgactctctttctccagtatataactagcactaactacgtcgtataatactaagccaaaactaattggtaagattaagatttttcttagccaaaaagatttagtactgatatttctaattaaaaggctttcttttcttttcttttcttttcttttcgtttttttctatacaaaagttattggaccgacaacgtagtatataaacatatggagatcgcaattcccttggctaaaatactatatatattataatatatactcatctcctctatatatttttgttcgtttttcaattttagaaagtacacgaattaaaaataaaagcaatgacaaatgtctgtagagatacagagcaaggcagagttgatagaaaaattaataatgaactcaagatctatttgtatataacatagaaca

SEQ ID NO: 229722 - DNA, 1632 bp, Cannabis indica
cccccaatggcgtcggaggttggtggagcaagttgcgtgcacaaggacatgtctccttttttgggtgtgatgccatgattggttccaaggctgaaaacatccaccagctatttgtgcaatctacatttttgtgccttttcactctaatgaatcagaaaacaaattcttattttgttggtacagttcctccccagcatcttcaatcttcattgaagcatcatctccaacaaatacattgatcagatcatggagaacatgaggtgagtgatcacaattgaacaaatacacaatactaatctaattgatgcaaaaatagatacactcaactcaggaagaagaataatcacatgcaccaaaccaacccttgccaccacaagtgccaattcctcctttggtcacttgagccaaagatgacatctttaaaccaaagatttatctaagcaaagaaaagtgagacccaagtacaaaagaaccaagaactctagaagaagctctcagacttaaaagaatggaacgatgctatgcaaacaaaaatagttactttgaaggcaagtaaaacttaggtattagtaccatacttagctaagtacaatttaaatgggaacaaatgtgtgtacaaaaaaaaaaaaaatacagccaaatggaaaaagctaaaaaactaaaggccaggttagttgccaagggctttcactagagaccaggtattgatttcaataaaaccttcaatccagttattaaggcatcaactataagaattattctgactattgtagtatcaaataactgggcaataaggcaactagacataaataatatcttcttaaatggatacctagaagacgatgtgtagtatcaaaaacctaattatgtctataaattaaacatgtcttgtatggcctaaagtagtctctcagagcctggtttgacatattaaaagcacattgttgtagtggcatttcagaaatttccaagtagatatttcccttttcttctacataacagatcaaactattatctttggcttaatttatgtggatgacaatattattacaaggaacaatgtaaatgaactcaatgctttcattgcaaagttgaacaagcatatctctcttaaggaccccaattctctacattatttcttggaaattgaggttcacagagatgatttagggttgtatctcactcaaaccaagtatattactaaactgatagagaagtatgatatgttgaacattaaaacttgtcctacttctatggtgacttgaaaaaccattttcaaaacatgatggaatcccactgtgtatagaagggctattggagcactataacatctaagtcatacatcgcatgatattccatttgtcatcaataagttgagtcaatttcttctatgtccaacaactagtcactggagtggagttaaaagggtgctgaggtacttaaaggggacaattcataatggacttcacattggttactgtgaaagactctctctggtaagatactcaaatgcagactgggcctattgcccagatcatagaagattcattatagggtactatatttattttggtgattctctggtgtcctagtcttccaaaaaacaagatatagtctcaaagtcaagcacaa

SEQ ID NO: 229723 - DNA, 1901 bp, Cannabis indica
gtcaaaatgtattaggggacacctgcctgtcaatttgttttttttttttttacaaattaaagtcgacaacgggcatatttacttaccagaaatgtgaatgaatagtttggtattgattctcatacaattatttactaaattttgaaatggaaaaatattgagacccacacaaattagggagaaacaaagaaaggttctccctctattttttatagggaatacttttccctttcctaacttaatttattttaattttattaattaaaaataaaaaagacaaatataccctttaaaagtctataaacagaaaataattacataataaaataatatgattctgggttttttttttcggacagtttagtaaacaacataataaaatattgttttcgattatttttattttaaactgattcatttctctcattaattattctgattccaattacagtttagtaaacgcaccatcaaaatatcaaaactcttctaagtaattacatgttcatgcacgaacaagtgtacaaccagtgacagatctagaattcaaagtgagggggggccgtattttttaatgggatttagaaccccttgtcctcgaacctatatgctaagtagtttaacccattacaccaaagttaatattatacttataaatatttatttttttattacaaattacatgttgtaactaattaaattaaatatatattttttttcccaattttttttttcaggtaaatgacttccgccttggtttatatgtgggtccaccccccatgtgttcaacaattatgaaacttttattaatcataatcaaaaaacagtacaaggagtttttctcaattttttatttatttttattgagtattgttgaacacacacataacattgtatgttaactaataatgttagtataattgtgtagaaaataattatacatctgtaaaataaaaatttgtaatttaaattatcattgacataaacattactatagtgtttaacaataccatgatccatgagatgatgtttttactagtagttagcaattttatataatagttatttgataaaaatttataagaattaatattgaattaaactaataacataataacaatatgttatttcttttttttattactatatattgtgctcctttaaatagaatggttaatttggacaagtttgaaaggacactccttaaaacaggtaatgtcttattctttcgattggacatattcgtaggtggataatggatttggtatctcgaccatacgtggggcccagaatagcattcaaatttaattgagcttgaatttctatgggtccacctgttaatgaacgcgcggcgcacacgttatcaatttcgaattggatttgaatgtcgtacatatacgctgattgccacgtgtcaaatggtggcacgagcaacttcattcacagactcacagtgctaacatgagccttggacgtaccctgcaattagataaacaatattaatgagcatttaaattaacgtttattggggttgaactaatctagagcctaccttaattaataatactaaaagaattgagtagcaaaaagttcatcgaaactcatgaattactcatctattaaatattaataattcagatattagtcggtgaaaaaataaaataattagattatttaattttacatgtgaaaggtacaaactatattcccctatgtatactgtttgagaagaaagaaagtacaaaattggactatctttcagattttctttattaagcattgcttaagatactttatggtatttaataggggtgttcattagaacgttcaaactgtcaaaacgttcaaactgtctgcaccacacaaaaaatatgcggttttaaattttttgcggtgtggtcgcg

SEQ ID NO: 229724 - DNA, 1014 bp, Cannabis indica
tgtgtctctgacacatcttcattagtttatatatatagggacatgattttttcccgtgattgtactttcacaaaatgtattccgtgatttatgacagccgttagatgagagagttatttgatctgatggttgagattgatttaggggtaattaaggttaagaaattgtaacgtaccctaagactcatctaatacatgtaccatgaaatacattctgtaaaagtacatcacaggacaaaatcgtatccctatatatatatatatatatataatatatataatttctcaatctcatggcggcgtaaccggtttttttcattcattgttaatctacttaatttttgtaataagttatatttattgtctctgattagtttcttggcaactacattaaagcttctctcctctacaacttgcacattcactaaaaaagcaatgctagtttcggtaccactaaaacatgactttagttaattagttaacgaaaaataaatacgactttagtcttattaatcagggctaatcagataggacaaattagttggcggccaaatatatgttggtcaaaatcaaatacaacatgaattaataaactaataatgagatatataaataataattatttatccatgttatctaagacttgctgaactagactccaaatgaaacgactaaaactcgtgcgattaagcattttaatctatattttattgggagaccaacgtgttaattgatattaaatacaatatttttgtaaaaattcatgacgacggctatatcttgtaccaaaacatggaaaatctttaaaaattgatattttatactgtgttaaattaattaaagttaaacacattaattaatttaatttatattaaatatgtgttaactatttttgttgatttaattagaggttcaatttttttataaaataaaatttaattgatatgttaaattggtttaacgcagtatgaaacaccaatttttaaccaaggatattgattaatgcaaacgccct

SEQ ID NO: 229725 - DNA, 2393 bp, Cannabis indica
actagaagaagaagatgtgacttctccgatggatgttgaaggaaaaggagataccaacgaccgtgagtgtacaaaagatgattttgaaacgtatgacgaagatatctgtacaaaacagtggcattgaggcaataagctgctaaccatgagactaagttagaagaaaagaaagaacaaaacaaaagaatgcaagaaatattgatcgtcctgaaaaagacgatggaaaatgtaggcattcatgtgtacccaactgttgtgccatctgtgcatgaaaggacgggggaatgaccttctcagcccgagggaagccaaaggcataaggatagggaacctagctcaatcaggtactcttctgaaagaccaacccctaaggtgaatcctagggttgtacctaaaagaaacaaaacagtctgggacccacaaaaaattcattctgatctcccaaaagggaaaggcccgcggaggggtaggtttcccaagggaaagactggcccccaagaccgtggagatcgaaggagcatgtctgtgcacaaagaaccaagggaagagagggggtttgccaagaaagaccccccagtcgacttaggaaaaaggctcaatgcaaaacacggagacctcatgaaacgccttgaccagaaaaagaaaactactccaacctcagatagtgtcctaaatgaaggattttggctgaactcactatcctctagaaagacatagaaagagtctcccggaggcagaagggagatgactcagaatttggctgtgaggataaggagccttgtgccagaaacatactcgaagcagagctcccaaaaaactttaaaatgcctgaaacaactttgtacacaggtgacacaaatccaagtgatcacctgtcctgattcaacagagtcatgacagtcttaagggttagcaatgaagccaaatgtttatgcttcccactaactttgggaggatccgaagaatggtttaaaaaagttagaacttgggtctgtgaattgttggaataagttgtaaattaatttcaaaagacagctcgttgcagtcagaaaaataaacctcgaagttagtgccctgactaacatcaagtagctaaccttggagaccttgaaaaatttcaaggaggaggcttccaaaatgaagaaagttgatgaagaacaatagttagccctgttgcaagctggtatccagacggggactcccttctagaacgaactccaacaggaaggtgcgaccagcctttaagattttgaaaaaaaaaaaagctcagaaatacatcaatttggaagaggcccaaataatagcttttggagggtattaccctactggaggccctgggtatgcttctgggatgcaagttcccaggggggtgcttcatgccacccctcaaacctatgggatgcctagtgtacaattacaaatgccattagggtattctcaaaatcttctcgtggcaccaactcactctaattatgggttgcagaataatggccctactccaggagcatgtttgcagtaccccgctcagtctgcttcacttgcggcaagtgcagctatagctccccaaacctcccagagcaaacggtcatctaagggaagcactcgaagtgagaacaagaagacaaagaggccatccggatacaacccttagtatacctagtatactaagttggtggatactcaagaacatgtgtacgtggctacaagataaaaacattcactaccgaaggccacctcctttttttcgagatagtttatgaagagatcccaataaaagatacaagtctcataatgatatcggacatacaaccaatgaatgaaaaaatttgaaagataaaattgagagcctaatacagctaggacacgtgtatgagtggataagaaagtgtttgcccctcgtttgccacatatgatagaggggcaatccacagctcaagcacctcatagagctcaagctccagatgtgttggctcctctggtagcactcccaccaaatcaaggggtaccacccaaacagccacctaggccgaatgggagagtactacaatctgcggaagaccccatatacggggctcaaccccagggccggccctgaaaaaaagtgggcccaagacggttttagtaaattaaaaaaaaaagggaccttttgtatatgtatttttttccatgtatgtaattttaaataaaattaaactaatatttaataatataaatacattccaaaccaataaatcatcacataaacttttcaatgtattacttaaatattatacgtcttgcatttttagatgcaaaagtattaattaaatttgcataatcaagttttgcaactaaatcatgttcaatggataacatagctaaatcgcttaatctttcttgagacatggttgaac

SEQ ID NO: 229726 - DNA, 1642 bp, Cannabis indica
taataggattgcaaatcctaatataaggtaaggcagctgccttacctggcaattaattaaaattacttcattatctatatattaacaatccacattcattagattactagattgtcaaagtgaagtgatgacttttcactctaaagctaaaagtcacgtgtatatgtatattgaacttcataatattagcatgcatattagcccactctaactttctttgagtctctttctctatctctctcagaatttatattacttgaaagttttttcccactaacttttacattgtaatttgttgtcatacagtgatgaccacaacaatcaatatatctaatgaactttctcatataattctattgttggttatggatgcaataagagctttgtactatctttctcataaatatgtgttctttttttatttatgttaaactttatgaatttttcattgaaaaattcaatcacctcattctcttcgttttttgacattaattaattttggagaattttgtatataagactttctctttgaacaattctactagtcctccaaaactaggaaatttaaacaagttagaacaattgtaagttagtaaggctttgtttttattttattatttcttcttctaataaagaatttaagttcttatttgcctacattcagttatatatagtacattaaaccaagaagtactccattgagacatgaatcatgtaattgattcctttgtttttattgtttattctataggcttattaggaactattacgaggaaggtactagtgatgatattgatactatttctataatccattaactttacttgctaggttgatatacctattagaattatatattacttatttaaacattcatccttcacatgaaacaaacgatggagtttgtatatttaggttggctgctcattagtgtttagccaagttctgctgcttctgcatttgaatagtatagatagcggtggataaataatgtatttaaaagaatgtaagaatatatcaaaggtacgtgaaaaaaaaaatacaatttgtaatcaaaattaaaaattctcatattaattgaagatttttctgttttttttttgtactatcatcttaaagatttttttttatcaaagaagataccaaaaatatatatattaaattgggaaaaaatgaattaattagaataaagaggtaatgagataggaataagaaaagaattttcaaataataaattacctccatgtcatcaagtaaccctaccactagttttaaaaaataaatttgagttttttaaaatatcaattaatactattaatgtgaatcattagatttaatctaatggccaataataaaatactcatttatgggtaatactcatttagagcatacctatatatatatatatgggtaactactcaatgattatatttttattgtaactaatagttacatttgttttgacatgtaatagcaggttactaataaggtaaaaaaaaatttagaataaaattaattattttcttaaaataattaatttttaatttaaatatttaataaaatctatttttagaaattaatatgtataaataattttttttttatatttaaatccctactatttttttaggggaattacccc

SEQ ID NO: 229727 - DNA, 1022 bp, Cannabis indica
aaaaaaaaaaaaaaagagacaaattagaatgccaaaagcgatagaaatcatccgatcagagatatgcctaaattaaaatacaaattagcagatgacatgtaggaccaatcttaataaaaaaaaaaaggggatgtaagaccaatcaaaaacaaaacagcaagtcgaaatgacatttcatagaaaaagttatgcaaaaaaataaggtttaaacataggtagatatcttttattatgggctgtgtttcactataaatagttttacttttctcttaaatgggaaagtcacgggttcacttactccaacaagaggtctttgacaaggttgtctattatcaccttacttattttttatttgctcttaaggattatcaaggcgcgctgctgcagaacttagcgggttcaaactcactagacatgctccaccaatttctcatttactttttgttgatgatgatgatagtctccttttctgtcaagcgaatgagaattcttgtctagcaataaagagagtcttggatatttgtcactgggcatcgagtctagtcctcaactttgacaagtctgttatgtcattttcacaaaacacaacgctagctgcccaagttttcttccacagacagttaacaatgcccatttgtgagtgccatgagaagtaccttggtctaccttcatactctcggagagataaaaagaaacttttcagtgacataaggagaaaatatgaagacttatgcacagttggagtgaaaaaatcttctcagccggtggacacaaagttcttctcaaagttgttgtccaatcaattgctacctacgctatgagtctgcttgccaatttacttctataatcaacttgaatccatgatggctaacttctggtggggtctaaatgaaaatgactctaaaatacattagcgttcatggaacctactgtgcaaaagaaatgatagaaaaggtatggggtttcactcgtttgtacattttaatccggcgttgctcacaaaacaagcttggagacttatt

SEQ ID NO: 229728 - DNA, 801 bp, Cannabis indica
ttattttaatattaaaaattaaataaaaagtagtgtagtctagagtgtcccactatttttagtggaacactatagactctcacatatataggatatcatttagagttccattaaaacaattttgtgtccaaactctactatttttgagatttttagtgtcccgttggagaagttcttactttggtgcctattggatccacaaattatttttaatcaattaaaaaaagaaaaattagcttcacagggtgctaatagtgagcactctttcttatctcccttttataagaaaaattagggtcagccctgagctaagatgaagaaggcggccgccttaagcccctcaccgctcaaggccccatttcgaaaaaaaaaaattaaaatatagttagtaataaataattaataatacttttaaagctaattatgtgttgtagtctagtggtaatttgattagtctaataagttgagagttcgaatcccaatagccttactttttcactggggccctaatttttatttttgtctaaggcccaaattaacatagggtcggccttgcctataaaatattattcaataaagtcgtttatcttgagtatcggatgatcgagtctacgtggcagatgctagttggtcagcagatctaactgcatacttaccgactaacctgcatctgccacgtagatcgaggtggtcaggatattcgggataaataacagggttcaatattaatttatgagaacctatttgggtctcacttgactcacaagtaccactataggcaactcttttggagttggccta

SEQ ID NO: 229729 - DNA, 2425 bp, Cannabis indica
atcatgattatattccactgtgctcacaagactataaccatgaataaatacatatgttctggacttaatagaatttatatattaaatataattatgaaataaatcatgtgaaccatgcaacataaaatgatttctaatctttattaattagtaaatctgattatattgaaatgggttttatttagggcacaaaatccaatagttttttcaattcagccagctctacatgtgccatgcggtaaggcataatagaaaatggttgagcttcaggaataaaatcaatgaaaaactcgatctccctatccggtggtaatcctggtaaatcctctaaaaatacatctgagaaacaactaaccactgatatccaaggaaaatggtctaaatccctagactcatcctcgatcgaaattagattgccataacactctaagtttcggtttccacctaagcattccctttagatagtattttgtctcactccactcatgttggctcggtaaacaatgaaatcaccacaaggggttaaaagagtcactcttttgtgtgaacaatccataatagtatggtatttagacaaccaatccataccaagaatagcgtcgaattaccccataggcaacactaataagtttccagacaacttgtgtaccttaaacacaatacaaactgacgtacatatggtggatacctcaccgtgtcctcctataggtacactcaaatgtaatgcaggactaaaagttttacaactcaaacccaacatactagcaaacataaatgatacaaaggaatgaaatgcaccagcatcaaataacatatgagcccaagagtttgagataagaaccataccatcaacaactccctaatcagaaacaccctatacatcatcaaccccaagagcgtaggcttaagcggatgaattttgttttgcttttccctttccttgattagaatggcttgtacttgcatcagaccctccaccttgattgtaccctctttgacccccactaggaataggagtttggaaaccttgtgagtaccccatgttgaatcttgaaccttgtggcctgaatttatgttgatactgagactgctggccgattagggtgtgaaactgtaggaggaagactgagactggttggtcctgggatgtccatgaaaaggagtagactctacatagctccctatgggtcctttgtgagatgcttgaaatttttgttgttgttgtgggtaatctttcttcttatcaccttattgaccacaactgaaacactcgtatggtccactacgagtctttccaaataaaccactactggtgctacccccattaaattgttgtctttgggaccactgcccttgattcttcttggtcatctttcagtcatttccttttcctctgcttgtgttctccttctcattcccttctacatgagccttaatttgcaagactactgtcacacactcagtcaggttgttaaaggtcaaaggggctatttgaccacgtatcacagacctcaaacgacacatgaattgttcaatcaccaagggttggtcaacaacaccataatatgcataagaggatagctgtacaaacttcatgtaaaactcattcacagtcatatccccttgtcttaaaccatcgaatactccaataagagccctcatgtgagatgaactaaaatattgttccttgaaaactctctaaaaatctcgccaagtcatcccatcagttgatattgtcctagacacggtctcccaccaatctgctgcaccaccctctaacttggacacaacaaaagtaacttggtattcctcaggtgttcctattgcattgaaatttttctttatatgcctctaccaccttttagctaccacgggatcttgtccaccctcaaactcaggcatttggatccgatgaaagatctgaaaatgatgactctgtcgagtggcaggatccatctgctgagcgggaactactctttatgctttgagaagagtgttcatagggaattcaacttgtggaggttggacattaactagaggggcctcttctccaaccattctccttgtcttccttccttttagaggcattttcttaggtctgtgaaccaaaagctaattagttagtgaggattagatgctaataatataaatatgctttatacatataaatatcaagatacttattactattattatttaaaataaatatcaactatttgttgacacactttgaggtaatgaaatccaatgctctgataccatttttctatcacgacccgagccttaggtcgtggcagatatgtaatatccataacttgggtggtcaaaggtcacactctgccccttgtagaaagataacacttataaatgttccttgaatttatatcacaaaatacttatctaaaaataatggattaactcctat

SEQ ID NO: 229730 - DNA, 2745 bp, Cannabis indica
tttttttttatcaacatttattactgattttaattcaaaagctaatatgagatttcatgtataattattcgaggagcattgatattagatactagtggtgcttagtacttttgtgacatgttgcgttgcgattagctaacgatacttcttaaaaagtactatattaaattatatgggacccgatacttaattagaccaatagcaatattgacacatagaaaagtgctagacaccactggtaccctttagcatttcttttattcgagaaccaaacacatgcctaaaaaaaagatagtttttttgtttttaattttgggtaagtctacaaaatacttttgaaggggtgtttcggcatcaagacaacattttagctaatttttaatttttttattgaacatgtatattatacttatttaagactactagtaaatttttagaagattcgaataatttacaatttatatatatacacaataaataactatttaaaaaatctccattaatttttactatggcaccattaattattattattattattattattattattatttgagataagcaccattaattattacacatactaaattaagatatgcatggtggcacacttaaagttacacgtatttttttttttttatcaaaggtaattatataattaattaaaattgatgcaatctccatttaaaactatctataatatttaactaaaattaaatagtataaaaaatatataatttaaatatatattgagcattaattttaaacctaaattataaatttttgcctttgaattttttagttcgttgaaaatttttcttaaattattaagattgttaaatttaacgacttttattcaaggaattattacatagaaaatataaattgacattttatttacaaaaatacattcataaggtaaaaataacatttataccttttgtgtgattttaattaccaaaataccacttacattatcatcacttacacaatcagacgatggttgcagagtggtttttgcgtggttgtgcggtagttgcatcagacgaaggtttcaatcagacgatgattgcagtgtggttgctaggtggttggccgaaggttgcatcagacgaaggtttcaatcagacgaaagtttttgggtggttgctaggtggttggccgaaggttacattagacgaaggtttcaatcagatgaaataactgttagcaaaatgtttatgcaactgttgtgaaacattaaaaatcacaacagtgtttctacatacgtaactttatccacaagtctctttatgatttaatatgaacaaattcaccattataaatttggaaaataacaaaaatacaccaggataaatattttactatagtatcgatgtatttttttgtaattatacttgagttggattgtttgggaacttcagttcaactttttgtagatctgtctttcatgaatctaaaaaattgaagtcaagacattagttttatgcaaattaaactggatttccggttgaattttagtttcgtagtagtttttctacactttttttatgaattcgaaacagtccatgttttgattgaatatggtcgtcttctcaagtgaagtcgccagaaataatggtggttatctttctggttgaattttcgtttcggttgcgttgggttgctgcgtagttgcgcgatagttgccgaggaagcatggatcctgggttgaaggtgtgtgtaagtggtatttgtgtacttttttttattttggctgtatatttgtttatttggctagcgggaagtatttttgaaatattgttatttttttttttggttaaaattaaaaaaaaaccctttattcaattgtactaaagaaaaattgtgaaaaaaaaattaaaagcttaatttggtacatattaaagtttaagaagtataattaatttagtaaatatcaaaatttaggtttagggacacaattcagtgtattgacactcgctaacaaaattaaacgaaattagataaaaatctttaaattaaataattttaataattaaaagaaaatttttaaccatttaaaaaatttaaaagtataatttaatatatagtataattaagtgataaaaattataattagtcttattttaacgctcaaatgcttatctaaagaaagtcaatgaataggttgacgaatataactccaatagttaaaacaacaagcaaattattcaatttggaaattttaggtgcaatagcataaaaaataagcaataaaaatcaattgaaaaatagtacataaaggtgttagctatgtcaaagcaatataaaaatgtatatatgatttttttattgaaaaatatatatatgatttaaccaaccataattcatttttttttttgaaaaaaatcacaattgaatgcttgtgtataatatttttgtgtcggtttaggaaacttacatagtagcctatcacatctaggtgcatcactataattcggtattgtagctaccactcaaaatattccaaatttatttaattcttgattttgatatttctatttttatatcgtgttatgtcgtgtttaaatcaaatttaatcgtaatttaatgttaatttaactgtaattttcgaaataatttagtcttatataagtcactttgtttatagtgactcatattctgactcggtatatctttagctagacaattaacttgttgattgaaaattcttctgcactgacgattatcatagtgtgaatt

SEQ ID NO: 229731 - DNA, 714 bp, Cannabis indica
aaaatcctttatttgtatttatatttgtatatgataataaagaatatatttttagtattatggttggaataaaaaataattttagagctaaaattacacattttgttgttagtttaatacatgttatctgtattttcggagtgatgacgtgtactctaaaattcaatatcggtcaaggacatgcccaaacctaggcctaatcaagtcagttatccagcccattggcaatgtcatgctacggttctagatttgggcgtgagtccagctcaccaacctaacaaggccagaccgctttggtctaggagatgtcgttcgacccagaagatgaaaagtccataaggaccaatctggatatcttcatcgagctatttgaatatggacaatcgaataggcactcggaaagcttctagacatcaccctacacgataccctccagacaccgggttccatagtgtcaaagtttgctccctacttcggactcgcggagtgcgcacgctaccaaaagaagatcaccattttatccaacgccatattctttaacattctcggtatgggtgtggatgcacacgacacctggcatccttaaattttctcctcttgtacggacaatcctcacctcgtgaattaaacctcactcaagtggcccaaagtcaataactgttgtattttaccccatcaaaaggcctagttgatacctttaaatcctactgggtc

SEQ ID NO: 229732 - DNA, 1834 bp, Cannabis indica
ttttattttgtttttttttaaataaataaataaatcaattacaagacatatttcttttatttttttaaaaattaaaaaaataaggtattttaatttctatgtttaaagttttaaaaaagaaatcacatataacatattcttagtttatttgtatctaagaaaacaaaaaaagttatttgtcaagaaaacaaaaaaaatgttataattatgatttaatatgtttgagggtaatagtataataatattagaagtaacaaaccaattaattatttttacgtaaaaaaatttattttatatcatataatttttatatatttttttgtttacttttaaaacttatttgtatacatcttagtacttaattaattatttttgaattatattatgatgttataaaagagtaacttatcactatattaataattaaatggtcacaacaagatttaaacaaatatatactatggcatacctcagaaatcacgcaatgcacatgagcaatatatttgcactctccacaacagtatacgcgaatttgtggatttctttgagtttcacaaatatcgcaataatattcaccaaaacaatcttcaatgaaggaatcaaagtaaggagtgcacatgaccttcatgctttatagtagaaggtagtggaccacataataaatgaagctcgaaatcacaatcagaacaccagaatttgaaggactcaattttttgaaattctttagaattcgacatgactgatggcttaaaacaagtgtcgtaaacattgcattgttcaatttcaaatgcaaaggatatgttcttgacaaaggaaagaggatgctcatgatatttataatctaagactctgataactttgcaatccatacacaattgaaaatcacattgaggacattggaaataaaaggctctggggtctttgtttttacaaaaaaacatttatcctctaagtatcttttaaaacgaagagagagacaaccgtgattaggatggagggatgtttggatttgttgtgggaatcggtcaatgcattgttgatgaagaaaatacttacatcttttacaaccataataaactcgatcatctgatggtgaatcttcagattgacatacaaagcatctagcatgaatatttttataaatagcatcatcaattgtgtcaacaagtagtagcaagtggggatgagtagaatgttggatgcaattttgaccttcaggacatgttattatggagtttgacatcaaggcacaatccacatccaaatcaaaattacatttaacacaactgaacatcaaactcattccaaagtatcggccacaagaattgcaaccaacatgatatctttggcgaagagatagagggtgacgaggatgaaaagggtgattaagttccttaatcatacaagacttgtgaacatagtatttacatgtatgacatacataaaatggagctgcaacagaagactcgcatatttgacaagtaatttggttattaccaatctcactatcctttaccaacaaaacatgtttttggggacaaaagtattgttgagtagtctccatttcaatctaataaacacaactgccaaattaatcaagaatattagttatatgttttaagtaggaatactaaaataatttaaccaaataattagatatactcaccaaatgaatcaaggaattgccaggcaaccaacttaaataataacaaaagttcacacaaatcaatagtactatatgctgtgtagtggatggactatgtttaatttcttatgccttatgaagctatggtatggtatctgtacttatatagtgaaccaaaagacaaaaaga

SEQ ID NO: 229733 - DNA, 1211 bp, Cannabis indica
cccccctgaaaaaaaaaatcgagaaaaaaatgtatatgtattttaattagttacaacatatatttgtattaaaagatgatacttatagacatgatagtaaccttagtgtaatggttaaggtagttgataaataggttagagggttaaggttcaaatctcactaactacgttttatattttctttttaaatttatttacgtcccctcactttaaattctggatccgccactgggtgatatattaaattaaattaagtggaccacttaaattttttagacaaatactagtttacacataatttttaacgaactagtaacagatttagttagtacatgagctacactattcgcaacacaagaaatgaacaacaagtaccaccaccaagtgcagagaaataatctcctcaataataggtttgaactcaaaattagaatctagattttttaactcaattacaaacagttgaaacattcgtctccgccctcctcactttgaaatcaaaattagaagcccatagaaaatccatacaaagagccaacaattccgccaccactacttgaaactcaccagcacaaccacttatttatacgcatgtatacataattaacatgccatgacattgtacaagatgacattttcaaaaagtatagcattgatatttagtacgaccataattctatcaatatggtgtcttataattaattaataatttttttttatcttttgaattaaattatgtagaaccaaaaattggatttatcacgtcatgtgatggttaaggtgtctcttagcatttgttaataatgtgtagctgtatgagttgagtctcttatttttaagacatatcacaacctcgtgcaggtggttgttgacccccaaaagccaccacaagaagaaatctcatttttctatccaaacattaaccaaaatttagagaaagattacataaacgtccacaacaccattaagttaaatttaaatgccgcgcccaccacctatttgagttgacagagtcagtataagacacaaaaatgtttgtgtatgtttgacatcataactaaaaaattatttcttgtttttaaaaatagaaaattattttttgaaaataatttggcttatttggtcttgtttttttaaaacagttttcagaaaacaaagttacaaaaaataagaattttgaaaataatataatgttgttttctgttttaaaa

SEQ ID NO: 229734 - DNA, 1657 bp, Cannabis indica
tgttcattatatatataatgggttcgcatgctacttcttctaattgagtcaaactgataaataaatatctatgtatacatctattttttcacttttggaataattttctctacctcacaatccaaccaacccaactttctttgcatccaatcaatattagttttcaaacttccttttccaatcaatagataaagtttttagacctaaaaacaatattattaattatctttcatcccattaagttttttatcaaacaaacccctaaaaataaacttgaactgaattttacgccaaacccagataattaatttttaagatttagatataatatatttagaaattcaatgactcgtacacattacatgtgggtttctaatacttcccacaattatacatttctttccacaactaaagattaacacataaacacataatgcttgacaatttcttcacaagaaccaaaagttgttctcagtttcttcacacaacatctacaatttaccatattacatcaacataatcaaaaataaataatatacgaaccagagaagagaaacatcaaccaaaacatttcaccacaacagtaaagccataaataaaattccccagtgactcctccatcaatagcataatgagataagtacccaatcaaactataacgctacagcgacaaaaacaaaggtagcatacagaataacaaatcaacagaacttttttgagaaaaataaaataaaaatctagacctgtgcttgagccgtctcaatacgacatcgtgcgaggggaaggaagcgctggaggagggcatcaacgatgagcttggcacctccagaatggacagtattgtaaatttgactgcaaattaatgaaagacaaagttaaaacaaacacactaccacttaacaataacacaaatccatatatatcaacaacacttacagttagttgggtcaattaccaaactgagtcaagcctatctgtccatttcaaagtacctaagcaaataattatcccagaaactgagtgtacccctggaattctctgaatgctaagaatgtacccatcttcagtggttacctggaataaaccaagaaagaaagaaaaacagtcaacataatctgatactatgcagagttgattgaagggcaataagttgagatatagaaccatgtgctcttgacaaacatatccattaaagcattgaccatcataatatgttttaaaatggatttttaggataggtgtctcggtacacccaacccaactttaataaaggttgtgtcttttaataccaaataaataaaatacagataaatacaaaaatgggtgctcacatgagaacttaggagctgattatcatggacccttttctccatcaacagattgtacaagcggttttactttttactaggcatctagtgagacacaccttgtccctactgtaatacaaaccaagtaaaattgaatttttttaagtaatgcaaataagaaaaagctattgctaaacacatgggatgcatattgaaattcgtcactacatatgtaaatgaatctacttgctgtcggaaaggcaggctttgcaacaactccaatatatcctctgatgaccactgccctgtagccccaaaaggaattatatgacaaaaatgagtaggaaaat

SEQ ID NO: 229735 - DNA, 1867 bp, Cannabis indica
catgaatgtagggattgctcgtgtgcttcacgatatcaatcttgaagttgctaagtcttgatacattgctcggagagataacttcgtttgttttctggatcatctgcccttgccttgctcggccaggcaaactttgtttgtgcatatgcatggctgaggtctgttcggaatatctctccagccaaatgtagagaatagcaaacatgtgtcaccagtatgtgttgccacatcgtagtacgaaaaatggaataccaaatatatatattttagttagttatacaacatatattagtaattaaaggtgatatatataaatataataatagatttgatatgttagttaggctatctcgcacatactatagaggtcaagggttcaaattctagtaaaagcatctttacttttagggtaaatagcagcataagtacccaaaattttaagtttgtaagctgcataaacccaatatttatttttaacggcataagtacccaatgtttgtaaaactgtaattttcttccagtttcgtcaatacagactctgttttaaatttattaaaagaatatttggaagtaactgacactacatatttctatctagacccaatgatctagaatttggattttatatgtgtcatgtttaagacaataacagagtatgtactgacaaacctagaaaaaaaaatagttttacaaacattgggtacttatgccgctaaaaataaatattggatttatgtcacttacaaactaaaaactttaggtacttatgccgctatttaccccttacttttaatattcagtttactttttccctccctcacaaaaaaaatgtatcttcccctcaattttagttctgggtccgtctgtttaatatagtgttgattattattagtgcctaataacaatatttttaataaagatgtttagtaattgttgagaaaaaaaacttaatatgtgatttatctaatataaaattgtgattttgatacaaaatacataatagtcggattgatgaggtgttgttggattcatacttccaaaaaggatatgtgttactattagtttgtcattagggcatgttcaatggggtagttagggagggagcttgagagaatgtgaggtcaaggatgggtgaggtggaggagatgagaaatggtgagaaatttgtgagactgtagcttgtagaacttctttgtgcttgaaaagccatttacatcttaccagcttgtagaactctagtttcttcacaacaatctagattctattcttcctaagagattgcatcgcttcttgaatgacttggagccatgctacaacatttttacttctcatagattcttgaaagctagtgagttctaaactgtcaacctcttctgcaatcataagtgcatatgcaatgaatttagcataaccaaaatgattaggggcttttctctgtcttctctctccatctctagctaattgatagctgctgagttcctgctgatcttcattgttttccctttctgttgcctcagtttcatctggaacagcattagttggtgctgtaggagcaacctgctccacctcaatctggaaattttcatctaaaccagcttcgcggtctttacaagtgctcttggttttcatggccatttcatcttccttgaaagctacatctctagtaatcaagcacttcttgaattcaagctctaaacaccacactctatatcccttaacccctccagggtagcttagaaacatgcatctcaatgctctaagttgcaacttatcttgtctaacatgcacaaatgtcatacatccaaacactttcaagtgatctaagtttgggggtttacctgcccataactcttgtggggtcttgaag

SEQ ID NO: 229736 - DNA, 2680 bp, Cannabis indica
ttgtatcctcttttatattaacctgggggatatcatttaaactatatggctaaaatatcactttttttttttttttctatttgtaattaattaaacttttacaacactctctatcaatttctctattttttatttatggtattttctccgaaataatttatatttatatatataaatattaacaaaaatatccccatataaagcatttcaagaaaataaaaactctttaaaatagagaatgaatctacatcatttgttaataggagtattttctcttttgttattcaattttttttaagaatttccactataaaaaataattatttttagtgataattttttaatcacaatataaattttttataactaaatatgactttacgattatgtactcgaatctctacctattacacataactttttaggcattgattactattattttgtactaaacatattaattttttaattttaaaaatattattgtgtacctttttttttttttgaaaagaacaacaagttcattaagcagtggaaaaataattgggagtcacaggggattccctccccatgcacaaaactagcatcctgactagacaacctatagcactctttgctagcacatcagcaaacccattacaaatacgactaataaagaaaaacttacaacaactaaaaagcttaactaaatcaataacctccgacgagatatttaaaaagttccagtcaggtggacattagcctgctgcaaaggcgccaaccacaactttagcatcagaaagaacatgaatatcattccaagagcattgtctagctctttgcatggccatcaaaattgcagcagtttccgcttccaaaattgaccatgcattacccttagatgaagaaagaaaccagttgcccgtgactgtattgattagcactgcccctacactagcaacaccatctgaccaagaggcatcagccatagccacaaacctgcagggagttccaacattctgcagataagagggttcctcaccggtttatccaatggatgccagaactcacaaaagtttgattccaaattgtgcacaatagcaaggatgccctaaaccacttccctaattggaggttcagtttccttcggcatcagaattttcctcttcaagtttgaacaagatttcatagaagccaagaagctcatattgtctttaaagaaaaaatacaagtggttagtataatagaagagaaacgaaaagaaaagttcaacttcatcacatggagtatcaaccacctgatgatccccatccttctccagagcagtttgaatggaggtaacttttccatcttcctagtctaagaacacaaatattctccacgaatactatgtgtcactttcaactgaggtcatttcttctgactttatctaagacaagatgacagttgcactttgagcatcctcatcatcctacttgagtggcattgtccaaaattcatcagcaaaacaagtgtcagcatacacttgctggaaatacattatcaacccaaccttttgaagatttttaatattgaacaaagttctctcatctcactcccatgctttgattttgaatagcatgacttcaactctcctcttcatgtcaattagaggagcaggtcttttgaaagggccagccttttagaaagttatgtgtctcgatgaaaaaacaggagtatagaagtatttacgatgataaaggcaacaattaatcttggtaatattttctatatatgggctgaattggtaaaagggtaaaagccttcttctttgcgaatcgaacttctttttaagtcacaaaataagtttatttcatggagagttggaacagacaagtttctcaagcgataaaatatgaagaaggtggaaagtatcctataactatttggttttatcattattttataatttattgtagataaataatttttttctactaaattgttgccaaataataaaaaaaaattgtaaaattataaagttttttattttattatgattattttttttttgagaataaaattgtaaagatttagattattcatatagtacaaaatggattttactttatgtaaaaaaaaaagtcaaataatcatttaagtttagatatctatctttttttggacaaactgtgtctcaatattttaaaactaaagtttaaagtaaattaaaagttgaggaatattgcttttctaattattatacatgttatatttgacaacaacttaataataaaaaatactttccttaaaaaaatcaatttataaccaaatagaaaatccttaaaatagaatataccaaatttggaaattgatggactttatcattacataaatatgtataataaaattataagtggctttgcattaattacttaccaaaaaagtcatacataaattataaatattgtatagattattaatataggacaggatgattattaaaaacacgattttgtaattatcaataagtgtagattattaatataggacttagtgagttatacccttttttatattttatataaaagattcaagataaatatcaagtttatattattaaattatgacagagtaactgttttatttttaatgcagcactagaaagaagcatttcaccttaatgtgaattatttgtgtgtaatattctgtataaaatgta

SEQ ID NO: 229737 - DNA, 1325 bp, Cannabis indica
aattgtatatttcaatttattttttctcaaaaataataatattatttagtggacgaaaaccagatagtttatgatttcaataaaggacttgactgttcttttttataaactcaagaaacttaatcacaaaaataaatttctgagggaccaaattgcaaagtaatattcattggaagaaaataaaaacagaacttatcaaaatgaacaaaacctgtgtcccaaaatggaccttctatccaatccaatccactttgaagcttactttacatctatacttatataatagtaaaggccaagaagaaagaataagtatataatagaaacaaaaaatgacttaaaagtattttaatgttatactaaattcacattgaaaactttttgtcagtttgttaaaaatgcaaaacaactaattaaacatgaatatgtttggcgatttaagtggttccctatgacttataaggtttcataagcaaaacaatatacaacctcaaattctcatatcatatcctcaaaaaccacataaggataggattacattttacataactactctcattaccacacttcatctttcttctaacccttcattcatatacatatacatatttatatttatatatatatacactctccattattgtaattaaaagtggttcaaattcatagttatgtaaatttttagggtcaagcatggtactgtgaaaagaagaccaaattggctaaccaaaacagatcatatttaatagcttcaattattttcaggtacatatacttttcttcactatactttctccgcatcctttgttatataaatatacatatataaaggagttggtgtatttgaagagccagaaggcatatataagaattggtcacttattattctctttgaaatgtctttgttgggttactattaatttttcagaatatctaaaacaattagaaaacacccattacccaactcaaatccatgagactatactacttttgatatttttaatgatttaaaagtcaaaaagaaaaagaaatatgtcataatatgtgctgtattatatcatgcttaaccattatttaagtcataatcataatctgtcgtttgactactatgtattttaaaaatacaatcttttttaggggaaaaaacaaatctatgtattatgtacatatatatagttgcccctttccatgtactaatttattaatttattaattaaattcataatcaatactgtatttttttattttttttatttttactctttgaacttttttattaacaaaaatacacttctagtaaaacaataaattatttttttggttgtttt

SEQ ID NO: 229738 - DNA, 1462 bp, Cannabis indica
tcaaaactaaagtttccctattaatcaatagcatggcaatgacctatatatcgaggaaatacgaaaaaaaaaaacaacattacgataaaactacctgaaaaacaacatgccatttttctgggtccctgccaataaaaatggtagaccatttctacagaaaagtcctgccgttttttgcttcagaaaagaaaagagtctccaaacaatcccagttcaaccccaaacttaaaactaagcttgagaacacctaataacatcacaatagaccaattataagtgataaaacctcaaaatatgtagaaatttagaaaccaccattgtggagccaagtttgagttattaaacaaaaacttgctcaacaataaaactaataagcaaaatcaactcaaaaataacccttagtcaactaaaaaataacctagaaaacaaacccttaaacctaaggttcaggcagagccaaactaccaaattgcatgcttgaatttcaccaaaaactcccaaaaagcttaagagaaagaggctagggttaaaccttgggttacacctcttgaattcttctagaaatcctcaaaaattggtaaagaaacttttagtttttgctggtttttccttgaggccgaaggagaaggagaaaaagatgaagaggtgacttgatcttagtttaggttatatctacttaacttaatttgataaataaaagataacactaatcttatcacttcgtccacaatggccaactggtagatttagtggaataatccacttatcacttaaaacaaaatgactaagttaaccttacctcaagcttaagtaattaaatggcttaggggtaaaatgatccaataccataattctgcctaatcttgatattctaatgtcactaatgattgccctactaaaaaaggattctaaatcttacccatgtgaatcaattggccattcgttgtattttccatcgtataaggagcaaaaattataaaaaatttaaatttcacatatgacataattaatacacttagagttcaataaaatctccggtattgtgaaattataactctaatgcctattttctgaaaatggagcccacaacatacatattcaaatataataataaaataaaagtaattaactctaattgccctactaattcatattctaatcatgcggttattacaatcatccccccgttaaaaagattgtgtccctgaaatctaacctgaatttctagatattgagccctcatgccgaactccgattcccaggtggcttccgccaccttactgttcctccaaagtactttgactaatgttatggtcttgttccgagaaaccttttcttatgtatcgaggatctgaacaggctattcctcataagacaaatatgactgcagctctaaggcttcgtcactcaagatatttgtcaagtcttacatattttctcaacattgaaatatggaatacat

SEQ ID NO: 229739 - DNA, 1171 bp, Cannabis indica
tttaaggagacttagctattttattcaaatgctaacccctttccatccacgtgtcatcatccggttggtccacatattttggaaaaaatcaggggcaacagggatgaatctatgcgacatttgaatgatgcttttgtgattttgtgcgatatatttgtccggccaaaattaaaatttttggacgatttatgggcggtttttgtgcaagtttgttttgttttttttagtctttttcttggcggcattatgcgatattgtttatttgtgcgatattgtttcatttttttttattattttcttgttgccttttgtgtgcagttacctgatcattgttgcggttcaaggcacaaaagagctacatccaaagctcgagtttgaaacttttctctaatagtttcttaattatctatattaattacaaagcttgagtttggattagatatatgtgtcaaaaatttggtgcatgtcgtatgccgtatcaaatttactattatttttatttcaatacttttaattattttaatttaaatataagtaagggtcgatatcccacgaatactatccttattaaattatttaaaaattagttacaagaattagaaaaatagagttttgattatgcgaataaaataacataaattaaaaagcaaattaaatgtgatactatgatatgaaataaatagtcaaaggttattctccaaccaacaatcattcataatttctagtaacaaatgtaatttcagtttttccaatcaaactatttatcctgtagatattattgaagcagtcaattatcccaattttcctattatatgtaatcaaggcaaaatcctcaataattaactcttttacacaagcagtaaatccacaaagcatgcaatttatttaacttagataaagctttatgtttaatggagacaatataatccatgcaataaattaatgaagcatataattcatttaacttagattctcttcttcatcacaattaaaaatacctttgataatattagaaattacaatttatcacacacacttaaaatcctagactattaggtgaatagtaatcctaagatgacaatagattaaagtaaaatctaatttagcgattgtctaaataagattaaaaaaataatattaaatataggagaatagaagtaattcgatataa

SEQ ID NO: 229740 - DNA, 1115 bp, Cannabis indica
ttccccatttttgatgaagatgaaaaagatgaaaaagttggaactctgattggatactttgataggacctagattgacagattgtctacctgggtgttgggtgctcggggtcccgggtgcttaaaaattaacttgctctgattctaattatgatgcctcaaatatgtctgtggtatgtctagttgatgtcctaatgcatttattgacccttttccactaagatggtttcaaaaattgaaaccctagtttaatatgtaattttagctcccaaaccttggattaggttgctccatatcttcatggtgcaaaataataaaagatagtggattggattcaagttattgaagtccaatcttccatcctagagatcccaaagtcaatctggacggagggctagggtcccctcctaggtcgactgctatgactcgagtctactcaactctatggcatcatccttcatgtcacgtgtcaaacaattatgtccacatcaccagggaaagttttcaggttaacaattatcatcttagaattacttctcacctaatagtttaggattccaagttgaattataatatgcaatttatagtaatgtcaaatgtattataggttatgatgaaaaatataacctaggctacataaataatatgcttcattgatgtgttacctagattaacttatctgcataaaaattaatgctttttctaggttaaataaattgcatgtttcgtagatctattgtttagtgaaaagatttaattattgagtatttttccttgattaattgtagtaggaaagattgggaaaattgtctacttcaacattttctgcggggttaatagtttaattgataaatttgaataacttttattattattgatcttgaatgattggtaagggtggagattgactcttaattatttcttaatattgtattatctatctttatttactttctagtttatgttatttaatctttatattaaaatcacctttcttattcttagttttgattcttgaataataaattaagaatagtcctcgtgggtttgacctgtacttaccgttatactgaaataactggtaatatggaaataaaaaaattagtaaatttgttg

SEQ ID NO: 229741 - DNA, 1002 bp, Cannabis indica
tatttgtaaattttctatagaaaaatcataagagtacaattcaagcctaagacaacaagtgtcaaattcaaaagtaaaaactaaaatgaattgaaattcgaaaacataacaaaaatgtttagatgggacttgcctgagaggaagattattgcaaaggtgaaaagaaaaaatgtgtgagaatccattgcaataatgttttaggttgctcttgtttcagctacttttgtatgtggtgtgagtgaactaatgttatgacttatgaggttgaggatcaacacaagagattaatatatgtagatgagcattgattaaaaaagtttactttattttctttgtttttttattaacctacaaaagttaaaaaaatgttctttattaatgaaaattacagcataataacaaaggatggaatttgtatccaaataaggttattatggcccatgcatacataaaatcaagtaaaatcatttaaaataattaacgaagttgttagtggttgatcaaaattaggcagcaatgacatgacaccattgggtaaaaccaacctctcaaagcattgaaagagtgtgtgtgatgtttaatagtcatttaattaactcatgcacgttctttgaaacatgtcaatctctttctataactattttaaagaaagaaaaagaaaatccatcatcaaaacctaaacaatcagattataagaaaatatggaaatagttggtgggcaatcttaaaaggtaaccgattcatccataggttaagaataacaagtggaagattgatttagaacggtattaaaaactgtgaataaaaactaaagctggtataaattaacttaaaaaaaaattattttaattaaaaaaactctagtaaattattttgtactaaaaatatatttaattatttataatatattacaaaaaataaaaaaaaaatatttttttaaaggaaaaaaatattcaaaataaaaaatatttaaaattcttattttttgttttattttaaaaa

SEQ ID NO: 229742 - DNA, 878 bp, Cannabis indica
aaattttttttgggcccctggactaggtgggccctaggcacaggcctagcccgcctatgcccaggaccggccctgaccttatcgaccttctttttgcctttatccatcgttgaggccatcttcaggactgaacaagcacacacaaaaagaaaaaagggggaataaacgtagtgttaaccaaagaacacaaggaagcacagctacctgggatcactcagggaggatcaaaataagcgcaaggaaaccgtaatttcgtacgagaaaattctgtacggagagcattttcaagagagaacccgtcataaaaaaggacatctaacaacttgacacaattgatacaccacagttgatgttcatgaaacgactctcatgtggatgctgccacttgacacatttgatgtccaacactatatagttaattaattgagcttaacacacatttgaatttgaattattaattttaaattgagatatatgattatcgttattaaattatagagttatgttatgagtgctctatagtcatttgcttagagagaataattctaaaaaattgtaggaacatatttgtagaattatatatatataaatttatatatataaatattgggaacaacattcgaacttgtgactttatttttgtaagaagattgtatgaaacttttaggctatattatggtcgtacatattcttagactcttggatgctcgaaaaatgactccaaattttcaaccaaaatgataaacggcgtattatcattattatttgttagaattatttatcactcataaaatctaaacaaaatttttggtgatttaaagagaagaaagacaagaatagcagaaacataccttgatttatagatagtgatgatctta

SEQ ID NO: 229743 - DNA, 1795 bp, Cannabis indica
taaaaaaaaaacgagtaaataataggtgaaaaatgataacgaacacattctaatagttaaatgcatgttgaggttgtgtagactgtaggtcacgtgtaatttattttgagtaataacaagacagactttacaaagctacataaaatattatatattataaaaaaagaaatgaaaatgatcgacaggacaatatatactttcgcaatatctctctagccaaccaattgatcaataataatcataagggaaataataaagaaagagataaggtgcttcacacaccagccaattgttgtgcttctttttcagttaaccttgcaacgaatccattgaaacttctctggtagctgcggagtagagatcctactccaacattgctgaatatatatatatttatatatagtattaaaagtaatcactcatgtaccgaaaagaattatttattagttataataataatatagtaatatatatacctccctgcaactttttggagcatgctcatgtgaagagatgctgacgtggaaggctggttctgttttttctcccatgtacactataaatgcctgataatatagcagataatatctgtattaatggagtattatacccttatagtaaatgtgtgacttacaataataataacaagtattttcataccttacgattatcttccgaagcatgcagagactgcccattcagtaatataatgaaaataatgctaaggaagagagacgaagtaagagccatttgaaagaattgttttacaaagtgttaacgattaagtcgatcaaaattaaataataaactaccgaaattctctcctatcttatatatagataattggacaatgacactcacgtggaaatatggaaggaaatgcagtccagaagatgttccattaatttaattttggaagtcagttcgtagaaaagtcgtctccaattctcgaacccattctcgtgacttcagcatatactaaaattaaccacaaccattgattttgggatctcatttttttttttgggttaagcccgattaccaaattttaaaataacacctattaaaattaaaatttgttttacaaataattttactgcttatgttttaattaatttttattgttaatgagtatataatatattagaataagcaaattcatttcgttaaaaatcaaagatgtagatattgagtggttttgggctctgtgtcgtgtataatgttgatttgtttagcttgttgaccctacttagtggggctggtgttgattgctttttgatttgcattttctttactttgtatattttgatcaatgaaagtttacttacttaccaaaaaaaaaatttacctaatattaaatttaaataataatccatcatcatgcaatgcaatggtggcgtgttggtaatgtcacaatactccattttattacataattaagatggtagagacttggccatctacaatgtctatacgtcaagaaacttgagtggacctggtgctgtaaatacaggcagcccaactttttgacatgaaacacgagctcagaatgcatgagtaccactagatacaaaaaaatacaagtttagaacacgacatgaaaaatatgtcttcaagcacgacatggtagaagaagcacgaaagacatgacacgtaagcacgaataaactagcctaaaaattactacacacaacaactccaaaaagacacgacatatatatattaaaagactttataattttttaagaattataataatggtaagataaatatattaattataaataagttaaat

SEQ ID NO: 229744 - DNA, 1733 bp, Cannabis indica
gttgagtttgataccgatactcggctttaaccaaagctccgaaccatctccatctttgagaggagacaacaagggaatattaccctttccttgagctttcaaccattgatcaagactcgaattagcaaatgtaaccacgtccttcacgctacgggatcgctgctgccatatgagatcgtttcgagcacaccacagggcccagcacaccatcacaaccctgctgtgtagatcagcttgcaggcgactaaatgaatcgtttagccactttctgagagaaggagcttctcggtttgcagcagccaaaccagcaaactcccagcaagcccaggcgaagttgcaggaaaccagaatgtgcaattcagtttcagcgaacactccacacatgggacaagtattttcgaccaaaaccttctttatacacaaactgactttggtggcgagacaattagaagccgccctccaaacaagatcttttgctttgggagccacttttagagaccataaaatcttccatctgtcatttgattcagacaaaaccggtgggtgtttcaaagattggagcaaattataggcacttcgaactgaatagaaaccattcttctctacaacccaataccatgtgtctgcatcaaccgagcttaaagggattccaagaataatggctgcatcttcaggagaaaataaatccctcaccacatcaacatctcagcatctatgatttccttgaaaaaggctactaacagtgaaatgctcaagtcctggcacaacaggaattggagtggctcgatcaacaatgggaagccacgggtctgtcataatttgtacagacaaacccccaccaatccttttcctcaaacccgctttaacaacatcccttgcagcaaaaatactactccaaataaaacttggatttgacccatgcttcgcggatagataatcaccttgaggataatatctcgctttaaagacttttccaaccatggaatcatgccgatacaataatctccaaccttgcttaccaagcatagcacgattgaaatccctcaagcaacggaagcccataccaccttcaaacttatgttttgtcattctatcccaattcatccaaatgataccacttccattaccagaagagttgttagattccaccaaaagctagccatcattttctcaagttctttgcaagttccaaccgggaaaaggaagatattcatagcgtatgaaggaagtgattgaaccactgacttaatgagaatctcttttccagccagagaaagaaatttaccttcccaactattgatccttttcctcatcttttctttgaggaaacccaaaacagcatttttgttgcgtcccacaatactaggaaggcctaagtacatgctatccaccccagcttcttgaatacgcatcaaactgcagatacgacttcttgtagccggactagtattggagctgaaaaaagctgaaaatttatggagattaactttttggcccgaggcatcttcaaataaatgaaggagagaaagaacatgattggcttcttcatcagtggcttgacaataaatgtaactaccgtctgcaaacagaagatgagatatagttggtgcacttctagccactttacaacccgttagccatctagacgactcataagcccttatcaaagatgagaatccttccgcacagacaatgaacaagtacggtgataaaggacacccttggcggattcc

SEQ ID NO: 229745 - DNA, 1774 bp, Cannabis indica
cgtgtttgtttgcatcatactttgtacaatttcccaaatctgatcttaagacatgattgcttacttttgtgatagattttagactgtctataggtgtttagtaggatgacttatccctcatttatgacttgacgactcatttatacaaccgtcaattgatgtatgggatctcgtgaaattagggaatgatgaacttaaatccttaaacacacctaccagagtaaggtgtcaaatgctctttcccatgccgcattaaatgcgtgtacaatattttgatcctcgagtgacgtgttatgtttcatcagtcctcacgtacccttctccgggtagacttcactcgtaaagaggaaaagataagagatactcgttctctagcaagatcctctgtcattactcctccaaaataatagacttcgggagtaattatagtgatgtgtctttgttaggtgggtgttactgccatctgactcactccttgtaacgtcctactcagaggaacaccacgtgttgcgattaactaactaatcccgttaattggggtccataagccaagtgatttaaaactaataataaacttactttaaataaataacttgcaatattacaaacttatttcaaactaaagatatttaaagttacataatgggatctcgtaaaatttatttttaaaatattgcaagtcatttcttataggccgacctaagcggcaaaattaaaatttctacataattccctgttggacctaaccctcgtggtctagcttggcttgaacatgtacaactcatcttcaaaaccctcgaactcatggctgaagcaacaccaccaaactagtgcatgcaccttagaacacccgtgagccaaggcccaacaagacagaataataatacaacatgaataattataacaattacacttcatattgtatgtcactccgtatataccgtgccactgcactttatatcacattattctatatatagtaatgtcactataattaatgtctatgttgcatagacccatgtattacgctcacacgtttcttttacatttaaggccttactagagtttgtctcagttataattatcgagtctaacttggttatgccttatctgcatacctctactcatatatacataattcatacataatgttcttacagtgatttatcctaatgatgtttatcaggccaaacccaagttatgtcttatacacataactcctgacatatatatatacatacaacacattcaacatatactttactatatgaagttttaaggcaataatactaacttgcatacttctaagcatttattcggataacatactatcgcatgctcaagactatacatatttagggtaatgaccatattaaaaaataaatgatcttagagcgaccctagtctacaataaatatattttgtataataattgtaattcacaatatatttacttagagtacgtaataaccccgattctcaatataataatatttatggtaataatcctagttcacaccatataaatttagggtaataatcctaactcacactttaatcaaattaatcacataatatgaatcgcgccattgcgctatactctatgtgcataattcattgtcttacctgatttctaacgtatgaggagaaattccaatccacgggtaatcttgtccaagtatcggtattcctagtcacaatttttaagtttaaacacaatagggttaatccccaactttataaaatcaggactcacatattggatcaaatgata

SEQ ID NO: 229746 - DNA, 615 bp, Cannabis indica
tatatatatatataatagatatcttgattcttcgtattgacatgatactatcatatggcttatttttgttttttcaaattttaattttaaactaaatagatcaagtgacgtgataacaaaaacattcttgtacaaaaaaaaaatgtcttgtatttacttcaataaatttgataatttatattacaaaattattgatcaatattagtaaaacccaataaaataatttaactatttttggtaaattaatttgacaaacggattttattgctttttaatcaatgaataatttgtcaaatttggcgtgacccccctttcttggtttagccaagtaatggatctattttcttataaggtaatacagtacaaaaatagtaaagtatctatctattaagggattttgtggtacccacattattgaatatctaatagcactttagtttctcataatgtaactctatgataaacactataattgtacactttagtttcacattattaagggtttttagtttctctttttttaacttattttataaaaagggaagctaaagggtgtaaaagtacccgcttattgaaaattgaccttttagagacggttttttttttttttttttt

SEQ ID NO: 229747 - DNA, 2418 bp, Cannabis indica
aaaaagagataaatatgattaagaatttatttaaaaatacaaagataaaatcaaatattctaaataacaaaaactcatatttaattcacaaaaagtcaaaagagaacagaatctgattttgaaagccttttcacactagaaaagaaaactatatttttgaaaataataaataaatcattaaaatcaatttcaaaaataccacaaatattatttttatcaattttatcaaatatgtcaataaaggattttacaatctctccctttgataattttatagacaaaaataaaataaaaacctacaacacacatgttaaaaataaataaagagaagaattccccctggaagcttgcataactcatatcaaacacgaaaaagaaactaaaacttaactccccctcaaaatatgaaggtccagagttacacacaacaaaataaaataggcttttgagtatctactctcctcctttgtgttgttcaaataaaaaaaaaagtaccaaaagcataaaagaaacaaatataccaaatctaagactaaagaaattatcaatgtgcttaggaatggagacaaaaaataaaagataagaaaaactaaggttttggggccttagacaaggctttgatagcatcaagaactgagcattgtagcccttcaagagtcatcactcgagcagtcatggaatcaagtgaagtcgaacaccagagagttctgcagagacaggtgctaaagcagttggaacaggagcttctgcagaaaagtcatccgaagtaaacacaagagattgaggcttggattttcgagatgatgaggcttcaacagtatcaggaattagagcagatgccttgtaagatgcagcagtggaaggagccaccaaatcttcttgctctgtcttgatatcacttctctgcatactcaaaattttgtaaataacttgagggaaaggaagattcatatttttcttaatacctttccgaaaactaatgatttgaccatagatgactgtggccaaatcaatatcatgcctagttctaaccttgtacaagaatgaggccatatcaaaggagatggttgcagtgtgagaagtgggtttcaatgtagcaaacttgtgaagcacgaaatacatgaaagtgagattgtgaccgagataacaaaattttgaggtcacaccatcttttgatccacaatctcaataagaacctcatccttgttaagaggttcactctcctcttcatctggaatagcaagagaaggaaggtgcaaggcttttgctacatcttgtggagaaaaagagaaccaatgactcacaaacactttacaaaatattgtggagttagagtgaacaacttcattattgagatttgcatagaactctttaacagtcctatctacagaactagaaaaattaaccaaaaaacctgcccattttctctcttaaagaatgttaagaacaccatatggacgatgatcattcaaaatataatttctttcaacaagaaattttctttgcgaatgaataaccatgtcacgagcattatcattgtagcaaaatagagaagaatgtgttttaaagtgtacaactttcatcctttgataagaaataggttcagtgactggtttcttgcctttaccctttgaggacaatggtgaaggaactggtgcaggtgtagatactgcttctggaacaagaacagcaacatcttcagactcagactcatcagattccagtacagagtcaacacaagcaagaaaggattcatcagactcatcagtcttggactcagattcttcttcctcaagatggagatggaggataagcctttaatttcttctttgcaacagacgcagaagaagacggagaagacgatgtgcccaaaattaattttctttttggggctaactcatttttctttgatcgacttggcttcataggaaatttgagaagcctaacaacaacaccaacaaccttcgacgaagatgaactagatttatcctttgccctagccactaccgaaggttaaattgaaaaagagccaacattttttactcaagatggcaccaccacttcagatggtggtgcattgactccaatatctaaagtaatgtcgggaaacaccattggatgctcattggagagagaaaaaaccttcttttaagcgttggtcttggtggtgcgaccaacagaggccatcagagtagttgcacgcgacagtgtagtcgaaactgaagccaaaggtgatggagatggtcggacttgagatggggcaggagccttggacgatgatcctatttgggtcttcaccatttttctctttgcagaaaaaattgaaactcaaaaacactcacatacaattttgtgatagaaacacaatgaaaaagaagagagtaagaaatcgtgtagacaaaaaaaaagaaaaaaaaa

SEQ ID NO: 229748 - DNA, 1592 bp, Cannabis indica
tcatgagatctccaaagaaggtttcaaatactatgttaactttatatgttaactttaataaatgactatagtaaatacatatggatattctctcttacccttaaaactcaagcttttgatgtgtttcttaagttcaagagtatagttgaaaagcagttcaacctccccattaaaggtgttcaagctgactagaggtgaatatagaccttttgcaaggttcttaaaggatcaagggatcatgtttatggatctatgcccgcatgatcatgaacaaaatggaagagcagaacggaagcataggcatatagcagaaactagacttactcttttggctcaatcaagtttggatttgtcatattggtggctggcttttctaagtgtagtgtttaccataaataagcttcccacaactgtatttgattacttgtgcccttatgaaactctatttggtaccaaacctaattataaatttctaaaactctttggatgtgcctgtttttcacacttaagaccatacaagtctcacaaacttgatttgatatgagcagtttttgttccttggttattctcctcatcacaaaaggtacatctatgagaactctgaaggcaagatctacaatactaggaatatgatttttaataaacatcatttttctgctaccactgctcctcctccctcttaggtaaacacacttctcaaccatgttttcttgctactattttttcaactatacctaatcatcattacactaatcaagtttttggtttcttgttgtcatctgatattttacctgagacatctccttctcaaccaggatctcaatctacattgcagcccgttgtcccaaacacatctcctattacacaaacttttccagaaacccacaccttgcaccatacttctataattccaccacttatcctaaatacagtgtctcattccaccacagaacatgtctccagtatcaaatcctatacactgcaaccagcctttacttgacatgtccaacttgtctctattcccacatcaagcacccagtacttacctactacatcatcaattgtcctagataatgcacaaaaccttgcacccaatgtgttagctgaaactagtatagatgatctagaaaccaacaaagttgtccctacagctcctaaaactcatccaatgagaaccaggttcaaagtggcatctccaaacccatgagctacttggcaacaaagcatcctcttccagaatcattattgccaatagaacctagatttgtaaaagctactcttcttaatccaaaattgtatgcttcaatgtagcatgagaacaatgcactcatcaaaaacaatacattgaccttggtgccttaccaaccatgaatgactgttattgacaacaaatgggtgcatagaatcaagttaaaagcaaattgacccttggacagatacaaatccagattagttgcaaagagttacttataaacacatggaattgattatgtagacacttttagtccaggttagttgcaaagggttacttgtaaacacttggaattgattatgtagaaacttttagtcttgtagtaaaaccaacaacagtt

SEQ ID NO: 229749 - DNA, 955 bp, Cannabis indica
tgtatatgtaaagtcaaaattgggggtgaatttttaattgtagcgtttgtgatgagttggtgcagctgcaatggttgcaggtgccagagacgccgatgtgtctcccactataattgggtcacttcccaggaaagaggctgctctattggaggtatttataaatatttatttgtgtatgtatgtatgtatattgtatagcatccacgcttcccatttgtccaatttcattgtatgttactttattggttgaattcaatatcattcagttaatatatattcttgatggttttgtattcattttcagtctacaatagattaatataataaattttattaggattattggattggatttaatctatatagatttaatcatcaagaactgacaaaatgtgaaccataaaaatggcaggcatgcatatactaaaattttgtataacctgattttggttctctgaattaatggttgattttctgcaattataattttgcttatgtgtttgtgaaatcttaaacttgtttggggaaaaaaatatactgatttttgcttgatgtcaaacaaatgatttttcaagaatttcttgtcaaagtaaatacactggcacataaaattacactttccctattggagattctaatttcataatagaattgatcaacacattcatgactccatacaagctctatttccagatagagaatgtttcacccttgtgcggcctttgaacaatgaagctgagctccaacgacttgatcaaatttcaataagtatttatggctctaatgatttctcagtctatcttttggtagtagtttcttttaatgataaaccttattggtcggttggttttatagatcttaatggtttacaattttcttttattaagaaaagttggtagtcatgcaattcgctatgactgtttcaaactttttcttttggtagtcatgcaattca

SEQ ID NO: 229750 - DNA, 1202 bp, Cannabis indica
aaatgagcaccaaagacctccttttataatgtataggtgatcacttagaattcaaaatacacaacactcatttctctcatataaatgagtattaatatagtttgtaacaactatatttcataccatttgaatcctatcatcaaattgtgtaacaacccttttattacactaataatgtgtgatcaacacatgagttacaagtgacaacaaattgtaactcctctccaagttacaacatgtaggttacaaaagtgtaggttataaaatcataggttacacatttatttaccatacacttaatatatattattcacatatatttatcacattttaatctactttattattatattataaaataatataacacagccagcccaaccttatcatctctatataaacaccacatatataaatatatatattcatataattgacagacaattaacaaagctactcatctgcagtaacatgcacctaatttaattatcttatctctaaattaagaaacgtaatatatgtatgactatgttgacaatatttattttttctgggagtaaattcttatttttcttatttattagtttcaactttcgatgaatttgaacgtgtcacgtaattaaattcttcagcttcgtccttaccaaaaaaaaaaaaggaaatttttgcttaatagaaatattttatatatatagactataatacgtattaatacaactgtaatttacctatgaagtgactatctaaacttgagtttggttggaggtaataaaattagaaggaattatattatatattattttttgactttttttttgaaaaaaacggtttgagttgctcccgtgatttctatgtgggttgctggattttgattgcgatttatattgttccgttagttgctataggaatttttgaatgaaattccataaaaatacaaaaaaaattattttaaagtgttaaaatgaaaaaccacataaaattaaatggaatagaataaaatttttttttaggagaattaccatgtactatttttttttaactttttttcaaatttacagtttgaatttctaaagtggttgcagcgctagttgcaatagggattttcatacgattttttgttgcaattgtggttgcagcgctagttgcaatagggatttctaggtagaattctgcaaaaattgcaaaaaaaaatattttgaagt

SEQ ID NO: 229751 - DNA, 1084 bp, Cannabis indica
gttgtcacagtacatcaaggcaggccctttgtgttctattttaagctccttgagcaaagacaataaccaaatcagctcgctagttgtatttgccattgctcgatattcagcttcagcagaagatcttgacacggtatgttgctttttgcttttccaagagataatggaatctccaagaaagatgcaaaaacctgttgtagatctcctagtgtcaatacaagcagcccaatcagcatccgtgaaagctcttagctgaatttctgagtttgcaacaaggagtataccttgtcctgggctcgattttatgtactgaaggattctttgggcagcaacaaggtgctttgctcttggtatggtcaagaactgactaagcttattaactgaataagctatatcaggtctagtgataacaaggtattgcaacttgccaatgatcattctataaagtgtagggtctgctggcttgtctttctcatcttgagacaactttagattaggctccattggtgtgctcactggtttgcttcccaaatatccaagttcctctaaaacttgaagagcatatggcctttgagacacaaagatgcccttgctggaccttgctatttcaagtcctagaaaatacttcaaattccccaaatccttgagtttgaatctatcattcagccttagttttaaggcttccaactcactcaagttattgctagctagaataacatcatctacatagacaagtacgatgatgaaactagtagaggaatgccttataaacatggaatggtcagtagctgaatgagagaaaccttcttctataagggttgtagagaacttggcaaaccattatcttgatgcttgctttagaccatacaaggaattttgaagcttgcatactgcatttggaggtaatttgttattccccttaggaatatacccaggaggtagagtcatatatacatcttcatgaagatctccatgaagaaatgcattattgacatcaagctgatgtaaaaaccagccatggatagcagccaaagcaagaatgagtttcacagaaaccaacttggtgacaggagcaaaagtgtca

SEQ ID NO: 229752 - DNA, 650 bp, Cannabis indica
tttatgggatagtatttttttataaaagatttaattgaataatgcaatcttaatttttccatgagaagtggagttcatcttttattttgcaatttcaaacaattcaaatcacaaagattgacagagttaatagaagatttgttcaaaccctaatagttgttatagttggtattatcatcatgttaagtcttgtgcatacgtagtctttataatatttatgaaaaaaactcctttccctaataattttgatcatgtttttgtttatattaatcaaaaatacttttatattatattttattaaaatctactaattattatgagtgagttgcctaatatactcttgctctccatctaagtgtaacacatgatttatattaatctaaggagtataatagggacatcatctataaaagtgggtgtatgttaaagaatatgaaaataaaaattaaaatgaaaataaataaattaaaataggtatacaatgaaattttaactttttacaaggggtaagttgagaaatagcacttttattaatcaattaatcaaatttacctctaattttaaatttaattgaaacatacctctttttatatgtattgtacctaaaataccctaacataagagagtcacatggagagtatcttgaagtg

SEQ ID NO: 229753 - DNA, 2421 bp, Cannabis indica
catgtgggcctactttggtggagactcaagttgtatctaatattaatcatgggccaatgggaccggattctttgggagtaaatgataatagcattgggccaattaatccatctcaagctatcattgggcacgtggaggcttcttctaattctattttgcctattgcttcccatggggccgtggagcaagataatgaagatcaagcattgactcaattttttaatgctcaagaaagtttattgtatgacctcatacactttgggaaccttgacttgtatgagataaggaaaatcggaggggacattggggtcccggtttcgtctgaagttaatgagagaactactcccttcaagaaaaggaaattcgaagcgtctgcctctctttgttctcggcctcacaaaattccttgcaagtatccagaagttgttcgtgatttcccttgggacactaagcaccaggccaatgattcgaatttggtgattgatgacccatctaaggatagttctagctccccgagctgctccggaattctaaagaatgccctgattggttcgtttgtgatcgatgacgctgtttcgagtgggtcctcttactcccacaaccctgtggaggagaatgtcgaatctcctccacaggagccatgagaggtattgcctggaactgtagagggttggggcagacctctacggttcgggaactgaagtccctgatcttttcccgctctccggattttgtttttctttccgagctcaaagtggacgctaatcctctggttgggaggattaacccttcttgtggacttcggcaaggtgaccccttatccccttacctcttcatttgggcggctgaagttctatctagattattccatgatgctcttcaccagggggccattaaaggaattcagctaagtaggagagggccggttctctctcacattttctttgcggatgatctaattctggttggtcgagctaacttacttgaggcgattggcttctggggatgtttagagaaattctgtttgtggtcaggtcaacaggtgaataagctcaaatcatctattttcttcagcaataatacccccttaagcttgcgtgaagaaatcaaagaagccttgggaattgcttctcctgaaggttgcatcaaatatttgggattgcccctatttagatctaggcagaaggatgctgacttcaactttatcctggacaacctcacggctaagcttcagggatggaaggcaaaaactttatctaaagcaggtcgagccactctgataaaggcggtgggcttgtccttgcctatgtatgcgatgcaaacttcgaaactctcttctcgaatggtgaacaaaatagatggcctggttagagacttttggtggggctttgagaaaggaaatagggggcttcatctaaaggcatgggacaaactttgcctcccgaaatccatgggcgggcttgggttccggaaaacaaaggagatgaatcaggcctttctggctaaatggggatggaatattcttaatggcagtcaatctctgtgctgcaaagttctatcagctaaatacctcaaaggaaaagatcttcttacctgcaggtacaaagattcagattcttggttctggaaaagtgtggtgaaggctaattccatcttgaaaaaaggagcttgtaagttgattgtaaatggtcagagtactaagatctggggagatccctggatcccacaccggaaagatttctatccgaaaccaattgagggaacctcccccaacttgaactatgtgtctgatcttctcttaaataatgggcagtgggatactcaaaagctgtgcgaaacatttgatagagaaacagtcacagacattctcaaagggggtcaaccctctggtagtggctctgataaatgggtttggacgctagagagtaaggggtgtttctcgactaaatcagcatatctggctcaagctttagaaagagctccccattgtgacgtctccccgaagctctggaataagttatggaatagcaaaatcttagagcgccacaaggttctgtggtggagcatcctgtcgactgctctccccattagagcggtgattgggaaaagattccacatagaggacactagctgcccattatgcagagtgggggaagaatcttttgaacatcttttcctttcttgtgaaatggcttatcatctctggcgctcctctccctggggtatattcccagtgtgtgacactggcattcgtgtttgggactgggtcaagtttatttgggatctaaacaaaagaggaattgatgctgatgcagttttcttatatgcttcgattgttgtggatactatttggagagtgcgaaatgaaaaggtccataataactgttctcctgacataaaaaagtgtattgataatatttg

SEQ ID NO: 229754 - DNA, 1534 bp, Cannabis indica
taatagcttctttctgttctcttaaatcgttttcatgaatatcaattaagttttatgtaattttccttcatgtttttaagtttatttaaaaaaattagtttgtagttgaatactaaattacaaaatcgattcagtctaattaaactaaattagattgaactttaaagtttaatgagataataagatgattttttaaatccaattactaattagattagattgtattgatgataaaaatgttatatcggatccagagctggtacaaagttgttttttttttttttacttctctctctctaaaacttcattttgcaaatgtagcaaatgtatgtgatctaccgaatctttaatggcttctactctctgttaccacttcctcactccaaagctcccaactccaccaactcacaatcttcttcatctgaaaccagccaagtctctctctctaacattgtttcgaaaggcaggaacttcatgatcctttgctgccgcgtcactaaaacaatccactgaccaaatcgttgcagctcaagacgacgccgttttacgcatcgtcttcgctgccggaggcactgggggccacatttacccagctattgccatagccgacgagctcaaactagctaaacccagttcccaaattctctttttaggcacacccaacagcatggaaagcgcctcaataacctcagctggctacgacttcgaacccatctctaccgtccgattagcccgaccaattctcttctctcttcaaaacctactcttaccttatcgtctcatcaaatcaacaatccactgtttatccaaactacgtgatttcgatccccaaatcgtgattgggactggtgggtacgtctcattcccaacttgcttagctgccgccattaaaggcatcaaggtagtgatccaagagcaaaactctgtaccgggtgttgccaattgggttctttcccacttatccgatatcgttttcgtggctttcaattcgaccgttgattgttttcccaaaggaaaatgtatcgtttctgggaatcctgttaggctttcgtcgaagaagggtgtttcgaaaggggtggcgaggttaagtttctttccagaatggaaggaaattgaggatgatggtgagactaaggttgttttgattgttggaggttctttaggtgctaaggctgttaatattgctatgttgaatgtttatcatcagatgttgatggagaaagagaaggtttttctgatatggcagactggggttgaagcctttaacgagatggagagccttgttaagaatcaccctcgtttgtatttaacaccgtgagtcttcttcactcttttgttttcttcttctttatattataagtggtggagacttgtttaaagttaaacctcttcttttgctactatattaagagttggggttttgcttatagctataacttttgtcttacttttatagtttggtttggaaaactaagatcttttttaatgaaaagtattttttaaaatatttagactttagatattattaaaaaaa

SEQ ID NO: 229755 - DNA, 1783 bp, Cannabis indica
ctgtataatgctatctaacttctgacttgctaattgtatcaatggttatttgtgtacaaaataatgatgttcaaacctacaagtcgaacaatttcaagaccagactattcctaggaagttgaaaacacaaatcttttgagagcaaaaatttccaaaactaatcttgagcttattaaaattatgttcttagattcatggacccgattgaaatcactgatatctttcattcacatcttcattccatcaagaacattttattaaacttttggactcccgaatttagagtatcctactttcacacaattcacatttgcagtcataatatactccatgtgattataataaaatccaaacataaaatagtcaagaactgcaattacaatgacacacacaggaaagtcaaaaggcttgtaaacaaattacatgccccaacaagcagaaagttcaacgaatgcaaagttcaaggttcaacatcaatatacatgtataaacatatatatattaagaaaactctgttctcctataagatttcccacagaggtagctgcgaatactttcctcattctaatgacaaatgattaagaaagaaaaaccctttttcagtttaaaacaccctatgagcacaaaccatcagaaaaggcccttagatggtccattttatttaacaagtgggaaaaataaagtaattgcaacactatacaagaaagcaaatttttagccttgttcaaatacccctactttcaaaaccctttgttgttgcaaatcatgatattggatccacataaacaagtttgtccatcccaaaaattcaatgctctgacacacccaacaattatatgtatgtatatgcatacataacaataaattatagtggattagaaattaacctggtaaacaataaggatgagtagagcaatgaggatgaagaaagatatgagccacacataaagatcccccatggcccttctctttgggcaagctttgagtcttaaaacagcaatagagtaaagctgtacaggtatgtgtgcaattcaaaagtgaaagagaatgacttaagaagcttaccaactgaaaagtgaaagagaatgacttaaaaagcttaccgactgaaaagtgtgttgtcttgttgctgttggatagccagcaatactgccggtccctctatattgagctcctcatcaaactctgattgattcaatattgaaaaactatgatttaaaaaagggtgttctgaaactcagaaactgaaatatgtttatgaaaatttaattggttaagaaacactatctaatacttgcatctcaacatgagataaagatagttgctcatcatgtttgtggtggattgagcaccatttattgtatctaatattgacaaaaccaaaataatatgttggaaacaacttgccattgacaactgcactaaacttgatagaactaccaagggcatgacaggacaacttttgttcttaactcatgtatcaacacttagaaaatttgacaggtttaaacccaataagtaaagcaaactaatagcttagatcataacttgataaaggtaagttacataattctttcgagaagcaaaagactaatgaactaaaccaacacttagctaagagccacactagaatatacttgaagtttaatatacacaaagaaaagaacaattactatgacaagagaataagaattagaagaaaaccaatatgttagaaagcacatgcaaatgacagactaccaattaaatcaaagtctttttgaaaaggtgctggacggacacc

SEQ ID NO: 229756 - DNA, 1318 bp, Cannabis indica
ttacaattaaaaagggaaagaaacgaccaacggtcttaaccaactttgtaacaacctccctattcttggaaagacttccaagaatctaactaactagggaataaaataaagaatacaatgaaacttagtacagaaacttagtacagagaagaacatagcacttaggtctacacagatgaaatatcgagaagaacatagcacttagtaaagaatacattatagcttcttgactccactgcatgtgcatccattgcatgtacatgatggcctgtaactggttagttctttccatatagttttgagtttggtaaagtacatgcttatggtttaattttcttgattaaggttcataagatcttttcttagattgtatatatgtggactatttttctggtgaaacctaacctttaaatcattccaaatagaagaagcacattcatcataaaggatacttgaagaaatttcttttgacatagagtttaaaatccaggaaataacaatgttattatttctataccaagcattataaagactttgatcagaaatagaaggcttaggaatagaaccgtcaagaaaataaatcttgtttttcacagaaatcgcgagatgcatagctcagcactaagagacataattgtcttgtcctataagtggctgagacaccaatgcatttcctggattatctccatggtgaaggaagtaaggacttgcaggatcctcgagtggatttttaattggagcaacttgaagaccttggttgaattgaccaggaagattcccaagatcagtagtgacaactggaacttcggtttgattatcatctgttgccattgcaagaatgcaaaggacaaaacgcaaagaagagaagaacaaccgtagatgaaacaagaagacacaacctcgctggagaagacaacacagtaggctggaaaagaggatcggacgggaaagcctatctttcctgctctaataccatattgagaaaaggagaaagagttttattatcaattaatgaaaaatatagtacagaaataatgaagagaaagagagccttcaatagtgaaggctaagctacaaacagttacaattaaaaagggaaagaaaggaccaacggtcttaaccaactttctaacaaccttcctattcttggaaagacttccaagaatctaactaactagggaatagaataaagaacaatgaaacttagtacagagaagaacatagcaagaggttaagtgttaagtgtatttttaataattattgaactctattcaccaaaatctcaagacacatacaataaataaaaattaaaataaat

SEQ ID NO: 229757 - DNA, 2076 bp, Cannabis indica
atacgcctcctcccatgcggcattaaatgcgagatgactgttcagatggaatctgacaccactcggagatgctttgttgccatcttgctctccgggagcatatgagacttacatgccttctccgggaggcatgtctaaggtaatcatttgctttaagaagactaagtttgttatttaaatgctaaccctttcccatccacgtgacatcatccggttggtccacatatgggcgaaattaggggcaacagttgtaaagatcaattttgtcaagataatatttattgagaaaaaaattgtcaaggcaaaagataccatccttgtcttaattgagacaatgtaggcgcccatagggtgtccttattagatttttcttttgggttaattaattcaattagataaatatttaaatttgaatagtagttaaagatatttcaagttagttgagatattctctcaagtggttgagagattcactcatctaaaatagcagtaactgaatttggttatagaaatttatttaaataattaaatataatttaattaatgggaatcgaatatactacaaaaataactttttgcttcggttgtaaagtgacacataaattatttgtgtcggttggtaaaaatgacgtaataacagcagacgtaaacagtcaagttatttgcttcgttttaaaattggcacaaattattttttgcttcggttaagaatcgaagaaaatagcattcactattggcgtcagctcttaagtgaagcaagaagcttcacttcaaactgtaatcgatgctaattgagatattgcgtcagttacaatttgatgcatatttgtatgcaatattttttttttactttttatttacaatgctattttcgaaatatagagcagaaaagaaaatttatatttccttctcaaatctctactacaaaaagtactgtttgcgtcggtcaacgcgtctcaccaaaatggttaactgaggcaaaaaataagcgaagattttatgcttaagagtgtgactggagctaaaaaaataacaattagcatcggctcgtaccccgatgcaaaaagtagaaccgaggtaaaatgtgataatttttaaaatatcttttatattttgcatcagtggaaaattgaagccaatttcttttgcttcggttaaaaattaaggttaatatatttgtcacggctgtcaaccgaaacgaacccatccccatttttacaaagtgtaatttcatttttacgcgtcctatatcccccaattcaaaacccgagcagacccatccccatttcgaaacccagccccgccagacactgattcgaaagactgtcagtcgcccgccctccgtccgctgcccactgtccatctgcccaccgtccgtccgcccaccgttcgtctgcccaccgttcgtccctagcatacccttccttttctctctcagcaacgaccaaaggtacacacgcatgactccactaagccatctcaccaccaccgactaccccccctccccagctccttccatctccactttacttcatcgggtatactatcctattcctattttttaaataacattgttttcataatgatttcacttgttactttaaaattaaaataataatttggaccaataatatttcaacacgtggcaattttaaaaagtaaacggctcagttaaaattaggactaacggacaaataaaaagcatgtttttttacatatgataagaatataatttaaaactactataatttatttttatcaaatatatataaatttatacttttgggagaaaataattaagaatatttttttaaaaaaaattatataacataaataatttttttatatattgtgattataattaactagattacaaaattatcattatcgtatataatagaatcttaacatattacaacactttaaaatttattaattaccaaacactttgctcagcttttttccacggttttgttgcagctatttattctcacagcacagctacaattgcttttctccacaacactgttgtgccagactagcccttagtcacttttagtcacaacgtatgaatga

SEQ ID NO: 229758 - DNA, 927 bp, Cannabis indica
ctaatccaaattactaaagcggtcattacatactgtcatcctttgttcaccctggcgtaaagatgaagggcccaggctattcttaaactgcaagtaagggctctgaatatctcgcatcttgccttgagaagaaatttcctttggtacagaatgtacccatccaaagaggttgatgaagaagctccagcagctaaggctgaacggagtgtgccagacaaggagagggtcattcagaatttttcagaacaaatccaaacagaatgattgatcagggtcatagatgatgctgagagggttgcacgtcctatcgtaccagtagtgataggaaaaggaacgggtatcgccccagtagagcttgaagcaaaatttttggatgatgatgccctaaccttcttagtttgaaagggtgctccttcggaggtttacggtagaaatactttagcatttactttgcttttatttaacttttacaagtaattactaagtgtcttcttctatgcagccatgacgtccaaacttggtggaatgttcaagagaaaggaaggtggctttccacttataacacatttaaaatttatgttaaaatagattcgtaggacataatctcacttattacctaataatcccataatatatagaccccaattatttaccattaggcttatccggatattacaacatcattctcatcttttgtatctcctgccttggcattaggatcaatgaagtgaagactagatttttttcaggtgagtaccatgattactgagtgtaatcttcagatggtatcactgcttccttgagctctccatgaaagcaccaaaatatttaccaaaatttttggaaaaaaaaaattatatataattacaactgaagatataaataattcagaaaagaaaataagaacaacacacaaagtttttacgt

SEQ ID NO: 229759 - DNA, 3697 bp, Cannabis indica
aaactccctatcatgcccctataaatggtttgatcgactgactcaccagactcatctctagacaatctagtagtggtgcaataaggggcaggaccatgtttagtttgatctaagccaaatttctcaagcatttttgttatatatattttgactgtgaaataaaaatgcactggtcaacttgttcaacatgcaatcctagaaagaaggtaagatatcctataagagtcactttcaaactcactagtcatgagatcaaaatatttgttaacttccctttcacatgtagatccaaagataatgtcatcaacataaatttgggtaacaaaataccaagatttaaatgcttaataaacaatgtgttatcaatagtacctcgcacaaattcatgagaaatgagaaaagatgttaacttgtcataccatgctcgtggagcttgcttgagtccatacaattctttttcaagtttgtaaacatgattaggatacttggagtcctcaaatccttggggtgtttcacatatacttattccttggagaaaccattagaaattcacatttcacatccatctcatgtatttgaaataaaaaaaaaaaaaagccatggccaaaagtaatcgaattgattcaattttagcaaatgtgcaaaggtttcctcaaaatccactctctgaacttgcttgtatcattgtgccacaagaagatccttgctccttatcacagtcctaaactcatcagatttgtttttaaaaatccactaaagtcccaatgatatttactccatcttgctcaagaaccagatctagaccttctttctcttgaattgacccatctcatcttgcatagcattgttccaaaattcatcttttgaggttcaactagagaaacataacaagcaaagtctatgacatctggtaccttacgataagtcaccattgtagcattgggatccctgatcacaacagtaggaggatgagccttttgtatccacgatggaggctctttcttatacagtcgagcatgagatgaatcatcagatgatctatttgtagcttgaccatctgcagagacactagatggtttagaaatatctgtaatatctgcagaagggcttgtaacacagtcagatgagagagacggatgtctggatgagttagcatttgataattcaggagcttctaggatttgtcatagaaggattcaattataaagtgggactaagagattcatcattaataatgacatcattagacaattccaagtcatcaaatttcacattcatggactccataactgtgaaagttcttctgttataacctcgatatgcacaactatttgcggagtaacctaaaaatatcccttcatcactttgtgcatcaaattttccaagatgatcacaatcatttagtatatagcaaatacagccaaaaatatgcaggtgacttaagttaggaatctttcctttccgaatttcataggctgtttaagtagtactagtcctcaaatgaatacgattacatatgtagcaagcaatattaactgcttcaacccaaaaatgagacgcaacacctttggcacatagcatagctctagccatctcctgaagagttttattttttcttttcacaaccccattttgtttaggggttttaggagcagaaaacttatgaaaaattcccatatattcacaaaattgagcaaatatagcattctcaaactctttcccatggtcacttatgtcctgatacactttcccaattgtaacatccttttcaattcacaacttcaaagaaagagcagagaaagcaccaaaagtgccaaacttgtcttggagaaaattcatccaagtaaatcttgagaagtcacccacgcataccatgacatatcgtttaacagcaatactagcagtttgcatgggtcccattaaatcaatatggaggagtttcaatactcttgatgtaagaagatcatttttataggagaatgagatgccttaatttgctttccttgttgacacggtccacacagtcaatctcctcctaatttaaacttaggaacaccacgaactgcctttacagtgacaatcctcaaatctctataattcaaatgacccaatctataatgccacagatcaagtttgtccagaaaaaccctgtgacatttcacttggccgcatagaaactttgaaatgatatgaagttctattagttgtaagaataaaattctcatccaatgaaactaaacattgagacttagtaaatataacatcataattagcatcacataactgactgattctaatcaaattggcttttagtcctttaacaaatagaactccagttaatggaaatgtacccgagagatttaaatctccttgtcccataatctaccctttattaccatcaccaaatgtcacaaagccttcttttgaatctagaaaattttgtagggattctctggagcctgtcatatatcgtgagccaccactatcaaagtaccagtgattctccttcatagaaaataatgaagtatgagcaaccaaggcaagattggcaaccttgggtttccatgtcttagatgaaacttgttgaaaagcacaagggaacttactagaagttgattaattatttatgatgttgatcagatatgttctgagtttatagcgcctaggtctgatatgaccttttttgttgcaaaagtgacaaataggaacaaagtgttctggttttttggtaatattttcccttttcaaggtatttcctttttagctatcttctcgtattcaactaagttactgttagattcaccttccttattcactgcagcagacacaaacttcacctttccatctgaagaagataaattagttccatcaatcaacaagtcctgaccttgtttgtagagcatcttatacccaatggaagtctaatcaccataaggcttttgattctgaagggttgattcaaagtagctatccctagaggtatgaaggacaaagactgcatggctctcacaagttcgacagtcaacttgtatatttcactatctttagaacatagctttattatcattcgcttcagtttctcctcaagctcaatcttactgtcgtcaagagccttgttcagatcttgcagttctttaactctcttggccatgtagctccactgagcgaacatctcttcacagctttattttttctacaataattgaatctgaatcaaaaaaagactcatcaccattagatcccttggacatagtttctttagctataaatgttatgaataacttatcttctttagactcatcattcacttcatcttcttcactatcactccaagttgcagcaaaagccttcttcttcttcaaggtgtttgcacattcgacctgtatgtggccataaccttcacattctcagcatttgatagctggtctgcctttcatctcattttgttggggatgattgtttgcattagagaagtttttgctggaagagctttcctttctttcaggaatgtttttcttgaaattctttttgagaaatcgagcataatttttagccaagagagcaaaattagcatttaaaaaatagtcaaataagtctgactctttctgaatttcttccttgtgaataaaagctactcctatctcagctttgtccttttcaaaatttttaatcttcttacccttgtcccatctctgta

SEQ ID NO: 229760 - DNA, 1641 bp, Cannabis indica
ctttacagatgttgaataaaatagattacattgaaatggagttttatttagggcataaaacccaacacttatataaatcccgttaggatacaaaataggaatgaaatctcaagtgttgagaatcctatatgggcatgtaagagagtgaggaagagagttatctgacttagagacctaggcttagaatgaggttcaagcacttaatgacttggaggctagaattagacttaagtcctttagattagagttaaggtcctttatataggagagcttaaaccataatttataattgaaatccttagatatttgtttattaaattgattaattataaaagactaaaatacccttaatcacaaatattttctagctactttattaggttgttaggcccaatttacaatccaatttgcagtccatgtgtaaaattgtattgagaatcctagcaggtcctatcctggccagccagacacctgtagcaagaaggctggctgaccttgtgttgtctagaggctggccagcctgaccaggggtggctgaccaacttctttgaggaagccagttggctgtagtggtaacttgacctccttgttggtgagttgtattgtcacatgttgttgattttgtccacgtaagcaatgccacgtcaggtgggaaaaaattgggataatattagggtttatgccctgaaaagcttgtaacgacatttctgattattaaataaagagttaaacatttgatatatgtgtgaatgttaaattcttaataatttattattaaataatttatataaaatatcaaaaaatttcttatacatatatgagtttgtagcttgcagctgtacacagaactaagaccacttaactatatatgagtaaaacagtcagcaacatattaaagttatagaatctttaattaatgaattaatagttgctagtacagttcacagatgcccgttcttcgatttaagtaatcttggttcggattatggatgtagtgagacatcaaagtgaatgtattgtatataatagagattatatatgacaaggactaatatggataatgctatctttatcagtatgccatttatcataaagacctaattcatatcataacgatgatcaatagtagattgacctaaattctgagttatcatgaactcatgttcttgctattagtttctttgattcactcattaaagtttctcagagaagatgattcttacaacttatgttttgggaatctaataacatggatggctgggaacatgatgtacaattatgcaaaccctgacttttctaacggatcgaatgttggttccctttaagtattaattctggaattagaatattgtgcacaaattcagatgagatcttgaattatactttcactagtaaattaatggaactaaaggtacaaaagtaattagagaagtaaaacaggattttgaccaaaattaattacgaacaaacacataaagggctaatcactagaattgattataccaatggacagagtaattaaactcagtaaatataattcgataattactaagaatgcaattctatatttatagtggagtaataataatattagtaaacaagggattatttggttgataagactcaataaataatctagtt

SEQ ID NO: 229761 - DNA, 594 bp, Cannabis indica
agatcctagtaaaatatttctaacatttagttagtctataaactaaaatataatattatatttgttatgaaaagttaatatgtgatatatttgacacaatcgacattataagctccaaaacactgcctcttaagaccaaaattataatactatttgcataaataactttattcaaaataattataatatcatacaacctcaaagatatacatctttaaaaaaaatgaaacaatatctaatacatcctaatttgccataattttaccctataatacagtatagtaaaaactgatacaaaatttatttatttttcattaatatttatttattaaaaatatgtaaaaaaacaacaacttatctttatattttattaataataattaaatataataataaaataataaactataaaatttaggatttaatactatggctgaagataataataaaataataaaaatataaaagtaaattaaaaagaatatataatgtgaaaaaataggcttatttgtaatgcaggtccgttaagctggtacatgttttggcgaagttggtcctcaaactttactttttttttgcaaattagtctccaaa

SEQ ID NO: 229762 - DNA, 2354 bp, Cannabis indica
aatagttgaagatgtaaaccatcagcaattttgggacatctaggacgaacttgatgaagatgtcgtacatgatacaagctcgtcaaatttttgatgactatggatctaggaaagttaattctgcaacctctagaactggcaatgataattgatactacacaaaatttgaatgttaatcaagttggtgaaaatgttgtagatgacgaatcagacgacgaaatagccgatgaagaagatgagttgttagttgatcaatgtgaagacgatattatttctcaaaatgatgagagtggtagtgattattagctccactgatgttgaaatatttgtaataattacaaaaatggtatatttaatgatgttaattttgatttatttacatttggactaattataatttttgttcatctagttaacattcatactaattaagtcataataattttttcttctaagagtaataatgtcagccgatacatcaaccttccactcgaccacaacaataacctctcactcgcccacaacaacaaactcgacaatttgttgagttattaacttcgcatgcagtaaccgtattacccttcaccgccattactacaagctcgggacaatgcacaaataaccccattcaactagaaagttggttcaaaatttttaaataatgtgtttgatgaagacaataatgattagtttaagtttttaattatgtgtggacagtataattagtttaagtttttaattatgtgtagacaataataattagcttaatgctcaaaatattttatatttattttattatatttgtttatataaataatagaaaatatattttattaatttaaataaatttattatatttatattcattttatataaataatataaataagaaattatacaaataaaaaaaatttataaatagtaaattatataattaaatcgttaatttttttataaaacctcattagcagcgggtcccgccgctattagtccgttgctaaagtaattataagcggcaagtgggtcagtccgtcagtattaaagattaacagcaacccagtattatcagcgggtcaatagtgacggacactcgcatgtactaggctttagcggttgttttctgtctttttacaagtagattagtctgtcggtatttatagtaattcttgtattgagtacaaccataatatgtattataagtgtcaaagcactctttatacgggcacatgtggaacgaagaaccagaatccaaaatccaatagtcagaaaagttttcatcagttatgacagagaaaacatcaaagtcactttcaaagccttcaccagcagcatttatggaatcagatgtgtctttgcattcttgattcctcattgcttcaagatgatttgtcaactcttcataattcctcctaacatgtccctttttgtgacaatagtagcactccacttccctccaagaaagtgaatgatcgcgattgtctcttccgtcatcatatcttcctctcgatgtactcctaccccgacttgattctaacctcgtcacaagagtttgatcagtatgagacatactacttggttgcttgatactatctgtctccaaaagagcggttgacacctcatctacagttaaagtagtctttccaactaaaaatatagtcactaatatctcatatgattttggtaaagacgccaacaaaataatagctagattttatcaatttgacatctacacttaataattgagttatgcagttatcaaatctatttatatgatccctaacatcttcttcttcaaccatttttaactcatataactgcttcttcaaatataatccattgttaggaattttgacgtataaaaattttataactttttccataactcaaagggagatgtttcgttcattacactacactttaatctaggagccaaacttaaactaatagtttttatcactttcgacccaactctttcaaacctttatcagtcatactcttaggcttctttctttgcagtgcctttaggagccttagctgtaccaacacatctttcaccgtgctctgctataaactcaaattgttcttcccatcctatagctcgatctcaaattttgtgaaagacactgtttattgacattttttgtgttgatgtgaactttggctctgataccacttgttgggaaaaataataaacttcaagcacatggaaataacaaataaaagaagcaaagaattttaactcggattgataaaactaccaaattcacaaagagatatatatttcacttataacttcaaaattacatatactctctatctaaacccaaatcccaatacactatttgcttcttcct

SEQ ID NO: 229763 - DNA, 1371 bp, Cannabis indica
caacttgaagacaattgctaatacgaacagatacaaaccagttttgtcataccactttcagatcggattataattaaatttcttacaaaaccaaatctgttgctgttcgagccaccaaaccaataccaaactacatctcattagagaaaagtgctctccatcaaaattaactttgattgtaagaaatttggggggtccaatgttctacatctaccacatttggataattatcactcgtagtagcagagttctatttttgagcattatatgtatcaataaagtttaattttgctaataatgacaacacctcagtaacctcgagttgtttagagttccagaccaaattgtttcgaccaacaaatcacgacagcctctaagcactcagctttgttccaagagttcaaaccctcctcaaactagcttgcaaaggtcatagcagcagcaactaccactggcacttgagacgcatttcagcagttttgagcaaaagcacatcgtaccaagacatgaatgacagtttctggagttgctaaatagaatggacaagaggaagtaattagcacatgcttaatagttagctgaaacctagttggaagatacttcgtggatactctccacaaaaagttttaaactttgggaggaatcttaaggtgccatagttttctccaaaaacaagaattacctggttgattggagctgtttttttaaatacaaaattattattgaactcttccatttcaatagaataatctagtttattaattttattattactccgctataaatatggaattgtactatttgataatataaaattatatttgtataattcttacttttagtccattgatataatcaatgtaaatagtttgccctccaattattagttataattagaattggtcaaaattaatgttttacctttctaattatcccttgattccttatgtatcattaattcaatgcaaacagttaatctataatccaattatagatgtggatcaaactattagcactcccagaattaacactataagggagctaatattctatcctttcagaaagcttggattctattatgtataatatgttcccagccactcatgttataaagctcctaaaataaaagttgtaagaatcatcttctctgagaaactttaacgagtgaatcaaataactcaatgaacacaaacaacggatcatttatactcaggattcagattgatttactaataatcattattgtgatatgaataactctttcatgataaacgacatgttgatgaaagatgttattttatatcggtgtagtcatgtataggggtgttcatccaattcaattcgtactattttgctcatagtacatccgat

SEQ ID NO: 229764 - DNA, 1154 bp, Cannabis indica
atgcagctcgacagtatgtctaataggtgtatgcattttatgtagctgatttttttgggttgggtctgatactggtctgatgtagtctaatatgttgtttggtggttattgcattttattgaattgatctttattggcttggtccgatataggtacggtgtgggtctgacacttggtccaatgccatcttatattttgatattgaaattgtgtttgatgtggttcgatatctgtccgatgactttacacaacatgtctaacttttatttttgttgtatttctttttgcatccttcaagacctccacactttatacttccaatgtcagaccataacactgagcgtgtcacttggcgtggcagtaatttttattacccgaagattaaaacaaaatttgagaaatccaaattattggaaagggtgaaggaatcccatttcaatcaattcttcaagagagagagagagatgttacccgaacctactgagtccaaaattcaagagaaaccaagtttgaaacggctgatagtcaagaactttaatggggatgagtccatcatggtattcaatagtggatgttggtacaaaatttttataatagtttgtgttctacaattagaatcaatggtgcagttggtggcacatcatgaggaagagtagacatgaggcttatgaactattagaaaatatgactatgaattatcatcaaagagcatctgggaagaagaagacaactgatattcataaattagatacaaaaactagctactttgactgctcaagttgctacactaactaaacagttacaatagaatactgttactgccaatgctatacaagcatcaactgggtgcatgtaaaaattttggaggacctcatacttttgattaatgcacatcaactgataatattttaatgaatcctagttaagttcaagctattataattttcagaggtagttcaacaacccattctctaactcattcaatcttaggtggagaaatcatctaaatttcacttggagaaataatcaggggtagcaacctagtcaaaattaagtccaacaaaatatgtctcagcaatagcaagttaatccaccaacaaatcaagcttttgttggaatttattttaccaagatcttagatctactcacaagta

SEQ ID NO: 229765 - DNA, 1791 bp, Cannabis indica
gcaagagaagagagctttggagactttccctgggacactaagaagaataatcatgtgggacatggggaggatgatgatttttctgaggaaccttcggaggagccctctgatgagagctctagttgcaataaaggagttaaaagtaatcacttgattggctcatttgtaattgaagaatctggctctagcttatcagtccactcgactaaccctgtggaggagaatgtcaaatctcctccacaggcgacatgagaggtgttgcttggaactgtagagggttggggcagacctctacagttctggagctgaagtccctgctcagatcgcgctctccggattttgtgtttttgactgagctcaaggtggatgccaatcccctggtacgtactctgaaagcttttcacttttattttcatatctatgtgccgcccattggtattgctggcggaatcattttagcttggaagtttgggttttcttttgaatgtatcgcgtgctctcgtaatcatatatcgggcatagtctattcggaccccccttccaacccgtggctcctctcgtgtgtgtatggtccgccctacatccatgcaaagaagcatttttggaatgagatcatggcgttaggggatagatacggtggtccttggttgatatttggtgataccaattttgtccttaattactctgagagggaggggtcgtcgggtagagacccctttatccctttcatttcaaacttggtggagtcccgtggcctaattaatatgcacatccaaggggacatgatgacttgggacaaccaccgttcgggagaaagccatgtgaaatcggccctggataaaggaattatgaatgcagcctggcttcagcttttccctaaagctagtctctgctcggtccagacgagcacttctgatcatagaccgttgtgtcttgatacggcagggtctgagcctaagtttaagaagtgtttcaagtttgaggaaagttggacgagagatgttagaagcaagcttgttgttgccaacgcctgggattctgtttgccacctatgggcacccgcccgagtcttcaaaaagattggggctactagagtggcgttccttcagtggaaaagaacgcagtttgggaaactcgatgtggatatcaaagatttggagatggagcttgagagaattcagaggatgcctgcaggctctcgaaactggagtttggagtgtgacatcagacggaacctaaatgaagctagaaccaggaaagctatttactggaaacaaagggcgagaattgactggcttaaggatggagacaagtgcaccaaatttttcttcctctctgcagctattagaggaagaaggaatgccattgattgcatcttgaacaaacataatgtttggataaatgagagaaaattaattggtcaggaattcttggacttttttaaggatattttctctgattctaccaatgaatggcctctgaattgtggacatttatttagggaaaggatttctcctgaggaccaggttggggtagttgaggccccatcccgtgaagaaataagaagcactctttttgccatgagcaatcataaagcccctgggcctgatggaatgtctgtcttatttttcaaacactactgggagtttgttgggaatgatttctgtgatgctgttgttgacttttttgacaaaggtagaatgcataggggtgtgaattccacgaatgttgtgctaattcctaaggtgcaaaacccgaagagaccgaatcattttaggcccatttctctct

SEQ ID NO: 229766 - DNA, 1628 bp, Cannabis indica
ttaagtgtattataaacaacaaatatttatagcttagttggttgaggtgtatgaaatattatacaatgtcatgggtttgaatcccataacacacgttttttttactattttttatatatattttttagggcctcaaaatttaattcatcttaagcccatatattttaaggactagccctgccaaacatggaagcctatccagctgatacctggatgggtactcaaagggcttattgctaatattgactgccctagagtgtcacaaacatcaacctatgggataatctaaattgcctagtaatggttatacttttttaaacacaatcaaatcttgtctcctttgtccaagcatggtagtgcgcttacctcattcacctttttgctagatggatattgcagacctctacttttaaaggtgaaatctttgggtggcacgtgccctctacttttaaaggttaaacctcatagcgatacttgtccacagagtacaaatggcccctaattgtccagctgcagcacgcacgagcacaattatttccaaaggacccaatagttagctctcttttgcatgtaatttaccccattattaggctttgagaaaaaccctaggcgggtcatgggcatgtccataccaactacttaccctatacatacccttctatttccatacgaaggaggattagaaccttatatagctaacactctactaatattactctccgtgctcttcttcttcaagagaaacaaagggtgcagagctagggtttcttacaaaaatactgcaaacacatcaaatacgcccttagaggctaatatactggctcatggacagaaattaattaatacccaagccacgtaaaaaatttccatctctttactttctatattttattatttttttagttcttaaatatttggtttttgaaaatctcagtaaccatgaacatatatattttctttgattttgtaatatttttatttgtattgtaattgatagtttttatatggtgttatgccgttattcattaaatttagtatgcaagtatatgcaatcgaatcaagtaatataatgatgaagtagagtattgttcccacaatgattgattatcaattaccaattaattaattatttgtttttatttaaaaaaaaaaaattgttggagaaaagtaaataaaacaaaacaataattaaaatttagaaaaaataacaataataaagacaagaattattatgatccacaactatcctttattttacttattaatgcagttaccccaatgtatcttcttcctatttaattgataagttgaattaagtagtttataatctgattaacgacttacaaagccaatctatgtaaaaactccttttattctatggtaaagtttaatcacaaagaaacattaagcaaagtaactcataaaatcatacaaataatctagatactttcatcctaaatcaatttgcatccataattattagagcatattcaaatttcacttttcagaattttgattcgaattcatagataacaattatagatggtcagtaaataattgtaaaattaaaacaaattgtatggaattgaattaaaggaagaagacgaaattgaacaattacattaatc

SEQ ID NO: 229767 - DNA, 1166 bp, Cannabis indica
gaagcatataatcacaatcgcattccattgtgttgacatcactgtaattgtaaatgactatatgttttggacttaccagattttgcatatattaaaccataaacatgtaaactacatgtaaacataaatgatttctagtctttcattgataacaaatcagattagattgaaatgggttttatttagggcataaaatcccaacacagccgccgtcgcacgtcgtccgctcccagcagtcgccgtcgcacgtcctctgctcccagcagtcaccgtcgtacttcatcccttcccctgtagtcgtaggtttcaggtatgtctctggtcttctgaccgtccaagagctcctcccctgtgccctacacattccagccatatcctcatgctcgtccctgcatatcaacaacttaggggattgaataagttttttcagaatacgaaagcattaaaaaaaaaaaaggtcaggtcttgtcgtatgacatggtttctttgtttctctgttaatgggcaggtgttaaggtcgtattgtgatagtcaggagatctcttaggtgtcgggtttcttggtcttctatgatcgtggggggctatttttgtggagctttgtgttttcgagtcgcagcttggtgataattatggcttcgacaagttggaacaatggagatacagaggaagaaatattgtggtttcagattgaggaggaggatcttgaagaagttgcagtgatcacagggggaggagatgatggaattgatgatagatggtgtttggttggacggttcttgcctaatcaggtgattgattttgagaaaatgcagaacattttggcttcattatggcagccaggtatgggtatgtttgccaaacaattggataataatagatttcttttccaattttatcatgaagtagatattcaaagggtcaacaatgggagtccctggacctatgacagaatgcagttgattatagagaggctaaaggttggtggggattcgaaggcattaccgttgaacactcttaaaatctgggtccaactccatgatatggagcctggatgtatgtctgaggttactgttgctaaggttagtaatactatggggaagtatatgttggtattatatttatccaggatcttagatctattgcaagtatgttgatttaacaacc

SEQ ID NO: 229768 - DNA, 1188 bp, Cannabis indica
tcgagtatatcaaattacccctctctgttggagaaaatctaaccaccagaattctaaaggtgcagtttgtcataatcgacgttccctaggctttcaacaccatgataggttgaccagacatatgcaacctgaaggcgataacatccatctaccacatttgcctgaaattcccaacaaggcatgaggtaggatgtcgagaggagatcagcaatctgcatgtctttgttacaacttggccatgtccaaagccaagaaatagaagatgcatccaccaaaccaggagcatacaagcttcatgacagacttaggcatgtattgctacaaagtcatgcccttcagagctgaagaatgcaaagaccacatatcaaaggcctgtgaacaaaatgttcaatgttcctattggccgcaacatggaggtttggacgacatgcttgtcaagtctaaaaaggttgggggcatatggaggacctagacgaatttcaaaatcctccccagccacaacatgaagctcgaacccaaacaagtaccaagtcctttttggacatggagtcacccacaaccatcaaggaagtacaaagccaaacgcaaatttgtgtccaagtctacagacaaatgtgcacccttcttcaacattctcaagagtaataaatattcaagtggacagaggaatgtgaaaacgcattccaagagttgaagaaacaattggctcaaccacctatgttgtctaaacccctagacaatgaagagctaggcatacacctaggagtcataaaacatcatgtgattactatcctcacaagagaagaagatggtgtacaacaccttgtatactacatcagcaaaagcctaaccgacaccaaaagtaggtaccccctcatggagaagctgacctacaacttgctcttggcttctagaaagttaaggccctacttctaggcacaccccataatggtgtacaccgattaatagttgcagcaggttctacagaaacatggagcattaggccaactactcaagtgaactatagagacttggccaatataaggccacctatcaaccaagcatggccaacaaaggccaagctctcaccagcttcatggctaatcatagaggcatatctccccgaatctctcaaagttcaggagaaaagcaagagcaagaacacaagatgtacattgaccaccaacc

SEQ ID NO: 229769 - DNA, 1080 bp, Cannabis indica
tattcaattttaattatatatacaatgagaattatataatatatatagttaggattaattaaataatatgtaaaaaagtgtatataatttaaatatttcacaacttttgtatcctctcttttcttatatgtaaaaaagtgtatataaaaaagtgtacataatacaattaatgaatgagtacaacttttgtatcctctcttttcttatatgtttttctctaagaaatcagagtttcacttgagactatttcaaaaaagaataaataataaataaaaaatttgtattattattgggatatggggaaaaaagacagtctacgtatcaaccttaacatccttacatataagtgtcacataagagtgtgaatgatgtacatagggacctcaacacaataattgggataaaccaaatgggatttggggttagggaacaaattgacatgaaatttcaaaagcagaggtgtttaataagaaagattatatgagatatgtcatatcatatgtatatgaaatggtaataacaataataataaatgacaataaaagacaggaccaacttattgtggatggtatgttagtgaaggtctcctttagaggtggctgctgtctattttagatttataagcactcaccatattgagggacaatatgcaatgccattacttttcaactccatacacacacaccattctcttgctttgcttgggtccacacattaatgtataaatctatatatatttgcacaatttactgtatctctcttgtgtttgggttttaaatcttggtccatatcatttgtttattgaaattatgggctttggatttttagcccaaaatcacaggatcaaatccttccaaacactacattttttttaaatatatttattatatgtatactctgcaggttgttttatttgggtcctcaagttactggtgctagttgtcatgttaactttggagatccaagatcaaatttataagagcaactctaatgttaaaagttaaatctaaggttaaattaacactaaatttacactaaaaaatattctttattattatattattttattaaattatctca

SEQ ID NO: 229770 - DNA, 1217 bp, Cannabis indica
tataatgaatatatataatatatttttcaattaatattttttactatataaataatattttcacatatataaatgtaattggattggatcgatttttaattggatttgagattgacatccaataatggatccaatccaattagaatccaacttttagcatccaatccaattcaattgtaattgcatattcaactttttgtaattggattggattggatcggttcggttcaattagattggattggatgatgtccacccctaattcctagcatcatataattcctttccccacaatatattcttccaaacaaaggagccacttttagaagacttgattgacttaaagggtctatttctattatacaaccctttcaaaattgggctgccagtgaagaggggtcctgataaagccacaaagcttatttagccaataaaactttgttgactagttttaaatcctagaaccccattccaccctcttccttatgccaacataatttctcctatttttaccaatgcatttttatcttcacatcatcacccctaccaaaatcttgcacacatgtgatgaatattttttacgaaacttttggggagcttgaaaagggacatagtatgagccgagattgattgaatgactactttaataagaatttctctaccagccatagtgaaagatttagccttccaaccattaagcgttttccaaatagggtccctaatggaactaaacatggccgattgatagtcccaacaaaacaaggaaggcatcatagcagacatggcaagaagtgtcagtagctacccaccacccttcagacgcaccaatgaagttgatctcaaaaatcatagctataactggcagctcttcaatcaaattagcttgtggagcaaaactaggcatgttcttacactttcgtgccatatgacatggcttgttatagctgtaacacatgaaaaaaccagaattatttctattagggggtacttccaacctattaattttgttctttaatggttccaactctaattgttattattagtatgagattgactgttgcggttcagattcactttgcaattcaaattcttaaaattgttcctattgggtttcagaatagtagtgaatcttttattagtaatgttgttgtttccaacaacaagctgttgcattttatgacctaaataaaactccatttcaatgtaatctattttat

SEQ ID NO: 229771 - DNA, 1593 bp, Cannabis indica
ctgctattttagtaaggattctttacctagtgtaattgcatccttagttgtggatagttgaacttttagaaagctagaaatagaaaacgaagcagagaagagagtaaatcttttattctctgataatgattatacaagggagaggttcatatatatatacctctttagtagtgaaaacacttaaccaattctaacaaccaaatacaacagacaatgtaacagacttaatagaatacaacagaccttaactaactcttaatcattggtattgctcgtatcctcaacatgaatgatttgatttaataaagattaatcatcattattcaaaaaaaaagaaaaaagacattatgtaaatttttaaattttttaaataatttattatattaaaaataaagtttaaacaaatcacacatatttttttttattttagatctttacacaaaatagaaagtttgacagtaacttttactattataaattattcgaaaattttaaaaaatgtaaatcttaaagtgactaccaagttcattgtggtagtagcaatgcaactatttcatcaagaattaggatgatattgatatggtgtttagtaggtttgcttgactttgtcaaatcgaagaataaaataaataatagacaaagcgatactaataattaataagtgtaaaggaacagaaggtatataaataagtagttgctttcgtacgttataacattggatcccaacatcatattcatatttatataatgataatatcctaaattaaaccaagttgatacatatcattattatcattattactgataaagaaagatctaattaataaacaaaacactgtgcatgtaaagggacgagcagggtttcttcttttaaaatggaaacatgcaataaatattgatactactagagtcttacttgattattaaaaatgagaaaaatcctaattatataagaattattaaacactatttctattagtataatttatgaatgtgggcaaaaataaaagagtagatactattttagattttatgtacttttacattagactatacattaaattctctattattttcattatattatttaaatatattttacttatataaacaaaaactttagaaatataaaatgaaaaaatagaaagaggagaagaaattattaaaatattatttgaaacatcaatattgcttcactagacaagtcttattcataatgtaaaattttaagttattttagcttatttgatggagctccttataataaaatttcttcataatttactttgagagaaattatattgtatactcactttattttatcggctttaattttaatttttatatttttttaagatatattcatttttataaatgatatccttattatacctttgaagttaatataaattatatgttagatttaattagagagtgatgatatattaggaaatccactcacaaaaacagatacattttaataaataatataaaaatatttttaattaatagaataaaaaataatattcctcaatttatccatttttaccatttttaattattttagttctattaaatgagtatactctaaat

SEQ ID NO: 229772 - DNA, 1179 bp, Cannabis indica
gaataaatttgtacaaattaatggagggtataatttttgatatggggtattttatgagggtcaaaaaaatgaaatttctcccaatttattatgaacacgaaattcaaatacttgtgccaaagatgatccattgacatatagagatataacgaataattttgataaattgaaatggaaaacatcatgaacttggaaatggaattgatgtattcctatttcatatggattcttgaagatccacatgagaatgtcaaacttattggttgcaaatggagaagaaaaagatgagtggatgggagagtagagcctttcaaggtaagactatactcgaaaggaagaaattgacatgaagaaccattttctcctatagacatggtaaaattagttgaagaaacagcttctcctatagatagccatggtaaaatcaattcggatactcttgtccattgcaatatgtatggattgtgagatttaacaaatggatgtctcaaggggtcggagaaaaaggtcaagagcaaaaagtttgtaagcttcatacgtgcatttatggactcaaataagcatcaagatcttaaaatcttaaattgggtaaaataataaaaccatttatttttgaacaaaatgttaatgaaccttgtgtctataaataaattaaagataagatagtatttcttattttttatgttaatgatatttattgattgaaaatgacgtagaaacattatcaaaagtaaagaaatgatggttagatgaacaattctaaatgaaagactcttaatgatatttcttattcaaatacttaggaattgaaataacaaagtctaagtaatgtctcaagcaacttatattaataaagtgttagaacattttaacatgcaaaactccaaaaaaaagtgacatgctaatccatagtggagttatccttttaaaagagcagtgtcctaaaacaccttaagaaaaggatatgagacaacatccttatagttctacattaggcagtcttatgcgtgtcttgttgtgtactgacatttactatacagtagggatagtcgttatccacccaaccatggattgagtcattgaatagcagtaaaagtattcttaagtatgttagaaatactagagattacatgcatgtgtattgaggtggtgccctatgtattgaggtagagatgttag

SEQ ID NO: 229773 - DNA, 2822 bp, Cannabis indica
aaaatggtacataagactttggagaaaacgccattcaaccctatcaaaagctttggacatatcaagcttaagggccgcccaacaaactttcccatgcatcctattgttaatggcatgaactatctcattagcaagaagtatgttatcaaagatgatacggccagagataaaagcactctgatggggggaaatgattttatccaaaaccacctttagacgatttgcaagaatcttagaaatgactttgtaaaaggtggtgcaaagactaataggcctaaaatccttgagagaatgagcacgttgctttttagggataagaacaatgagagtagagttaatcgttgcaaaatctgcaccattattaaggctatcaaggatagccttagtaaagtcagttcccaaaacagaccaatttttctggtaaaaataagcattaaggccgtcaagaccaactgctatatcaccagagatttgaaaaacacctctcttaacctcatccagagtaaaatcttgattgagaaaattgacatcaggctccgcgaacccaggattaagagaagcaaagatagcagaagcaacatcaacatcactgccttgagaagaaaaaaggttttgaaaataatcagttataagattgtacaatcccctcatgagtattcacaacagagccatcctcagccttaagaaatttgatagtattcaatttccttctgaaggaggcatgcttatgaaaaaatttagtatttttgtccccagcatttaaccatttaaccctagctcgttgtctccaatagacctcctctttataaagcagagtatctaaagcagacttaagatgactacgcttacgagactcctcaaaagtaagagcaatcttattttggagttgatctatttcaaaattaagctgggaaattctggtcttaaaaagagaagtatattttttactccaagacttgagatgattaacacaatgatgttgcttattaaggaaagactggaaaccagaggcagctataggaatagagttatcagaccaaacttctttgacaatagaataaaaatcagaatcttccaaccaggtattttcaaactgaaacctcttattgacaaaactaggaacagtatacgaattattatcaagaactagcttaagaactctatgatccgagccataaaaacctaagtagtgcaaagagttattaggaaagaggtcacaccaagactcagagacaacaacccaatctaacctttctttaacactagaattacaccaagtgaatttattaccaataaaaggaagaggaataagagaaaatttattaagaaactcagaaaaagaagaagaatgagaactagaaccaacaagacctccatatttatcactactaaacaaatagctattaaaatcacccatgataacccatggaagattaggggcattatgatatatcttatccaagagatcccaagtaaaacgcctagtacttccaccggggaaccataaaaataggtaaagtgccatatattattagagttaaaggagatattactatctatatgattaagggaatagtttaaaatatttacattacaattagctttccataataacattaagcctcccccaaaagacaatctagggacttctaaccccaaatcaaaacccaaagaagtcttaaacctattaatagaatgaggcttaagtctagtttccatcaaaaaagaaccaacggcctatgtactttgaccaaaagggaaagctggttgaatgctcgagagttccctagccctcgagcattccaactgataagagtcattattctgggcgagtgtgcccaacatcacccacctgttcagatggtgaagttgtggaagcaggaacaaaatcattatctccagacatggcttgcttcagctgtgaacgaagagagccaccaacttggacttgatgagagtgaaaagtaggcctcttgacccctgaagcacaagcaagacccttccctttgaccctaggatcgggagcagcaccaggcccttccacattggttcccaggtcaagagaagggatggcatcagcaagtgaccttgcagccagcaagacctcaggatgctgaaattcagatgtatcagagataatattagaatctgttggtgcaatggtcatgatagggacagagccataaggtgagagattaacgtactcagtaaaatgtgaggaaacaggattggtgaggttctgattaacaaggtaggaatcataaggacactagaggtaataggcgatcctaaaaacgaactaggtcctatagtagagtttaacagaccaatgaaagtatacgattgggccaagaatgggttcatcaccctttgatcataaggaagagagtgcgatggcaactcagagatggtaaaggcaagaggatgaggataatgaaaaggcccagtcttatccattgatttttccttcccccgaagaaggatggtataaggactaggaggtggaactggattttcatcacatttttgtaaataagcttgacaaaaccttttggtatgatcaagcttaccacagtaaaagcgaaaatcagggagtcgctcatatttaaaatctaaccacttggtaaattccctacccatcttaaggaaacgaatgttaatgcccctccgaataggtttattaacatcaagaaggtatctaccccgcaaataaggcccagtgccctctttaatagtatcctcatcaacttgaataagacactcaaacccgaagctataaatttagcaaggtcataagatttgcaacgaaatggaatgccata

SEQ ID NO: 229774 - DNA, 1493 bp, Cannabis indica
ttctgcacggctcgttgagtattccactatggacatgccagcgaggcatcctgctcggcatgttaatccgactaggtgctctaagtagatgccacgtgtcaccattcctgtgatgccacgtcagagtgccaattttgggataacaaccctataggtggagaaacttttcagcctttaataatgcatccaatgaagattaaaggcaaaggtgtactgtaccaaaatggtcgtgagtgcattatataatttgttaaatattttatattattttaatacattagatattattttgaaataaaaaataatttactaagactaacaccgtgggtatgcaacactatctttatatgtttaaataataatatttaattagataattagatattattcaataatatttcactatcaattttttttttgtttttttacaaaatgttaccatgtttttttaatatacatattgtgtgtcgtttaaatattttttttggttaaaattaaaataattttgacccttttttttagaaaaaacaacataatcaaataaatacttttaggatatttttttaattaatttacctaatttgattttgttatatatatatatatatattttgttaggtgtggtctcgtttgattttaattattaatagctttctttttaatgttgtattaattgtccgatgttattttctatacaatattggaaggttttgtagtataccttactcatatatcttcttgtgtttttgtcttttaaaaatacataatttttttttttttaaaaaaaagcgtgttgtaatagtttaagatatctaaaaaaaaattaaaaattttttaaaacaattcttttagggaaaatataaataagcagtgttgaaaacataattatatatatatttaaaattaaaatattgacaaagatgataatacgataagagttatttcagtagactccctatttatttcaccaatgagagatttttagttttattttttaataattgtgtacgttgtaattatttaggatcacatgcatgtaaattttaaaaaattctgaatagtttatagtgttaaaaataaggttcaaatatatttttacatgcgtgattgttttttcttatcgtgtggtaagtaaataattgagttttattttctgcaatataaactattcataattttctgaaatgtataagtgatcataaatagcaactatgtatgggattctaaaaaaaaagttggactataaagctctttcgaatgtcaaagcagataaataatttaccgaaacaatcctttaaaaaagtgtagaacatatttccactgattaaatttattactatatatatatatgggtatactcttaatgggtattacctatgaatgggtattctattattaaccattggatcaaatctaatggttgatatttataactattaattaaaattttaaatttaatattttttattttaacctactacctgatgacatgg

SEQ ID NO: 229775 - DNA, 897 bp, Cannabis indica
agctctcttaagattacaatgtacgaatcaataggcaaatctctagtgaaagagatagagtcttgggcatgtagaagagaggagaagagagagttagggtttttagacttgagttaagagcttagggagtttggaggcttaatgacttaggattttagagtgaggctaaagctctttatatagtagaccttacttgcctaatatcccttagatataggtaaataaattcattatttacataattaattaataaaatacaaatgaataaatttcccttcaaaaatagatatcttctctctatttttatgggctttcaaggcccaaactgttgcttgacttgctgtccacatatgagagctacttatcaaaatcttgccaagtcaaaggctagctggtcggccatacaatgcctgtaggtagaggtctggcctgtcatgttcctgccagggtctggcagatcatgttccttctagcattgtcaagagttggccaggtctttgcatgtgttggccatccttagtaggtgatggctagccttgatgatggccaaccttggtgatggccaacctctgtagatggaggccaacctttataggtggaggccaacctttgtacaccttttccttgcagaggttaggctttcttggtcgaacagacccttccttagtctaaaagtcaccttttggccggctagcttgtgcccaagccctggctagccatataagctcatcttggccaacctatatgccccttggccggccagacatggtggtatagctccttgacgactcgcttatctccttttgcttgttgcttgacagtttttccataccttgtaaggagactttgtcctgctattgggaaggctgtattccgtgtgtacttgtccttggcata

SEQ ID NO: 229776 - DNA, 797 bp, Cannabis indica
tactcattatcttcagcattctaacccaaaaaaaacaaacatttattaatctccatttctaacaaataaactcagaactaaaaaatattgctttaatctattaaacatcaacctgaaaaagctccatgagaaagtgaacatctttggtgtaaagctcagctgataatactaaactgtttgtatttaaactgttttgttctgttattctgttagttaaattcagttaggtcagttagtcagttgggatattgtttagttcattttgctgcctatataaacaacagctctttcattgtattcattttaacacaattcaataaagaaatactttcattttctctgtttctctgttctaatatggtatcagaagaaaactaattcccaagctttttccaagcttttccaactctcaacaatggcgaggacgagagccactttctctgctacacccactgatcccgtggatgatgctcctgctcaaatcgatccttcccccatctcatacttctgctgaaatcaacaacaatccagctcctctacctcaacagcaacctctaatcaatcgacctgcatatgaggatattcacagcccatattacctgagtaatgctgatcatccaggcatggttcttgccactcccatcctcaccgatcgaaactttcaaccttggtgtcgtgacttcatgatttcaattggagctcgcaacaagacaccatttcttgaaggtacaattcttaaaccttcttctaatgatcctctctatggttcttggcttagatgtaaccaaatggttatg

SEQ ID NO: 229777 - DNA, 1106 bp, Cannabis indica
gaggttagggctaatctatatagaaaaaagttcagaaactcataagctgtagataaaattacattaatataattgaaaaatcaccgttctttatcacccacaaagtataaacacacatatataagtagttcctaatattctagccctggttttggttttcaggcttccttaacaacaagattgtgcattaaaggtagcaaatttatagtaaattggttataaataattcaaattgcagtgaagtttaatagcaattttatgtaaattcatgattcctttcaagtactccaatgtcagagtaccagtcttgctcggaaattctaatcagaaagcaaaaccaggcttccaacgctcaaacaaaattacagggaaaatgggataatggggagaataaatatatttaaaaagttaccatattcggaagaatacgagagtcacgaatgtggcagtaatggccgtaaaaaggttatggttgcggagagggcgattggtataggcgaacttcttccggcaacggtatctcgtgtggaagctacggcaatggaagaggtcctgagctttggtgtggacactgtggagtggtgtggtagcggctggcctcgtgtttctccctctttacattgctatgtgctttgtaatctaaacggccacactcttgcttctccactcctatctaataagaattctatgaatatttatttataaaactacatttcacataattacattttattttattattcatttttgtccccgagtttttataagtaccaaattgatatgaatatttaaaatttatctaataacaatatttcttcccaactattgaattaatgatattgtttgataaagcaggtacagtacagattatcttcttttgaacatttataggcatcatttttttattttattggctcttatttccaatttcaatttcatggaggttgttctaattggcttagcctattattactttagaatattttattaaacttcctaatatttttattgaacttcttaataataaaattttcttttggtggcgtttggtaacacttttttttaatcagttttctatttttaaaagtagaaaagtgaaaatattt

SEQ ID NO: 229778 - DNA, 2783 bp, Cannabis indica
gaaagttcttatttttcttttaacttccacattgagatgagatgaatcattactaaataatgtttgtttaaaaggtttatggccgaactgggggcttttcttttaatggatgatgctggtgccagtatttctattgaggagatgtatatgaatctttctgatgataataatggatgttcttgggagctttttcaggcctacaaacaactgaagtctcttggctacgttgtggggcggcatggtatcccctggtctcttaaacatgttaagagcaatgctgattctttttcttcacaatgctcctcaaaaaatgtagtggatttgaaatcccaaggcgaaatctctgtactaggagtgtttagtaggctgcaggttggcgaagttaaaccagtatttgatgtttatctcccaaataccaagtttagaaagtcttcacctggtgctccaagctttgtggtctgctttactaggtacattgttttagtgaattcttataatatgtgagcttgaaatttgttgttaatacaagtttcttttttaaatcttgctaggatggttttttatcattttgtgtatgatactatacactgattttacttgatactatatgctcaaattagatgtttcgatcattacaagttccagttgaacaattcaataaagtgtctttctttttccgatagagatttgttctctatcaacgaaagaaatctgtcaatctgaaaactcgaagtgcaaatcaatttccaaacttttgagaggcttggttcccaatagagctaggccactaattaatagccttagagttacccctattcctagaacaagtataatatcttatattatcttctgtattttcctctccattttctttagaacaagtcaatggaacagtttttgcatcaactttttgctaatacttcaacttaacaagcatttgaccactgtattaacgttgttgtattggatttcactgctagactcacatatccatttgtggattaattgctaagtgtttttttgttgtttctttagcggctatccaccatccaaacccgatcttcaacacatggagagaaaatgtggaggaattcctttgaagttttttcatgtggagcaaggacgagtgagtttcatttcctttgacaaagtggagctttctatcctaccatgacatgcagttctatgctggtgtcaaacacatttgaagacattcgattaatctgagcacaatttgatttctagtttcttcagcataactacaaggtgtactcctcacaggattgattggcaagtcatgcccccgtttggttagaatagatgaaaggaaaagcaatggtattggaatttctgcacgtaattttcatatcagtcaaagcgggtcatgaatatataatcacccatatttggtggactcttcatcagaatttctcaatccccatttaggaaaggatttaaaaatggaccgattatattggcttgacaggtagcacaaatcattttgttgagatttcttcccaaaaatttcccatatttaagatgcatgatgcattgtccacctttataattgtttatgggcagtgattatggtacattaggtctgttcgatttgaggaatagaatggtttatttatggaactccaccataaggtgctaaaacactgccctcttctcctcattctgtacttggtactggtacgttgggcttgggtatgaccctttcaccactaatttcaaggtggtaaagatttcatgtcgagacaggaatggtgttgttggcaatcgtaatttgtttaaagagggtaaccaagttgggatttatagtttgagaagcaattcttggaaaacaaaggcaatgcctgacatatttttcagatttgaatcatatactgttcttacataacttttttatatgtagttttaattaaagtaaaaaattttagagtggtttatgaacatgcaaaagcaaaaagaaaaaagtggactatgttattaggtagttatatatataatccaccacatacaatatatataatattcccaagtgttaatagaagaagctattacatatagtgactcatcactacaataacacagaccaataattccaccaaccataaaattaactaggacataacacatacaaaccaaagtccacattttttttatatatttttattgaaaaattaggattaatattattttataaaataattgttaaataaaataaataaaaatatatatatgtaaatagtttttaaggataagaaggtgggcatagcatagccttaaaacccggattgggaaaaagagttaaaaattggttttggactaagtcacaatttgatcaaacaaatccaatccaataatatgacaaattaacaatcaaaattgggaataactatttataaataataataaataaaaaaaagtgaaactaaaagcaataagattggcagagagttcggcgggactgtgtttgcattagcaattgccattttctattttatttatatttttatgttttggatcctcttttaacaatataaaaaaataacatgagatttatgtaatacactgctctaaaagaagtattttagtaatccttacctcatttatctgtttttggtattttgtaaattatattggtggaaaattcacattgcagaagatctaaatttattggttacttctcagtcagtcaaacaggagcattagccttagtagtagtgctggattagttttacacgttgctcttccttttagttatgtaaagtctgatt

SEQ ID NO: 229779 - DNA, 1541 bp, Cannabis indica
gctactttgttttgagtgtgtcttttcaataaaagatttaaccaaaaaaaaaaaccatgtcaccattctatgtttaggaatattgtacctctcccaaatattgtttgcataccaagtgggtgtccctgcctttgaaaacaacatgtcacaagcttttcaaatggaatattttatggtcttaatctggttttctatatcgcaggtcaatatttgatctctcacttttattacttttgtccaataccaactactatcttggtggattttatactcccaccaattcaaaccttttatataaactttgtgaactcatttcacccacaggttgtcttgtttttgagccaaagcccagacgtacttacgcatggctgtaatattccactcttccaaccatctaaatcccaaatcccaagcttttttggtttacacacttccttccatgccactaatcctggtgctttgtatcccaccgaaccatgccaaagataatctctaaagatccttttaatggcttgcaaaacttttttaggcaaaccattacttgagcccaatacgagtgaaaggcaacaagaacgcagttgcctaaattggcccttccaacatatgaaagatgtatagagctccatatttgaatccttgcaaccatcttctctatcaacacttcacattccacactagagatcttcctaaaacatattgagaaacctaggtatttaaatggcagcgttgattgtacaaaaccagaggcatcaagaatctgttgcacatcttgactctccatacttgtacagaaaattattgttttattagcatttgcttggaagccagatgttggagagaatctcttgaagcttcgtagcagtaccatgattgattggacatctccattacaggacataagaagatcatctgcaaagcaaagatgagtaagtcaaagaggcttacattaatggtggtacttaaagccttctgatgcgtgtcgtaagccacaacaaatttactaatattttaatctaatacctccaattattttagtataattataagtaaaggtcgatcccacgaggactatatttattcaattattcacaaattagtaactataattagagaaggggttttgatgattagaataaaataacaataatgaaaataaaaagaaaacaagtttaaagagagactatacgatatgagaagctaattaaaggttattcgccaccctcaacaatcattcctaattcctattaataaatgtaatttcagttttcaatcaaactattaatcccgcagataaagctgaagcagtcaattattctaatctccttattgtaggtaattaaggcgaagcgctcaataattaactcttttacctaagcagtaaatccacgaagcatgcaatttatttatgtttttcaagttattcgtgaatgctaacgaatggttctggcggatatttacatcttgcgaacatggtagttcaattgagtgggagcgctgatcatagatatgaaatctataacctctataagtatttagaagtg

SEQ ID NO: 229780 - DNA, 701 bp, Cannabis indica
acttagctgctaacctgagtttggatttgggagatcagttggttgagcgaaactccagttgtatccgccatcatgggattctgagacacacactctaccgatatgatcaaacgatcgcattaaaacacgcaagctccctcttgaagtcttgtaaggaacaggctgaatcacactgagagtttcattttgaatgtaaatagggccatactttctccatgatctacctgcatcggcagtgacctgttcaatgataaaaacaactcaatctccgtttcaaatatcacgaaattcatccagaagtgagctaatctagtttgtttacacaacctccacccatgatccccaagaattccaactttcaacagaggatccacagagcaattgtccattttcgagcaagattggctgatttttaaaagttggcaggcagaaaaacatgtcaaagtgagcttgaaatatgcatcaacatcaatgatagaaaatgtaggtgtaccttgttttttattggtcccaatattccagaaggaagttgctctctttctgaccagcttatacctttatcatatgaccgtttcatgcatccactccatctaaaagagcaacagttagatactaaaagagcaaccctttgttgtgacatgatattgtatcaaagattcaaggaaaaattcccaatccaattgaatctagaaggaaatatg

SEQ ID NO: 229781 - DNA, 1168 bp, Cannabis indica
ataaaaaaatcatattaaaagaaaattatatatatatttttggaatataagaaaataaccaacggaaaccatgttttggaataaataattaaaacgcttaaagtaataataattaaattttatatctctttagcattattctcatataaatttgaacgtaagactcattctgtgttaccattattatctatcagctattttttttttcttttttgatatatacatttattgggatttaataataggatgtttggagggtaataaatatattatttttttataatatatttatacaaaattagatttgaattgaaagatatattagagaaactatgaatttgtatattttcctattaatttatcagttaatttaattatttaattatttttttaatttttgtaatttaaaataattaatgatatattactgtttggaatttgaattgtgggaaaaaatggaaaatttgagctaacattacaaattaaattagaaaatgaacaacaaaaatactattttgaaaaatgcagaaataattttcactctttttcttccctttctatttttttcacaaaagaattccttactaaaatctgatttccaaagaaagagtactcactgcatttcttttgtttgaaatttatattgcttaataatcgccacacactttgtgcatactttgggtttgaacacagaatttattagaatacataaatggtgaattttaatagagaaatcactttatatatttactttttaatatttttttttatttttgttttattttagtggttgaaatgtaaagtactatgtgagtttgaattaggatttaaattattctgttactatgtaaattttcataaaatattaaaaaaagtgttttgaaataaaaaaattcaatttaatattggcttaacttattttactttaatgataataattataaactattaatttggatacatagtttcacataataataatgctcaatttttttataattaaaagtattatttttatgtttgtaacattatctattttaagtatcaaaaagaagtatctcattttataggacaacatactgtgaacaattaatgaaaataaaatctcaaaaattcaataggaagcatctattatttccaaattaatctcaaacatattactcatttt

SEQ ID NO: 229782 - DNA, 1136 bp, Cannabis indica
gggcctccttttttggaactaggacaatggatgtgtcattaattaccttgggcagctcacatgtcctgaagaagtgtgtcaccatggccagaaggtctgtttgcaccgtgtcgcaatgatgggagtagaagctggtggggagcccgtccggtcccagtgctttgtcttttcccatctcaaagagggcagtggttatttcgtcatgtgtaggaatggattggaggctctcggcatcatgattatcaagagttggtagcagaatttcttggagtgcatcggttgtacaattttttgaaaaaagttcttcaaacttagcaagaaagcagtgagtgatctctttagggtcttcgatccagttttcctcaagggccttcttgatgcattgaatataattccttcttctgcgcacagtagctgaagccatgaagaacttggtgcacttgtccccttcctgcagccattgaaccctcgatttttgcttccaatgtatctcctcccttagtaaagcctctgcgagttcacctttagccgaatggatggctaagtggtcatcaggtctattggtttcaacgtcatgtaaatgattagtggcctcctccacttgtcttttaacattcagaaattatctttggttccataatttaagcattcgacctgtctttttggcctttctatggaaatcgatcatgtgatggtggtgtaatctctgtgcccaagcgtcctttacaatccaaaaacatcttggatctctagcctacatgttttcgtatttgaatgtctgactcttgcaacgaactcccccagaagtgtcaagaaggagaggcctgtggtccgagccagtggaggagaggtgcttgacaattgcgtttggggataggatgcgccagtcggagttaaccagacccggtctagccttgctctcttagatgatccaccgttgttagatttgtttctgtccttggcccatgtgaagcaggggccttgaaagcccaagtcaattagccccacccgttggaccattcgacggaagtcaaaggcatatttggatgagttgccctgtttagcgtagtggaaacactccgaatccgtgagatttccattcatgtctccaatgaggaattattgacaatatcgcc

SEQ ID NO: 229783 - DNA, 1251 bp, Cannabis indica
tttattttgttagcacttgagaaaacagtacttgttttgctgatcctagctcacgtatgcatgaagtggaaacacatttgtgcacaactaaaaaatcttttttttttaaaaaaaaaaaaaaacacttctgaacattgctttttatccaagaaaaactttacataaaatataatattattcaattatattttacttagtattattggccaaaattactagctagctagcacgttagttggacttagaagctcattaaaggagtactacagagataaataattatattcaccattaattaatcggtaaaaaatttcttgtgtggatatggtacttaaattaatattttaattcattatttactttgtcctgatatcattggttctatagcttataagatatactagaataataataccaataatgacgtttcctaagatttgatttcgcattcatttgtgttttaattctcacatcttcaataaagcttatattactatttttataaattatagcataccattaagtaccttgatcgctaagctgtggatcttttattattattattattattattaattactagtgttattattatagactgactaagctattattattttttaaggcttttccaatatatatttattcgtcactcgatatgattgaaactagagtgggcacaagttttctcgatcgttatattgtatattcttcaatgattatggaacattaatgagtatagatttctatttcctttccttcaaatgctataacatttattttttttgctcaaattaaatagtataacattcagccagcattaattaatatttgtgttcttactactaatccctttgtttattagattcttctgatatatgtgtagattatttccgttctctatcatatgcatggtttatttatttgttaagtattttttttttttgaaatggtttgttcaagaaatttaaaataaaatgttttcagtactaaaattgatgtacatgtacatcacattctttcctctaatttataatattacgaaatcatattatgcatggaaactcttttccatccttttttgtttcttctatttctttaagtcataaatttatatatctattctatctaaaatgtgggtatataataaaattattcgtttatgataaattattgggtgatttttttgttaaataaaaaaaataacaaatcagagtcaccatctatatatttccaatgacatggcagcca

SEQ ID NO: 229784 - DNA, 1318 bp, Cannabis indica
caaacccatctttcaaatctaatatcctcaatataatgcaaccacatcattcattgcttttatcttctcaaattctctatgaaactttatttttgaatacctgtaggcacaagtgtaaattgatctgaatacgtcagtctgtaacttgtggttgacgctcacagtaatgtggtggtattatgcaccttgatatgtatcagggaacacgagctctaaatcatgaaccaacaaccatttccacagaaaaattagccaaaaaagcaacaacccacaaattgaacttctgaatgacattctaaactaaatgtgacaatcccaaaaaaatgcatgaaacatgacttacccattgattctaatgacggtgcacttgcttcctcaatgtaccttcaatgagagcttggagtaactaaattttttaaaatatgcaagatttgagtgtgatttggttaaggagaaaatgagatatgtgaagtgagtgaaggaagaaagagaagggaagaggaggaatagattttattatatagaggggtattatagggataaaattaaaagtgtgcatatatttttaatataaactttggattaaattttcattttctccaaaatatatgcatataaactcaaattttcctattcagatgacaccaatacacacacacacacaccaagtagtgttgttcacaattttgttttgcgaagtaatttaaccttgctgtcaattaacccttctaaatcgatattctttcttatttttttcctattctctttctttttcttcctttttttgtagtttttatttttcttcttcttcttcatcattcttagtaccatcgccagaaaccacctttatccaccataatcaccaccgaaaccaccactgcacaaccaccactacccactaccaccgcaacaaaattattgcaaccaccaccacaaccattgcatttattaaatccaaatcaacctaagaaacacaaaataaaagtgaaaatctaaaaaataatcttaaatgtggaaaacaatctctattctaatcgattgtctttacccaaatcacaaatccaaaaaacaagacccacctgattcttatcataaacaacttatcaagacaaaacacaatacccaaataagaaaatgaaataaaaaaaaaaaaataaaaagaaaatgaatgaactgatatcattggttgggactccgacatcgtgagttggtttttggggtttacgactttgaatgaacagatgcctcctttccctactagtgtgcacagacaagagagaaagagaagatgaagggtggggtttacgggagcagggac

SEQ ID NO: 229785 - DNA, 2713 bp, Cannabis indica
caaagtagaaagtaagcatgatcacaaaattgaaaattgagaaaaacactgaatcgaacaactctggaccacatcttatacaatcacctaccccacatacactctaaagagaacttgtaccaaatatggcatactaatgaccacatactaacacccaatttaccaaagctatgcatcagtctttctcaagtcccccctcacaatctaatggtactgactttgactgggaaaaacagaaggtggttaaagatctcagacaatttaagtttattttttttgtttgtttgtgtgtttggatgtacgcttctacatgctaaaatggttttttcgtgactctttgttttcttaaatcctaactaattaaataatgtgtaatatgccaataatattttataatcagacaatatatattaaaactgtttcatcagggcaaacaaagaaaggtcgtcgtgtcagctattgtattcaatatattaatgaaatatctgtctaggcttcagctagtctagcacacaagcttcaataaacacttctacagtataattgcttaaatgttacaatatctaaatatcttgaagaatacatgatataagaatcatcgagttaaatcatccttccttagtactcaaagatgtaaacaacttaacactaacagatgaggagacctttaatgacctttttctaaaactcactgactttggaaagaattaaaagcaagcaatgtttctaaaattatttttgaaaaagaaaatccattagcacaaaagaagaggtgaaagaaaaaaaggattgttcttcaaagaattgggatgtacatatgattggggaaagccatggaagtacaaattctttttcattcatgtagtaaacagctgaaagttttatcatgtgcaaaagatttctctttattaaatacctaaatgtaacatctaatctaagctaatactcattacaaagaaacaatatagtctttaatacttaaggcatagcttcataagctaaaaaaggaacagctagtgaaaaagaaattctcaacagtcttggcctggcgagagctagcgattaacaaatgcgaaaagtgcatgaaaagaaactaaaatatcactatattctatacctgtatcagatcaaccaaacttttatgacgacttgctgaagaaactccgtcaattccaagcaaatctgcagcaataatttctactaaatcttctgaaccttttgaaggtaaactatcctcctctaccacttccttatgagtagaaagtgactgctgtgacagatgcaaggatccattgccactgtcatccgtagaagtcgatttcaaattgttcctaaagctacgaatgtgaagcagcaggtcacggttttcctttgaaataatgggtggaggaagcctcacattcaagttcatgttagagaaataatatgctagataagcagggtcggaccgcacttgttcctcagactctaattttcgcaatttgctttttaaattatccaagctagaattccaactaatattttgttcaatcaatagactcctaatagctgcaaatgaaccctccatacttggtggagcactaccacttcgatttggtactaaatctgcttggtgtttttgtagactgggatcattcataaataatcccaatttctctactgccatacttcttagtggagatccaaaggtggtggtatcttccgaagagggccactttgtacctctgctgctttccactactctcataggactctccattgccatcctacctagatagtatattattaaaataaaattagaaaaatcacattagtaaaagtggttcttccattacatttccagcaaagctcttccacaaatttcaaggaataaattagaatcgcaaactgtatgtcaacatgttgaagacacaggtcatgattttacaaagtagcataaaccactccatcctgattagaatttacaaatgacaagaactaggtatcccttaagagtagattttgatgcagataagaaatgcgtttataccaaatacatcacttttaggttcaagttgaatgcaagaatcctatgaatagggccataaacatcaacaatctttgccatgaagatatgaaagagaaaaaaatatgcttaagaataaataaaaataaccaaataaaggaagtttaagaaagctcaacagtaataccatatcaaaaagctcaaagagtcatatatttctcttcttaacaaacagaattttcaggatttatgattgcagccactccataaacactcaaagtttcatcgattacacattcaataccaatttttcacagaactctttaacaagtatctcgatatactctcaaataacacaataaaaatcataaggaaattttattatacagagaacaactttccaagcacaaaaagggcaattagttaacatattacgagttgacacacacacacatatatatataatctaaaagctgctgaccaccaattgttaagagtatatctcattcgatcatttcacatacgactatatctcatagaattatactaatccaacgcataatttgtatctctattttgatttcaagtagtaaattcgtaactataaattataataaatatatgaagtaaatcaaaaccaaagactattttactcctacgatcataaatggaatcatctaatataaaatgatcaaatacactatcata

SEQ ID NO: 229786 - DNA, 999 bp, Cannabis indica
cactctttcttctgactttaaaacatccttgaagtctcctcgtatccaagttggcaccgagcagacatcctccttttgaaaatcagtgtaagggtcttatggcttcatgattatcgatttttataaaaataaaattaaccaccattcaaaatcacaacttctttattaattgcttgaaatctcacaatgaatatgctaggtttcaaaactcccaccttgtcatcccctttgtctttccaaattctacgagcaaaaccttcaaatggacccaatggagggttcggtcaaaacacatcacaaaccatggctgcctttcaataaaacacttcctcttcaagatcctcaatttcaatttttactgcatcccccttttgaactttcttagactttgtctccccaaattatcattccgatttctaattaatgaagttgatggatgtaaaattaggggggatgttatttctggattgtatttgagcttcacaacatttagttgcttctaggttcaaattcgttttactcttccatttgaattcaatgtagtgaagatcttggggagagaacatcaacaacatcctcaatggttctaacttccacatcaccttgttgtgtcgccgtctcttcttcatcttcttccttcaaaactaacaaaagtactattctaaggacctcggccatagatttcatcttgagaaccacatccatagacattacccctattttttcctaaaaacatttttcctcttcccgtgtgtagttaatctttccttactggtggagctccaagaagtccccgtttgtggccgtctatgaccttccatcgcatcagtgagagctgggttgaacaaatcctagcagagtaaaacttagggcataaaccctaacactatcttagtcctataaatagaaatactcacattgaagaaaggatctccaatctttgaaatttagagaattcctagcaaactttatcctataagaaaaaaatcaagaaataag

SEQ ID NO: 229787 - DNA, 727 bp, Cannabis indica
caagcgtaaaactgctccaaaagacaccaatagacgagaaaatgttaattttacagacccgaaacataggctaaatataacctaacaatgaactattgcaccagaaaattaaatgctatagtaactcccttactgggaagagacataacgggaaacttgaaagattgaattgctcgatgtgataaggtgctgaaaaaagttgaaggggtggagagatgatgtttcggttcataaatacaagaaaactcattatcagctctttgaaatccttacccaaaaggagatcttttggagacaaagatcaaaacagctttggttacaagcgggggaccaaactacaaaatactttcatgcctgtgccaattcgcgtaagaagtacaattagattatttctctaaaagatgacagcggtgtgtgggtcgattgggatagttgtttgagtacattgatggttgactattataaaggtctattctcggcttccaatacaaattgggactgtgttactgagtgtgtccaagggagtatcacgtctgatatgaacttagagcttgtggctccgattgatagtggagaggtgaaaaaagttttattccaaatgcattcggataaatctccgggtcctgacggtttcaatccagggttctatcaaaagttttgggacatagttggttaggatgtaatcaagctggtgcaacaattcgttttgtttggtgagtttccgaat

SEQ ID NO: 229788 - DNA, 1340 bp, Cannabis indica
aacataaataactgctaatttccaaattaactaagcgggctttacattctgccttaaataaggtaaacgacttacattattgtataaatatcgtgccttaaataaggtaaacatggggattctagtcctcaatgtccatcctaccattctaatttagtttctacaataaataaaaataaaaaacataactatttgtacttataattacggtctcttctcgaaggattccaaaatcaaacttttattgaagagaatagaagtcaataagacaaattttttttgtaaacatacatttttacacaaatgcaaagcaactagagaaattttttttttctgatcgtacacttttttttgtaacttttcttaatgcaactaaatctcaccaaatgcaacttaacaactttatttcagtacaattccataaaattcatcaaaatttgtggtttacattttattactgtatcaacaataagaaaactactttgtcaaagagtgaaccaaaaaaatttctctctaaaaattattgtttcatcaaactttgtggtttacattttagtccaaatgaactgctgaatagattaataaggtacatttacaccatctagaccaagagcatggacaagtacaaaagaaatctagactaagagcatgtacaagtacagttaagcaaaaaaaaagtgccagtccaataaaattcttggcagaaagtttgtagtatatttctttgacattccaatagaaagggagcttattccaattatcagaacaagctcatactcaacatgggaagagtatgccctctcaatcatttttgtataacatatatgtatatatattatattgtgctatgctaattttcactatgaaaatgagatatcaatcaagatagaacaagattttttttttacaatttgaatgcacttagttataagaagaaataaaagaagactttctatgaaataagactttctatgagttatttcactagacacttggaagacattatattgtcatacaaacaatgactataaaagcacacataaacttgtacacatatacataggcaatacaaaccagaataaatagaggattggacgagggagaaacaaagatttagagagagaaactaaaacaaattcagaaagaaagaaaagagaaagttacgtacatttgaatattgaaggacggtggcagttgcggttgtaattgcaaaagtataacattgatgtcggtggtggagtaatcggagggacggtggcaatggaggacttgcagtggagcttgcctacattcggctgctatggaggaataggagtcccctgcaactcaattaatcaaag

SEQ ID NO: 229789 - DNA, 1421 bp, Cannabis indica
tgagtcatgaagaacacaaagaaaatatttgagttcctaaaaaacacacgtttagatccaaatcacaccctggccgacaataggagtttgttcaagacccgaccgtccatgggtctttatcatgggagttggccgaccatatgggggtaccccaaaagttggccggcccatgcctggccatagggtccctggctggtccttggctgggtcatgggacctagccgaccctctctgagcttgggaaccttggctggccaaggccgaggttccaagcaggcgtccaagtatttgtcctcctttgaactcaataagggtttcgtgacagccttgtaggcatataaaattgtaatctcatacgtggttccattggaaactctgtataagacttggtagtgagtctattatagtcgaatgtacaacttaagactcgccatttgtctaagtaggtatacttgagacggtactttactgatacccaaccttgtagaatgtagtttatttggcaagtacccttgagtataattggccagagttttatttgtagctttgttaggttacgcacctccccttgtctcttctatgcatgtgatttttagtgtttgtctagggaggtgacaaccgcattgtcataggtccaatcagtcttgcttttgtgaggttgcatctagtctgttcccaagtaactttctgagtgattttgagctgacattgatacattatggcaagaactaatcgctcgtaccagagtgcaccaccatctgacccctacattgccaagttggcaacaatgggtatggacagtatagtgaaggaggccgcacaaccatttcatgatagagatccagaggttggcgaggctaaggtgcctgtggcccaccagcgtgttgagaccagacaacaattccgaggtggaggaggctgcacttgcaaggagaatgacgtacatgacttgtactattttcttcgacaaccctctaggctcatatgatattgacagaaatccattgaataggcttggtcagccttcggtgattggtgtagaccatgccttaatacaggtttctgagcctcaaattctcgatgctagggcacatggagactgttgtgtctctcctcaatctattattactgtcgaggctctcgataggatacgagagagtggactggtgagaggtgaccaatgtgaggtgccaccaagggacgaacgagcgcatcgctggccctcaattgaatgccgtggtcatagcaccatacttagcaggggtagtcctgtctttgcacccatattttggagacatagctgcttacttcgagatgtgttcaacacaaatcaccctaaaaggtatcaaggacatttcaatgatgtttgttctctatgcagagctaggttgacctcagcctactccgtatgagattggata

SEQ ID NO: 229790 - DNA, 1005 bp, Cannabis indica
atatatatatactttcattttttcttttagcctgaaaagatatggttacatggtttgggtctttacaacttgtgggctattaaataatacattttcttttgctggtttgagaactttgttatcagttaggtatgcatgtacatgtcctattatgtatcattaatacatacatctttaccaatgctatatgattatttaatgactaataacaccctgaaacaagtagtaagttcgagtattttcaaccatgctttttaaacatattctttagttaaaataaggattgaaacttaaaaaataagctccaaccatataaaaaaatgattttttataacagaatattaatggatagggagctccgtaaatgtaaagagctaattttttgataataattttaataatattttaatcaaaaatattattactttttattattttataatattaatttatatttgataaattcaaattataaatattaaaataatcaaatatgaactaaagtaaggagcagcaacaacaataaaaaataattatttattttagtctttttaactatatccatttgcaagattattttgtaaaagtcaaagaaagtaccaaactttcttttaagataaaaaatagaagaaagttattgactctattgactctaaagaacccatggatatgtatgttattaaaaatctgcatgaatcatagaaaactagttagtcaaaaatcacttttctttgtaggacttgctcaaagggtgtacttggaagaacattttttgccagatgcctgataatattattgatttggatatttattgcaaattttctcaaaggattatgcttccccttgaaattgatcaactggatcttgatttatttgtgtattacctcttacactcttatgttaaataatagatttcgggctcgtttggaacgtcatattaaatcgtattgtattatattgtattatattgaattagattatatatcatatttttatataatacta

SEQ ID NO: 229791 - DNA, 857 bp, Cannabis indica
agtcgtgcctagcacttttcgatatgtcgcgttgcgattggctagcgatactccttaaaagctattatattaaattatatgggaccgaatacttagttgaaccaataacgatattgacatattttttatttttttttaattttgtgtttgaactataaatattattgtatactttgaattttttaccctactataaatattcattaaactatttacagtattataaagtaattattctgtcaaattgtaataccatgacaaataaaataataacgttatagttttgactattccttcaacaataccatgtgtgtgatgatttaaaataaaagtatatatatttttaaaaattattaagctagataaacccaattaatgattaaaaaattaaataaaactaaattaagaattttaaattaaatatatataacactaatgtgacaatagtttaaataagaaggtactagtagtaattaggatcttttataagtgggcattgtataattgtttagcgatattttctaaagggaaatttgcggcagaagtatctgaaaatatcgcttttatacagattagtcttcaactttcaaaaatagcggtaatagtcctcaagttcacgttttttataaatctatcaatacccaatttaatagctttgttaagtgctaacaagaatgtcacgtgtcaaaaatttattggtccacatcataattttaattaaaaattattaaaaaataaaataaataaataaaactttaatattctttttatttctttatttttttttgctgagattctttttatttattttatttttattatttatatctctcgtcttcttcttcttatggaaaata

SEQ ID NO: 229792 - DNA, 1599 bp, Cannabis indica
gggttttctggtgctagcatggtgaaattggtgactaaagaccctcgtatgcttgattgtgatttagtggaatcagttcagttgtttagagctcgtggttttagtgatgagcaaatcaaggggttgaccatgaagcttccttcattgcatttctacaatgtaaacaagattgttaaaccaaaacttgagttttttaagtctatggggtttacagctgaggatgttgcaagaattgtttcttctgagccttatatattagaaaggagcctggaaaatcatatcattccttgtattgaagtgcttaagagggttcttggcactgatgagaatgttagaaaggtaataaaagcttgctattggatacttgagtacaatttagaaaagatgcttgagccaaacatagcaatgttgaagagccatggtgttcctgagaatataatcatgaatatgttcttagctcacccaagaacatttcttttgaggcctcagcagattactgagattcttgctgaagttgagaagttgggtttcaatcccaatacttctctctttgttctagctattcgttccatggctgtgatgagtaaaacactttgggagcaaaaggtggaagcttacaaaagttttggtttgactgaagatcaggtgtacacagcattcaaattgcaacctatgtgcatgattacttcagagaaaaagatcaagaaagtgatgcatttcctcatcaacaagttgaatatggatgcttctatgatttgcaggaatccaaatcttctaatgcttagcttggagaagagacttattcctaggagttcagttctgcaacttttgatatcatcagggttttttgaaggaagatatcaacataatctattatctcagaatgccaatttgttgagaagctggtgagaaagtataagccactgcttcctaacattgttaatgcacacgaaggaagaatagaatttctaggctttccagttatcttaaagtcataactactataaagatgaagaagagtatcattgtgtcaagaataccaagagccaagattgagttcattgtctagtttgggctaaattcacaagagggtttttctcaaatgttgcaattgtgtcactaaaggtgagtcctttatacagattggttggtggtttcttgtagattctttctatggtggtatagtcgtggtgtggcctcatttgagctatcatggtgaacatgtcttggttttatggtgttaattagtggggatgatatcatacaatttgagcatcaacattcttgccatcaagtcttttctcccctctatttttggctgcttttttgtgactgaggatctttctttgttttttgtcctatgtagatctactaagaaaagagatataatcaaataacgttgttgaaaattttgttacacatatttcaacgatgaatgaaaaatgtattgtactaactttattgatgacaagtttcctattcaattgtactctagagaatttttttcatttattttttttgttaattgtttttttttgaataaattgaggttcttggcaaaatagctttaaaggatattgaaaaaaaaatatattgttt

SEQ ID NO: 229793 - DNA, 1604 bp, Cannabis indica
  modified_base (32)..(32): a, c, t, g, unknown or other
cctcagctgctctgctatctcagtgtgcatangttaaagccatgacagagcactattcagtcaaagtttttagcagaagaaattaggccaaaccttataaatcaagttgcctttcaacaagctcatggtgatccgaggttgtcaggcttccagtccatgtaaacacagttgacccgctatgtaagatgaagcagtaagaagaattcaaagatgatgaagcctggtgaaatgacaaagaaaaatgaataatacttccatgcaggacacatgcaaacatttcttaaataagaataaataaattgacatactgtgtcgacttggattgcttgcatattatcaggcccagagccctgtactcgaaataatgcaacaccatcttcttcgtatgtctcatctggaacttcattctctgcaatgtacttcttatagccatcactaagaccaccctgattgaatttagaaaatcatatggtggtcaactaaaaacaactattattaattagattcatggcaaaaaacatgccaaatgtattctatatgtttgttatctcaaaatttcactaaccttataaactataatgctttggaatattaaatagaactgaattggttcatttccttcatagatgcgagcctagaaaaccaatggggaaaagaaattgttagtgtgagttgtacttgtcgacatgtacaacacaactagttgtgtcttgtaagtatatgaatacaaaagttacctgggcagccataaacttcagtgactcaaccatcttacttgctaatgaaacagctgaaactctgtcatcctgttttcaacatgaatacctgattagtgctcaagcaagctaatagttttacaatataatcagccatagacagcatagcacaaatttgtagtttatcagccatggcagagccaaaatcagaaaaagctttcgtaataaaaagtttgcagaaagtacaaagaactgccttgaagaattataaggaaattctatttgcaaggcagttctttctattttcaatttgtaatctatttgctttgtatataaattaaaagtgtgctaaatattaagtaatgaatttgctttgtatataaattgtacatgaactataaggaagttttctagttttgagaaagaaaaataaatgtcttcaacatttctaaaactatcaaaaaaatgtcataaacattttaatttgagtgtagatatcacccaggaaaaacgtgatagacacttgatatggagaagagaagaatagcttgtttaaaataagttctcaagacttatttatgcatgttgtctaagaccctcccaacagataggttctttcttgggtagaattaacttctgtaattacgcaaatagattagctgaaattccttgcagaaactttatagaattgatggacaaaattacaaatcacgagctttcgagaggcttgtctctcctactccaatctgtttgagatgattggggctctccccaataagtctcaactccaatcaattttatccatgccctttctaagagatcccctcccctaatatagtgtaaggtgccctaaaataaagagagttaacaactaagcctaaagtctaa

SEQ ID NO: 229794 - DNA, 1197 bp, Cannabis indica
ataaaaaacacacatgagctcgacatgtttccatactcacttaacacataacgtgaaatttccaacttctctttcttcaactgaagttcagcttccactgcattcagaatagttggtccacctggatgtgtaatccaaaataaggagttccaatcactaatcccaattggagtgaatgcctccatcaaactcttctcaatgttgttagaaatcaacaaatgaacatctttacgtaagtcaaatgtcaaccccatttccctaacatttccaatgatggctttgtctgagtttggcaagatcgtttgcgcagctgatactaactcaaatatgggtctttcccccattgactcattgggttcagcaccaacaataactgctgaagctccatctccaaacaaagcttgtcccaccatggaagctaaatgagacttagtaggcccacgaaacatgaaagccatgatatcagaacacacagcgagaactcgagcacctttgttattctctgctaaatcctttgcgaggcgtagaacggttccgccgccgtgacaaccgtgttgatacaacatcacacgctttacggttggttcgagttcgagaagctttgcgcaatggtagtcggcaccgggcatatcgataccggacatggtgcaaaagattagatgtgtgatcttagatttgttgggttgtccccattctttgatggccttcatggcagcttcttttccaagcttgggaacctctgtgaccaacatggattgacgtgcatttagggatggtgccatgtactcacacatgtttgggttttgctttaaatactcttcatctaagtgtgtgtaacgttttcttattgtcgtgttattacctgcaacaccattaattcaaatatgttatcaaagtaaaaaacagataataaataaagtcttatttttttttaaagactagttttttctaagaaaaatggtaacttttctaaacataagctttaaaagattagcacgggtattactctcgctgaaaatacaatttgaatataaacaagagctaccagtaagacaatacacagttttgtttaaagaatgtttaacaaaatataacttgactaagggtaaatagtagggctgaacatttctagcgggttcgacctgaatccgagcaacccgcccgaacccgaaccggtgaacccgcaaaatttttttt

SEQ ID NO: 229795 - DNA, 1515 bp, Cannabis indica
acttcttgtccaagcacacattatatattttaaaatatagttaaactactatcaggtcttctagtaattactccgtgatttctaaacacaccttttgctaacatacatttttggtcttaatgtggtttaaattaattatatgatgaccacttaatttggaatacacttggtgacgttcagttggaggtaataaaatggaatggaatggaaaaaaaaaaaaacttctattccataacatatagttattcacatttatagtgatttcatcacaattattaatatttttgattatacgatttaaattattaatctcttgatttatcagtacatcagatttacactaacatgataatcagcaatatggtctatttacacttaggcaatatgttatgtcttttccaaggcattgaaaaaatagacttgtatcagatatattggtatatatatatatatcaaactagaccaatattgatagaagaattgatcttatcgttatatttattcttagtcaatattacttagtttatcatagatcaatttgaccttaatcctgacatgattaagctttaagctaattgtgttatttgagttctttgacttgttcatttccaccttaccctaaggactagcccatacatacatcttacaaactcggtagcacgattgagtgggagtgttaaccatatatatagacatctatagtatatatgttagaagtaaaacgataatttcctttaagctaagttgaagtagttaatgataaagtactcatttaagtaattatattagtctattgaaatatcattaagtgaactaagtcttttaaggataaaatataattaaagtgtaaaatgataattttagtccctactaattataaattatctatagatgatcattgattgatatgatagaaataatggataattttgtagcgtatctatttttgatctatacagcatttcgtgaaatcaggagtgcaatttcgaatctatagtggagtcatgaggaactaataagttaagaaatttatttgttaatagtaggttacaataattaattatttaatcaattaatattcacattattattttgtcaattttgagaatattccactaaatggtaaaaataaagaagaaacgaccttcagagctagagtcgtgaggacacatgaccaacaaccttcagtgctagagtcgtgaggacacatgaccatcattatcatcgtcatgactagagtcgtgaggacacgtgaccaatgacactcaatgctccatgcaaggtctacctctaaagtccaagtaactcatacgaaccagagtctacatgaagaggcactttcatgctagacatgtgccatcaaagctagtccaaaaatatctacaacaactattattttttggagataattgttttgaaaaattattttattattgttttatattttaaacttaacttaactatagttagaaaaaagatatatcaggttaaaaaatcctaagtcctagatgtaaa

SEQ ID NO: 229796 - DNA, 963 bp, Cannabis indica
gatttggcctaaaagaaaagaatgttatagcttttgagttgaggccaggaaccttaattcttaattttttttttcttgctgaatacctcaaaactcattagttagaaaaaaaaaaaaagaaccttagtgatcacatgggaattcaccaactcacattgtcaatgccccagttcgccagttcatgagcataattgttaaagcttttaggaaaccaaacaactcttacattacaactatctgaagcatacattaactgtccaaaaacaaaagacaagctttaaccagaacctgacaatccgaaactagctcaccctcctcaatgttaagcatactcagcactctggtacccaacagaaagccatgcagttcaccttccaaaggatccaaggcacgaaccctctcagagtagagagtgaacactctaccaccatcatccttggccaccacccgaccgaagcgatctccactttgaaggctacatcaactaaaatttgggtgctagtctcagcagtaagtccaaaacacagtcgtaccaggatcaaaactcttaggaccattttccactctatccaagtatcaccaatgttccacaaaagatgcatttatagactttcgcattgcatctaaaggtaacatagtctgattgtggaatctatcatttctgaagctcaacatgtctcatgggttattcaagactcccattaagcactagttgtacatgttagctaggggtcttggttgtgcttcagtttttttcctttttggttcccaaccaaaccaatatcgagttaagcttgggatgaacctatccagaatagaatagcactgaactttgttagcatatacaaatattagatgttacttttggaagtgagagcattatgtaatattgtgctctgtggagtgaaattaatcggacttgtattgaacaattggcgcttttttttttcttctgaaagtcca

SEQ ID NO: 229797 - DNA, 2351 bp, Cannabis indica
agcatgctttagtccataagaactttgtgtaactgacacacatgagtaggcctggaagcatcaccaaatccctcaggttgcaccataaacacagtttcctctaatgttcattcaagaatgcattgctgacatccatttgtttgaccatccaattgaaagagacagcaagggtgagtatgactctcacagtttctggtttgacaacacgtgagaaagtttcctcatagtcaatactaggtgtttgtagatagccttttgacacaagtctagacttcaatctgtctaatgtcccatcaacattgagtttaaatttgtgaatccacttatttccaatcacagccattcttggtaagtatggcaccaatgtccaagtaccagccttttagtgtagtgaactcatgttgtattgaattaagccactggggatgtttgagtgcagcaccagtggatttaggctcaaaggaataagggtagttgacaatgggtactttgtggcctagtatgactttggtttcataaggccattcagagacctagttctcatagtatgggtcctggtgacaccagtggtatctgtattgatttgggaattgggaataggaattggttgttgctgttgaggttgagtggaggtggtaacaagtggaacagactgaggtatataatcaggaggtggcacaagtggaatggtggatatgtttgtgactggtacaccagtgttttggtgcaagtatatatgtttgtggttggttatggagaggggaaagtgtaggtatggcagggacagatggggaaccagatgttgtgtgttggggaacatggggtataggctgagggttgggaatttctggttctgctggaggttgatttctgtgtgtgagaggaatgagctcaggttgtagggccatgtttagtacattttcaggaacaacatgtgtattagtgtacatgttgttaatattatgaaacgtagaagtatgatagaaaggaggattatgtacctgttgagttattgctgcattaggatatccaagaaagtgagattcatcaaagaccacatgcctagtgatgaacattttgccacttggatgttcacaaatgtaccctttatgatgtgtagaatatcccaaaaaacaagcattgctcagacctaagttctaatttgtgagtattgtaggctctaagatgagggaaaaagttgcatccaaatggcttaaccaatgtgaggtcaggctttttggagaacaggcattcatagggactgacattgttgagaacaagtgttggtagcctattaattgtaaacacagcagaagccatggcatgccaccaatattccattccaaggccagcttgagctaatcgagttaaacctgcatctgttatgtgtccgtgcttgcattcaacccttccattttgctcacttctcttaggacaaggatgttaaaaatggatgccttagtcagataaaaatcgagcaaatggtctgtactcacctccccaattttcctgaacactcttaatgggtaagtcaaattaattctcaactaagctcttaaattttataaaaatgtcaaaagcttggcttttcaaggttaaaggaaaaaaccagcaatatctactataatcatctaggaagtgaacatagtatttaaagccttcttttgatgttatgtgggatggaccccataaatctgtgtggattagagccaaaggttgaggggctctgctatgggaggtgggaaagggaagcttgtggcttttgccttgataacaggctttgcaaaactgcaaatttttcagtgagccagtgtgtggaatgtgtggcaaaagtttagctaaggtgttgtttactgggtgaccaagtttgcaatgccagttattaatatcattaggcttaaaaacattaaaagttcgacaaggaaactgagaaaaatatgaaacagtgctacttttattaatttcttgattagtacaagaagtaacaagattattacaatggtaattacaatgctctacatgagtattagacactattgtaagatgacattgaatggaggcattggattgatcaccaagctcgtatagaccgcccttagctttgcctttaagtagtactgtcccgtgagtttgtacttgacaaaacaacaggatttgtgaaatttttttcatggaaggaacatgaaggacagaatttcagtgtaaagaatgagtgttgataagggaggggagagtagattgaccaaagcttgaaatcaccaacttcttaccattgcccacgaccatagtttcatttcccatataaggtgcagctgtgtcaagatgggatgtgtcattggccacatgattcg

SEQ ID NO: 229798 - DNA, 705 bp, Cannabis indica
agaaaagaaaaaaaattattgcaatgatcataataataatcacaatcaaatattatctttgtcacgatttaatatttataatccttcttcaaattttgcaaattaaatctgaccaacattacttatcacgaaattcttatttatattataaatatcaacttgatagtgacactgacacaaacctttttccttctcaaaaggaaaggttttttttttttctgttttttgtattagtttaaattttggttccctcatataaaagtccttgatcaaagatagattaagaaaatcgaaatccgaaaaattggacaacaaaaaagaagaaaaaaatggggcaacaattcaaaccttgaatttatggcaacacttgaacattcgacctggattcttcaccgtctttgaggtacgaaccacgacttcttgtggtggttcgcaattacacacccgtcgccctatttttctcatcctgctccctcgatcgatggctgtggtcagagaagatgaacctcgaacataccgtagctgctggttggttgtcgtggtcatctcgcccaacgctttctctctccctgcgctgatggctcctcccgtggtcggagaagatggtctcgccagaagatgatgggtcgtgccatcgtggtcggagaagaacctgcagccgccacttctttctcactccctgactctggttccacacttttaggg

SEQ ID NO: 229799 - DNA, 1832 bp, Cannabis indica
ttggaaaaaaaaaaatactcatgttctagatacggaagttgagaaagaatttcaaatagtttgttgacgatatatttctaaatgaagtgcattgtttagattgatttgaatcaaagatttctcaaaacaccttgttcaataattcctttaaacctgaaaagatctcctttttttcttccccactaattttcatttcattttcttgaaaaatgagctcttttttcttcttctaagactgtcgttgggggagaaaagaaatagctttgtgtaaaaaagctgtcgttaacgagtggttagttagtttatcagtttaaagaaaaatggttcgtaattccaaattccaaaccgccgccgtccacgtctgacttaaataatgctcgcgccaatattatctctcatagacacgatataatttacgacaatcattttcccttatttttaaataataaacaaatacataacaccgtgcttaagggttctttcagtcaacggtcaacgacccaatttgaaccgtctctgctcaattccgaaactcagtttatcattctggggtttgctgtaatcaattgattttccgaaagtaattagctttgattttctgcttcttcatctttttctaatgaaaaccggagctgggttcttatggctccttctcttaatatcgctttctttcagagtcaaatccaagtgtccccagagttgtgacttagcttttgcttccttctacgtttgggagaattcgaatctcaccttgatagctgaccttttcgatacgactcctgaaaccatcgttagatataacactgaccaagtacccaacaaggacagcatccgatctaccatcagaatcaaaatcccttttgcgtgcgatcgctgtgtagctgacgagtatcttgcccatgagttcgggtacaaggttatgaccggagacacatacgagaaggttgttgcgaactactccgacttgacgacggtccaatcgttgaacgactctaatagctatgaccccaacatgataccggataccgccacattgaacgtgtccgtgaattgttcgtgcggagatagccgaatttctaaagattatgggctgtttatcacataccctcttcgaccggaggacactttaaactctattgcgactagcaataatatttcagctgatttgataacgaggtataatccgggtgttcagaattttagccaggggaatggcatcattttcataccgggaaaaggtgtgtgaattcttctttgtgaggacttttccttatttgatttcattaattttgatctgaaagtgctaataatcactgttgaagtataaaagtggaataaatgaaatttagtgacttgattttacctttttttgcattttgtgttttgaattgtggatgcgtctattcttacgtttatgaacggtttgcttctagtttgatgagttttgacgcaaaacatatagaaaatactgtttaagggactaaggattaaaaacagtggcattcgttgttttgaaatgtgtatgccatagttcttgttctatatgtttcttcttttcttatgcatttagttcaaatagtattgatgcagacatgctaaagtgctgtttaatttagcaaatttgttgagaattatcaggtaaataaatatcaggttaagtagcataacttgatttagttcttattagcactccacgtttgaatttgtggcttatgtttattattagaatagaagtgtttaaatagtagcactttatgtttgtgtagaattatatgtggaaaagtagatactatgtctgaatgaaacaataacattttaggaataactctttt

SEQ ID NO: 229800 - DNA, 2485 bp, Cannabis indica
tttttctacagttctgctgcagctgcttttttctcacagcacagctacaactgctttttcccacagcacagttgtgccaaactggcccttagtcaattggatcatcaattgggatgacgaaaataacaaaaatactactaaaaataaaaaataaatgaaaaaatcgcttcgtttccaattgtcatctataacctttacaaaagaactagttaggacaaaataaaaatagaatatcatattttaatgatgtgagaaaattatgactaacagtgcagaatcaaatcaatgaaactaaaataatcaaacaattagcgaaggcacaattaaaaaattaataaggacaataatcgaattaaaataaagacaaacagagtagataaaaccaaaaacaataaatacaaaaaataagaaatgatctacaccaaaatatatattggttcaagtctgatagatcgatgtgatctatggctctactccagttctggaataccaccaaatctcctttatttattgagcaagaacagctacaatacagtcgagacagattctctattgaattatctcaaagtgtttcaacgctcacactcttatccaagaatcaagaatcttcttcatctacagaagattcttcatacaaaacccaaatccaatctctctcttttctcagcacctctctctctacctctcaatattttctctctcaaactctcaatttcatctaaactacgttatgaatctcatctcttaaaataataagacaaggtggtatttaaaggcttaggatcaagatcctaaagtcggtgactacaagaaacgagattgttaagttagttagaaataactaacttaaccaactcctctttgagtgaagtctccatgtcagttaaaatatcagagcccctaggaacatatacgggcttccagacttacggaccaaggatactcgctaataatggttctggataggatgcagcttactggagtcgactatccggaactaccattctaggagggaataatagccaataagaactcgatctcagagtgagactagctttcctaaagactagacccggattggacatgatagtcatctgggaactcccttccgaactcgactatcattccgcaagactcttttcgggacgggcatccgcgagtgaacaattttctagaaataatgcttcagaagagatattggagacttttccatttggaggaacaataccacaaattttacctagttacttcaaattaaaagtgtgatgatgatgaagaaagaatgcagacatcattaattggtgttccaggaatctctgtatactaacttttgagattgttcaagttcaagcaatgcttgagcttatttcctgtcaagatattagtcccaacattagcaggattatcttcagtattggccttttctaaatcaaccaatcattctttttttctcctctctagtagagtcttatatttatatgtttgttcttttcatgataaaccagattcttgcaaagatgaatggatgactggctatccgaatacatagtcactcctcctttgatttgtttcaactcataaagtattttgcgaagccattacacttctttaaaaccttttgtagttgccataaattctacttctctggtggaaagagcaaccacagactgtcactgagccttccaacatatacagttctggtttgtcaagaaaacataagaagtggttaagtttttggtatctctaaacaaagaatagtccacgtctacgaaccctttcaattctaattctcattttgctttctcataggtgagaccataatcccaagtgcccttcaagtatctcaataaccatttaagggctttccaatctaccatgcccagattggacataaacctagttataatgcttaaagcgtgagctatatctggtctcgtgctcaccatcacgtacattaaacatcctagaaccactgcataaggtacatctttcatctcttccttctccttcgaactcttcgaaaattgatcctttgataaaataaattgaccccctaactgaacagatgtactctttgcatcttccatgttgaacttctaaataattttcttgatgtactctgactgctttaagctaatagtcccttccttctactaccagtgcaaatgctattaagtctgctttcgtgaaccttgctggaggattgatctctctttggtttctatctcgagccaactgataaccttccagaccttctgaacccttctgacacctttgtttggtctacgttatcttattctttcggctccacaataactttcgtttgtgctttgtcttccggttccatactatcttcagcctgtgaaccttattccaagagcttggttccgtactccatttctatacttgtagtgtctttgtttcctatttttctggcgtcacacagagacacactacctttcttggaggtcaagtgaggatattc

SEQ ID NO: 229801 - DNA, 979 bp, Cannabis indica
caccaagggcctggtttgagaagttgtctacatctttggttcaacatgagttctaattttcaaaagttgatcagtctctgttcataagggtcacaacttaatcatgtatctacattcttgtctatgtagatgacattcttatcatggacatggatgacactcttgttgaacaacttattcatgacctaagctcaacattctcacttcaagatctttgtcttgttgattaccaaaacaccagctattattttacttacgcaaaccaagtgtcttcaagatctcatcaccaaagctgatatgcaaaatgtgaacacacaaaacactcctatgaacagcggtcttaagctatctaactatggaagtgaacctgtcaaagatgctaccctatacagttccattgttggtggcttataatatgcaacaattacaagacctaataagttgcctttctttgtaaaaaaaatgtgtcagtttatgcaaaatccattgcacacacactgggctgttgtgaaaagaatgctaagatatattgttggaactcacgatcatggtctgctactcaggcaagttttagatatttctcttgatgttttgtgtgatgcagatttggcatctgatccagatgacaaatgcttaacctcaagttattgtatctattgtggaggtaatcttgttgcctcactactaaaaaaaccccttttagagggggtgtttaagccctttcagcgtcggttttcgcgaaattcgctactgacgctgatcagggtgacgctaaagggttttaaaagaccggcgtcatatatacccctacgacgtcgattattagctaggaaccgacgccgtaagggtatacagggcgttggttcctagctaataaccgatgcaataggtggcgtaggaatcgacgccaaaaacgagcatttttcagttttttaaattttatataattattttaattatatatttattaatatatata

SEQ ID NO: 229802 - DNA, 1239 bp, Cannabis indica
aaccatgcaacattaaatgttatttctgatctatattaataagcaaatctgattatattgaaatgagttttatttagggcataaaacccaacaaggatggctcgattgggctcaatggtagtccgattgttaacctggacttaagggcagagctgattggcccgatgtaagcctgatttatgcctgatgctggtctgattctaaatctagacatcatgagtctgatggtttgtccaatgtaggcctgatgcctgtctggttgtcctcttggatctaaaactgggattgatgagtttgatgctaggcccgatggggtacgatttggctcgatggtttaaagatttatggcagtttaagactatttttttatcacttttctattagattttttctctaaatttgtaattgcaaactttttttattgcatgtgacaggttcaactgttaatgtgttcattatgtataaaggtaattggaagcttcaacgtagagattgggtttataaccgcactaaaaatttgatatttataagaatgtaagctactcacgtttggttgaccttttgtaagaagaactcgatgataacaaagtgcattatgacttgaaattagaagtgaattacaagtacatgaaattcttaatgtatcgccctgatgttattcgaaatgataagcgtgtaaggttctttttgaccatgcttgcgaagaagctagatgaattcactcccttatttgtgacttttgcaaagaagaatgtttgtatcaatcctagtcccacaccaagtactgttaaggatactcgtagcgaggttgggagttttgtaccagaaatgaatctggaggtgttggcagctgatgtgttacttgaattaaacactatgatgctgagagctgacattgtagcacaaatgtcctttcttgatagttttggtgatggtccagatcctgaatggtatgttaaggccatggtgatgtaagagatgacccagatacagaggttcctattgatgtagctttgaacttgactccactatcctaccaaagaccacctatgccaccaacatagaaaggaatgccctgtagagaaaattgccaaacatctggtactagtagtagttgtccaaacgaaaccagtaatgctggcgaaacaactgatggtagaggtcctagtgatgctagaagaaccagtgaagctagagggaccactaacggtacagatcctagtgatgctaaagggacca

SEQ ID NO: 229803 - DNA, 2672 bp, Cannabis indica
tttttttttttttttttttttttgaaatgaggcttctattaaaatctaacagacacataatttcgttaaaaataaaaaaaaaaaaataaaaaaaaaaataaaaaaaaaaaaaaaaagaaaaaaaacaaacaaacatatatcatgagagccacgtgacaaaaataataatgacaaaattaatcatttttttcttgaaaattaaaaaaaaaaaaatgacggatctctcaaagaaaaatagtgaaaaaatttattattttaagagcaactctaatggtataaaaaaagaaaatacttacttaagtagataaatgatgtggtaaaatgtttagatgttatactattggagtagaaagaataacattctaaaaattgtggggatactatacagtagcatcaatactatcataatttttttaattaaaaaattaaaactaaaaatttgttgttgttaaaaataaagaaacatataaaaatttttaattataaccaaataatttacatatacaataatactgttatatttttaacttgttatatataataataaaatattataaaaatgtgttgtactgttttcaaaaaaaaaacgattatataatattttaattaaaattgaataattaaatatatatataaaaaagtgccctgttttgggtctgtagtcgtttttcctgttttttctttttaactaccacttcacttttgaattgttttcctcatccttcaaccgctccttctgttcatcttttttaatttttccttcctgctaactgttcccgcctgctgctgtcttgccggagttgcaattccctgttcgtgttcatcatcgacgacgctgatggatcccctaatcaatgacattcatactgccctttctctcactgatgaggaacggtcagttttcacaatcccagaatattcttctccacaaaccgaatctgctcaacacactctccttgccaaagttctcactctccagaatgtgtacagtcaaatgttcatagatcaaatgggtggtcactggcgaggtcgtttccaagttcttattactgaatataaggaaaaagaaggcttattccacatcaagtttggctgtgaaggtgataaaaaaagggtgttgaataaggaaccatggcactttcaaaatcacttaattgttctttgcacaccagatgctctacaaaatgtctcaaaggatgatttggttttcactcccttttgggttcaaatatatcgcttgcctttcttgagcaagtccaaagtgttggccgaagccttaggaaatatcattggtgagttcattgaagtatttgaagactctactaatgaaggatggggtcctttcctccgggttcgtgttaagatacctacaaacaagccgttgttgcgaggacaaatgatccgactacctaaggttagggatgagttttggattgattttcgctatgaacgattgccggaattctgctttgagtgtggttgtcttggccatccttttgaaaagtgtattgcctttatggagagaatggatagtgggaatgatgacgacttccaatatgggccatggatgaaaggggcaaaactcccaaccaataattatgatcgttatcggaccgactttgccaagggtaatgcatggccacttcttacaagactagcccgaaccacccttaccacttcactgcccactttaaacactcgtattcaaccccaaccaagtgttcttcttgaaggggaatcatccatacatccaaggttccatccaccctcacgaccacttaattcaccaacctcacaaattatcacacccacccgtggccttccacaattgccatcaaacacatctggtttgtctccacgtgcaactactcttagtcccaacccagatgtcatcaataacacaccttctcaaggcttgacttttggatgcaatactggtactcaacataatttttctgatcttcagaccactaatccgaagcccctccttccccaaaccagcaactttactcctcctaccatatcttctcatcctcccaacaccttctcaactttccctacctataatcatacccctcaccatataaactcacacactacaagctccaccagtacacaatctcataacaactcaatccccaaccagttgatacattccctgccacctttcaccactcagaacaagaataaacaagtgattagccactcccctgtagtaactctgccatcgcctaccaacccaactgccaatacaacaactatcactgacctctcccacatctatatgcctgacttgcaaaataatacctttgctacttatccaccggtgctgaatccactttctcccaacaccactcttgcctccaccactctaaacccaccaattacccaccttccaacctactccactactgcaatgtctgttaccaaggagaaccagcctccaacaaccacctttaagcggcataatgactctttatctatgaggaagtttctaaagagatgtcgtaatgctccagcatcatcatcttctccattgtcaagggaggatgatattgagacgttggtttccgattttgaggattctagcttctccaacgactctagtgcggaggttgctacgcaaccccgcaattcatcatgaaaatcttgagctggaatgcacggggtct

SEQ ID NO: 229804 - DNA, 916 bp, Cannabis indica
aaaaaaaaaaattatatagttttccattgttaaaaaaaattacatagttttccacagtccaaaataaaactatataattttctgttatataaaacaaaaatatataatatatagtgtaacttcatttgtaagttgactataatgaaagttataggaaccagacaactggctgcaaatgtttcataaatgctccactttcaaaataataaatattgcatgtgtaagattttggacacaaaaaattttgttcaccacttcacttgcgctcatatgctgctgctattgatatgtagatggtcagtatatttttatcttaatggttatattactagctaaggttgagaaacccaatgaaattaatttgttcatataataattttttatgtgtttagacgtaaaattataatgccaattagggtaataatctgcacggacaatcttgtattaattaaattgttaatgtcaattcgcagcaacctctctcttggcgaaaaaatagcttaagtttccagctaattaacacactgttccgtacactcatgtcaggctggataatttcatgtacgtaaattgtacaacaaaagtatgtgacatgtaaagatagactaacacttatcttataagttattaatattataattaaagatataatagtttgttgaggttatgttaaaatcaacatatatgaatactcatttgatgtataaaatcaatcaatcaatccaacgaaataattgttttctaagaaaaaaatttaaatattgtcaagtattcttattaatatacatgtacacagctgttttccaagtatatgaattaaagagtgaaattaattttatttatatgtgaaaaacatgggccgaatttcatttttttttcttgcaattaattaataattttattaaagtaatatttg

SEQ ID NO: 229805 - DNA, 1136 bp, Cannabis indica
tgtgaccaaaagtcacatttagtcacaaaaaatttatgttgtgatttgtcactaaaagtaactattttttgtagtgatatatatacacattatatattgttgtatagtgtgtcacactgtcaagacttttactcttatgacatactcttattgtgataatgaatagtcccgtgattcgaaaaatatcgggtaagctatgtaattttatattgtttggagaaggtcaagtgtgatgattctgagattgtgtagatatgagactacacatttgaagaaggtttaaatggattgattgatattacttatattaacaaggtacatcttattttttggtagcctatatcacaaaaaaattccacagttaagcatgcatgcgagtgagacaaagcataatagaaacactcgtgttggtctatagggtcaattgtcagtttaggaagcagccaaaatgacatacccgtgtataagagacattagtccgtaggagaagaccgacccaataaagacttgaagcagaacgctacacttataaatatctaacataaatgaaaatgaaataaaatcaataatttatgatattttttattgtaattatggcaagttctcactaatttttaaaaaattctaaatagtcatagagtgtcgaaatcgtatttaaataatttattttttagatgtataattttatttgaacacggtatataatttaaaatttctcaaaaatttaccaaaattatgttataatattgaccccattcttaaagcaaaatgggataaaaaaaattgtaaaaatgtcccaattaagagtgtgtttatacctgttgtgatattttacacgcaagtgcacgtatcgttacaagtagtaaactcaccaggagtgaggtcaatcccacagggattgtagttaagttaaaattaaatttctacttctatttgattaaataaaaattaagaaaagattaaaattagaaaataaaaatagtgcaagaataagcaattagattaaatagaaaattaacggttaataagaactagggcttcgacttcaattgtttctattgattatgacctaatatgattatctccctattatcaattttatgcaataacatgtttactaaggtaatttatagtct

SEQ ID NO: 229806 - DNA, 1728 bp, Cannabis indica
aaagaaaagaagttataatctggcgtattctcttaaaattttcttttgtaggataattcttcaattgagtagttatatatatctacagaaaataatgaaaattcacttaccatgtaagttggcatatgaaaatatgggtacaataaagagctgaatcattaaatattatttgttatgcaacaatcaatattcaaaaagtaaaaagaaaaaaaaaagtcattgatgaagtggtactttaaatagtagatagctcctcctgaataaatgagatttgcaacctcattgcaattgagtaaaagtaatctatcaaatcaatccaaatctatgtttgtaaagcaacaaaatcaattctaatatatgtttgtaaagcaacaaaatcaaaatcaaatctatgtttgtaaatcatcaaataatatttgtatactatactaactttttcagccaaactaaatgatgtgcaattttgcttaatcaagcaataatcaagttttgctagttttccaaatttctgcaagtctttttgttatgtccaggttgattacattttccgcatttgatttgctttgttcattttttgtttttctgccataaaggtttgcttcttcttttctttggtcttcccactcttactttttcttttggatgctgaacttcccatgatttaacatattcgggtacctcccatgtgtcttcattaggaatagggtatacaatttatccataagttgcaagcatggcctcctttgtgtaatatgatgagcaatattcatatgcatctttattcatatcttttagaacagctattgcatggccacaaggaagttgatctatttggaacctgttaatgaataatgtataccttttgtcaatattgatttgaaatcaagatagcaagtaaacataattttgcagctccatttgttacaatcatctttcaaataaattttcaatctttatttgcatctaacaactctatttattaatatcaacccattatctctaacccctaagaaaattttcctaaatgatggacgaccatattatggcccttaactctatcatacaaattttcatcagggaaataagataattattcttttaaacttaacaataaatcacctaagctagaccaatcctaggatatcccttttcagaagtctgaaatggaagcctagctgttttgagcaaatcacagctacttggacatgagaatcatggaatggtgtaaagatgatctgaggttttggaactgagggctctacgaatctgagattagttgctatggatccaaggacagaagtgaatgacgatgtgtttggtgtgaaaagtgttgtgaccactggaactgatagctcagaattgattgacacgcattcaatgaagtttttagcagttgccaatgaataatgagtttggagaaaaagaagagaatatagtagcaggtagtgtactgctactgctacggatgatgattttaaaccttataaactacaacttcacaatgaaattccacaaaagaaaaatctagcattcaaagccaacaatatagcacaagattccatgatttccctttacaattcctaatcagctgcactagcaatttcatttaaatttatgtttgggaggaactttctatctaacatcccgtaataactaacaacaactatctggttacaatctgatttcccttgtacatatatctttttttttacaatctgattttacagc

SEQ ID NO: 229807 - DNA, 3306 bp, Cannabis indica
ttgcagccaactcccaaaggatatatcaccagggttgccgccatacaacccaactgatctccaacaagctgctgcaaaagaacaagtaatcaggcaatggataactgtttcaacactcctactacatctagggcaagtggaggaaattcgaacatgcctttggaaaagtgatccacaggtaggcaaacaattcgacaccgatctccacaacatgtctttgacttttggagggcatttcaaggcccataaaagcacgccaaaagtttggattaatagaggagtcgctggaaggtttcaaatcttgaataagcttataagccgacttaactgaatagatccccgaaacctccttactccaataccaactatctgtcacatttgaagtagatataggtattttataaatcaactccttatccctactattgaataaatcaacaataacttccacatcccatattttgtcattcatttccaataaataactcactttttgaccgaaaagggtaggatgagatgaggtaacatgagggttgtcctcatcaggaagccaaggatcattcataatagagacattctcacccgagccaatgaggagtcgaccccctttagtgatcaggtattttgcttctaggatgcttcgctaaataaaacttggattgttacctaactcagcagtgatgaatgaaccacgaggataataacgagtcttgtacagcttgctaacaagagaattagtgcgagtatgtaatctccaagcttgtttactaagaagagcaatattgaactcatgtaaataacgaaatcccatacctccttgatccttcgaagcgcacatacaatcccagttcatccaatggatacccgagccttgtctagagttggatttccaccagaatttgcacataagttgctccagatcttcacaaatacctttaggaatcaagaaaacactaatatcataatttggaagagattgagcaacagacttcaacagaattttcttgccagcacgagatatgaaaacagaaggactgtcttatctcattcgaagatatgaaaatagaggttggctcaaagggtgtcaagtggcgcgaggggctccttttgtgtctcacatgttctttgctgatgacagttatttgtattgtcggactcttgatactaaagctgaaagaatcatgactttgttggccagttttgaacgtgctactggtcagaaagtgaatcgtcagaaatcttccatctttttcagcaaaaatactcctctggatgttagagggcgtatgtgttctatacttggtatggtggaagctggtgatgatggtttttacctggggttaccaaacattatgaagcataataagaatggcgtgttggggttcctaaaagacaaaatgaaggtatctcactattaagtgttaagtaaattgccacgtgacaattcttcattggtccaagtcattaaattttttaaaaaataatttaaatattccaataagaaaatgacacgtagataatgatttaatatttaatggtcgtgtacctacagagttcaaaaattataatttaggtattattactgccaaaaattaaacttaggtatttatttataattgggagttaaactttggtatttataccacaaattactcaaaaaaataactgaattttagtttgagagagaatccttcattctttgtatctcaagtcaatacaaccaaagaagattaggatattaccattatcacggggccgaacctctagaaattttggtattctatttacttattgctttttgctttctattatttacttcatctaatcgttttaacttgactcattgtcgttgactaaaagtgatatcaacaacccaaattaacctttaactaatactgtaataccctaagattaagaaatcggattagcaaactctaactagttaaatgtgtattaatgtagaattatattattatatattttaatatatggaattatattgattgatgatattttaagaccccgttggtgagctaagggtattttcgtaattatgatcagagaaggataaaactgtaattttaatgttatatcgtactaatggactatattattatatagtatatttgttcagtctatctgaaggtttttttgacaagtcagcgcggtagtcacaattgggtattttaggccgaaccgagttcgggacccgaaatgcatttttgaaattttattttggcatttatttgacaaaggaataatctgaaaatattgtgtatgtatgatttatgaaaattatacccttaatgtgtgtaagcttaatttggcattggagggcattatggtcatttgaccattttaccatgttttcaacaaaagtggattttattaaaattgaaatatattttttggtttcttcacccctaaccgtctctctctctttctctttactcatctttcttcaattttatcaatcttagaatttagcttgaattggagttggttttggtgtgagtttgtcttggaagcttataaattatggtaagcttctaacgtagctattcctatgttttaattttgagtttaagggctgaatgtattgaaatgttatatgtattttgatgttcatttgtgatatagatgcatgttggtgtgaattggagtaaactaatgatttaatggttgattcagtttgtagatatttgtattttgcatctagactatctttgtaggatttcttaaaggtaaattgtgatttaatttttaaaatttgaaattgtaggtttgggttatgaatttttagagcttgatttatgagtcctatgccatggattttgagaacaacttgttggttgaattactaattggaaggtttggttgaattgtatatattgatgttgttaaagcttgattttgtgcttttagcactttgatattgtaggttgtaattattgaaatatttatttgagttgagcatgctttggtaggagtttggtgtgttttgggcttgaaattcaagttattgaattgtcatttttgggtttttaacccaggcgccatggcgcgctctgggagcaccgcggcccgctcgtgtgaattatgggtttttctacccagaagccgcgacatgcttggtgagtgtcgcagcccacctggatatttttttgggcagattgcttgtaaaattttggttgttcataacttttcaacccgaactccgttcaagatgtgctatatatcgttggaaagcttgttctgagctctatatgtttatttgtatttgaatgccaattatatgattatgtg

SEQ ID NO: 229808 - DNA, 1760 bp, Cannabis indica
atgtttagatctgtgatttatatatttcttgagtattttataaattctaacaagtggtctcagagccaccttgtgctaaattaattaaagatttgatgattttgctcataaaatttggagattttgaaaaataaggtttttatttttgagataatttagccgatatctttttttttcattcgatgatttggcttctgttagtttaatattcttaatacatctaatatatatactgtaatttggttattattattgttactgtatgtatattattacagttaatatatatttatagaaggcttcactttatttatcgtgacttaagatatcacactgtatatatgtttggtaaagatatataatcgatttatgatttaatggctttttgccattaatttttgttttcgttttcattttttccttttctaatcgtattgattggcttcagagctgttcctctcagtcattgattcatattttagtaaacatatatatgtttgatttgtggtttcatggatatgtttaaatttttataatagcatatatggaatttttgaggatgaataaatatatatatttggaattgaatagtgttattaaattgattcatataacgaattggattgattcatataacaaattcataatatataatatgtctggagattgattcgttgttgtaatatatatatatcgattatattaaattaattcgttgtaattttattacagttttatatatatttatatatataaagaagtatataattgtactcattgtttatgagtgtctgccctccttttgtgctctgcggcagttatagtcaattatctggttttttacagttttttcttttcacctttcagttatgttgctcttgtttttctacttttcattgattttcttctgcaatgtcccttctgtttcatccatggatccttttattcacaaaatgaaatcaaccatgactttgtctgacaatgagaaatcggtttttgccattgctgatgatggctcttttgaggaacaaccccctgaagaattctctttatttgccagagtgatcacgcacaagaaagtctggcttacaactttccaacgtcaaatggcggaacattgggacggccggtttaaggttaatattaaagaacatttctcgggtctcttcattctttgttttagatgtgaaggagatagattaagggctctcgataaagaaccttggcattttcaaaatcatcattgttctttatccccctactgcacttcagaatgtgaccccagaatctatggtttactctcctttttgggtgcaagcttatagacttccttttcttagtaagtcaagattgttagctaaatccttggggaatcttttgggtgaattttggactgttcatgaagattcattgaatgaaggttggggaccgttttgacgattcaaagttcggttgaatagaacgaaacctttgcttcgtggcaagatgattacattacccaaagtctgggatgaattttgggttgaattccgttatgaatgtctccctgaatattgtatggaatgtggtattattggtcacttatatcataaatgtcctcagttctttgaaaatctggacaatggtattgagccagagttggcctatggccctatgttgaatggacctgctcttccttcttcatcttatgaccgttatcgatctgatttttcctaaaggaaacgcgtggccctacggatcaattctcgtccccctgcaca

SEQ ID NO: 229809 - DNA, 721 bp, Cannabis indica
tatttgtaccatacatattaataatgaaagcaattagtttttaatgtatgtttcttttaacattttatttgtaactttgttgcaaactgttgggttgtgttctttatattctatatgtactgatgtccatggtttctatttatttttttattttagttttttttggatactttgtgtctaacggaaactcaaaataggaatttctcgatgtgggggtcttgtcgaagccaagaatttctcctagtcgagggttttgccggtgggagtttcaaatattaaaaattaaattttataacatttcatttatttattatttgtatttttaaattttttttttaaaaaaagtattcatgtccagcttattgcattcagtgggtttttatgatatatttttcatgtctaaattcgctagacttaaaaaatacccctttcatatcgctgcatatcttgtccagcaataaaaggacatgaaagagttttcatgtccagccttaatggtcgtggaatggggtttttgtattagtgatactttccttttcattgaaggtcatttcctactattgttttggatctcgaggctcccacttcttactcgcagttttggtgctcaccttctaagttttgtcatcacctctttcagtcttgaagggtggttagttgctgttttatgaggtgggtgttggaattattttaccaggatctaagatctactcacagtatg

SEQ ID NO: 229810 - DNA, 668 bp, Cannabis indica
tatcagtggtgtcatttaagattatgcactacagtggagcagaaggtttctaagaggaggggtcatggctttaaagcttaatatgagtaaatcgtatgacagggtggagtggagttatcttagactcatgcttcaaaaactttggtttttcataacattagatgcagctagaatctggttgattttcaacggcaaggtattaagttgttcataagattgagcctattgtttcttttcgtgagattaggcaaggaccctttatctcttacctatttttgatttatgctgaaggtttctcggtgttacttagacgatatgagtggaacaaattaataaagaggtgttgtatggctaggggtgccccttttttcatttgttgttcatcagtaatagttatctttttgtccaagctaatacaggatgggctcaaagggtgatggagatgctatatagttttgagaggatgtcatgacaaaagattaatgtgactaaatctactactttctttagtagaaatgtgagtggtgccatccgaaaggctatttgtgtaattttaaatatcaataaagctggggagaatagcatgtacttgggtcttccaagcacaagtggtagaaataaatctgttgtcttgggtttcttgagaaaagaagatgtgaaaagcgtat

SEQ ID NO: 229811 - DNA, 757 bp, Cannabis indica
gttcaaaatgaatgttacaattgcatctcattcataagaacaaagttaagaaattaaaccaagtgataacaaagggtcagccttcaaataaatagcctcgaaaattaataaatacatatatacaaggcattgattctgtgcgggcattgctttgtccccataggtatgggtaattttgtgaccattgataataaatcaaatggttaagaaatgtgctgtacatggtatattaggtgtagttgcccgtattatttgtttgtatagtattgcattgaaaagagaagaaccaaattcagtcagcaaatgacatcaaactctcaagaaatttgtcagcttcaacatcaaaaccttgtctttctcacatccataatccgttttcataaaccaccgatttaccaatctttcgaattccaagccaatgaattcaagactacttatgggattcattttcgcctccgcacccccttttgggaatccatggttgggaatgatctttcaagatcctcccttagatttgattgcagtggcactctgttaagattgtaggaactggctttttttattaattgtgagctctagtctagtttttttattaattgaaatctgtatcaagcacatcactgagcgcggaagtaaaactgccagagctactaagagtagaaatatcctactttgaaaccacaaaagccacaataaatataaaaaagacatataaaccataagtggatcatggatgtacaatgtaaatggtacattc

SEQ ID NO: 229812 - DNA, 1741 bp, Cannabis indica
tttagggcacaatacccaacaaatatatataataaaacttactggaatgctgattaaactataaaagaatttcttgagttttatttatggagattggattaattacaaattagggtttcacttttagagattttaaaggagtaaatgatagatgtaaggagaagagatggagatcaatttatagaaaaaaaaaattaaaagaaatagtaaggtgaatagaaaaaaaaataatagttaagcttattattgaggttggttgagatgaaaagatgaagaagagaagaagagataaaaaaaaataaagaagagaaaaagaagaatacgtggggattaaggctggggtttagattgtgttttggtggatatattagtaatttactttattagttaataaaaaaaattaaaaaattaaaataattttataagaaggttattttgcaaaagtagttttgcaagagggttatttaactcaatatccatttttttagttcctttatcttgtgttgtgtattgtgttatattgaattgtataatttttatataaattagcgctttgtgtgcgatagtattttatttagtgatgtttttttgtaattggtatttactaataattttaatattttctatatatttattttaatgatattaattaatataaaatttgaaaaatttgtattattttatttcactacaaaaatttttacttttaatcacaataaaacttatgactaaaagtaaaaaaattgtcacaaattataaatcatcattcctatgttgtaactaaaaagtccgtggctaaatgtattagtcacaaaaattagaatttgttgtgactaaatgtgtttttagtcacaatacttgttgtgactaaactaaattagtgacaacttgtatctaaatattaagttttagttacgagtaactttttgttgtgactaaaagtaacatttagttacaaaaaatgtatgttgtgataaaaatttatcactaaaagtaactattttttgtagtacttttaataacacaaatatatatattatagagttttatattttctaaatattttaaacttaataaataataattattaagtaattaagttattataaatatatattattatactgttagttttcaaattgtatattattatgaaatcaatatatataattgttgacaaatttataaaaaaattcatcatcaataattttaaaaatattgtcaaagttcttttttttagttccttctattatgttgtgtattatattagattgtataatttttatataaattctgtacaatattatttttagtattaaattgtattagtatgttttgttaaattatactgatttacatagtttagtaaaaaatacaaaaaaaaaataaaaaactacaaataaacaaaaaaaaaaaaaaaattaaaaaataaaataaaataactaaaataaaaatttgaaagtgctaaaaaagattaaaaaaaaaactagaaaataataattcaaaacactaatttttttaaaaaaaacatgtcatatgtgattccaactcgaatattgattctaatttcgaataaattatataaaaaaacaaaatttatataactaaaatagacattgtaatagtgtcaaagtttcaactatcaaacaaatatcaaccaactaaaccaaagttcaactgatcaaactaaattttaactcaccaaattaatcatcacatattaatactcacataaccaaat

SEQ ID NO: 229813 - DNA, 2676 bp, Cannabis indica
ttcttttacaatccttacccttgctaattatcctcatccgaacagtgtccttaatcccctaaactcaagcaactaggagttaaacaactaagatcaaatatgcatttgttcctattcttccagagaaaataaagggcagcagccaagacagtattggttattcggtttgtcaagttctgctttatgttgcagcagccaagaaccatttcggcaatcgaccgaggccactggatgcttcccatccacttgttgacagttgcaaacacctgaattgcataggtgcaagtaaaaaataagtgatcatgagtttccaaagctgaatcacacactgggcagaggttgctcggaatgactattatctgctgtaagtaatccctcgtgagcaaatgtgtgttaaaaatctgccaatatatgaatctatgtttaggaacaacaagtttatcccatatagctcctgcattaacagcttggttatcttccacaaacaagttataacacctcttagcactaattttattacctctagttgcttgtcttagcttcgtttcatccaaataatctcttaagctcagaattttcttgaaataccaacttacatcttccttcttgggccaatcccatatgttttggtctttcaagtacattgaattgatccatttaaccgataagcaatcatcctttttagcaagagcccaaagatgcttagccaaaagagctttgttccatttctttccttcccgaaagcctacccttccaaggtttttggggaggcaagccttttcccaagacgctctatgaagcttgctcctattccatgaaattccccagagaaagtcacgacaacttttatcaatagctgccgttaccttagaagggaggatgaaaaatactcatccaataattccgaataccaagcatcactgagtgaatcagttgtgccctacctgcaaaagataggtttctactagcccaacagtttaggttcttgttcagtttgtccaaaataactccacaatcagcagccttccatttagttggtctaagattgacccccagatacttcagagggaaactgccttcttcaatttgaacaatttcaaggatctttgctttgacctcttcacaaacccctccaaagtaaatgtgggactttgaagtattagctgataatcctgtgtcattgcaaaacttagtgaaggctgtatgaacaagcttcaccgagttaacattacctttgcaaaagataacaagatcgtctgtaaaacacaagtttgtcaggctaatatgcttacacagaggatgaaacccaaagcccttttgactagagtaatagctcaacaatctagtaaggtagtccattatcagcacaaagagtaaagggaacatcagatctccttggcgaaggccttttttacctttgaaactaacttggattcgactgttgagaagcaaattatagctagtaccccttacacaagtcatagtccatctgatgaaccgagaaggaaaacacagaagcctgagtaagtctttcacaaagtcccaatcagctgtatcataagccgtactaagatcaattttcatgatgcacctggcagagacattctttctagtataacccttcaagagatcttgaaatatcattatgttatgagctagaagtctgtttttgataaacgcaccttgattgttgttgactatggatggcagaactttacataatctggaacaaatcattttcgagatgcatttatagacagtgttgcaacaagcaatggatctatagtccttagctgaagaaggatttgtcaccttcggaatcaaagagatgagagtctcatttaaggtgttgggcagccagccattggcaaagaaactcaggactgcagaagaaacatcatcaccaattttgctccaaaggtccttatagaatcccaagctaaacccgtctaacgctggacttttagaagaatgaatgctgaagagagccttcttcacatcccccttattgaacgggtgaatcaatcttactcgttgttccaagttcagacaattagcctgcttcaaacaagtcacatcaatagtgctaaccgctgaactcttgctccccatgaaaatttcaaagtgcttgacaaagtgtttcaccacttcctcaaaatcatctattatagcatcccccttcatgaacgtagtgatcctattttccagtcttcttttcctcatactagcatggaaataggtagaattttcgtcattaaacttaatccagctgatcttactttgttgacgaagattcagatccattctttccttagctgtcaaaaataattgctgcttgtcattaaccagaagttgcagggcttgatctgtagggttcaaagctgcttcctcaaaactaccacagtaagcttccttagcctccctgtactccgttgcaacatctcccacttcatacctgtgaaagacttttagggcatgcttgacccgaaacaacctatttattaaactttcgagaccaattccaacatcctttttattccagcaatccatcactagttgataatatccaggataggaaggccaatgattcccaaaatgggatggtttaattcctacattattctgaacatggcttcggattaagcaataacaatggtctgagatgacctcccattt

SEQ ID NO: 229814 - DNA, 1027 bp, Cannabis indica
aagatatgattggccctatcccttaattttaatttaggggttgatcgactgtaggttgggacctagtgagaaaactagcagacaccctttacaccgtatgccataaagtaactcttggcgtagcctccaatctttgacatgggtgtgtcaatagtgccacccaactactaatagccctgctggctaaagtagaagtaaccaatcctattctttcctggactagattttagctcaaaataataattcaccatgaaaggtgtagactgcgaccaactaagctcagcgtacatgacaaagagcactaaaaggtactttatcccctttggtgtaatctaagtcggacataacttgaagaagttagctatgtccatgaagtatgagtgcagaggaagtacacccccttgctcgacatgggggcgagaccatgctatgcagttcagctgaggatggtgagccaagtggtcttgagcaggcctaatacatcaaagctggctaacaagtccgctagcaatgatgttgtaaagtttggcagccaataaagtagagcgaggagatacccatctatctccatcccccatttgcaaaagccatggcacagcagcctcatcctcaatatggtcaaccccaacctcagaaggttgacccctgctattcagaggcactctagactcaccataagagccaacgggattaccctataccacgttgcactccataggaagatctctgttgcaggaagatctctagatgcagaaaccactgggatatagtcacagcaaccactgttgcaggaagatctctagatgcagaagatgtctgcccaacacacaaggtgtcatacacaccctgatagagaatgtaagtccaagacttgggtaggaactgtctccacccctggtttagttcctagacaaatattttgtagatttcatcacatattcgtttagaataggggtgatgttgaaccttggtctcgagaccactgctgacttcaaaagtcactcaaagagctacccaatgagctctt

SEQ ID NO: 229815 - DNA, 1038 bp, Cannabis indica
ataggttatcaaatcatatcataccatgcatggaactactggtctacctatcaccaacctacactattaattaaaatatacactactctgaataacaataagagaaagacacttagtgtctaacatcttttaacgtgtcatatcactattgatataattatcgaattcctataatttaatatattaatttttattgaacatcgctaatcagtactacttagatattattggtgccttatagcaatgctctaaaaataaagttacataacttataacattcattgtattgtgctcactaacaagcaatttttttcaaaatctcaaaaaatattaagttggaatcttattaatgctcttcattctaaaatatcgagctacatgaaaattagaactattcctatcgttattctagaattatatatgagattttcactcacaagactttacgagaaccatagataaatttgaattgagaattttagagtttttttttttctttttttcgcatcaataatctaccaaccttaaaattgaaataccaaatcactctcacttgtatacccttacaagtcacaagttctttagcatcgtttaggtaaatggggcaaatttatataaaacataagcatattttgcatgtcttaactttgtgttacattattgtagctaacttatatttcatatttatgttgttcaattatataaattattatttggcaaagtggtagtggaatataattgcttggttccaattcaagctattagaagtcctcaaccaagcaattagaagtccttttaacatgatttttgcttttggtcttttggtgaacaattgtaaacatttacttgctaatttaagatatgttgcttttatttttgtaaccattcttcattttgggctactgctaccatatacactaccagatttagtgtagatactaaatcgacttataagtttattgtgtgtgtcggtttaggaaattaacacttataccacgtacgtatgaaggaatgtcttgcaagcataggcatcagttt

SEQ ID NO: 229816 - DNA, 1364 bp, Cannabis indica
tctctctctctcctctctctctctctctctctctctccctttcttgccggtttcaccctcgctggaactctctttctctctgtctctctcattttctcggtggagccaccctcgttcgacgaaggccatggctgacctccacgagccacgaaatcccaagaactcgtgttccccgatcccactcttgctctcagaccctttctctctcgtaacgttaagctcgacccaatgttgtgatccctctcttgcatcaagctcgaccttaacccgtgatcccgagccgtgtgcccctggggttttttgggcctaaggatgatgatgtgtggtcctgtcggggcgtgtgatcggaggacagtggtaccatcattctagtggccgccgcacaaatgtagagagaagagagaaagggtgggtgtcgagtgagaaagaaagagaattagggtttccaattaaggttttatcatttttaatttatatcctcaaaataattttatttttaagtttaattatttttatttttttaaatatatattttttatttatattttttaattttaaataatttttaagtggaccaataaaattgtatcatgtgtacaccgtgtccacgtagatgtacatatggataatctaacatagcacttaacatataaagtagatgacaattgtaaattgctaacaatttcctaaatttaggggttttaccgtccaaatttgagtttttgaaattaaatacaagcaaaatgaaaatattaaaagttttaccgcaatttacccttaatatatcaaaaatttggttaagtttcaacatttcaattgacaagataaggttttttccttttctgaattttaaggatattactttagtgtcactattttttataatttcagaaaaatttctactaatcccacaaataaattttagttacttttaaatagtttttcttaccgaaaaagatatttacgtgtcatttaattcattttcaaacggttcttttatatcattgaattttttcagtttttttggtacagatgggccaagtgttcagctccaaatgtgcagccctattcacaataactcataaattcttttttctttttctttttttttctttttttttttaattttaaaattatactatatacctcttttaatttgtatacttttaattttttactcttttttttttttttttttcaaaattttctttattatttactttttttttttaattcatttcttaccaattttactttctattcacttctacgattattttttatttttcttctaattcaaaaattttgttgccaacttttctaacaaaacctacactacctatctacaaagatacaaatctatt

SEQ ID NO: 229817 - DNA, 931 bp, Cannabis indica
agttaaaatattatctctataaaatttttaattgatttataatgccgattaaatttaacacatatattttaacacaaatattgagaaagatattaaaataaaagattgaccataacataccttcttttagtaacattcaatttaactcaaattaagagttttattactcgttaacactttaacatcttctaattataaatataagttgcaaaatctcaacaatttttaacttaaatactaaatatatatttctatatagttatattattattaataatttttattttattttatttaaaaaaatcttgtcaaattcgtgttaagcgaatcgtgtcgtatttgattcgttttttatttcgagtcaagttgtgttgatccgcatctaattttttttactctaactcttaaaatttgtgtagtgttcgtaggttgtgtcgaaacttattttgccacccttacttataataatacattgtattaatatagtattgaagactttaaaatatctaataacaatattatttaaaagtgaaattattgatcatatttttgttaataacatcacacattgtaagacaatttgtcttcatgacttaaaccacatggaattgaagcgttaatccttaacaatatagcaaaagaactcaacactatgctttaatcatctcaaccaatcatctctcatccacctaagtgaagtagtttaaagggtaaatactattttggatcttgtattttgcgaacgttattaaatagactctctattttgttaaatgacaaaatgaacattgtattttctaaaattatacaaataggacatgaactgattttttgtcaaaagagtctattatataattaccttagtgtttgcttcattgtaatgtaattggaatgataataagaatagtaaaaaaatataatataagtagta

SEQ ID NO: 229818 - DNA, 1766 bp, Cannabis indica
gattacaacaacaaattttatctggctgacaggagccactattgaatttaccttgagatgcaatcagcaaggcactcagcattcccaaatagtgaatgagcattccataaagcaattgggttaactgcttctgctatctctataccaccacctgcatctaatatatatatatatatatatatatattaatataccaatagtgaaagaaaaccattgagagaaaattatattaacaatttaattaataagagcaaagagagagagattactagagcaatgaaaatctagagaaatgaaagccatagcaatgagaaagatcataaaaaacttttgaagtcctaatcccatttttctatattataaatatctcttcacactggcttgttggctttgattatgtattttttttgtaggttaaaacaaaaatctaacatcactttatatattagataatatgtagatagctgtattagtatacacacttttcaagtaaaattattggatttcaataggatcttatatcctatatttagttctgattggatatcatattccaagtttgaccaataatttattcctttacatatatatggtacaatatcaatcagggattatatattaattatcatcacttgcaaacttagatttttttttattttttttcctacagtgaaatggaaggttaagattcatttatatcaaaatcaaatcagtagatgattttattttaattttgtctatttatcgttggcttttggtttgtgatattttcaaattatgagatgaaccaaacaaataaacaacaatttattagtttatttatgtataaatatatagtagttatttggagatgtgttagaggaatgtaactcctatatctagtttaatcgtatattttatttacattaattatatttaaataacatagcatacaagttattcttgaagataaggtatatcattacgagggtcatttcaaatattttagatactgtattttaattttaaaatgtaggctcctaacaaaaaaaaatataaactgtaaataatatttttaaatattatcacattacgaaagtatattttacttaattaagtacctaaaaactcaaacaattttattaaaattgctattaattctaatacaacttcaagccaatatcaatattctatttaaaaaaggtcatcctatgaacgctttttgaaacaacttcatcaaccaactcttcatattttatcgtctccaaaacctcattttcaatcgctatcgatgctaatccattaagcctttcttgtaacatggtagaccgcaagtaagacttcatcttttaactttgaaaaacttctttctgcagaagcaactgtcacatgaatagtcaacaaaattctatatgtatgcaataattgtattaggaaaacaatctacgcctttcaaaaattttaatatatagataggtctcattttctctctaggcatgatttgccttaatagctcaactccacacataattcatttccattaatatcagactgttcattatgtttcaatgcgttttcaaaatgacaaccacaagacttcaaatttgtattgctaacgattgtaacttgtcagaagtaagaaaccaaaatatttttatattattgatattgttcaaatctcctagtaagagaagcaatggcttgatcaacatggtaaagaaaataattaattctaaaagattggggtactcaacagatggagtattcaaattttcatcaaattgtct

SEQ ID NO: 229819 - DNA, 1407 bp, Cannabis indica
attcattgatttgttgctatacttcaaagctttcgtagtggaatcataagaaagaaggtagctgcgcagttggtacacattttgtgaattcattgtccaaaatatgtcataactcagggctagaagataagttagaagtttcacctatcaacctatcctttgtcctaataacatgtcttccactttgattggttgtcaacgtatgttatgcgtatgttatgcgtatgttatgctatctatgcagaagtgacattatgatgaactaaaaaagatccatttttttgagggcctagaatagaatctttgtgaggacaagtggcatgttttacctttcccttctcttgcccctctttatttcattatgaacttattagtatgattgttgaatgcccagtgggtggtaaattgccttaatttgtgctatatatgtgttgtatttgaaggttgaaacaaaggttatctatcagacaacaggaagcaaaacggggattatcttcaaaaagcgaagttcaagataaggcactaagtatcatacgtctatggcaagtttcatttttgtaatccttattttaatttcaattctcctacatcagcattaactttatgcaagaaagtctgaaaattgagagataatacactataatataaactagtttcccaaagactaaaaaaaaaaaaaagacacaaatgccacataattttcatcaagtcttgtcacttcggggatgagaatgggatacatacaaaaaaaagtcagttcaagaatcataaaaaattatcaaacgatggatattgtgcaaaataactgaaaaaaggctatttgtcaaacaccccaacaaaaaattataacacaaaacataacataatcagtttcaacgaactcatacccgcacagcagaagagtgggcatttttgcaataatttcttaacaagctaaactcaccaattgacatccatgaaggaggtcgaattgcacatttccctctcttcttcaaggcaattgcaagccaaagaggcaatttcaaaatctagattcaaacctaaactcacacattcacacaacttcaaactattttccaataacaataataataataaccttgatatggcgagaaagctatggtggatggcaagcagagttacagcaaaattggaagaagggtgagttagtgagtgaggagtactattgtggaactggagaatccgcttagtagagagagagaacgactttggttttaatttcttccctccaaattcaatttccttccctccattattttagtagagagagaaatttcgcatactactaaaactaaacacccaatttgagaacgggaaatttgattttttatactcattaaacttaaaaatttgttttttaaatcaatacattttacactataaaaa

SEQ ID NO: 229820 - DNA, 1159 bp, Cannabis indica
tcctgggattctccccttccttcaatatatgaataataagtttttttttaattgaatatccacggactccctttaatgactctctcaatatctacctcatgataaaattgaaacaaaaacatattagagtttaactctttaacatacattccttttccaggttactaaatatgttttaagaaagtagtaagtaaaaaagattaattatgaatagtgttcagaataataaaaaaaatttaagcgcagcgaaataataaaaaaataaagcatttttttactcagtttggtaaagttacaaaatccacaaaataaagtgtattcacttataactttaaaatcctgtttgatttagcttctataagctctcttttaacttttagaattaaaaaagtccttccaggtctgtttggataaaaatgaaaaagtcttttataatttaaaagtccttttcaaagaaggtaggatttgtagcttcttccaaaaagacttttgagaagttatttttaaaattaaaataatttacataatttttaatttacaagcaaaggattttttttaataatatccaattgcgttgaaaaatatttttcattaaaaaagatctttatataataggtatccaaacgataaaaatatgtctaaatttatacttattttatacttctagctataagcaaaagtagtattttagccaaatggggcttacactcactatgttagaattttgaggataagatgaatgaggttccatcccaaaaccaattggcaatggcaggagtagcccattcatcttatacatcacaatttatttccacacattagcaatgtgggactaactctaatacaccctcctcacgtttgggcctggaaagtgtgggtataacgaacgacctttaagaaatcgtagggccgaacgtgacatttgaaagaatcccacaaggcgaaatatcgggaaatttatgggtgtacacgtcgggaaatttgtggattttgaaacaggtcaaagaccccaacactggaaattggcacacattggccgaaaggtcccaaatggaggttaaaggggagacagtggaagtatctgtttggaccggtggcactttggctcacaacggattacaaacggctttttggaccggtggcaatttgggctcacaac

SEQ ID NO: 229821 - DNA, 807 bp, Cannabis indica
ttgttatttttttgttgattttttgttgtttgcatattatttttcatgttattttcttattacttcatgtaattttcttgtatttttataaaatacggtaaaaatgtaaaagaaactttgaatataaaaatgtaaaatttatacaaaaattagtattttatgcaattatctttaaattatttcatttattttttgaaaaaggaacatggattattaaaaaaaattgtccaaaatgacttatttttaatctaattgtcaaaaataacttggtcaaattttaataacgtttttatttatttgattatattttaatacgcttatttataccccctctctctcttttcttaccatttttcccttctcttacgttatttcttcatctccttcttctttctctctttcttatttatctctcttctctcaaactttaaaattaagttatgatcacctcgttactcggatgagcctagaataatatcattacgatttactattcaatgtgaacatttcaaaatgtaggaagcatatattttttgctatatttcaaaaaaaaaaaaaaccatttgattactaatataatgattaattaatgttttatatatttttttaaatcttagttagcattcattttagatttttgttaattgaattaattacgacatgctaattagcttttaaaataacaaaaaggtatataaaataatcggtacataaaaataaaattggtaatttgttatattacatggcaacttattagttttgaaatttttttaaggttgcctaaatgatataaaaatattttttttt

SEQ ID NO: 229822 - DNA, 1464 bp, Cannabis indica
atttatttaatgttaattatatataaaaataaaataatcatttattaaagaaatttatttattaattagtaaatattaaattgggaaattaccctatatactgtttttttaattatttttttttcaaatttacggtttgggtttttaaagtggttgcagcgctagttgcaatatgggttttatacgattttttgttgcaatttaggttgcagcgttagttgcaatagaggtttctatgtagaatttcgtaaaaaagcaaaaaaaaaaaaaaaaaaaaactattttgaagtgtaaaaatgaaaaagcccctattaaattttattgtattttttattaattaaaatgaatatttctatatattttatcactatattatttatttttgtttgctatgtcatttatgtgtacaccatccgcataaaatttatgtataatgaatatacatatattattgctaataatataaaaataactcagttaaaaaaaaccgatctcacaaactaaatatataccgtaatattttatttataataaatgataatattattggtatttaaatttatttattaattcaaaaattctattcaaattaatataatagaaggtaatgattcaatcctacccttttttaaagtatcaacattaccctcctcaagggtagttataatactaagggaataacattccaaggctaaagactcaaaacaaacaaggtaatgtttcacattaccattcccttgttagcattaacccattccaaacaccccctaagtagtttataatcgttaatacttacaaactcaaagtctgaaaacctccctatatacatatatgataaattttaatcacaaataaaacactaagcaaaacaactcataaaatcatataaataattttcatacttttgtcctaagtcaatttgcatacataacaatcaaagtatatttaaatctcactttttaaaattttgtttcgaattcataaataacaattatagatgatcaatcaataattacaatattaaataagtttgcatagaattaaagtaagagaagaaaatgaaattgaataactatttcaatccataaaataaattcaagtggttcacatgataatccttaaaaaaaaaactagttcgtacaagtcattctaaacacaacaaagattcaattaaaaacataaaagataaagataaaagagaaagaatattatttggaatcttctaatggtgtattctactcttagccttcctcctatgctcaaaattggtctctaagttcaaatgacaaaagaaacttagctccaactcatttaatagacaaaatttaggaagttttccatttttttcgcaagagtcgtgcattggatagagagtcgtgattctcattttttttttcctgctgcaacaaacgatagttttttgccataactctattgatataactcggaattagacgattcaag

SEQ ID NO: 229823 - DNA, 984 bp, Cannabis indica
ataaaaattaaaacataaataaagatttatttagcaacaaatttaatatttttagtatttatgtcacaaattttttaatagtaaaataaaaattttaatataattttattaagtaattattattaattaaaatacacaatttattttttatatataatttaaaatattttatatattcgccgcgaagcgcgggatgtttactagtttatgaaaagagaaatgaattagacatctcggtcattacaaaaaataatgtcaagtatagaggagaagtctaccaaatccaaaatatttcgagcaaaagcctacctaactacattatgtgccgcaaaattacaacatctagaaataaacaaaaaattacagcataaaaaacatataattgtcaatatttcaacaagagtaggatcccttcagagcattgataaccttctctgaatcactctcaatcaagacaaaaaggtgttgctttaaagcaagcaactccaatgcaaaccgactcgcctcaacttcaacaatcaacggatctgtgaaattgaggatgttagctgctacccacaaacttttcctatgcgatccttagctaaaactgccatgcccatggatcaactaccaaccttaatatcgcagttgatattgatccaatctttaggaggaggggatgaaccaaaaaggagacacaatagccaacgtcaaagcaaataagcaagtcacataatctgtgtaacaaatagagatacaatcaatagggtgattaatgttacccgaggaattattatgaaccttatcgttacgggtcttccaaatcatatccactataatcgaaggatagaggaacatctttttagtatccactcctttcgacttcaagttccagagaaatgttaccctatcccaaacacgggctccagattcaaagaccggtgtaactctcttaggggaagacctccaaagatggtacgtggagtagcgaaagaggaaaaa

SEQ ID NO: 229824 - DNA, 845 bp, Cannabis indica
gtatactacgatggtggcgacgtgattccgagtgggtggttcacgatagtagcctacgaagcctaccctattttgagtgagtgtgcgaaggccaggttccagtttcaacggtgagattggaagtgtgatagcttctattgagtagctttgtgtgattggtgtattcattttgctctggttttggcttgctatgatttctatttgaaactccagtcacggtgagagtggttctattgcgatttggatttttatttgttctagactggtttttcgtggtttgtttgatttgttccggggtgtgtttttgcttggaaaaggtttgatttggtgttggtggtgtgtagatttttttttggatacagtttgatttggtattggttgtgtgtttgattgctctagttctagttcgatagtactgagtctttgttgttggatatgttttgatttggtgatactatgtactaattctgtggtgactgctcttattggattgggatttgttgggactggttctagttcgattgggatttgttgttgagctctcggtgggttctagttgtggtggtgcgtgggtgttggtgtgtggttgtggtcaggtttgtcgttgttggtgcttttggtgtgtggagtcgtgtatgtgtttcaaaggccctcgagtttggggtttagaacagaacggagggaggtgttcgtgcatttttattgtggtgtttgcgtttacattttggggttgagagtgattggttggttgggtgtgtggtaagtggaattaggcaaatatagatttagaattggtgactaaactgacggaggttctaaaattagacgaaacagatgatcccgtt

SEQ ID NO: 229825 - DNA, 2195 bp, Cannabis indica
agctgcacttgttatcgattgaaggatttgaaaatttattataagaagagaattttaatttgtgtcaaaagaagtttaatttttgtaaaaaaaataaattttattataaatattataattaaatggcttaattattaaaataattcaagtaaggatttaaatataaatattaattgctaaaataggtcttgttaaatatttaattaattattttaagaaaatagttaattataattaaataattctaaaaaaggaatgtctatttaattaattattttaagaaaatagttaattataattaattaaatctaaaaatggaaagtctacgtattagtaacctgctattacaggttaaagaaaaatgtaaccatatagttacaataaaaatgtaaccattaaatagtcaccctattattatatattattattataatatttagaagaataaattaatatttaaatttaaaaactaaaatcaattactagtagtaagtaacataccgtgcacatctactagcaataggatgacaactagaaaccacattggagggctgtttaaaacatcaaatatagtcattaatcaatatgatattaactattactgttttactaaattagtatacatgcaaatttctatgaaataaaataaaaaataatttaattaagtaccttattccaacgacaattctgaaatcttcctctaacgatcgctcaatatattgttggaaattaaagctgtcatgcctggctgacaagtgagcctgcaaagtacattattaaataattattgttaaaaataatgatgattaaagtaattaattaatattatattgggttttgataattacctcaatgaaaccatgtctaaggtgagatagtcaacttttgcaactgagttagaaaactgcctgaagaaacatttctgttcatattatttgatttaatcagtgcttagttgatcatgtccttagattataatcatgtatcatgtgttgatatatattatatacgtagaatattaaaatagggtcttacaatccacaaaagaattgaggatgtttccgtgcaattattcatgtgtcgtcttccaaaagttgtttgtcttgtaaatctaaatcgataaggatctgataaatacagtcaattgttatattattatattaagatgtatacataaaatcttaaaataaaaaagatgtatacaatatataatgtgattatataaataaatgtagttagctcaagacactattttttgtgggtaatcggcagaattggcgatttatataaatatatattataattaggttatgaattgatcatactgatctatatatatattattattgtaatacattacacataatgatttgtatatataattatgaaccatttaaagaatacaaaattaagaaatgaggaacaagctaaataataacaaatttctattttagttctaggatttttctctccgaaggaaacatgttaggcttagtccttttttagaaagggttcagtatactacaatggtggcgacgtgatttcgagtgggtggttgacgagagtagcctacaaagcctactctattttgagtgagtgtgcgaaggccaggttccagtttcaacggtgagattggaagtgtgatagcttctattgagtagctttgtgtgattggtgtattcattttgctctggttttggcttgctatgatttctatttgaaactccagtcacggtgagagtggttctattgcgatttggatttttatttgttctagactggtctttcgtggtttgtttgatttgttccggggtgtgtttttgcttggaaaaggtttgatttggtgttggtggtgtgtagatttttttttggatacagtttgatttggtattggttgtgtgtttgattgctctagttctagttcgatagtactgagtctttgttgttggatatgttttgatttggtgatactatgtactaattctgtggtgactgctcttattggattgggattcgttgggactggttctagttcgattgagatttgttgttgagctctcggtgggttctagttgtggtggtgcgtgggtgttggtgtgtggttgtggtcagggttgtcgttgttggtgcttttggtgtgtggagtcgtgtatgtgtttcaatggccctcgcgtttggggtttagaacagaacgg

SEQ ID NO: 229826 - DNA, 1320 bp, Cannabis indica
gaaagggcccttagaatggctagtgatgttgttgcttgagtttccaggggtactgaagtgagacaaatggatagagcttgaggaagtagtgacatgttgtctagacagagtgcgcatagtggcattgagaagcattgtgaaagttgggacaaatttagtggattagagaggcattattgaggaatctagggtagggctaccactgctccaatgagaaagttattgctccatactgacattgttggacataaacaaaccaccttgctgagaagacgctgccatagttttggatgtagcaagttggagaggggcagtagtagcagggctggcttagttggagacacagaaaccactggtagggttggtggacatgaaagtgaccactgaaagtggagcgaaatgcatattgttaaaattttcaagtacatgattagtgaaaactcatacctgaccttgaatccccaaatgtcctcattgtaatagagattaggaggtagcatcttacaccaacaatattattatattttaaataatataagacactattgatatcctttaagaattttcattaatgatataaaagaaatgatattaaaaatgaataaattcttgtatttagaaacctagtaactactaccataatgatattgaaaaggaatgaattctcattaatctgtgtaaagtttttaattgatatatttcataaagatacaaaattagttatatttaatatttttgaaattaaatttgatatattgattttaatgtgaaaataattgtatcagaatatttattgtgttaataaaataaataaattgtgtttctatatcaattatattatataatggtatttacatatggaaagtcgagcaatctgtaggaaaatcacaactgttttgggtacaaattttagacttgatatctttagaaatatgatatggatgtgagacgtgacatgatagaattttgaaatagctttgaaacacaagtttaatcgcattaatcacataaatattcagcacacaacgcccagattgacaactcaatgcccaagttgacatcttgacgtttactggatgttgggtaagtgaaaaaaagtcccaaatttttttgatgcctaagtgacatgtttacatcacttagtcaaattctttgttctagtgaagttgctcaccaattctgggtgatgttgattttcagtgaaatcaggtaggctcaaaacttcctaatatttatttaatctttatttttcttgatttaatatttatcctattcaaagttgactgtgtatatcatgcatgttaaatgagaattgtattt

SEQ ID NO: 229827 - DNA, 1290 bp, Cannabis indica
aaacagatagagatgtatcggtgtatcccttttaaaatgggtgcattatagaatttcccaaaataatattacctttcaatataagtaggatataattttcaggaatgtgaccgttaattttctattataatttcttagttattttttatgtttgaaaatatatgtcggaatattttttttttcaaatttttatatgacggtgttcgttatggttacaacatcataaatttttttaaatttttgaaaagtttcaaatagttaatttacagtactgaaaataagtttaaagttttttgaacatacatggtagactaaaatattaggaactccattatcggtactgtaaactatgtgaaaattttaaaaattttacaaaagtgatattgtaactataacgaatattactatgaaaaaaaaatgaaaaaaaaaaatattttgacatgtaatttcgaacataaatattgactaagaaattataattaatactcatctataatattttggacactataataggacttttattttaaaaaaaataattataattgtttcttaatatttttattaattgtataaattgaaagtagagagagaagaggagtgtgcataaatcaatccaattcaatgacagtcggtcaattcaattacaaccgaccactaatattaaatgtctaattatgatcagatcggattggatgttaattttcaatatccaattggattggatcggatattagatagggtgtccaaatattcaatacatccaacactccaatcgaactaattaatatttttatttagtttggatgagtaatttaattttatgttgttatacgttaaaaaaataaaatttatatatgataattaacattaaaattttattttttttgggattgaatggatccaatctaatccaataaatattggatctaaaatattggatggatcaaatccgattcaaaaaaatactaggtctaaaatactagataaatttaaattaaaccaatagatatacatgaaatatatccaatgaatagaatcgatcaaatctaacatccaatggatgttgtatcgattggatgactgaaataaatttgatcgggtcagatagtaaaagctaacatccaatatataattggatcaaatttgaataaacttaaaaacattggatatggtccaataaacatctcttagagaggaacaaagattttgaaaaattattgctcaattattctgataattaaggataaaactgaaatatgaaaataacacacaacatatatatatata

SEQ ID NO: 229828 - DNA, 1496 bp, Cannabis indica
ttcttttggttttctttccactcatcacttttgctctttctattggtgtttttcttttacatcttggtggtttcataaaatattaatatacaaggaaactacggccatgaaatattatcaaaatcaaataagcaagcagtagcataattgttgtcttttttattatcaattggctcttgagcaaaaagtatttacacacaaaaacatatataaattaaaaatttaaaacaacaataattggtatgtacatattctcaacatgcggatgctccaacataagtggttgaagcaatcacagacgctgtcgccatgattgcagcttcctcttcctcaagaactttcaacttcttcttaacatctttgacgatttcctctacaaattttgattccggcctaaacacatacacatacaattacattaattagtcacttaagttttctaatttaattataagtagaaattctataataataaaacacaaaaatggagatactagttagttattacctaatactcagtgagtcccatcctgataaactagcagctttgttcaaggccttcctccatttatcaagatctttgcgttttctaccctcaaagcgttttgatgtaattgtataacttcctttttgtttcctgatatcagatggatctacaccataaaaaataggcacaacaatctgtttcttcttgtccttgcgctcgagtatctgaacgagttcatccaaacaccaagacgaagaggcatagttttcagagaaaacaattacagaaagctttgctgttttgatggcttccgttagtgttggcgaaatctcatttcctttcttcaatttgtcatccatgtaggtactgattttctttgctcttaaagcatggtaaagatgactagtaaaaccatttcgagtgtcctcacctctgaaactgataaacacatcacaccttgagcttgagaaacaagaacccatgtagtatatgtagctgtatgtgaaaagtattcaataattaatagtgagataccgattaaaatgaagatagttcataaatagaaagatcacagatactaaaaattgaaactcttgctttattaacacgaaatgttatttgacctttatgttctatgagctgattgcttttgggtcaaagagcgcgttttattaagttgataatatacaataataattgaatcccgtatcatatgcaagtcagattcgcgttttgtcatttttgttttttcaaacggtagaataattaagaagactaacgcatattatcaatagttttagcaaagttttagttagtgcaattatatgtatgcgtatagtatcatgccaccttgaaacaaaaaaaaaaaggactaaattaaggtagcgtttggtaacacttttgttttttaattttaaaaatagaaaaataaaagtaatttttttgtttttaaaattttgtttttgaaaaacaaaaatgtgttctataactacttttgtttttaaatttt

SEQ ID NO: 229829 - DNA, 843 bp, Cannabis indica
aactttaatatgagtttgattatttatttaagtaaatagttctctaaaatcccatatctaaagttctaacagccagaaccacaaaaacaatggttgtggcttgtcctattcttccttcgtctctgttaagacagttagttagttgtttgttgtaacagacttgttagttagtcctttacgattatttcacttagttatgagcttcatgttgtatatatactgtgtactcgttttcattcaatgagattctctttccttctccaattctttctctttgctctttctctgttctttctttcttctttccctatcgtatgttattcatggctcgcaactttaacatggtatcaaagcactttcctctgctcaatgctaacatggccactgttagtgctgctgggatttccaacaatggatcgaccttcaatggagctcaagctactcaaaccagagctcaaccttctcatgaaccagtgtacttcaatcacatcatctcaattcaccttaatgaccacaattctctcctgtggaaacagcaagttcttgctgccattcgagggaatcaactcttgaggttcatcaaagaaccaccaccagctgagttcttgactgaagaagatcgtgttcagaatcgagtcaaccagatcttcattgattgggaggtgcaagatcaacttttagtctcgtggttgttgtgcatgtcaacacttttactttggaatctacattcagcactggtggtagacacgtgatttcacatcgatcaaggcttcatccttctacattagaagtattagtatgtacacaatagtggttgatgattgaaaaaaaatgtagatatca

SEQ ID NO: 229830 - DNA, 1515 bp, Cannabis indica
atttgcttttgagaaatctttttagggaaaaatttatgtcttgaaatatcatttataaggacatcatttgtacttaagttcttcaatgaaactacaggcaccatacataagaatgttttgtatgaaacttttcgattggtttgcattattataggattttcgatcctaaaaacgttagtctaattataaaactacaataaagtgatggactacagtatcaaccttaggtaatcagttttgaaatgcatgagtagttattgatcttcttggttttccctttgccagatttttcagtccaaagcttcaagctttaaatttaaaattaaacttgttcatctttgatatcatatgaagttaatttagatggcttgcttaaggtaaaggtatggtatcttctcataattcctcaaagtcaagggaagaatcattaaatgataattgcaattgtagaagagccatagtaaagtcatgttggtttaggtttatttctgtagctgaattggtattatttaaattcaagatgaactcttaatttaaaaacaaaaggtacattacagttaatatctttgtatattaaaagtggttatctaacagtaattcttggtgttttatttattttattttattaaattaaattgatattaactctcaggttaaccttaaaaaaagtataaattaaaccctaaaatataaactaaatcctaaaaccgcctatcaaccccatcacaacgttttgagctttggaggaacgattgaacctgatcttcatgctcattaaattttgagagaaatcatattaccatctgtgtgttactgttcaagaactcactgaattgtcctcatcgccacaaccagcttccaatatcaccaccttagaattcgtatgctttatttttttccttcttctctctatctctatcgattcttttaggtttatatagatattatgtatctgtctggctgagatattgtagtttagagttcgtttacgatcatattgtgatccatgtttaatttgtcttgccatacatgttttctatgtttaatttgtgatcatttacctctgatatttacgatcatattgccaaacatcgatgacattttctttaatgagttgagttggaaaattctcataggaaagtatttttttcttgcagatcttgcattgaaaaaagtagaattaacagttcatgtggaaccacaacattgactgccttcacacacacttgcatacctattttgtttggtttaggctaaatgattttaatgaccttcacccatgcttttttttaattttgtagatagatgttgtcatataggtgcacacataaaatatttgagtaattgtatacttgatataattttgggatattatgcaactaagagactgttcattatcatctgacattttggaatgataaagacattggttttcacttccaaggtgggttcattgtattttctttttcttccttatttatatttgttctattgttgtttgtaaaatggtacaac

SEQ ID NO: 229831 - DNA, 1510 bp, Cannabis indica
taggatcctgaattgatttttattcaaaataaaatttaattataatccgatctaaaagtgctatgacaaaactgtttatattttctatatctgttcgtattagaaattatcttcaagttggttatattaaaaaaaaattaatcaaaaattaagctcagggtcttatttttaccattttggaaaatacagggtccattttgtcatttaacaaaacacagggtccaatcggtaacttttgcaaaacacaaggtctaaaatcgtatttacccaagaaaaaatctatgcttgtgcatgtttaaggtgctccaaacagcctcatactaggacacttattttgaatataagattgttattatacagaacaacagcgttgaagttgccctttccacatgcagcaataatttccctgttgctaaacctttgtctcaagcaacataatttgcaccaataccagctcgtgtcaggtttaaggtcgtaggaacaaaaagtaagtgtcgttttttttttttttttttttttcttagtataaacggaatttatccattttacccaaagcaaatctttttctcttttttctgtgatggcccagataaatttcgctaatatggcttgattccatttgacaccttccttaaaaccgattccaccataagccttcagtaaacagaagttttcccaagaagtaacatgtaatttacttctatctccattggttccctataagaaacctctgcacaatctttcaacttccttcgtgacactatgaggaaggataaaatactcatctaataattgcgcagcctaaacaatatagagtgaataaactgaatcctccccacgtttggcagatgcctgcttgtctaggaatggagatgttgctggatttttttaataatgatgtcacaatcttcagctttacatttagttggtctaagaggaactcctaagtaacgaagcggatatgatccctccattaacttttaagtctccaaggattgctgctttttcaaaattttagactcccccaaaataaatttgatattttcccttcgctgatatgaagccccgaggtattgccaaactcatccaatatgtctttaagaacaagcattgctttccttgtttctttgctaaacaagattagatcatctgcaaagtaaaggttaacaagacacaaacatttgcatagaggatgatatctataatttgtaccaaaggcagccatttggagtcttctcgtgaggtattccattactaagacaaagatgagaggtgatagtgggccaccttgcctcaagccttttttaccttctaaggaaccttgcacccttccattcatgcatatgcaatagttagtagatctaacacattccataatcctatgaataaatctcaaaggcaggttgtaagcacataataggtccttaaggaagtcccaacttatagtatcataagctttgcttatgtctattttgatggaacatcttggggagactaattttctcttata

SEQ ID NO: 229832 - DNA, 1885 bp, Cannabis indica
atcatctaaatgctaacctataaagatctccttaacattacaatattaaattttatacaatttattcgttttcagattcattttcaaatttcaggtaaactctttctaaggcaataagaaagtgaaccatttgtttcaacttcttaggcagccaacaagcccaacaggaatgactatatgacaacttccaaccttccaaaactaacaccatacacaaataaaacaaaattctagattgccaagattacaatattattaaatgaagtaaatggaaaacaaacaaaacccagaagtactcatattataataattcatatagaaagcctttttcattttatccaattaagggatgaagactacaacactcaacaaaatataattgattaatgtggaaatgtcgcatagctgtcaattaattagggtagtttatttcatgccactaagaagttgatcaacaacacacctactcctaccttcaatgactttaaagtccattcttccaagtcccattacctataaaagcctaatagcaaatagatttctacatacacaaacaacaaagtttcctcttcttctcaatcagaaatcacttatcttcccatcacaaaatcattttttcagtatttcaaatttgattgataacaacatggcttatcaacgaatcccgaactatatattaccatttatggttcttacaatttcattatgtataagcagcaaaatggtttctgaggcacgccacttgctagagactactcctagctttccaaaaatacctgagattccaaagcctgaacttccaaaaatgcccgagttgccaaaactagaaattcctaagtttcctgaagtactgaaacccgatgtctcaaagttgcctgagctaccaaaacttgaaattcctaaggttcctgagctaccaaaacttgaaattcctaagtaccctatggtacaaaagtctgaactccccaagattcctaaagtgccaaaacctgaagccccaaagttgcctgaggtaccaaagcctaaacttaaggttcctgaaatgccaaaacctgaagtcccaaagttgcctgaggtaccaaagtctgaactccctaaggttcccgaagtgccaaaacctgaaaccccaaagttgcctgaggtaccgaagcctaaggttcctgaagtgccaaaacctgaagccccaaagtttcccgaggtaccaaaacctaatgttaaggttcctgaaatgccaaaacctgagactccaaagttgcccgaggtaccaaagcctgaactgcctaaggttcccgaagtttcaaaacctgaagccccaaagttgcctgaggtaccaaaatctgaacttcctaaggttcacgaagtggcaaaacctaaagccccaaagttgcctgaggtaccaaagcctgaactacctaaggttcttgaagtgccaaaacctgaagcacctaagttaccagaggtaccgaaacctcaactaccaaagactgatgttcctaagttgcatgaattgaatcatgatgatgcccctaagatgcctgaattgccaaaaattgaagctccgaaagtgcctgagctgccaaaatttgaagtccctatattgcctgaaattccccatgaatttcctaagcttgaaattccaaaattacctcaactcccacatgagctttctaagcccactttgccaaccattcctaaccttcctaaggataaatctattccttccctcagtactccacctcacactagtaagccttaaagcatttatgaaacaagcgcttgcagtggagaattaaagtattgctttgatcaatctgtgatgtttctttatgaattatttcttttgttaccaatagaatcctgatatcccagcatagttacaattttt

SEQ ID NO: 229833 - DNA, 1651 bp, Cannabis indica
tatagtatataattaggattatgatatatgatttaatgggttaattcaaatgtaaattggtaatattaatctatcacaatattcattacattaaaccaaacatgttctttgaatttgtactaataacaaatttgaccattattcatgcaaatctttcctaagtacgttccttaattatgtaaatttgaccattattcatgttcttctattttacagtctaattttcttacgacgtcttttattcatgcaaatttttcgactattatagctatgcatgaattagttgtgcaaacacttagaatagacggtgagctaattttaataaagaatctttaatctcttctttatgatgtactcaacgctaatttctttgttaatgaaattttattcatggttcaaaaaaaaaaaataacaaatttgaccattttataataaaaatgcaaatttaaacaaaggagagagaaggttgtacataatttttattcttatgaaataataattttttaaaaataaaaataaatcgaacgatttagtgggattcctttctgtaataagtaccatacaaaatgtatcacgtgcacgtacgatgttctccattatttataactatttttctttattattttttgttaattttctatttatttaagtggatgcttttttacttgttaaataaacaattaattctctaaatttattattatttttttattattaagaaattattttatatgatatttttttaatttgtaatttgagttgctttggtaatttttatgtgaattgctatataaattttatttccaatttaagttactatattaattattaggtttttatgtaaatgtttgtaaaaataataaaaaaaatatttaaagtatataaaaaaaaaaagaacccttattattattaactaaacaaaagaagtactacatatatactagaaatatatatattaattaagaattaatcaaatatgtagccggaagaaagaaaaaaaggatagattaggagaaaagaaaggtaataaatattttattttattaatataaagcttaagtcaatcattctctctcagtcaaaaagatcaataaagcaaaataaaaatgattttatttatttatttatttatttaaaagaaagtaaagaaaagtaatgcatttctttacattattatatatatgttgatctaaaaagccactatctcatttttataaaaataaactccaatataacaaccaaaagaaaatcaaacaaaagtagcttgaaaaagtggactgatcaactgatctaacccataataatagaaaaagaattttttttttttgggtatttattagttaacataaaaaaagatcatataaagagtaattctagtaagctttggatccatttttacatagcatatttatatctatatattaaagatttattggaattaattaaataatttaaaaccagtcaagcacttagttttgttgatataggaataagcaaaaaaattattaaatattagaattttggagttggtcacgtaatataaataaatgtttgtttgtgttgggaaatttaattatattaaactttgagggaataatataataataagagaagtggaaaagaaatattacaaggcttaatttgcaacata

SEQ ID NO: 229834 - DNA, 1205 bp, Cannabis indica
attccttacacatagaggagggaatattcaaatttacctcacaagtggtagtacaggggaccactgccacctcatttgtgcattgtttgcctctgtcaatcgtactcgacaccaccttttgcgttttgccactattctgcatggtagaggatgtaccatgcattgtaccatcctcaacgttaggatcatcccctaccttttccttcttcggcactggttcaccttcagccaatgcgcctctctgcagccgtgactgtgaaggctgccttctccagacaccctttcttctatctgttttcccctgtaacacagtatcctcctcattcactaacacttctctttgcaaggattttgtagtaaaacaattgcccataggtccttcaacctttatccatggcccatatgttctaaccgccggacccgatgctagagtaacccacgccgtgggctgagtgcactccctgttgaagtgtgcaagcctcccacagttgaaacatagaaaaggcagtttctcatatttaaattggacccatgtcgaagggtttgcaccagttttgaagaagaaccctggtgggaatggaaattgaatccaaacatcgatctaacatcgtaaaaatccacgtctgaccacttcttccttcttttttccatctgtttttagtagttgtcccacctttttagtagttgtcccacacaagccttgttgacaacaatatcttccagggttaagtcttcaaacagctccatcatctcgatttccatctcgctatcccgttccagtattttcccagcttccttatctatcaagacaacccctatagcaacttcttcactgctgcttacttcttcaacaataaccacactgaactcgaaatagaacacaataaacacccacactcaacaggggaggtcagaagtaagtctaaatgaaaacagactagactcaacaaaggagttaaaaaacacaagcagacatacaaagcccgaaatcaccgaatcaaagctacgacgagttttgaaagatgagataaatttcagtaatcggaggtgtaaggtagccgtggacagtagagagaaaacttaaagacactcatgcttagcagtatttatgtattaatttatatggatttgttatcgtattcttgtcttatcaaaaattgaggtgaataatgttaattgtacaagtgtcacgtgtaactatagta

SEQ ID NO: 229835 - DNA, 2112 bp, Cannabis indica
catatagagttactattaactaattaataataataataataataaatctaataacttttagtcacaacacaatttgtagactaaaagtaaaatagttgtagactaaaaagtccgtaaactaaaaatattaatcacaaaaattataatttttgtgaataaatatatttttagtcacaatacttgttgtgagtaaaactaaattagtgacaactataaatactatgttttagttacaagtaatttttgttgcgactaaaagtcacattgagtcacaaaaaaattatattatgactaaaaagttgtgactaaaggtaattattttttgaagtgaccatataataatatttcttaaatatataaaatttaatcttgtttgaaatttatttattagaaaatatatctaactaattttattaaacaataaaataagtaaataagtttagatattttaaacaatataactaacaaatttgttataaagtataattaattaattgaaccaacgactgattaattcatcaacatcaagctctagttccctctcaggagcctctgggttctcatattcctcctgctccgtgtgctcctcctgctcctcaagctccacgggtactgcggctcgcctaacaacttccatatacctggtggtatgggggtcgttaattgatacaacataaaaagtttttttgtacgggccagttttgacttgtcctcaaaaataatctttgactatgacgagcaaccgtgactgctacttcagcctgcacagatcttctccttaaaggtcctagttgaccaacatgcagtgtatcttgtacatcttcccaaaccaagagtgaagaaatttcctctaacatcttttccactcccacattaaacgcatgtacacgtctccactgatttggttaaagtagtggtggtgttatgtttttgattctgggaaatcactgctaacttaccactcacagaaacatgaagtataggaagaatttctcagagatgaggatgtctgctcaaagtctaggttaattcttatgaagaagttggagcagtttgtctattcagaattcacctcctcacagaagtcacctgggttcatctataaaaaagaagaataggttagtatccgaacaggtttggattgtccttccaaaagaagaacatcccaggtacttcaaacagaaggaaaaaaaaaacaaattaaaataaggaaatccactctagtgcaaaaattgatcttagggttttaaaacccagaatctctgaagagtataaaaagggaaaaagagacaattattcttgcaaaaattcctcaccaaacatttttgagtcaaggcgcacgattcttgggtttgttttttcttttctttttttataaaaataaattcaaataaaacttagaatctagcaagcaacaacgaatactcatatattccagtagttctaggcatgcaaaagcaaagtaaaaaaagaagaattcaaaagaaaataacttacttactgatgtgtctagaataaatttttcttggtagaaggtctggacgaagaacgaatctcacgtagcttgaagaacaacttttcctttttgaagctttgaagagtgaagaactggtgaaagtttggaatttggaaattcctcttgtagaccaaaaaaagggtagtctcggtatgcgattgaaattaggttttaccctcaaaaaatgccaaaatgttgaatcattaaacgtctggggtgtgcaaccgtcaaaagacatttcccatttctcggtcttttaataagcattaaatgtagagatttaaagagatttaagaagatacacacgtctcgggtagggcaaaaatcaactccaataaggcatgtgaaccctaaaacgtgttactaacaatgcgacgatcagttcccacgcatacttgggaggaaaatgttattctaatcttcgcacaatgtgatgtggcactcaacaaggtaacatatattaagtacgtttttacctggacacgatatactagtttaaggttccatcaagaacaattcagagccaaaccgattaagtttagttcttcaacagatagtatccgagcaggttcaatgccttgcacttctccaagcaa

SEQ ID NO: 229836 - DNA, 1034 bp, Cannabis indica
ttagacatcgatctgataccatgcaagactttgtataatgagactgcaggagcaaaagagagaagaagaaaatggatgaatgtattgaattgctcaatcttaaattgattggcctttcatgtatttatactaaatgtttgtacaagacaatacaacattaaaaaatcaacaaaaaaactaagtgaaagagtaataaatctaactaacttgttgttagagtacaaacattttccaaagcgttttaacacaattatttattctaatatgcattgcttggaaaagtacctattgtacacactgatgatgtttgccaagcctatatactttgtatggattctccttcactcagtggtagattcttatgtgtcagtacctatatctcctatacaaaaattataatttattgggtcgtgtaagagtagtattgtactaaataacaagtaacactatatttagataaaatattgtactaattattatgatcataaattttaatacaatgtgaattatattatttaatacacaataatttattcttattagcctatattataacatttaaaaagtgttttagggttggggacctcgaccctagacctggccccggtctcgcacacaaacccagccccgaccccagaccctagatccagccacaaacctaagacctaaccttgaacttggaccaaaacctcgtacccagatcagaaacccagacccggaccccaaccccggacctcgggcccggccccaaaccctagccaaacctcggacctcaggccccaaaccctggacccggacccaaacatggcctcaatcccgaacccagacttggaccccggactcgaatccaaaccttagccccagacccgaacaggggtcaaagttagggttgagtttatagtaaatatgatataactttacacaagctattaatacaagtcaataccaaacatactattgaattaattgttaggctaattttagtctaagttttgggtcttattttcggttagttttcactctttgtttctagt

SEQ ID NO: 229837 - DNA, 948 bp, Cannabis indica
tttatttagaaaaaaaaaaatagaattcttcaaaatcaacaaaaaaaattgtgtaattttaaaaggggaaattttttttttggacccctggactaggtgggccctaggcacaggcctagctcgcctatgcccagggccagccctgtctctaacctctccatccatcctactctccctctctcccaccaaacatagccttagggtacccacagatctttctaaatattaatagtatttcccgtgccaatggatttgtaggcccctttcctaaagattttcttcgatttgaccatatttttccaaaactaagaatttgaattccaatagctacaatttagaaaaaaattccttgttttaaatatttagctttgagcacattacaataaagtgagtttcaatttgtcataagatgccacccccactttaccaaaaacaaaactttgttcatcttctcagacttctaaaatcctaagctcccgagacatttggataaacacaatttgtcccaagctttgagacgcatccttttgttacccttcctggcccctactaaaagtctcttgctataccatcaattctagaagcttaaactcttcgagaattgagtggattgcatagcataagcaagaacatatagattaacatattttgtgagggttgcccacctaatcttagaaagagtcttaattttccaaccctgtaattttgagatcaagttgtccatgatgaaatcaaaatctacctttttccttgaccaaaatagctgtaacccaaataacaaatgttcctctcttgcccttgaagcccaaaaatagattttatatttattcccctcttcatgccagttgctaaagaagatagaaaattttagtttgtttacttgtttcatccaattcaattcgcactactttgttcatagggtatctgatccgcactaagtatgaattt

SEQ ID NO: 229838 - DNA, 843 bp, Cannabis indica
gttagattatttgttttgggttttggcatatgatgtttatatggttgcaatataatttacctactggttatgaattagatgtataatgtgaatgattttttattagttttagtatagtttgaaggtagttttgaaccgtttccattatcattatcatgtttttgtttgtttgtttatctctgcaagattgagaatacaagttctatccttatgattatttcaagtccaagtgataccctactttgacttacagtgttattgacaacattaagaaaaaaaaaatatgtgatgccaatatttcgtactattcaattctattttttcttggatatttctatctgagatcaatcgatattcttatctgaccccatatatttcaccttaatcttaacaaaaaaaccaagtccatgcattatacttttctaaatctacaatagacaataatgagagaaatttgtgaccatttgcatcttgtgtgcaagctgagaacaatgtgcttcaaaatgtagcttttaaaaaagttccatcaataacgatgattgatgtttatgctgatatttacagattgtcgcaatgtagtttggttttattggcatgattttagttgttctgtgtgaatgtatttttttaagtatatttctagttttaatatagttttgaaactatctatgttttaatattcatgtttctattttttgtgttttttgtattatctatggattgagaatacaaatttcatccttatgattattacaagtctaagtgtgtcactacttgcacttagtgttgttattttagttgtagtttgagttatttttcttagtttgcattccagcacctgat

SEQ ID NO: 229839 - DNA, 1717 bp, Cannabis indica
agagagagagagagagagtacctctacaacaaattagctaacacaatggaggacaaattcctttagctctcatagccgccccgtcgggtcagggctctgacctccccgcaagtctttttgctaatcctaattccgccaagtaactcaagtttttgttcaacttcagttactatttgtagctcaaatatggcacataattcattgaattgattgtcatccttaactcctccaacttagcatatacatggtccttttgttgatgtagttgatctcttgcataaaatttgtggacttcacctttgacaaaaatccaactacatcctgtttcctttcttacaccttggtctttcatcatatgtcttgaactaattctatcttcgtaactccctgcctccatataagtgttggaaagaagaacataagtagctgaatactccccaacacaatatttccatggaccctacatgcttccaatagggtctgccagatcatttcattaggctcaataggtatcttttctatgaagtcaatagcatcagcaaggcgaccgacacaaccaaagaccaaaccataacattccttctttcgttgaaagtaaagtaaaccttcttccaccatacccatgtggctgaaagcaaacaggatgcacaataaggtaacatcatttgccttcacgtccatttgctcgattcttttaaagagtagtagagcatcttccacaagaccatgttgagcataacttgatattatagcagtccatgtaacaatatcagggttgggaatcctctcgaaaatcattcttgcctcggttatgaagccacatttggaatacatgtcaataagagcactttctgtacacttatcagaatccaagccagccttacataaaagaccatggacttgtctaccataatcaagcaaagaaagactagcacttacatcaagcacggtagaaaaagtaaactgattgggtataaacccatcttccctcatttttgagaaggtcttaagtgcttcctcatactcagagcattgagaataagccactactaaggttgtccaagacactatgtctctttcttccatcctatcaaaagctttccttacatcttcaagtaactcacatttagcgtacgcatcaacaattgcattggaaacacttgtcttgaacactgatctagacttcaaaaccattccatgaacttaccttatgaaacctgtacattttacaacagatattgcattgaacacactacaatacgtgtaaaggtctggacaaatacctttctcatacatggttacaaatagttccaaagcttaattggctgtacccacattgtgaatagcctgatatcattgcattccatgggggtatgaattccacagctagtgaaatttgagtcaacaatggatcttgcatcagacaaagacttacattttgagtacatgtctattaaagcagttcccacattaatgttagaatccagatgaagttcaaaagcataagcctgaactattttacccttgttagtatcacctaatttaccaacaacatttgagacactaattatggtgtacatattaggtgaaattccctcattcttcattttgagaaaaaattcaaacgcttctaagtgatggttttttgatgtgaatcctgatatcattgcattctaggagacttgattatgtcttttcatgttcctaaacaccttat

SEQ ID NO: 229840 - DNA, 1710 bp, Cannabis indica
ctgtgtgtcttgtccgtgttctctctgcttgtcttgcctttcctgggtgctttattccgggggtttctgagtttttcgagtctcctttgtgtggatggattggtggttttgtatttgttttgtgagagttttttcctttattgttttctggttctctgtttgtcggtgtgtgagtctttccttggttctgggtaggtgtggggattgtcttttactgtctgcatagctttggtggtaggtattatgtctattgcacctaataaaggcaattgttttagttgtggtatgaatggtaatgggattaaagttgagttggaggaggacaaatcaatgcactggaacatcttcttcaagatgttggtggatatcaatattgatataccattggtatctggttgttcttttgatttggcctctggtgtcaaaagatggcttcgtttcatttttggggaaattggtattttttgctatatctgcggtcgtctaggccactaatggcgagggtgttctgtgttgtctcttgtcacggtggctaatggcaaaggaattccgtttccattggttggtgccaccgactctaagttttacaatgtattcacctgtgctagtgtcagacctgtggttggtgccaccgttgcccctttgttgaggttctccgcttgttctgcggcgtcggacgataatggggtgggcaaaactgttcatcacccatctctttctgttgttcatggctcgagacgtacgaaatcggtggcttctcgagggccgttggggcatgggcttgagatgtccatggtttggaagcccaaggtgccagttgatcgtgataggaggtttactggtaatggtaatggagctgaagtggttttgaataatggagaaaaggctcctgcaatttttcctattttggaggctacaactcaggataagttgacaaactcgttggcttttagcgatgcatttccaagttttgacttctcgggtagtgggacgaattcaaatttattatctaatgaagttaatgggccaggcagtggttaaaatgtggaattgggcctgtggagattgggttgctggataatgataaggggaagttagtagaaggtgggccgttgcttgatctcccaccaattactaccttttagaatgaaggttcacgtgctcaactcgataagttgaatactgatggtgggccgactttcattaattcagaagatgggataattgtggataatgggcccgtgactaaagtgattaaaaatcctggagtgcttaaagagaagatgggcagtgagtacatatatgagggattgactgttgttgggcccaccaatgagaccatgcatattggaaggcttgagatatttaattttaataagaagacacttgtagagcccgtgagtgctctaggtgtgggccctaacagtaatattgtaattgatggtgggagtgggccgtgtgatgcatatagtgaaagtgggtcgtgtgatgttaatggacagacctctatagtgaaagcggtaactaagacttccgcaaatgtatctctgcaagttgacatgccagttccttcgggacagtcctctagattgacggcttggaaggccaaggcccgtttggcggatctctcaattccgcctacgaatttgtttcaaattaatgatgtgggctcgacggtcggtgctattgaggtgaatttgacccctgtgg

SEQ ID NO: 229841 - DNA, 1272 bp, Cannabis indica
ccccatcagagcacaaaacaccagcttcattagtcagtcctaaaaagccaaaagatagaaaaaatttagattgtggaggattaaagagatgctatgaacaccttatgaaaaacataaagattaagaccctttcaagttctaccaacctactaaaattgtagtggaaaaaggagacaggtgggacaataattaatttgttccaacttttttaaaatagaaatatcataatgcaaaatactaaggtaacacaaattaatattaaatatgtatactttagtactatttattaaataaactattgacattattttttggatattaatcaattaatttatttgcatcctaatatttccccaacaatacttgccggtaagaggcccaatataaatgcaaaagacatacacgaacattatatatctactatgtactacgtatatatacatatatattaatcaagaaaggagataaaaagaaggtaacgtcataggtaattatcttggtcactaagaagcttccttgttcccttaggaaatattgttaaaaatacgattgtgttcttgtgatctaaatacaaaacgtttaagaaattaataaattactgtttttaacaaaaaaccctatattattcatgaattgttaatgcatattaaaggaattaataaagataaagctggacaactactgagtaatttcaactagacgttcaaatattatcctaccatcctgactattaattagtattgtcaaatttacaacaaacgaagtagacttacatagatatgatgataaagaagttactaaataccactaaaaaacaaacctggaatagcattattttgtctccttgtattagcatattgatgaaaaaatttcgtattttgatctcctgctttcaaccactgtattctagatctttgctgccaaaatatttcttctttttctagtaaatctgaaagttgagattctaactcattaacttcaaactgatcacatgcataactatccttattttcagcttcagctaaccttcgcttagtgttccaaatattcttaggcagcttaccatatttcttttcatgccacttacctaagctttgagcacaagaggagatgttattaagcacagcctccatcacagatgacgctggagtggattcccaagaggatgacacaatttgatgacacgtaggatcgatactcaacatagcttcatactgaaaatatttgcgtttatgagataaaaactgttgccaactttaggaaggtcgccaa

SEQ ID NO: 229842 - DNA, 1085 bp, Cannabis indica
gaactcaccaaccaaaaattaagaaaacccttacaactgtgatgtagactccatttagcaagcatatgaatcgcctgattagacgatctaggcaaccaaaaatagctaacaaaattagaagacaaaacaactaaaaacttagaaaacaaaaaggtcatgttccagtgtggagtaattgcagactcaatagcaaccaccaaagatctggcagttcgagagaagatccgcactgaaaatacccaattttagcaacattttcgaaccccaaaaagtagcatacaactccccatgaataacaaagaggaaagttatcttgaaagcaaacaaagccaaaataccagcacaatcattacgaaccacaacctcaatcgctccaatactgtccttattcgcaaagttcacattaacccgaaaactaccagatctagacaaggtacatcgtgccaattgaaagtcattgccaccagaaacattctatcttgaactcgaaactaaattctaatgactacaacatatacaattataaaaaataaaactttactaaaattcttttagataccaaaacaaataaatagtgtaccagaacaaaagttaaacttaattaaataattccatgtcgaatatactagaacaaaagaaaaaccttctccttaacttgccacatgaacaattacaataaattaaagactactatacatggtagtctctttcttaaaggaaaaagactagtatataataattagtttagtttatgtacatataaattattaataatagagggtaattaagtctatagtacatcctttaaataggtattttggtaaaatttttatctattttagaaaaatattttagtctattttttaatatgatcgtatatattataattatttaagaccacacctgtaaatttttagaaaattttaagtagtttacagtaccgaaaaataaaatttacatattttgctgtacacacaattatttatttttatacgcatgagaagtaactgtttaaactttattttcgacattataaattttttaaaatttttcaaaaataactataacgtacataattataaaaa

SEQ ID NO: 229843 - DNA, 1230 bp, Cannabis indica
cttgatgttgtgtttggtgaacaatatttataaccttcaagcccatcactctttatcgttgttatgaacgcatacactagcattcactcacagcctaatctcaactctcaagtggcaactcgaattcttttaatgaaaagaactagacaattattacaagcctattgttttcacccttgatagtgtttttactgtgcctggcttgtctagttcatatgcttgcccctgcattgatgtgacatgaagaaaaagaattacaattctttgtttaacagatgtgaaggaccttatttcgactctggctgatggccatggggaatgctcaataattggtagttacaggacggacactgctgattctgtttgcccgtcacgagttcgtgctatgttggcatcacgtgcttgcagatcgtctgtcatgattggggatgctcttggaaggaatgagatgcagaaggtaatgacactactacttctgatttgttgatcttctcacttttctccaaattactgtggaaagaagggaagcataaaaactactattgtgtgtttgatagatggaaggtggcatatagttgaaaggaataaaaatattggaatataaatgagaatagaaataggaatgaatggaatcaaatttaaaatgcataaaaattgataaaaaatcattaattttttttttttcattttgcattggaaagatttttccttctattttaaaataaaatagttattctattaaaatgatgttctatttcattacctcccaccagttggttggaaggaataaaaacataagattgcgaatgagaatgataacaggaataagaatgaaattaaatttaaaatgtataaaaaaaattgataaattattttgtataaatacctaaattatatttttgaaactttcggaggtagctggcagttaagtatattaagtcaatggccacgtggcagttgctgattagtctaggtcattaaattcttattttttatttaaaaattaatttaaatgtaccaataaaaaacgacatgtgaataataacttgacacttaacggttagatatttatgaaagttttaaaaatataacttagttatttatttgcaaccgagagttaaacttaagtatttataacgtaaattactcttttcttatcttgcattgaaatgtcttttttttaattttaaaatggaataattattctattggaatgaaatttaattagtt

SEQ ID NO: 229844 - DNA, 1349 bp, Cannabis indica
tactacacgaaatgagagttttgctagcgcatttttatgctggaaaaagctgggtattgtactggcaaactaattctccttttgcaagcacatttttgcactgacaaaaggggttggtaaattcgcgttggtattagagcttttgccagcacaaaacgaaaagcattggcaaaaataaaaatatgcactgagaaaattcttacttataccagcacattaacgcgttgggaaaagtcttaacttttgctagcaaaaatatgcgatgggagatgtctaattgtaacgccatgaccccaagtgaatgaagttatcaatgtaaacttaatagagtgatgaatacaacaaattcaagagtctacaaaagttgcagacaaatgagagagagacctttatttatagtagagagattacaagaggcaagaaaagaaagatagctggaaacagttattagttacaaccgaaaatagaaaatagaataacctgacaaaagaaacagaattaactaactaacagttttgatctgtattacacatgtgtgcttttacaaatttattttaacttaatgtacttgcttaaaaaaagtgcagtttaatttaaatttttaattaaaataaacataactgttattaaagataaaacaccactaaatacgaagatcccctaaataaaactttacattctattctaaaattcgttttacaaaataagagattacatttcaaaatactatcaaaagggtggatcctatccactagaagctgaggcaccgcggtagatatgtacactactggaaagcctcttactcatggttggtccactttacccttccctttacctgcaccacgaagcacccgtgaatcacagagacttagtaagaaaaactattaaatcacaagtaatgtgtaatgcaagtaaacacaacatattctatattctttattcaacacataatcaacaatgcataatcaattaaaaacgtctataagacgagtcaatttcagtgcctcataaagcacccttaccactcgttgtctacgagctacatatgctactatcgttgcccggtaaagcaaatgataagtaagaaacctatctgcagtttcaagcgagtaattactcataacggtaatgactgtatctatccctcgatcttaatcgagacactataataataatcactacctcgatcatagtcgaggcaccaacgattataattgtttcttgtccaacatacttagtagtgcataaagcttttcttacctcaatccaataatcaggtgtgcgggccgacctgagtagaactacgctcgacgatcccgagttctatgtcacgacaacaaaactcgata

SEQ ID NO: 229845 - DNA, 1721 bp, Cannabis indica
attaaatttttggtgggatgcatatgtttctgatgtttatcttatgaacagattacatactgttgtcaatgagtttaaatctccttttcaatgtctctttagcataaaaccagattattctttcttaaaaaaattcggtcgtgcatgttttccatttcttagaccttataaccaacacaagtttcaattcaagacatctaaatgtgtctttcttggttatagtcatttttataaaggctatagatgtttatactcctcaggaagaatctatattgcaagaagtgttaacttcaatgaaaaagaattttcatactgcaatatgtttcccaaaccacagactgctagatatcacagaaattttcttgcaccagcctttattattcctactgtaactccccctgaccactcttctcagtttcagtttggatcacttgatttccattctgattctccaatcaacaccatatttgaatcatcacccctgcaggagcctaatgacccacatgatgctcatttgacagcaactgaaaatcctggtgccactactactgcaactccttcatttgacaatgaagcacctgcaacccctacaccaaaaattcctacacgagaaattccttatcctccaccaccattacctcaaggccatcccatgcaaactagatcaaattttgatatctacaaaaaagtatttctggtaactgcttcaaaacaacagctttatgaggaactaaaaatatactagcaagctcttagtatgcctcattgggagaaagcaatggaccatgaaaacatggctttgataagaaagaaaacatacattctggttcctcgtactgttgatatgcatgttttgtccaacaaattgatttttagaaccaaatacacaaagatgggtcactagacaagttcaaagcaaggttggttgtgagaggctttaaacaaactccaggtctgggttacaataacacctttagtccagtaatcaaacctccactataagaataattttctctcttgcagtgacatatgattgggatatacaacaaatagatgtaaataatacatttttaaatggagagttggaaaaaaggtatacatgcagcaacctcaagggtatgaagacagcactaaacccgattttgtatgtcaattaacaaagtccctctatggtctcaaacaagcaccaagggcttggtttgacaccctaaaagacactttaataacctagggatttaaaatatctgtatcagactcttctctattttacaaaaattagcagggctcattgttgcttgtccttgtatatgttgatgatttcttaatcacaggtgctgattcacataccatctccaagttgatcacagatctgcacaacaagttttctctgaaatcccttggatatgtcagttacttcctcgggtttgaaggttacagaaatgcttcagggatttatctcattcagtccaagtatgcgcagatcttctcaacagaacaaactttgaagatgccaaagaatgcaacacaccgatgatcttggccaataaactctcccaagatgacagtcccaactttgacaaaccagaaatctatagaagcactataggagccttacaatatctcacattgacaagacccgatattgcttattcagttaacaaattaagtcaatatctcaagtttcctactctaaatcaatggaatgcatgtaaaagaatact

SEQ ID NO: 229846 - DNA, 1315 bp, Cannabis indica
aagggtacattgaatttggtgaccggaacaactggtggtgatgctccgtctatggctccggctccggctacaggctcagcttcttctccttctggttcaagtaacagcactggtaatggtaaaaatggaggtgtttcattgatcggtaacagtaataatttgggttttttcatggtttctcttctggttcttgttaatctccttgctttttagatttggtgaaaatgttattgtagaagctttttattatttttaatttttaaattgatgaatagagatttgtttcttcatcatgtggagaagatttgactatttgagtatggacgatttatagcttgagaataatatttttaaaaaagaattatgtaatttttttttcttttgtaatttttctcattttggtataaaattatgtgttactaaatataagcgtttttttttattgggagagaattgaattgagtggaagaaaaccatctgccattatctctagtgggcaaagctattataacctttttttgttatttttaattaatttacaaaaaaagaataatgaaaaaggaatacccttttcatttttggaaatatatgaattaaatgaagttcgaaaaagggtaatcaaaattaaaagctgaaggttttttgtttgtttcttgatggtatgtttggttgtcgagaaagtcgggattttggtaaatttataaagaagtgcacgtgattgaattgactatttagggattctatgtataataatatgtaattactagcaaaaaaaatgtataagatgaaagaaatgagggatttaggcaaataattggtactcataaatcataagtattatacttattatcgtgtataataatcatcatagcatactctatttagaaataaagttacaaattgggtttaaaaaaaaataaacaatttaaattatattttttgcacaataaattaattgtttttttaaaaaaatattgtaaatcttaaataccattatgaaacaaaattagattaaaaaaattctctacatacaaaaaaatagtctaagagtaaacaagtgagataaaactcaatcatggataaaactagttttactaaaaagtgatcatcactattaacaatactagaagaatacataaaagaaataccaatatggcaataaaagagtaatttgcagctaaatcttttcaactatgattttacttgcacttaattttttaatttcaaattttaatggtaaaactcatcaaactgttaaacacttaacaaatttaaggtgatatctatttatcttagttaactgctgacatggact

SEQ ID NO: 229847 - DNA, 2041 bp, Cannabis indica
ttattatagaatattaattattagtcatatgtaaaatattatttcgtagtggtgtctaataacagaacttgatacgtattaaattctctcaacttttatcctcatcaggtgttccttagtaaaattagatagaattttttgaatctaacaatctcaatatatagttcgagaataattttcaacagtctaaaaaatttagggtataacttggtatatatcaaaagacaaaaataccctttcataaataaagcattactatatggtaaaaattgtctaatactactataaggtgatattttataattagttattggtcttctataaactttattgaaataaaataagtaaaatttaatattaaattatacgaataacaatattaaatattgtaatagtgttaaacactaatttaccatttgtctaataaataatgagaaaccaataaaactatagatacagaaatgattctagaagtgttaaattaaggattaaaatagtagctattactaacaagttgttgagttgagaagtgagagacagaagccttgtatagatgggtttggaccaaattgtaattccaaaaagaatagaagaagaagaatatgagagtagtattgaatatttccttttcttcagtttgatttgaacaactaatatataataataaataatattggaaaataattagtggttgtcggtaggccactcactcaaacaagtctttatataaaacgacaaatatcaccacttcccatgtccggcgttcggcgcaacaatttcacacacacacaacacactattctcttctcttcttattactatattgttaaaagagaaatgctaatgtttatatttattggtccaaataagtatcgggtcttatataatttaatataataatttttatgaagtattgctagtcaatcgcgatgcgacatgtcgaaaaagtattaaacaccacttgtgcctaatacaatactcttgtgaaaaggtatgtactcaatcctcctacttttttcgatattatattgctaataaaatagttaaatatttatttctatattacttaaaataataatttttaaatatattagtaactaatcataaaacatatagaaattgttaaatattactggtatcaaatagtaatattttatattccgttatttatttttctttaagaatattattattggactggtacccaacatcttttgtatgtagtgtcttataattagatagtaataaattttaaaaattattttcttaaattttataagacttgatatataattataattatattaatagtagtacgaaacaaaaaaattgtaagcaactactgtaatatattttagaatttctcttatttaattaaaaaaataataagtcgagcaaaagcaatggtaaaggtaacgtacataccacaattattataatatagctaattagtataaattttttacatttcttaatataataaaaccccgaataaagtatgagtttttgtaaatacttaataataatgctttagacaataaattgagaattattttaaaataattttaaaattgagtaagcatgtccttaattaggacccaaaacttgtgaaaatatgttgttctcacgtgcgagtacagatgtaacttcacaccgaactcataaccattggattttgacacgtgttcgatcctgatcaaggcatcctcacaattttttattattttaacattaacaatactctactatatataattacaaatagctaatagaaagaaatgttaaaaggatatttactaattaacaatgtccaacattattcaataatcaaaatgaataaataaagaagaattagaggaagtaattaaagtgggtagaaaaataaaataaataaataaataaatgtttcctttaatgcctacacaatggggccttaatgtttccctattctcttcttctttaatttcacttttggctacccctccaccactttctgctcctttatatatcacaatattattctctatatatatatatatat

SEQ ID NO: 229848 - DNA, 904 bp, Cannabis indica
gtgcattatatttagagaaatgtaaaggttaataattgtgtcttgtacgtgttttattactaatttcacttattttatcttacttaaataagaaaaatgctaaaagatataatatcactaaataatcgtaagacgtcacttctaaataatattagatattactgatacttaataataatggtccctaaatataaataatgatcataaaaaactattaattatttttaaagtgttatcttataataatgtgagtatcgtagtgcctaagagtatcactaatggtagtattctttaagaatgttaaatttttttacatcatttaaaatacaatatttttttttattctctttcacataatttttggcacttcttgttttaaaatattctaatattaaaaaattatgaaaataatactatattattatataatatatattaaataattaaattattattttataataaaataataattaaaataaataaaaaaaaataagatataaaagatgtcataatatatattttctcactccaataataaatccattaacaatgacaaatagcaattatgatgaagcatctaatagcaaatagcaattatgtttgtgtagatatggtaaaattcctttaaaaagaaagagaatttaatagacatgttgaagccatcaataaaattagattgaattaatttagatgggaattttgattttatatacttaaaaattaaaaattttattattataccaaaacttaaactataaaaaattatacttttttttaaaacccctaaaaatactccctcacaattctctctctctgcatcatctctctctctctcacatcccaaccgcccaccctcacaccctcaccaccacctctgacctccgaccctcaccgccacctc

SEQ ID NO: 229849 - DNA, 616 bp, Cannabis indica
ctttcttttctattttcttcgaatctcatgggtgttttttttttgtctctcgatcagatttcccttcattaggcaaagggccgaggtcaacttcatcttcttccttggaccttcgaagaggaagcaactcattctcgtgaggcctaaggtgagtctttttctccttcattattcaaatctgtaaattatatcatgtttgatgattatttttacttttttttatttcaatttggaaagttttcttacagggaaatttgaaaattatgataatactaaaaagagggttagcgatagtcttgccagagatgtatgtgctgcggtcaacgatgtcaccctccacttccaaatcattcgtcttccaggcaggtccaacactacacgattctctctctctctctctttttttcccttactctggtagagagaaaagaaccgtaggccattttgatagttaaatctataaacaatgaattgggtatttcttttggtgtaattttattgttgttgttgttttcttttatatatataaatatggagtttaattttgttgttactttttagatatatgtatggattggtttaattttattgttgtttgcaccatgcagcttgaaca

SEQ ID NO: 229850 - DNA, 971 bp, Cannabis indica
aataaccctggcgtccacctttgtcttggttccgacggaaccacttgttctgtcctgaaccaccagatcccgggttagcctttcttttctgatcagtggtggaatcaccaccatccctaccacaaacatgagtaggaagagtggggctcccaccaacacttggggtcactcggggctcttaaagaaacttaaccgtaccttcggcttgtagagccttctcaaccatctccgcataagatgttgcctcatttgtagtaatcaccaggtcgtgtctaattttaacatttagacatgccaaatatttatccttcttcctgaagttcatatgcataatacccgaagcaaacttggccaggcaatcaaactttgtcgtgtattctgttactcacataacctcactctgcaccagctcagtaaattcttttctcttagcacttcggactgccttgttgtaatacttgtcattgaataaatctcaaaactcttcccaggtcataattgtgacatctcggttgaaggacacaaattcccacacacaagtgcatctttctagaattgaaaagtagcacaagtcaccccggtcatttccaacgacccccataaaatttagaattctttctatcactgtgagccactgctcagccttattacatccagacctcccagaaacactgtaggtgcttgattatgaaacctctcgtacagcggctccatacggttgccaacaacatgttgttctactggaaccgcaggaactaaagcgagctgagcttgtggtggaggcactgtaggaggacactgctacctgaatcttagaatttcttcatcttgttggcggatacgatcttgcattttcgtgaatctctgctcccaatctaaaggagcttgaggtggattttcgtgaatctcttgcttattcgtaagcaattgcaaatgaagaaacaggggaacaagtgggtgaaacctacggc

SEQ ID NO: 229851 - DNA, 1448 bp, Cannabis indica
aaatatcacttatgtccctcaaactttattatatgtcatttaagtactaattacaaccacttatttaactttcacatcagaaattagaatattttttttataatggtatttgttatagatataatatcatttttctaaatttttaaaaaaattgaataagttatcgtactaaaaacaaagttgttgatattttaatttaacataggtgtttaaaatacttcaaatttatttttcgctattcaaaaattttcaaaaatttacaaagatgatattataattataacgaacacaatgaaaaattaaaaaataatattctaacttgtgtttccgggtacagaaattgtaataagaaattatctatttttcatattaatcgtaatttaattatttatgttcataaattaaattagtatgtacattgattaaacaatgatcatttcatatttaactctgttacaatgcatttttaataaaatatcatatgcttcaaaaaaaaaaatatttaatttgaataatttccaaaacatccattttaatttttatttttatgaaatatagatattataaagtaaaaagaaaaattataattaaaacaaatgataaatcatcgactaaaagataaaactatatttcatttaaaaaaatagaacttatatctattttaaattataaactttgtatcactaatctaatataattataaataaatcaagtttacttatttaatatttcatttattttatttcaatccaaagagtaatacaattaagaactagtttacattctcatgtgtgttttaatatttcatttattttatttcaatccaaagagtaatacaattaagaactagtttacattctcatgtgtgtttttgtttttagtgtttactttagtaaactaaattgtattactctttggattttaataataattcttttctgaattcttaattttataggttactgttaataacttatataacattttcattaagaaaagtaacagtgtattttcgatgtggtattatcacaaatcctaattaaacaattggttttctaacaaatgacatttactatcatctataaatataactatataataaagcacacttactttatattttttttttatttcatctcaattaacaagaaacatattgtaactaatttagacctacttgctggagtatgcatggaaggattaactagaataagatacaatgaattagggggttcgcggtgcgggtggtgcggtttttgactattttttcaaaccaacccgcacatgcggtttttctaatttcccaaaccgcacccgcaccgcgaaactaaaaacccgcaaaaaccgcaccgcaaaaaatagtgcggtgcggtgtggtttttgtggtttatgcggtttggactatcactaattaattaaactatcacaaatataacaaactttgagca

SEQ ID NO: 229852 - DNA, 1418 bp, Cannabis indica
ttcatgtacgacccacctagtcaaatagtttgaagttccacgcttaaatgtatttttgttatgtgtgtttgtatgtgaaattgaagcaattttagccaactttagccctagttttgactttctatttagtaaattcacataaggggacatacaaaatctttttgctatctcctcacaaatcaatgaaatttattaatagcaccaaacagttaattttctttttctttatctttttaagaaaaaaaataacaattcttggttgagtcatgaagatacaatggacctattgaaggaagtaataaaatagagattgttcaatcaacattaataaaattgctattattttataaataaatattattataatgatcttcttcttcttctacatttttttaattaatttatgtagatattcgactttcattctaatttgtctgccacttccgtgaggatgatgccttaacactttagatttatttccaatttatattcattattaattttaattcttgaccaaaaaataaaaaagaaaaaaaatcattattcaagcaatcaagatgttggaataattttgttttctttatcacaagtcaaaagggaatcattaagggaaaagtcaaaaagttctcttcgaataaaggtaaataaaacatagaacttatcttccaatatcaaaagcaaataagaatatgtataattgtttatgcattatgtacatttaatttatttccttataagtgaattgttaaaaggtaccattaatattttttgtggtgttatatcgctattagtgtaattaagtaacatgtttaatataattttaaaaaataacttttaataaatatcgctaactaatcataaaatgtcacttataaaattgctgagtatactagtgtccaacgatgctctatatgtaatgtaactccaattaacccccacaccatctaagacgcatgcgcatgcttacctggctctagtggccacaactggctggccatggcactgtctatgtgccactatggtccttttagtacaatattccaaatcatcaaaagctgcaaaagaggtaatttttttaaaaaaaaaaacgaaaagaatccttatatttgatgaaaaattggaaacttgagaaaagtgagaaagtacccattattagggccccccttatttcaataagtatttgccaaattctgtgttgggtaatatttaggatcaaagcagatgatgtgtatttatggcacacaacgacttgttttaagacaatctaccttgagttttcaattagggataatttggtttcgaattaggctaacagtctgttaattatccaataataacacgtgttatttggctaatcatgagaattaatgttagagattaataagcaaccgaagaataagataagagcaatgatagag

SEQ ID NO: 229853 - DNA, 1250 bp, Cannabis indica
gtgagaaaaagattgagaatttgaaagaaaaaaaatagaaaaatagatagggagcgactgaagatgccagtatgtgtttaggtttaattattattgttttatttatattaagaagaaagtatggataagagattattttaattccgattaataattaataattaattaaattaatcaaatattataataaattctaattaaaaattgaaaaaaaaaagattatatacttcaaaatgattttattctgccacatgaccgcttcttgattctttgatcaatgatcacggttttagaattttcacaacaattcaaattaagccaaacaaacacataacgtgaaaattgccttccatcgtatgcatcaaacacaaatgtataataaaaatccttgaaaggttttatatatgtagaaagactttaagaatttttttttcttttgccctttatctctcccacaaatactttttaattgtttttttttaacatatattcgaatttgagtataaaaagatttaggtcactattatccattggcattttttttagcttgatcggttagtttgacattttttatttaaaattaggaagtgatctttaagggtagttccctacattgtaaaggtaatgaactactcctatcattaaaatgtgtaaataagtgtaaagttgttttgggaaacaaacaacatagctattaataaggagaggagaagaccagaaagtgtggaaaccactttgattgatttccagcttagttggtggaatggtgatgatgacgagagtaataggtgaggagagagtagtagaggtgagtcaaagaagaccgacgaagaaccccactagaaactaaacaagcacataatgaggcggatcatccattttggacaagagtaccaacaactctaaccccatttcagtcaaccagtacaataataaggatcgagacattcaacttgctatcatggcttctcgtctccattcttctaattctcgtctccattttcggtctttccttgaccgaaaatgggcactcatcaaattccaacaagaatgatcatttactgttcggaatgtataggcatgtaagttggttcaaagcttcaggatatataacattacgagaatcggttgccctgtttctggttgtaaaaatgggtcacttgatgattcttgggactgaaaagtttaagcactcttaacgtgatcaagattaacataatatcttcctaatatcttccttctctttctcg

SEQ ID NO: 229854 - DNA, 1754 bp, Cannabis indica
tatttagttgactacaaattcaaggaatcaccaaaaagaagaaagaacagttggcaatgcaattctgatatcaagttcatcaaatggaactttcagtttcatgattccaagggattaaatacttacatttttatcacaaagatggttaatagcttctgtaacagcaagagagaccacatattgtacaagaggcacaactcttccattcttcatctccaaggtgaaagagaacagaagaccacccttaggtgattcccacatattcttagacctccctgcaagaaaaaaagcatctttctttacttctttacccaatttttcattcatttcaattaaaacaaaaataagatcaatgaaccatttcaaacctctccctttgtactgaatatcagctacacaaactgaaccaatcggaatctcatcgaaatttctgtccacaccaaaacaggaaatgaattgaattgaataaacccaaaataaaaaagcaggacaaactcaccgagaaacgacgtcgtgtgttgaagctaaccgcggagaccaaaggagaaaccttccgaatctattggtggagagagaattcatgaacaagtcgatttcgaacgagtccttttccaagggtttatctaactccgattgcagaagaactgaaacggtgtcgttttcagggagcttcagagtgttgttgtgcttgagcgattgggcaaaatcattctccgccgttgattttcctcgaagaaccagcgtagatgggaaattggactccataactgagaaagaaacaaaattcaagaaattgaatatgagagaattagggaattaaggtgaagagtacctgtggcggccatggaaatggagaatgaggaggaggaagatgcagtagttgagagtagagagagaaaatggagaggggttcgaaggaggagagagcaagaggttctagcgaagaagagcatgagtttgaagatgatgaagaagaagagaactcgttttcggcggactcaacaactatcaactatcaacttttgaccaaaaacgacatcaaattctgaaaaacgacacatttcaaaatagttattattattaaggtaaataaccacataagtactacattttgaattcagtaataaaaaaaaaatagaagtaattgatattataagtttctgtctagacccaataatctagaattcgagtcttatatgtaggattgttcactgtatcacattcaatatttttagactcttccaggtccaattcaattgtacattagatgttagatttctctaaccgatccaattccatattgtaggctcaaccaaaccgatctaataaatcattagattggatcggttccatccaatggatgaatccctgtattgaatcggatccatccaatattttttagacagaatattagattcatccaatacttttaatccaagagtaatacttgatttttcacctaaactgctaatatattagttcaaaatattacaacacaacataaatccaacctaattgtaacataagtccaacataaattcaacctaaattataacataagtctaatataaatccatcataaattgtaacataagtctaacatcaagttataataatacatgttacgtaaacaagagtatacaaattatgaatattataaaatctatcatcagtgcaaacaccaaagtcacaatgtcattcaattctgaacaaatacttttttaaggtttgttaatactactctcactttatta

SEQ ID NO: 229855 - DNA, 1394 bp, Cannabis indica
tattgagaaaataccaattttttgggaataaaatattgataatgacaatctccatcaattgtagataatttagtttatctttgagttgtactacattcatttgaagtaaaatatttatatgttgtttataaactgtttgagaaaaaaaaaaaactataaactataataagtgtagcattcctctatcatttacctttaaaactaaaagttgtatccatcactctaagcacatacagagcaagttttaatatttgagaaataaaataggtaatttacgttttaaaaacataacaagagaaaataatacttaaattattgtttccactttatttaacatatacttaaaagaaaaaaaaatccaatacttgtgtttttgaaaataaacacacaacataacattttaaatccacccaataatagttatctatttaacttagaaaacaacccacacatttattgaaatacttagcaatcctatctcatttgtcaatgagtctttatgccttggaatttttagtcttcccttttgatccagagttagcccccacttcaattgttttccccatcgatagctcttgaacttcttgttttctctcctgcattaccactctctatgaaggcaatattagtactgtcactcttatttgaacctatcggtttctaattcagcaaagaaccttcttcattacttatagctctctgaatgtaagttgccccttgctcttgatctagtattccattaattaaacaagagttagaaaagaaaacctaaaacattatgaatttatttttacaatctaaatgagattaaaaaacaacaattaccagatattaagattttctgcctcttagtggttaatcccaacactgcactcctagctttctttagggcagcatccttagccatttgagtcactgatttatgtataggtcctccagtagtggaggagcgaaccggagaaaacatatgatctaaaccagttgttttgatcttatcatcgtactataagattggtcgagttcctgcctcagtctcctccaatagcgctacacacttagtatgaacatgatccaatagaccacaaaacttgcaaaaagtattcagcctctcatatttaaaagagatccacatattagatagttggtcctccccctcaaataacatttcccgtaataaaggacgatttatatcccacaatactctaattcgcataaaagtgcttgagttttcagcatcgtattcagcaaaaactcttattatcattccaatttttgaccccaaagtttcattaatattattgataggaataccatgaacttggatccagaaagaaatattcttaaaatccttcactacaacctgattaatcccagatgactcaacaagcgacaga

SEQ ID NO: 229856 - DNA, 2916 bp, Cannabis indica
aaaaaaaattactttcagaacttttttatttgaaatgaattttaattttataactttaaaaagaatattttaatatttgagaaatatatttttttttaccttaaaaagagcaatattaaataaataatcacttagtttttaatatatttaattaactaaaatgtaactaaacttactggtaaataaattatacttttataatttactgaaaaatatttttatttatatttcaaatttaaaagttactaaattgtattttcataaatttattctaaaaaaaaatttattagacttctaaataatttagaaagacccataaaaaattaattctagttatacagttatcgtttaaaatttctctcaatattttattattaagctatacctataatatcttcaaaaaaaaaaagttataccgtataatcatgatgaaaacataggagcataatcaactaagaacagaaagatatgactagataaagcttgtttaacgtttagtaggtcgtataatattatattatattaaattatatgtcataatattatacaataatatattaaattttaatttatattaaaatataagtttatatgtctaataaaaattaatattacatataattttataataaaaaataatttaatataatacaatgcgatataatacggatatcttcccatacgataaaatacgtcacatgcgacacattcgaatacctataagggtaagtgtcactcgtttgaacatacaacttctaagtcgccgaacatggttagggactcgtaaacctttaatgatagctcaattatataagtagtcaaatttttttaaagaaatacattaatagtaaaatatttttaacgcaagcacccaatttgagtacttaatttaccttacatttcccatttagttaattagatttttttcttctactaaataatactaaataaataagtgggcgtcgttgccaccacttcacaatgatattttatatatctcaaaatattacttctctttctctttcattttaagtggtttcgggacaacttatgacaagcaacttaaatgacgcccctattattgttgcccttgttggattcttgttctactttcatgttcaagtacttcatccactacaaccacttttaataaatcaaccttcttcccttttcctttctgccataattctctttgtggatttatagatatatgaaatttttcatctccaaaaccaattggttacgagaggagaagttcatgaatcttatatatatttttttatatataagatagtagaaaatataatatcaatgaattactcctctgataaccaattagttttaagatagaactctatgcaccttatcaaactctaatatggtatcagagcaaaattgaattctgacgagccaaatcccaaaaccggtccaaaagaagtcaaaagagtcgcttgtgattcaaggatggtgagccaaaaacaactgttgtcagccaaaaaagtcaattgttattgatccgtgcaagattagtgagccaaaaataatcaccattttagttttgagataaaactttatacactcacattcatatcctaaattctaacacataaaaacaaaacaattatagcaaaagaatcaatttttaacttttgtaccattttttacaatcacaacatcaaactactacttttacaaattaaaaacgcatttccacaacagacattcaaaaatacctggaggaaaatgttgctttgatgccactaagaccctccaatatggcagcttgttcaattggttcctacactaatattcagcaattaaataaaatctacaaaaataaattcacaagcgaactcgccatcaaatttttaatttattattaattacaaaatattctttaatcctaacaaagtgtcaagctcacaccccaattcatatatctaccatcgcaattaaaatgaaacttgattgcattaagtctcacctcaatgcaaaaaaccaatccaatcacctaaatagtttcttccattcacatcccataaaataagaaatttcctttaagattcattcaaacagtattaagaagttgaaccttaaatattatatttagtgtaatttaatatatatatatataaaagaatgttgaaccttcaatttaaatgcaagaataatcaatctaaagtacatttgtagtaagtaaaaataattatttaaattttttaaaaaaaattacaagtgctcctaattaattacaacgcataaaaccagtaaaaataattaaactataaaattctcctaaatacctaaacgggtaagaaacaaattatttgaggatattatagattttcccattaatgtttaggtcaaataatatttaagtgttttgatataacctacatttgtatcgatatctaagatatatgcagtagttattttagattatttgtaaaatttcataaaattccaattattgtaaccaaaaataaaatttaaatattttattacatgtattattgtatttctactcactacatgaacttaaagctaaagcattataagttattcattacctttttttttaaagctaagcattataagttattcattaacttttttttttaaaaaaaaaaatacttaatggttctaaatagaatattaacagtaataatatctaagttatatttttaaaactttataagtacctgacagttaaatgtcaagtcattatccacgtgtcattttcatattagtatatttaaatttaatttttttttaaaaaaaataaaaattcataaattggaccaatcaaagattgacacataataatttacttaacatttaacaatccgatacttacaaaattttaaaaatataaatcaagtattattgtcgctaaaaaattaatttaaatattta

SEQ ID NO: 229857 - DNA, 938 bp, Cannabis indica
tatatattatatatatgcactttattggatagaggttgaaattcctttgttttataggaaattttcacttatcaaaagtttgattatattgtgttgtctaaatattattctagacatttcagctcaaataaatttgagacagaatagaacgacataaaattaatttatattgaaattatgcaaatgttatttcaattttccactatatatatatagaagatgatataatattagagtggtgtgtatgacataagtcgtggtggttgaagtttctttttattaaaccttacctacaagaaacaaaaaaaataggaaagtatagaagacaaagtagcaagaaatgttgacaacttatgatagcttatctatatccaactaagcactactgaaactttgttattacaagaactgtttgacgactcattaaaaaaaaagtactaatcgtacgttttaaaaactattccaactaattagatctattttattttccacgctaaaaatacaaaataaatttatagtacaaccccaaaatagttattctggttctgttttggtattttagaaaaatattttagtcattttttttaaaaagaaaataactatatacatgtgattatttatgattatttatgaattttcaatgagtagtttataatggagaatataagatttaaaatattttattgcacctctaactattttttcttatatgcttaaattaacaagataatgtggatgatattcttcacattctttacggtgcggtcgctatttgaatttttcataaaccacacggtggggtacgatttgcggttttgaattgttaatatacggtttaaaccgtaccgcaccacacattattaaataccaatttttatatttatttagatccaatatgtgaaagtccagcccaaagcctactaattattgtattgttg

SEQ ID NO: 229858 - DNA, 1211 bp, Cannabis indica
aaagcatttttcttatagctaatagacaacatatttccaaaactagtaacctagatatgccttttcaacactacaattacgagagacataaagcattgcaacttacaaaacattagcagaaacatggacatattttactttaatgtaaattccaagaaatagaaataaatgattctgcaagcaagccatacgtatctcatgttcaagcaagccatacgtatctcccagtaataactagcttaatccaacttattaacaatgagatagtgaattgtaggaacacaatctaaaaaaaaaaaactcatgttcaaggactccacattcatcatattgctgtttaatgggatactttataactactcatacaagtaatgatgtattgagagagagccttaatatgggagtttttcttgttcatgattgcagtatattggaaacaaatgattcaagagcctttacggaacgattttgaagctggcgacaataggaaaatggacttaagtgaatgttcaaaagattgttaaatgttgagaagaagattaataacattggagtttgacagttatgaaagtgtcataagattctcgagtatttgaacaaatttggggttggttgtgagttgtaggaaattggtatgtgttctgattctagttgaaaaaaagggtaaaaggagcataacccagataaaaatatacagtaatatgagccacacataaagtgaaatcatctagacatctgatgaggaatttcttcgaacaggtggcgtgcaaatgaagccatgaacacaacattagccaaacaagtacgacacttgcaattcagcggaacacttaaagacgcatgaagagcaagggtagaaacaaatcataccttggcgtgttctttcaatttcaagcttgagaaaaattcagagagtccgaggttgggttgcgaacaaaaggcgaggagagacaacagcttgcttaggctgtcttactctgacttttttgaaatcaactgaactgactagagcatctctccaccctagtgtagtgtgtgtgtgctggacttaagtggtcatctaacaatggctagtggctaggccccctttaatcatcggagtttttacactacatactcaaattaattttttttattgtagagcaaaaattttttttaaaaaaatattgtgtaaaatttaacactgtgtactgtattaaatttttactatt

SEQ ID NO: 229859 - DNA, 1098 bp, Cannabis indica
tctctattctctgtagcactcaattacctagactctcatagagtttttggtccttttgtatttgaaaaatcccactaagtacataatttttttccaaagaatcttctaattgcacattttctactttattattaatttcattagattaaaataacactaaagatccagttatagggtggttgaagggtgcgaatagccaatgttatgaattgataaatttaatttatagtaaggtgcattaaaggcaccaattaatggtgcttaattaacaccacctgtgtatcatatgactattagtataatttagaatatggtgtcataaatttagattaataaattagcatgaaatagcactaacaatttgcaagataccacctgaaagtagtgtcaaatagcaatgctcatctattagttatagaatttgaaaaatttaaacatgctggctttatagctcaatatagtttcctatagttgccctaaccagaacgttattagcaaccttttttttaaggaacgttataaactttattacttaactaaccttaattaagcttactttttcaaactttaattaatatagtacataagtgacgaaactctcaagttatcgtacactaataatatattatttatagaacaaagtattatttggtgttttcacaaacaaataattaagctcttcaagccctatcatcactctctaccacatggagttccaacaaataggaccctctttccaagtccttctcttttcagtttttatgtttattttggtgagcatactcttgaagagaggtcaaacaagaaataacccagcttcaaaactacccccaggtccatggagactaccctttctgggaaacttgcaccaacttttgggtcctttgcctcatcaaacattcagagacttggccaaaaaacatggacctataatgtacctcgaagtcggacaagttccaaccgtagtagtttcatcacgagagtatgctaaagaggtcttgaaagtccatgataatgctcttgcatcaagaccagatactcttgctacacgaatcttgtcatatgatggcactgaccttacatttgctccacatggtc

SEQ ID NO: 229860 - DNA, 1369 bp, Cannabis indica
aacttatatatattataaggattgcaaacaatagccacataattatgtgagataacatgcatactaattgcacttatagatacacgacataaatatttaagtttaattttagattgtcaataaatacttaagttaaatttttggcgataataatacctaaataataattcttgaacttctataggtaacttgctgttaaatgttaagtaaattgccatgtgacaatctttgattgtttcgagtcattaaatttttatttttataaaagaaatagtttaaatgtaccaataaaaaaatgacacgtggataatgacttgatatttaacggttaggtacctacggaagttctagaaatacaatttaagtattattactactaaaatttaaatttaagtatttatttataattaagaattaaacttaattatttatagtgtaaattactctaaatgacagcttgttatatgtcacgtgctattagactcttaaattaaaatatctaatattgctttaatattggtattatgatacaatttggtatatattgacttttaacttaaaaactaaaatatttgctacccaatgctaatttgcatcactaattaacaacgacggagctaaagaagggtagtgggatgaggccacggccagcctaaaactttttattctacgtttttgcctaatgtatttttgcaaaaaatattaatatatttaagaatatttgcggcatacttatgtaattgattttaggagtctttttatttttacatatcaaaatagttttttttttttatgaaaatttacatattacccggcccacagagtaacttaaattgcaatcaaaattcacataacaatccacacaaaaattaccatagcaactattgaagcaacccaaatggtaaattaaaaaaagttaaaaattagtatattggataattaaccttcatgttattgcatttaaatttttttttggaaaaatttcctatatacaaatgtttttcacttaaatccttatattattcttttagcggtgaaaaatgaaaatccctatgtacaacacattttgctacaatgtttattgtccttttagtgctatcatctcaaaaactaatgtaatatcaaatgtgtaactgttggaattttttgctaccatgaagcaaaagaatttttgtctcaccaaaaaattaacaaaaaaattaaagtgcaacaaaataaattatatataaagaattttgttcaccaaaaatttaatacaaggacaaaactactgtataattatttatatattatatatatatatatataatatatggagtttattaaattcaaacacatcaaaatgaaactactctctttaatgaaattg

SEQ ID NO: 229861 - DNA, 1968 bp, Cannabis indica
acataacataagaaactcttacctataagaattttgcatcacgtgtacagccatactcatctacttcattatgtctatagttataacaagtactatagtactcgtagtactcttctgccttttcctttcacaaactgataaaaattcttgctcgtaaaccggatctatgctattatatatccaattttcttcacaaaaatatcatttaatttaatgctttcgattatagatcgaatcacacggctcaaattgttgcataattggagacactcatacccttctcccattctattctctctccacatatatataattatttattaataaaacaagtagtaaaaataaactctttcttttataatactagatttgatttggactgtgctaactactaaatactaatagttgaatctttaacataggacaaaaaaagataaagatctaacttaagttctaacttgttctttatcaactgtcatcatcatcattccctaggacattgttagtgggaagcatctcttctcttgcttttaaagccaaattaaaaccttaaaatttagtgaaattataatctctataaagctagctagggagagagaaagatgaagctagctatataagattctaagcaaaatatttgtttttgttttattatattatatggtcacctgcattgcatagtcctcctactcctactctgtccataattgacagtcatgtcttctctcacttcctaaatgaagtaaaacgtgcttatttttgagtatatatataaaaaaaaaaaagttctgtgagatatttcatttcatcaccgtcttgtcattttagttaggcccatattaaattttgtgcgtgcagtgaatagaaaaataaagtagtcctctcctaacatctttaaaaataaatttaaataaaaaaaaaaaccgtagtatggcagggaggctagatgccaaaatgaattttcctcttgctccccacgtgtgccaaaatccaacaagttgccacgtgggagaccgagtcgacttgacttagctacgccaatgatatattattactaatattatacggcggcggctaaataaactcggcttgcctgccacgtggcaagatcttctgcgatactctaattcgtacaccaccgtagtatttttattgtttaaatctgaatctgatattggcaaactatcaatcgacacgaatattatctaaaaaataaattaataattaattaagaaatatccaccgtcttcttcatttcgacttgcgttttccatgatataattgaaactgtaccgttttgagtgtccctcgtaagaagagagaattgccacgtatgcagtgacaagcaaagaaagcttttattttgttatcttgggtcaaaaagttgactaaagcaaactgttaatgacagaagcggttgcttgtcgagtaatactcgtatattgactgtatagtatgaatcgctgagaccagaaaagactggagaaaaaagaaggagaagaagatttttttaattaggcctgaaaaaattaaagatctctgactgtccttttgaatttttaaccgttggattatgtactgtttgttagtccctgagatcaatggtgagtgtccttttgaatttttaaccgttggattatgtagtgtctcttattccgtgagatcaatggtggaaagatgttcagatatgtgattagtgagagtaagtattgatcagtagtattccacatcagtactgttcttatttttttggtgtgtgtgtagtgtgtttaagagcctctttgcttttccatgagactatagctacgcatacgtgtacgcaaccaccacgtcagtggtatgtatcatataagtattaaatagaatttttaaaggatatatttggtgggaaggaagataaattgaataaatttagaatttatgtgaaattcaaaagataaattggaacgagtttattgattaataatt

SEQ ID NO: 229862 - DNA, 2249 bp, Cannabis indica
acattgatgatctagaatgtcttccagactccttcaagagccttacttctctcaagttcttgggatttagccgttgtcctaaattgaaggatttgtgtcctggttttctacatctctcatcgcttcgaagtttgtgcatttcaggatgcgaggggttaggggacatgctgattagtgatgattatgactttatgtggcaatccctaaatggaacactccaatcattagcactatgggagttgccaaatatagtgacggttcttcctatgggtatccaacatcttacaagtctacagtatcttacagttcatgattgtgataatctcacaacaattccagagaggatccacaatctcaaatcacttagagtcttgggttatccaactgccccaatctgacatcattccctgaaggaattcgaagcctcaccactttgaacgaactcaagattcttaactgtcccatgttattgaagagatgcaaaaggaatacaggtgaagattgggataagatttctcatataaaagacttgttcttacgtccagatcccaacgaagaagaagaaaatgaggtagaaacgtcaatgtctaatgtttgcttttattttcaaataaaattaaatgaacgcttatgatgtttatcttgatattgtagaatacaaagggatgcaaccttttgaacaagtttaggctacgcaatacaagaaatcaaggatagataaaatatatcatatgtgtaggtaattattttcactatgcatgcaattaattccttctgatatgatttgtattacgaataaattcaaaaagaataaaacagagtaaaattgacgggataagtaaatatatgttttcctcttctgtttaattcaaaattactggactgttgttggtaatataaaggattggctgaatgtattcaatctacaaatttgtccttgaagaacaaatgaggagaagaatataagttgatatttcttttgattgaaaagttttgagtgctttcatgaggatgagttccttttggttttgaattgttttgttatccttttgtgtgttaattaatgttttaatggttgtgatatttcagcaatcttttatttaatataatctgtaatccctattgtatgtttctttgtttacttgattgattctaaattatttatttcaaatttccatgaaaatcattgggatggaaacttacctgtgtcaatgctacttcacttcgttgtatggataatgtgaatttcaaatttacttctacacttgaatttcatgctgtcacttatatgtattatttgattcaagtgtagatgttataattaattaattttcatactaaatcttgtttttttattgtctgagactgatatacttttggtttgcaattacaagtaaagtgatcttgctggagaattaattatgatgaagcaagaaatgttgctctcttatgctgttcttcaaaccagtttgctcttatggtatgtaaatgtttacttctgaattttatcacttttatgatatctgataattaattgtttgtgactatatttttgttcttattcttattgttttttaatgtacaattaacagcttacaaaatggatgaacacactgaagcaaaagcaatcataggctgtagctgtggtgaagatgattgggtgagctgtgaaaagcttgaatgtgggaaagatttgtgaatcatttcctgataatatggcttcttgcaatcacagtgaagaatcagagatgcatatgttaaaaagagtgcccctttgtccaccccaacgatttggtggcagttttgctagctataaatcaatttgctttggaaacagggattttgacttggcctgtgtttcgagaaaagtgtttgaagatgtgttggagttcactagaattcgggataaaccaggtggccacagatgctcttgatggctcctccgctctttagatggaagcgctggcaattcgtgaagcttgttccgaagctgccagagaaggttgggaccaactctgtattgactcggactgcacaagtcttaatgtcccttggattgtatgtttctttgttctccattctcttgaataaagtttacaagctgtatttacttcttaactttttacatgcagtcagtgggtagagaagaatgtatgtggagagttccactgggcttgtaaatatggaggtacatggctacaaggaaatcattacgaggttaatgtgaagttcaattttttttttttttg

SEQ ID NO: 229863 - DNA, 1997 bp, Cannabis indica
aaataacccaatttaatacctccctcaagataaagtgtataaactatgaacattcatggatacaacagttttgaattgattgggaaagagaggtttggttaataggtctacaatattattctttgtagagacttgaagaatttgaggcacccttgttggatctatcttctcccaaaaaatgtgataatcagtgttaatgtgctttgtccgctaaaaaataaaaaaaaaaaaaaacaaaaaaaaaaactgaagttttgaagatgtgtatagttgttgtattgtcacagtaaataatgggtggactagtgtgattgataccaaaatcttttaataatgctagaagctatgctatctcatatgtggcaataaccattgctctgtactgggcttcaacagaagatttggagactgtgggcttcttggacttccaagggatgacaaattgacaaaaaagaagcaatatcgatatccactgattgacctgtgagtatcaatgcaaaaaccccaatttgacaataaaaaaaaaaaaattaagatgtacttctacatctttgaaattagaatcaggaaaggcactcaattaagatagtttgagaatttgaataaaaaaagagagcttgacctgaagtgcctatattgtaatataagatgcacaacatgaagatggaaagttttaggatcatataagtattgattgagagtatttacattatattcagacgaataatagataagtaaatgagcttaccaataagtcgtctatacatagttggatgagggagaggattaccaacatctttaccaagtttgatatggggttctatgggtgtgaaaggcactttggttcccaaaaaacctgtatcatttaacaattgtaatgtcaatgatcgttgagaaatagaaatgcctacagatgcgtgacctattttcaagcccaagaaaaacgtaaggcaagatatttcaattgaaatgtagagtttattgttggaatttataccctaaaagtaagtaattaatggataatatattatagaatacatgaaatacaattatataagatattatatttatatattaattataaaagtataatatataaatatctgaaaatttcttattcatatggagaaggtataatcttgtaaggtcgtacaagagaattaagattatacaatatgaataaaactagtcggtagtgtattcaagtaaaagaatctttaatacagaactactaagtacaatttactatacactatactttagtatgtgattttgattcagatcatcacatatgtggataaacatgtagcaaatgtgttgtgtattatttaactatacatgacggcaccgatatgtaataacatctttcatcaatatgtcgtttattatgaaagaattattcatatcacaatgatgatcattagtagatatgtctgaatcatgggtatacataaactcctatttgtgttcattgagttctttgattcactcgttaaagtttctcaaagaagatgactcttacaatttctgttttgggatcttaatgacttgagttggtgaaaacatgttatacaataatagaattcaaactttccgaaaggatcgaatattagttcccatatagtgttaattttaggagtgctaacagttggatccaaatatattattagattatagattaactgttcactttgcattaatgatacataaggagtcaagagataattagaagagtaaaatggtaatttagaccaactctaattatgaactaataattggagggagaacaacttatattgattatatcaatagactactagtaagaattctataaatttaattctatattgtcaaagagtgtaattttatatttatagtggagtaataatagaattaataaacaagattattctattaatcaaatcaataataatcaagtatttttggagcttcaaaatataggtacatagtctctaagtcacctttatacaacattg

SEQ ID NO: 229864 - DNA, 1099 bp, Cannabis indica
attacatatagaaaaataaatagcaacacagtatcaaagtttcattgtatgatttatttacaaaataggattatataaaaatacagtattcacttttttttgtactactttatactgctctctacacatatatatatattaacttttttcttctattgtgccaaaaataataaaaataatgctgtgtcatggtattaaaacatgtttctaaataattaaagattattcatcacaaaaaaaaaatagagatcatatatagaaaaatcaaaatagtgattacctttcttaaaaaaaaaatcgtgattaccttataaaaaaaaattctttgagcagtaacaaatagagattaaaagagaggttagagattttccaattaagattgaaagaagaagatggtcaccataaaaaaatacgaggtgtacttttaaagaagacctaattttgtaataaaaatgggttgcttttataaataataacaattttaaaaataaaaaggagtgaacttagctatggggtgtacttatatatttttttgggtgtgtaaatataattccccatattaaaatagtgatgagttagcgatacttcataaaaattattatattgaactatacgagactcaattacaccaatagcgatattgatacgtaggaggatgctagacaccaataatatcctttagcatttgtcaaaagaaaaatagcattttcataaaattgaaagcaaggccgacactcagagtaattgaaccttagaaaaataagtattaattagacttgtgtaggtattttttaagattatcaacaaataaaattgtgtattttttataagataattttacttttagattgggtggactttaggcgcaggcctgtcctaccttaactcataatcgaccagacctatgtttaggaccgactctataatatgataaaaataataaatttgatttaattcaaaataaactaaccttggacaaccactgcaagctgtaagaagagtgaacaatatgcatggaattgtctggaaaaagccttccatagaaactccctggcatagctgtgatgaagcatggtccaaacttgtcacctttttcttt

SEQ ID NO: 229865 - DNA, 1193 bp, Cannabis indica
aattttgataattttttttaatagtttacaatgctaaaaataaaattatcataacatgggagttaatttattatggatagcaaattattgaagaactatgaaataagttaatgatatataaataaagattattttttttgtaagtaataagtatttggttacaatatggataaatagaactaacatctatagtcaataaaaaagaaaaattctattcattgtaataaattataatttttgtaaattaaaacaaaattataattgtaacaaataattaattttaaactttgacatatagttttagtgtacatataaagtggctagcaacatgaatattcacacgactatcttttatcttattgtatggaattttaaatttttatagcttttaaagtataatattgtaaaaatataattttttttttaaaaaaattattttatagaatttatttttaaaaaataacgtaaagtatctgattattctcttatggtaactagtgacagtatttaaaatttttattttgtgaggatttatttattattaaaaaatatttatacttatattataatcattattactagatttttttaattttgtgggggcttttctactattttagtctataattatcaaattaaaaaatattgtatttaattttttaaaagacaatatttttattagtatagtgggtccatggcggatggtaaatggttatctttttgtttactattcttataaaataattattttgaaaataaaatttatatttttgccaaaaaaaaataaatataaaaactaataaaatttataatttcatctattacataatgtacaatctctaaaagttacaacacaattatcgatcaaatgaaagggacattatttttttaaaaataagttttttttttttcttttttaattaagttacacatgaaacttttaaccatacacatagtaaatgataatatatattttaaggaaaaatgctaaaaggcaccagtagtgttagtacgtgttaatgtggtggctggttgacaaagccaggagtcaatgtggtggtttcatcgggattgggatctcgtcggggtggttctgggtcttggggtgggggttggtgggtggtggggggtttggttttatgggcagcaaagaagaagaagaagaatgaacagaattaaaaagaaaataaaaa

SEQ ID NO: 229866 - DNA, 1750 bp, Cannabis indica
aaaaatatatataataaataaaaattgtaatatcatgtgaaaaaacacttaataatcataccaaattaatagtagtagtaattatataaacgatctttttcagccatgaataaaagtactagtcgttatctcagatggaaaaaactcaaactgagaacctaaagagctaggaccccattcatagcacctataagaataagttttcgcttctaatttgcacggtccagagggaatgatataccacaagcaaggctccggagtgcatctagggccatccggcgtgtaaatatcaaaccggtggaactgatccttccattgaaatccacaaaagaagagtgttgtaccccaaaaattacgactaaacttgaaggtaaaagtgctattgtaagtcaaaagttgaacaccgagatcatcatctttcgatttgcaatgaacactaagttgttcttttccatccaatatgtttcgtatcacaactacttcgattcccatttcgggttgacgaggtggacgaggaatgtcggtaactccacatgcacaagaaaacaatgtgaccataacacatattgttatcaccgacgatagattcagaattgaactcatattttgtagaaatataatatttttattttttttgtgtgtgttttatgtttaagtaatcatctctttttatagggttttgagtacataactaatagattgaaagcattttgcttttttggggagtaattaattagtattaataaattcatataatattaatttattgaggaaaataaggaaatgatatgccgttatatacaaaacaatgatatgtataatatgtttttcttgtttaggaatattatagtataacataattattatgtgattaaattagagattgtcctattgattggattaaatggactcattcgtgtgagattatcctaaaagcggtttaaatctgattctctctccgtagttatggctatcaatagcatgaaggtgttcgcaaataagatgggtgtgttgttagagatttattgtctaaattttttaagacaattttgtcttatgtgtcctgcaaattaagataacactgtggcccatagtttggttaaacatgtctagacaataagttatgctggtttgaagagtcaccgacaccgattgaaaaactcctctcggaaatttttttttttttgaataatctcaaaaatgtcttaatgagatctgatcacgcttttttttttttaaaaaaaaaaaagttactatatgtaattaattaatttttgaaactatgcatattctacaacgtacgttttccttgtgaaaaggattcaaaattattagtactttctatatttatattttacaatattctttgtaaatagtaaatatattatattacctttttaaaaataaataaataaataaatagatatattatatttgtaattaattaatcttatatttccggtgggtaataaagattagtaattaatataatgctttttactttcttttattttatttttataattattttatattgggggagtttacaccttaataaataatttgtttttctagaggtataaacctaattagtcaacgttaatattatatatctttatattttcaaaaaaatatataaatataggtactgtttggtaacatttttattttttaatttttgtaatcacaaaatgaagtaaaatttttatttttgtaaaaaataaaaatagcgttctgtaactacttttgc

SEQ ID NO: 229867 - DNA, 1571 bp, Cannabis indica
tatattattaaaatttattagagtatctcacgttactattgtatggaaaaattataaaatatataagaactactctttttattgccaattagttttaagatagaaccaattcaccttattttaaaatctaacaaagctcgttcaagtacaccatgcaagcctgatcattgcaataaagccataaattaagtaattgtcatttttaatttattatattcgttacttttttattattcacatttcttagtctaaagctcaaagtaggtaactaatatgtaatttaaaaaacgaacgtagaagaaagtgttataaaaaagggtacaaatcaaataaatataaaaagaggaaaagtgtaacagtacacaaaaaagaggtagatttctaattctgctcattggtttggtactttaggtaagcccgtataaaaaaaatgttaggcacgtgcggtgacaatgaggcgtgtgaagatcggaatcttctggaccgtattggatagtaatttactcgtatcgtatgaactttcttgcgcggtaactttgatcgtcgttttcttcgtttccaagatctttcgttagcgcaagaaaaggtacaaaggaattctcaattttgggcgtttagggttccaatcagcttcatccttccaaaatgtcctctcctggccaggaaagaaatctgtaactccttatctctttattcttagttctaagccaagcatatagaagacatcattttttttttttggcaatgtttcttttattatttctgttagtttcgaagagcaccaaatcgcgttaatttttggtttaatgtttttgaattcagaaggaattgaattatatgctagttgagtaacccaaatttgtcacgaaattttcttaattataagaatgatttgcttgaatttcggtaatggaaataagtttgtacttgtttttatagttatatatgagcacggttaagtgtgatgtaattttgcacaacttgttaaacccaaatcattttttaaaaacatgcatacagtcataaatttcaggaatatgatttgtgttattgactagtgacttcttttctttatgatattactattgctatatcagctccattgtttcaacaaatcttcattttcattggaagatattgctcttttatttctttgtttatttttctttatcgagagggggaaggagtatggactccggttaggcaagattcagttttggtgaatagattgttgttaaggtcatttctgtttgtatactagcctgcttgagtttttcatttagaatttaatcgaattttcaatagacttcagagtgaagacaaatttagttcaaaacatggcatgggactgagactttcacgtggttaataaatggaatgcctacggtttctactgtcatttgatcttttttctcataacttttgcaatgttattaagacaatattttctgtaatttttagcctgatgtgaccaaagtggaattatttggttttgttttccattagttttagattgcaatgtgtatctatctgctttcttttttgattgaattcatgctctgttgtctttc

SEQ ID NO: 229868 - DNA, 3139 bp, Cannabis indica
gttagtgttggttttaccgtttaaaattgtaagaaaatcaaccttaataggagatatgctaagaactttacattttagaactttcaaggtgatctttagagattcatcttttggtatttgagatagagaccctgaaagattcaatcaatcaaaactggttgtttattatcaatcaaatgatgtctatacagacttaaacaacaaaaattttcacctatcatgaaacagctgaacattttttcaagagcagaagacaattcttgataagtataataattataattgcaaaatctacaattctgaaaaaaccttgtaacacaccgaaacatgaatccataattcattatcccatgaaccaacaatgttcaagaaagtagcatagtcaacactctcacgaagacgttgatcaacactctgaagcccttgtcataggcaaatttgacaataagagactgctaaaactattttaaagaataaagtaaatcaagaagttgaaactttttctcttcgttttttaaagtgtggaccttctgagtttcatatagggtccaccagaagtcaacccaaatagtaagttgtaccttcttcttgtattgggatttaagtaaagaattgagaacaacctatcattcttaagaactgcaacagggccacttccactgctatcacttcccacagataaaccccacaaggaaaaaaattctcacaccttggtaaaacgcatagaagctaattttgttaatcaaatctcatatagttacataccagagacgccccaaatgtgtcatatgatgccactattgcaatagttgtaggaagttgattaacatgtattttcaatctgggcaaccatccctgtcaccatcattcacgaatcacaataagaactcaatttacaaacacaattttgcatactcgggtaattgaaaaaaaaaaaaaaacaaaaatcagacaaggttctacttgcattaaactattacaactgaagaaagttgttcatatagttggatggcaacacaatctgaaacaccaataattttctaataacagcatcaatcacctttgttgtcgagtagtagagagagacattggcctccattgtcatatttccatatgatttcaaaaatctaaacaaactagctaacaagtttaaaataaactttggtgtatttgcaataatgaattaatgaaatggttcaacccacgattagccctctggagaaagaatcaatctacaatagccttacggagaagatcaaacagagaattccaggctatataccaaaccattttataaaattaacatatcttcttgatacaaaaccattatatatgtatacagatgaaatatgatatatgatcctcaacaataccaatatattgaaacaaaacatcattatctttacccagtcaaaataaataaaatcaaacaaatccattgaaacatagacaaaaacaaatttgaaccaactaataataataccatagcttggaaacccagagcctctaatcatcttaaccgaagagaaacttgctctccaaaatcgaaagatctcgtagatgagcttctcaatgtcaaacgcatttctaatagattcgtaaccctttcccccaaattctctaagtaaaaatcttccaatccaaaatcaaattttgaaccactaaaaataaactcagataagacccagacaaggattgaattagaaacctttctagaatctccaatccaaaatttaatagtaaccagcaaattataagaagcttttgatcaacaaagggagcacaatatctgatgaaaaaaaaatatatatatataaaaaagtaacagtaccttgaatattatgcccattaattgcagccgaattttctcagtgttcgtctgtatcgacaatgctatacggacgcattaactctaatgcgcctacaaaagacttgatcattgtagtgaattaatagtgatataccaacaaacaacaatataactttttcattgactcactcaaaattaattgaactcatcaggatcacaccttcgcctaatatctccttctttactccactccccttcttgactccaactatgctaagctacaccattggtagaacaaatcaaccaatagccttattcaagaaaaagaaaaaaaatgctatttatcaaatttaaaaatctctgatagtaaaaataaataaataaattaattaattaaaaaaattggcaattaaatatacttcggtacactcttcctatattttctccgtagtacacaactacataattagctattataattattttattaataaaaaattctttattagctggttactaattaattttcctctttccttgcaaggcgcgcattccttttatttcctcttcccttatatttcccttttctattccgaccgtttaattagtccaaccaaaccctaaacgaaaaaatatgaccgttgtactcagattatgatcttttcactgcagcagcttagcagtcgaagggtttttatgatcattttcgtgggaaataaataaataatatatacgttgatattgtgcgattacatatatataaccttcactctcatcatcattcaaaaaaaacaacaattactaaatttctctgtacctcgactgagtgtttttgaaggttgagttttcttgggaaatcatgaagaagaagataaatatggggaatgagagaaggatgatcgaagctcttgctttggtgtgttccttgcacgttgagatattgtctggcaatgatcgtcatcattcgcttgacgatttgcttaaagaaaaactgagaaatattgatataatgaaagaattagaggaagacaccccgaaacgacgccgtaccgcttctacttccgggcagtactactctcactcaacatcatctgaagaaacaaaaaggagcaaggacttcatgatcttcaaaagcggcatcccgaaacgacgccgtactgcttctactcactcaacatcatcgtcatcatcatcatcatctgaagaaacaaaaaggagcaacgacatcatgatcttagaaagcgccatcccgaaacgacgccgtacgagtgatgatcatcatgatgatgtagtactacgagtagtgcctgaagaaacgaaggtgacaag

SEQ ID NO: 229869 - DNA, 1632 bp, Cannabis indica
aaaataacattgtttaataaaaataatttttataaaatagaaacaacataaaatcgaaatgcaaacaactaacataaaaataaaagaaaatataaaaaagtaaaactaaacaaaataaaaaaatattgcatatccacaacaattctcctaaaatatatgagaggcgcacaaaattatagtattttctctatatttattttactaaatttaacaatcacataacattttttttagaaaaaaaaaatattaatcacatcacaattatttttccgtacatttattgattgagatcttaataatggtggtgatatggaatgggatcctttacattaattaaagtgcattattagaagagaaaagatatatggagtctgtaatgcctagaaatggacactataatttgatttgtatgatcactaaatataataaagtaataatagtataggaatactgcaactcttttcaaatttaagattatttttttttctattttaattgcacatgcttggtttcagaaacatgttttctttctttcccccctttttatttcatataaatatatcataaatatattatactttctactcttataatcttatttaatcaacatttgatgcgatctacttttgatgatttctcacgtttgtggtaggtcaacccacatgtttttttcttctttcttttttttcatttttaatttactttttgaatgaaaactacatatatagttcattattgagacgaaaactaaggaaaaatataaggatatggagagtgtaggatataaagggatggaaggatagccaaaattacttctttggcttaagagaattagaggaaaagaagagatgagtttttcttccaaatctcaaagaacaagccaaaaaattataaaaaaattctaccatggaatgccttaaaaacggtccactgatgtatctctatctattttgatatttgagagaatttttaagtctaagtttttttttttttctattgtctatgttgtagttattaagaacattcgttaaaattttaaaaaattataaaatttaacacgccgaaaataagattaaaaagcatataaataaaagtcttgtgtgtaacaaatagtttgagttctattttacggcatgttaaatttttttgaatcccccaaattttagtgcaaaacatgtcacgttgaatctcaattctagtaattttcaagtcgatgcctaactacatcattacactaaaaagggcagtgatcattagaaaaccacttgagagcatatgtttaagtcttaatttcttataaatattcaccaaggccaaaagaaaggcaagtttacacttcaaacttcacatgaataaagaaagtaacagaacaattctttgtccaattcctaactcaaaagttagttcatttatttattttagtgagtaaagtgaagtggtatacaatgtaaatgtattggcaattattgaatttagcctaatattatttttatctcttttcaagcccaacccaaatgttctctctatttgttagtttaatttaggagtttttacaaaaatattgaattgtgggtagaaatttacaattttactaaaacagaacaattaaaacaacagtgggacaattaaaaa

SEQ ID NO: 229870 - DNA, 1243 bp, Cannabis indica
ctatcaagcttgatcgtactaattttttttcttggatatctcaggttcttcctactgtaattggacgtgatcttgatggaatcttgctcacggggatacctcctcccaccactttaattataggagcgacaaatcctacttacagtaatagaaacgttaagatcaactattactattatggatatgatcctccatgaacgaaggagttcttacttcattcgccaccttcacttcgtcatactctgtttggcgagccttggaacagaggttctcctatcaatcaaaggccaagctaattcttcaactcaacagtcatgttctccacacttaggaaaggtggacaatcaatctttgactatgtcaacaagatgcaattgatcacagactcattggttgtagctagatctcccatccttgatcaagatgctatacttcagttgttaaatggtcttggaccagagtttaactctgttgtattaggcataactgcgcgccgtgataatctcacctttgaggaggttcaggcacttccattgtctcatgagagttgcctcgaacaccataactcagtcacagatctcaacatgaagcttcaagctaatgtggctttctcgggatcaagaatcgattcttatagaccaccacagggctccaagattggagtttgaggtggattttgtggagtgaatcagaacaatgaacctcaatgccaattatgcattcaatttagtcacattgcccctgtgtgccattatcaatttgacaagaaatggatccctcccaaactaggcacaaacagtcaaacatgcaacaccacgaacccttcccctcgagctttcatcaaagaacatgaattcgactatgatccacaagcctttgccacttctttcacccttgcccttcgagatgactttggattgtttgtgagtaccggtaccacaaatcacatcaccttaggtactaaaaacgtgaaaacatccataacataaactggttcagaaggtcttgcaatagaagacggtaagaaattactcatctctcatgttagttctagtacattgccttctgttaattctttacctcttaaattgaactcgatgcttcatgtcccttcaattaccaaaaacttagttagtgtatctcaattatctcgtgacaatgatgtgtttcttgaatttcataaaatatgttgctttgtcaaggataagctagctaggaaggtgctgctcaagggaacacttaa

SEQ ID NO: 229871 - DNA, 1355 bp, Cannabis indica
cttattctcttctaccacatcaagagatacaaacttacttagccaaatgattagtattctttcttctaatactgaacttgtataatactcccatcttataaaagattcattatttcttctactttgctacccctcactttagtttccaaaattactccaattcccactatatttttataaaaaatttctttaactttctcctgcttcatccttttattgaatcccctaatgttcaaactcagtatattgcatttatccatgctgtaatacaatgaatttattccattgtttagccatccatttatgaattcttccactatttctcttttggatctgccactgtccttctttgtcttttgcatttctcatctgttctttgcttccttcctccattgttgttgaataagtctccaactctgtattaaaatctgtcacaacaattgttagcttctgaacaccctcagaattagatgtagcagtagtaaaaacctagtgtgagaaagaatcaaccccagcaagatcagtaattataacagcctcagggtcaactactgttgctttttctttttctagagtgcgatctttaacttcacttgaagcatcagcaacaagactactggtgcttcttcttgagtgctagccatatccataaatgaagctacagcaacagtaccattgctggtttttggttgtccttttcgaccagctctacaaatatccatcctatatccatagcctccaaaatcggagcactttgttgggagccattcatattgaatgggcacagtgtcgagcattccccgttcaatttcaaagtctatgaccgatgaaaaattatcttgtatgtctatatccacaaggactttagcaaattttacttaagtcctttccattgttatgctatccacacttattggagttccaattgtgcttgctaaagcactaagacaattgttctctcaatattaaagacatagaccatagaactttacccacactggcacaaactttactagcttaactgaatccaaattaggcatccaaggtttcatgataacaagcttattgtcaaaataaatcaccccaacctctagtacataatcacaagttgcctcatcattgaatttaactagagtaaccccattgttcattttaacaattcattccacacctagatcaccccaaacccttcttacaaagccctcaaaaaccttaattgggggattagcacccaaaacaaaacacagtaatgacgtactccaatattcagactcaatctcaattttatcaagatcaagtttagcaattacctttccccctttcgtcaatggctatgtatagtgaagtctggctcc

SEQ ID NO: 229872 - DNA, 1145 bp, Cannabis indica
caatttattcaaaatataataaagaagaaaaacacgacaaaccatgttcaaaacatatttagtaaatatatgaaaattgtatattagaaaaatgtattctaacataaattttatgttataatttttctgcatatatgatttattttttatctttaagaaataattagaaaaaattaatttaattttactcatacttttaatcatcaatttatttttagtttaataattttctaaaaatatatatataaaaaaaaagtaatgttttaaataacacccgcaacactaattatgaggtaatagtacaaatacataaattatagtttgagagacaaaaacgctgatacttgtgttagatatataaaacatgtagattacacaacgagaattctctatcccacctctaatgaggcatacacaaggatagaatgatagtaaggactcgaataattattagaagagtgttaattattatttcttaatcaatttttatgtctgaaattacatactaaaatatatttttaattttttttcatagtagtatctgttatagttacaatattattcttgtaaattttttaaaaattttaaatagtttacactaccgaaaataaagttcttgatattttagtttaccatacttgtttaaaaaatttcaaacttttggcacggtaaactatttgaaaaattttaaaaatttatagggatgatgttaacactataatgaacactgtcatgaaagaaattaaataaaaaatatttcgacatatatcttcgaacattgaggttgactaataaataataaaaaattaacagtagcactcctttaataattaataaggatgagaacagaagaacactccccgcttattacagacccgttttacatccttacatccaacatgaaagttctttttctagggacttttacaaaatttcaacaaacgacattaatgatgaaatatcatttgaatgaaacgcagtgtcgtttttctaaacaacacttcgtatcaatcttgtcttctttttccattaaaagaaaaaaaaaatgaaaaaacagacaaacacaattttcttaccatttctgaaattagagaaagctttagagaaccctaacaacactctctcctctctttctctcaattttc

SEQ ID NO: 229873 - DNA, 687 bp, Cannabis indica
aaaatattaattaatatctatgcgcattagagcagaatactataatttgattcaaacgcatcacagaattatgtttttgttacaattttcacttctcccattttactttattttttttatccaaacatgaattcatttgagaacattttcatagaaatatgtttacaaatctaatcagtcaagtttaaacctgattttattttggcattttgttagaaaagattagcttaatacatataatttttgtataatcaggaaaacaagaagataaagaaagaagcaaacaagtataggctataatgtgtgatcctgtttcatcgatttgtggggcggtcgtgggtgaattaatcaaagatcaaatctaccggtgcgtgagacatgtgaatcgactttgtcactgtgcaactcacagaaggaatgtaaagcaattgaatgaacaactagaaacattgcacaaatacagaaatgaattgtcaaaggatgttgagtcgaagaaacaaaaacaagaacaaattcataaagaggttatcgattggctccacgaaacacagaataatatctttgaaaagcgtgaagaggcagagcatgcaagccaaaacttttgttatttcacattccatccaaaagcaactattgatgaggacacatttctacatatcaaaaataaaatagatggtttaatcgaac

SEQ ID NO: 229874 - DNA, 1471 bp, Cannabis indica
ctggaccagcgtgaaacagcagtctcatgtttctcaatgtcaaaaaatgatattgaactctgtttgagttcagcaaaatctagcagcttccacttgcaaaataaaattaaaaaacatagatcagtttgtacaacatagatccatacaacttgtcataacatctctaaatttattttagcaaaagatcagtttgcagtcttatttatacaattcagatggtccaattggtaatatttgcaaaacagggccaactaaattttctatttccatattacccaaaacaggtcttctccgcttccattactaatgatttgaagcttttctcagcaccgaattggaaaaatttaatcccatatatcacaccacatgtaaagaacacatatgattcccgaatgtatagaaaacacaccatataactacttcaagaatacagatgattatgtcagtgccatagacttccaatatgttaataattcttatggtataagtatcaagtatattgccccttctcccttaattgtataagctctagaaacagcaatatcaagttaatagctttgattaatcaacaatgtgacaattccatagctatttaagtcaaatcaacgtaacaaataagagaatattagttaaaggaagtgaatagaatttttgagctttttgagttacttgaaaaggttgtttcttagaatgaaaaggttgttagtaaagttagtgacaacaaatccgagaggcaagaaacaaagcatgacaacaaaagattcagaagattgttcaagaatatacaagtgaagctagctgaaacctgaaactgaagtgaagtacacatgcttaagatcaaatattataaatttggtggaacaacaacattggacattggctagcgctgtccatctagcaatgaaggtagaaactctatataacaatcaaaatgaagttgaaacttgaaaacacctcaaagcaagaaagaaccattagtcaagaacagcaacaaaacctcttacagtcaagatcagcagaggttgatgggaaataatgtcatcaaggacagcaatattacatttcaatatattgcatctcaatttgttaagagacaaaaataatttctttaagagcaggaaaagggacttaaatcctctaacttcttgtgccaaagaatccctaaaagtatcagatagagctaatgagcagctataatttaatgaaaataaagtcacttgtaagatcgagaagctcgaattctagtagttcatcaatctatgctagctcctaaagtataggaaagtgattggagaagaaacaatatctttaaatcaagtacagtacatcagtcatgggaaactttgcaacattatcattgataaaaggcagctaagagaatttgttttccaaataaatggtgacacatccaaattcccacattttagcttggttcatgaaacaacaacaagaagaagaaaggtgagaaata

SEQ ID NO: 229875 - DNA, 1985 bp, Cannabis indica
gatttgggttcgggtttggttctggatctagaatccgagtatgtaagcaaaaatataaaagataacatattagacaaaaaaaattgtttttaaaaactgttttcaattttaataaacagataacagtttctaagttatgaagtcaaatagcctctaaaactcttagtcgtgaaacttcggcgttgtagacatgctatcatcactttggccccctaaccatcaaagcctggctccgtccctgtgacaaattatgagacaaaaactttgaaacatataatcgtgattataatctattgtgttgacaacactataatcatgaataactatatgttctagattcaatagaatttatacattaaacttataatcatgatagaaatcatgtgaactatgcaacataaaaagatttctgattttttattaatcagtaaatctgattatattaaaatgagttttatttaggacataaaatccaacaaactcccacttgcactaagatttaatttcagcaccaacatatttgatgtcatgcttttgaattctagaagggccgaatgaagagattaaaagtttgatagcctgtgttggtggggttcagtggatacaggacagagtatccattggagagcttggcataaattgctacaacctaaaagtgatggtggattaggtttttgaaggttcaatcaatataatcaagccttactggcaaaataagcatggagaattttaactaaactgtcatctttattggctcaagtgcgtaaagtaagatactttagagactcttctattttggaggtaagtaagggttattatccatcaacgacatggagagggactgtatgggaagagacttgttactgaaaggattaaggcattgtgtattggtaatggtgtttctacgagggtatttaatgatccttggttacaatgactgacatcttttcttccttgtataaaatcctcctttattgtgatcacagtttcagaactttattgaccctctaggaggttgggcgtttgtaaggtgaataatacttttaattcaccgaatgccgaactcatcttatcgatcctattaagtccttttgagcacgaggataactggtgttaacataacacggaacggtaattattcaataaaaagtggttataatttggcaatgaccagagatgagggattaccttcttcttctagtgaggtgttctcaatatggtggaggaaattctgcaaaaaattcttcattttgcatgacgaggtttctatgagattttaccttcgaatggtggcttgttttggcgtaaggttgttcctcataataactgtcctatttgtggttatagaggtgattcaaattcacatgcaatattttggtgtccctaagctcaaggaatttggacgttattagattgccctttccttcatgaggcgaaggaagatttatcttttaagaaagtaatgatctatgcatatgagattgtggagaaaaatttatttgaaagactaattattatttcataagcaatatggatggagagaaataatatgactcacggagaacatcaaaaacatcctgaggaaataattagttggatctcaagaatctgtgactctattaatttagcggatgaaccaataaattaaaatcacaataacatgcctattctagtaggacgttacagatcatctttattaaatggattaagatcaccactatatggattaaggtacgcttctgctattcatattttttttttctttgaatcaaccaaggtattctttagatctatatttatatatttatactaatatgaccaatatattttattttacttttcatcaataaagttttgggtcattgtaataaaaaaaaaagcaaatttcccttttgtaattacacaatgaaactattagtcataaactgcagtaagtattagcatcaagcggggatagctcagttgggagagcgtcagactgaaga

SEQ ID NO: 229876 - DNA, 819 bp, Cannabis indica
ttcttgattcgcttaggggaacaactctctaagaacattgtcctacaaaaaattaggtgttaagatgcatcgcggggaggtgcagcatgcctcatggttttcctaaaggacgtgtccgcacaacatttcaagtttttcatcctatgtgcagtagtcttgtgagatgaactgagaatcacaagaccaatatttttagaaggctgcctgggggttgaaataagcccgtaaaggatccctcaaaagaccctcaccgaagggtagaagaatgaaggaaaaccaatctcgaagctaggatggcccctcccaggtgagcttttgtgagaaggcagttacgctggactggtgatgggaacatggggcataaacttctccaaggtctccactctcaccttaaggaccaaatatgaatatcatagttggtctaagtgcattaaggtatcaataaatataagatgaccacccaattcaatggagactatgttagctcgagttctctcaagtagttccttttgctcacataataactctaagtgagttatcagagcctcccttaatctatggtagatcatgaagtgatcctcaacccaatcatctgagtcaaatgacaaaatatccattgggacaagtcaattaggaattgagctactagcctcaaaagacatgggaaagaagcatagtagtaacactaaaagcctacaggtaacaagtagagtgggagtcaaggaagtttcagaattaagtatacgaataggtagagttacataaatcctacttttctcacatccacttgctacccaagagaatgaggcctaaaggaaa

SEQ ID NO: 229877 - DNA, 914 bp, Cannabis indica
aatttgcttggccattttccttggcattgcaaaggctaagcattaggcgctttgcattttaagtagcttgtgtctatcctagttgcagagataagattgagaaatattagtatcagttttgagttataacttgtgatcatgtctttatttatatttcttttattattttagtgtttctaattatactcacattccatatccttacatggtagatttctatgggactatgtgacaacctactgacttgcattgtgcgggcatgggactacaagaaaggactttttgttgcaccagccatggacaccttgatgtggacgaattctttcatggaaaaacatttaaccgatgttgacgaccttggaatagttcttattcctcctgacacagagaggtcagtatgtggtgaacgtggaaagggagcaatggccgagccttctgatatcgacaccgctattagagtctttttggagccaccgagttctgattcgggtagcagtaatgggatggaagaacaatcgtgagctttttcattggaaggaactaacaccagagtttaaatttgtgcatacagcattcatttcataattgcttttgagggctaaagcctttgatatattggatttgggtgtatatgggttctgatgattaggctaattatacgtctagaagtagtttaggattacctgttttgactgtgtacatatgcaacattcagaattgtttggtgcatacatggggacttgctttaggtatgttgacaaggctaactgtacgtctagttgtagttttaggattacaatttttgtgaccttattctttcaataattcaatataaattgcttctttcaagtttttgttttaccttttacctgatcatgttcaagtataatggtttttcaaaacatatatttgta

SEQ ID NO: 229878 - DNA, 1351 bp, Cannabis indica
gatacaaatacataaatatattaagttttaacattgtgtgattaatcttgatgaagcaactttaatgcattgtatttgacaatatcatagtagaaaattttattagcgtgaagttgaataacttgtagttacactaaaactttttttattattttttatttatttttttttttttgaatatgatattatttttcattattaataaaggtactaagtgattattgtacttggttgaattttcttaaaaaaatacaaatatattttgtaaaaaaaaatatcaccatctaatttttcctttatttatatgttataggtataatttctacttttataaatttgatttgtcatggccaaaaaaatcaataattaaaaaaactatgcggtattggtaatgttatggttaaatatattttgataaccaaacacatacaataagtccacttctaaactctgttcattttcgagtttatagtactttaagagtagatgattttagctaaacaaaatttgtgtcattatttcaaactaaagaaggtaagtaagaaagttgacctaacatccacaaaatttcaaattcaaagtagctttctatgcctttctttcccaacaaaacatactccaacccatgagatcttcctctatataaaaccctaaacaatcctcaaacaccataaactcaacatcccaatcaatcattacacacaattcacaaccattgtgcttgaaaaatcttgagttttgatttgcataatggccttaaacaattgtttcaccttagttttattcattgcttttgcctttatgagcattgataatgggcttgcagctcgtaatcttctccaatcaacagccccaaatttaccaaagcccaatatcccttccataccatctctcccgcagcccaatttgccaactttaccaaatgggctaactatgcctccgcttccaagcttgcccattgggcccactatcccaaaactcggcttcccacctatgccaagtataacctcgcttccaaacatgcccaatatcccattcacaatgccaaacattccattcctttcttctccaccaccatcctaaattcaaaattttctagtccttgaagatgatgaacatgtttttataaagtctaaatgttgtctctaccttgtagttagtagagaccatattatttttatttatactttttgttaatttagatatgtttgtgttattatttaattacaagaaaatgttgggttttttctcttgtactcttgtctactctgaggaggtgtgtttttattattagtcttgtattgtcatatacatatacatataacaatgaaatttgaaattatttggagtg

SEQ ID NO: 229879 - DNA, 1272 bp, Cannabis indica
atattcaacctatcttaatgtttgaatatttttcgaaaaatatctagcactatatatagaatttatggataacatttaaatcatagaaatttaaattaattttctaataataaattttctaaataaatataaattaatataattattgtatgataattaattaaatacaaattcctaaatatgtaattaatgatagattttttaaaatttattaatttagacaataaattatataaatttggtaatatataattaaatgcaaagttatgatatgcctaaataaatcatgtaataaattaccaaatcaaaatttttttctacatttaatttatactaaatgacatataaataccaaatatatgtattaaataaaaataaataaatataatttcttgattaaattaataaaaattaggaaaaaattaatattccaaataaataattttttttttgaaacattcggtcccctcaaacgacatgttgttttttgttatagacaaaaaatgacacgtcgttttacataaacaaaggctgcctataacgatgaaaaataacacgtcgtttcagacctccatcaacctctagccgggtcaaaatttgaccctattttccctgtgggttcgatagacccgacccaaaaccctaccgaaaaaaataatttcgatgaccaaattacatgttttcaaatccaaaatattcttaatccaatagtaaaggggtccatatagattctatgcaataaaaacacgtaaaatgtgaactttaatatcacaaaaattaatcaggtccgaaaagagttttacaaagaatttttcacatttccaagtttttcaaaaaaggtttttcatgcttagatcaatctccaatgaaatataaacatagtgatgtatataggattcgaaataaacaccaaaaaactaaaaattctacaataaacctcggtaaattaatatatttttatatatatactcgtatacaatgtatatattgcataaaattatatatccaacgtataatatatatatataaaatatatatatatgtatatacaactatataaatgtgtatacacgtatatatataaataaatataatattatgaatatgcatatatatatgtatatatgaatgtagattgaatataaatgtatatatacaattagaattatataaaaagaatatatataaaaaatatatataatttatatcataacgaaaactctgcatacgtatatatatatatatatgaaataaaagaaactcaaagataaa

SEQ ID NO: 229880 - DNA, 1447 bp, Cannabis indica
cattactttttggcacaccattaaagagtaaactttttgcaaattgagctataatttagttttttatcacttatttgtatctctattgaatatgctcatataaccaaaacaattttcattaattattacttagttcttgtgtgacacacagctaagtaaaaatgcacaaatgactgaaactcaatctcaaaatgataaatatcaatggaagatcaaaaaagtcttaggggagaatgatgtggcgctacaccgaatgttcaagttcacaagaatagaagcagaatatattttttgtaacattagcaatgacaaagttaataaagctaaggaaggaggagatgtgaagatcaagatggtggacttagacactctaactcatcatgaattgtccttgaggaaagttaagtctggcaatgtttttgggtttaagcttggttggttgagtcattttgtggttaggagaaagctcagagttggtgatgagattgggatatatgtggatcctaatacttttgtgttttacttttctgtgttatctgtctagagcgtaatgtggaacaaattagatctagtttggtaaactatattgtattgtactggatagtattgtgttgaattgtatttgttatccttgttttcgaaaaaggaacgcatgtacttttaagatccaagatcaattaataaagacccaattcacagtcatcaaggttttggtaaggcatctcgtccagatgataagaagagtccagcgaagcaatcatccaaacttatttaagcaatgcttccaaatagaaaattaatcggcctctaaatgtcaaggttgattctgtgatcatttaatactgaatcctaccacattaggagtttatttctaaagttaactccaaaaatcaagcattccataaaagaaaaatatggtgattgtcaagaaatcattatataacatttattacacgcaaaaatgacacacatttttcacctaccgtcaagcaaataatcattgctttacgagctgtgcctcataaaattggctcaatatcaatatattacttgtatttaacccattaatggaaaccctagcctataaatataacaaaatccattcatgcaaagagttagtaattcattttcttacaagctaatactaaaaatggggttcataaatagtgcaagaatactagtctaatactaaaaatggggttcataaataatgcttttccagtcaaataatattaactcatagtctagagtttgttaatacttgaaccacgtaaaaatcatcgtttcaatctctatattttatttattttctttaagttttataatattttatatcaatttttgaaaaactcagtaaatagtattgtattagtattatttaatacaagattatatttgatattaacttatattaataagttgtttaaaattatactatctttatcat

SEQ ID NO: 229881 - DNA, 1061 bp, Cannabis indica
taacaagaaatcacatgatgatacataccgttacatgtcaagctacacattgattattggcatatactagtaaccatgaatatgaactttggtttctttattgtagtattatagtttaaatataagtgaagagaaaaaaatgtgaaatatgctactttttgaaactgaaattaattatagtgtatatagatatatagtagacacaacacatgacacaaaagtggtcctaactagatcaatgagacataagacccaaaggttcacatgggcacaaattgttagaatccattcatttatttttaacacaaaatggcaaaactactgataaaaaagccaagaaaaacttccaaggcatggaggacccaatttttcagtatgtatgaacaagcatgcaagacccactaacctttaattatatgtatatatatgttttgcacttgccacttgggacttctcgcagtttcttctttttgggaatattctacttatctctacacacactcttactttacattggagtagttataatgagtaggcagccccccaatatatatagattattaattgttgtagctcaattggggtcccctacctacaaacaaaaacttgttcagaatgtgtatcatatcaacttgagctaaggtctttaaaaattttaacttctataaggagcttatatatgtattattttaataataataaaaaaaacttatgacacttatatattattgatttgatattgaaaataattacactcatagctaattcatttatgtcaatagtgtactattctagttagtcaaacaaatattatacataattatataaacgcacatgatttttatgtatgcatgcttagaaaggttttcagatttgagctaggtagttagagttggttcaagtgatcaatgaatcaataattaaatgtcctctggctagttatgatgcactaactatattagtgttgatttgttatagtaatgtatatatatatgttgggattaaactcatcacatgtcaagtcagtaggttcacctatatgctcatcagatgaatctgaa

SEQ ID NO: 229882 - DNA, 2391 bp, Cannabis indica
caatccatttaagccctcttcaactgtgtagtcccatacctacacagtctcagaatcatcccacttgaccttccccaggcggtgtgggattgcacagcttacccggtatttccccttacggatcacgggactactgactgtcacaatggacaattacaaaatttgtaaaattgaatgaaattaaataaaaaattttaaatccaacaatctcaatagttcagtaaaaattctaattagcattaaagaaactttttttttctttaaaatgtttatttatttattttttttaattttagaacaacacatgttatccatttttgatcagtgattgtatttaatttcttttaatggatgaatcctctaattatgagcaagtgccaaggtggaacaaaaattgaagtggggcctacataattttttgtagatacttcaaatttttatttgaaaaatgtattgaattagatataataaaatgtaaattaatacataatcatcttaaaaataactttttttaataacatataagtgaagtgacttttatgcaatgatattttcattgttcaaatttcaataataatactttagttttttttcaaaaattaaaataaaattgtggagagtagaacttatcaccttcttaaattgttaaaaaaaaatctttaccactacaccaaataactttatttgactagaaaagtatttgcataaaggcctcccaaaaaaatcatttaaatttgaaactcaaatagcttataacctgtcttaatttcatgtggggtgaccgtcccacttagtccacaatgccgaccttaggcataggcgggctaggctcgcgcctagggcccactcattttaagggcctaaataaaaaaaatactttttcaatatatacatattgttttaataatttttaaaaatattatttatttttatagtaagggtttaatttttttttttttgttgctggcctatttcaactcagggccgaccctagtccacatgtggctttgcccatgattacgaggacaaaatatattaaagactaacttttaaaagttagattttagtgagaaaagagaaagataagaaaaatgtataagaaaaaaataattatgtttgggttatgaaaaaaattgtattgaaaaaaaaaaataattcaacaaaaattttcatgctaaacaagaaattttgatttatttcttattctccacattttgtttcctacaattttattttctcatcaaaattcaagttataaatatagcctaaaagaaagacaagctcggagggaaccaacataaagttcaattcaaaataacaagtggctcccagaatgcaacgggaacttctcggtcaaatcggcatacaaggtgatcaagaatgtagatgtcattgccgactgtgacaacaagtggaggatctttggggttcaaaaatccatgagagactcaaaatgctatggtggaaaattgtggccaattgcctccttactaaggataggctgaactccttattctctatcgcggatccaaagtgtaccttatgtcatggtgaagttaaatcctcactccatttgttctggtattgcaattttgcgagggcagtgtggttcgactgttggtggtagataagaacgaattcagttaatattgactgctgggaaaggtggttagattggttttctatagattctaatcgtcttgatgggcttcaactgcatctttttcttggcggggctgccataatctttgaaagcatatggcgagaaagaaacaacttgtctcatgggggaacgcctacccctcttcacaccatcctctaacacatcaatacaagatttcttgaaatcacggaggatgcgcgaacacaacaagttggcatcattgaatggctcccccccctccctccgaatgggtgatgtgtaatacggatgtatctattgggaaataccaggctacaggggctacgattttcagaaatgaagctgggagtttcatcaattgctttacctttcggttggctgtgagtgagccccttatcggagagatcatggtgctatgtaagggagccgatgaagcgttaaagcaaggttacaagaagatgatttttcagagtgattcctctaacgcgatctctgctctgaatactaaattgcaggaaattggaactcttcatcataacattcaggatcaggtggcgaatttcatcacttcaatggctcattttactctgtggaaagtctcctggatcccgaggagttgcaatggtgtggcccattcggtggctaaatgggcaaatcaaaacaacctcttggatggattgatttgtctaatgagaatggcgccttaccctctgtgccatcagagataggctgacccaaattctctcttt

SEQ ID NO: 229883 - DNA, 1095 bp, Cannabis indica
aaaatgaaaaaaaaaaataatttttttttctttctttcttctctctcttctccgtctcttcaatcttctccttctcgacttcccactcgcccaacttctgaccagcccagggctctctccggccaccgacaacccaaacggaggccacttcttgcttctttgattcccaaatgtcccagccccaagcctcaccctgtcgatcacctcagtcggcgtccatgggattcacccgtcgatcgacccagattggccccgttcacccatggcatacttatcgagcttccttccatgacctttcttttcaaacagctccaatctggtaaactcgtttgcaattctcctataatccttggaaatctctgacaccacgaaatctttgacataataactggtgaaaaactgatcaagatgcttccacgcagtgccaggatggtatgcaataaaagcgtcagtaacatctctgccagcgaaacttagtagaggcgcatccccaccagggtgatccttaacccattctgatacataataaaccataccctaaatagagatccacagatcccttgccttgttgtgatccttcagttcctcagtggtaatgtacttcttctcgacttccattctgagtaaagaaaaagaaaaaacacagtaatcctagatagatattcagaatatcgtgtattaaacacgtctttaatagttgaatgtggagatgtctcgacagaaacgtgattgtattgatccaatggcaagctggaaccatccttttttccgaggtctacttgatatgtgttacgtcgattgcggatatatggaaatcttctgacttaccagggttatgagtctcgcttccgttagttggatgaaactataagaagtttactcatagcgagatggtcatctcacattcttgtactccgagccggtccgactttgacacttaatttgcttattgtaagctaaggtatgtattattcttctctactgcctcgctattctcctttagcgatatatggtttcttgttaatacactaagtaccagttcgtatattgattcctcgcctaagaccttacagtcagcgtgttgcaaatatactc

SEQ ID NO: 229884 - DNA, 1041 bp, Cannabis indica
acaattctgtacgaagataatgctgcatgtcagctcagataaaatgaggtttcatcaaaggtgatagatttaagcacatttcaccaaagttctgttccatgcatgagcttcagaaaaaaaaagaggatatagatgttcatcagatacattttgtgataatttgacatacttgtttcacaaaggcccttcctacaacaataatttaagaagttaatatataaaattggaatgcgtcaactcaaaaatttcaccaattgagataaacgttgcaaagagaaggagataagaaaataattaatgtactctttctttgccataattttattcctacaaggtttttttgatggtaaaattttagtgaggcttatttttaatatataacatttaaggaggagtgttatgaaagaataatgatagtagacgtgtttatttatgcatcacctactttattactctatttattttatgtaactctagttactcttaagatcatagtaattttttttatataattcttgtaattttagattatttaatcttatacttaatagatagtctttgtcctataaataagagactatcatcttgtaaagatatgcattcataagtaatgaaattcttcttttatatttggtccggccctgggcacagatggtataggcctatgtctagggcccacttgcacttggttcacgggctaagaaaaattatcttcttttaaaaatatacattttccttttctaattttgaaaatactaattttttttataaaaaggccaaaaatatatatatgtatatatatgtttttctttgaccctttattcccatattcttttagtatatttgtagttatactaataatattatttaacaaataataataataataataataataataataataataataataataataataagaaggaggaggttctaatggttactatttttattgtaaccatcataattatattttttttagttattggatcattattaaatggttgtgattaatttggaaattaaataaaaata

SEQ ID NO: 229885 - DNA, 1414 bp, Cannabis indica
attagtagagagtagtattcatgacatgttggcttatggctttttaatactaaaccatgcaacgaccatgaagtcaaatagtattgaaacaaaaaatatgctatttatgaaaatcgtaccctgacaaaacaatcatgaaaatgcatcctcaagagagctgcagcaagagttggaaatcgagagatgtacttagatgttgtcttcttgatgacattttctgctgttgggcaagtatgctggtagaagccaattttcaagccttgtgcagtggccctttcaaagatagaggcaacaagcagaagttgaagaaagacaagtaaggatagcttggcagtctccattgtttgttatagcaaatatgtaatgttatgctttgtttattcacaaatatggtaaggaacataatgccttgttttatagctatgcttatgccttatgactaattcatctacaaaattatcttatttgaatatccattacagattgttttagctcaaattaatagttctatagtatgctaacatgctggcagttgttggcattggcataacagttgacatctctttttcttttgttttttatttttgaaccaacagttgacatattagattgacacattttaaaattgcattacactaatattttggctttttatgaatttctactttcttcaaagccctgattttcctctttttctttcttattttcaattattttaacatgttaattagtctctgttttgttctattaaattttaattgtcaacatattattggaaggaaacacacacaaaatcatgaaactaataatttcgcatatgcttgttaaataaaataaaaaaaactcgaatgcttgctcaaaataataataataataataattttgaatatgacaagtggatataaaaatgaaaaattataacagcgaaatgtagtaggatttatggaaaacaatggcccaaataagtgtggctcacacgatgatagtattaatattataagggccaatatgtaaaatggccctaaatttaacaattaagttaataaatatttctttttataaaaaattaacaaaatgtctattctgttaaaagttcgatgatgaaattataattataactttgaataattaagtgcttggtatagttattttgaacaatagtatatcgattttatgtgcaacagtatattaaaaaaaactgaaaggtagtatattagtttaagattgtggtatattattttaatgtgttatggtatataatgaacgaaacacggaaattaaaaaatatggaatactagtttaagtttaaggtatagttatatttcactagaaaatattatctttatattcattagtatatcatgaaggaaagaagaaaaaaaatatgtagaatattaaattaagtttttggtat

SEQ ID NO: 229886 - DNA, 1206 bp, Cannabis indica
atagcctttcacaacaactcttgaacttaatcttttgagattttgagataagttacactttgcttatttttcttaattttcagcatactcacgagtatgtgagttaatgatttataagcttttaaagaactcatgtgatatcgttcgtagtcaacatactcacactggaacatgatagaaaagaacaaagcatttatgtgctgacaagactttactatatcaataaagaaccagaattgttggataagaaagcccagattagcataatcttatttatgtgctggtagttgtcattcgagattacttttaaatttaaaaaagagtatgatattttatttatttagtcaaattacttacttataattgtgaccaaaagactttggaaacttgattaagaaaaagaaaacaaattagacgagaacatttaggagggataacttagtagataagttatcaagtgagaaagcttcaacgggaaatacgagagctgcttaactcttaagaaaagaataagaaaaagaaaaaaaatctgttctgttttctaagggataactaagcacgagtcacatatgagctcattcaatacattccaacaacccaaaatatcaacacaggacatttcacacttcattaattaattgactaataataataatcacacttcaagaaaaagtgatgacatgggtcacaaatggaatttgtcactgtccttggtacaattttcaaaaacattggtcatgtttttgttttgtttcatagagaaattttcaaatgttgactccgaacgaaacagagacacttgtgttacgagttttaagacataccatggaatagaagattgccccactatgcaacatggttagactatactattctattcttactatattacaagtcaattttggcagaagaaatatgagagttttgaaaagacgttgatccgggtaaagctgccatgactgcatgaatttacatgacaaagaatgaaagaattggtttattgtgtgttcgtgattaagcgcaactccacttcgaatacaagccttcctagcaaagttcctatttccgacctaattctgtagatcgaacgagctttccgttgttcttctcatactccagcttcaactcctctaaacgcttggatacctatgtaagaattaaccaaaatacatctcatataagacaaagcttaatgcacctatcaaa

SEQ ID NO: 229887 - DNA, 1306 bp, Cannabis indica
cattttaaagtttccaattatttaaagtccacatattaatttttagcattttttttgacgtaaatttttaacattttaaagttaccaattaacttatttaaatgaattttttttcaaataacttatataactttttaacttatcaatatttaacttaataaattttacctattagtaatatgctaactattttttataacatctttaattatcatttcaattttctaatttgttcaaattaacaatttttttaacattttaaagtttctaattatttaatatcaacaagttaatttttaacattttaaaattactaacttctttaaatgaatttttttaataaaaatcttaactaattaaattaccaatatttaaattaaatttaattaatatgaaattaaattaaatatattttttcaatttaacctattatcatatatataatattagtgatatatattctaattattttttaaaatttaacctattatcaaattaaaaatattatgctaccgaaaattcgacagcataacactttataattgatcattctcaaatttgtaacacctacacaaaaatcacaaacacaataccaaaacagtttacataattatttttttagtccaccctactccgaccaccagtatatttttcttacagaacctacttcattatggatgaatatataagatattaaaaactctactaatatgcaatattaaaaaataaaataataactatactacttaggctcgccggcaaaagtcgaaactgaaaaaatagcaatgaaacgtagcatttcattaaggtctatacttttgccggcgcatattagtgcgctggcaaaagttcccaccaaaattttcaaccacgttttcaagtgggcgggaagttgaccgccaaaaaatttcacaacttttgccgacactaaaagccaaaatatgatgcaacgtgtcgattcaataaatgcgaatactaattgcgtcggcaaaaattttcacctacatttgcgcgcatattttttcactgcgagagaatttgaccaccttttttttaccacttttgctgcgcatttacgcgcaggcaaaagataaaaaaaaattattaccttttgtcggcgcatttgagttcgccgacaaaaggtgactcgaactgccaaaagttcccatcttttggcagttagattgccaacatttgccgataaatttaaggtacttcgccggcaaaagctcctattaccagcaaaatagatcaccagcaaaagtgggacctggaccaaaatttttgactgcttttgctggtgaat

SEQ ID NO: 229888 - DNA, 3251 bp, Cannabis indica
ctttagtatgccttagacaagacacctgctgttgagtgggagtaatgagtaggtatccactactagaaaaatcacctttctcttcgatttttatgtcagtttctcttcagtttttatatataataattagcgaagtcatttgaggcgatgacatatgttacgaaaataccgaagacataagtgggacctatgtcttcgattattaggtaataagcgaagacataggtggagcctaataccacttttgcaagggggaagaccctacgtcttcggttattacaaaaacatcgaagataaatatgatctatctctttggttattatgtaataaccgaagacatagggtcacttacaacttcggttaatacaaaataaccgaagacgtaaggttgctcattttttattcatttatttatatttattttttaattttgaatatatagtactttttttaaaataattataaattcattctaacatttaatttgaaataaaaaatcaatttaattatataacacaattaaagtacaagatacaatttaattatattgtaataaaattaaggtatactttacaacatgataaatccttactaataaaaatacaaaataagtaatattgcctaacattaaaagtctaaagctagcttgtacaagtgttgtgtcaatttctagcaactccatctccacattgtatgttgccttctatatttatgttctgcttacaaaaatttaacaaaataaattaaattaaatcacatagtcccatcatataacttttgtgcattagtaaaagtttttaccatggcttttgtgagagttgatcttcctgttccagaaaatatagcctccaatacaaatcaataatagaagaatcgagactattgatattgggagaattattgatctgctttctagtgctagctgtagccaaacacaatattattgaggagacattatataaatgaaaagtaaaataacgaaccagattaaaccatttgaatgaagttttgatgaagattcttgttcaaatttacttaactaagaaataaacataataatattttctcaattagtttaatctgaagtgtattaagttcagaagcagccatcttaatacacagatcttgtcccccaacattgtattctatcatatcaactaagttgtcatcaaaccacaacatgcaaccactaacaccacttagagcataagctgaacacgaacagttcctcaaaagaacaaaaaaataaaaacttttgtctagaacaatagaatgaaaatttagtttcaaagagggcaacataaaattatgatctttttagcatttagtaattcaaacttgggatattattagttttaaatattgtttttgagttgttttccaaaaaaaaaaaagatttaatttgaaataggataaataatgatatgatcattagggtgtgattggtataggatttgaatttgattttttgctttttaaaacttaaaaagtgtgggacctgcacagaaaacatgattggtttattgtttttgaaaactgatttcaaaaacaaactcaaaattattagaaagattttgaaaatagctttttcatgttttcagttgatccaaaaacatgatttttgactttttttttcttttcttgaaatatcaacggctactctctctctctctttttattccttcttttttctatattctattttttttattattttaaggaaatattttatttcttttatttcttaataaatagtttttttttctacctacatttctattaatatactatttgttattttttttctctaatattattattagactatttattattgtaaacagatattataataaaatataattatttttctaatttataataaaatataattatttgcacctggaaaaatacactctattttattattttcattttttattatatatatttttaatttatagttacttatattatattttttttcttcattttaaatgctacgactaaaacaaaaaaataaaaacatatgttttatttgagtaataaaaaattaaaatgaaaatattaaaattaatacaacttagttacaacaatagagtataagtatttataaataaaaaaaataagaaaaatctagctttaattaagaaaataatgttaatgtattattcttataaatttataactgtaattattgtgaaattaaatattaaaattatataactaaatttacatataaatataaaatttattatcataggctatttatttaaaattaaaatcatgttcagattcagttaaatcaatcatatattctaatactgttatattttcaaattctgtaccaatcacagattcaattttttaaaattcaaaaactgtttacagacactaaaccaatcacattttcaaaaacatatttccaatcacaaaattaaaattttcatttcagaataccaaattttgaaaacacagtttttaaatcacgaaccaatcaaccccttaagcttttttagtaattcaatattcaatttttgggatagtaatttacattagcttgagaagaataggctaaatctcatacctgtagaaagggctttcaaggagtcctccagaatgcttgtgcaaaataataacccttagagccctccaccatttcagctgcaggacatgtggctaagccgtaaaataccaccaatttcttcactaagaagaagacaggaaataatgagaagagaattgatcacattgccaataatattatattctaatccaatttttacctcaagctagtgccttcgatgtttgaattgccctgtgtagaaaccaaaacgatgtgtgatcctaactcgtgagtggattggacgagtagttgatcacgtttatgcatgttcctctcactttcttcaacctgaatcaagtagcataacttgagaaacaatacttaaataaaagaatcatatcattggatatacatctacatttcatatcaaatgtactttcatactccaagatctttcacaaacttcttagtttcagaaagaaggcaactttcatctataaacgaaagcttacaaactccctaataaacagaacatgagatgtatagaaatttgtcatggttgttaattactaaaaagaaaatgtaagctcataaagttgcttctctaaattgatagaaaagaatcaacagacctgccatgtgaaacgatatccatccatattgatctcaaaatctaaacatagaa

SEQ ID NO: 229889 - DNA, 509 bp, Cannabis indica
ttgtaaaagatagagcaatcacaaatggcaaatataaatacaaataaaaatagattatctggcttctacaattaaagatttgtttagctaatgaattcacttcaagattatacaaataggaaaaaaataatgcagtttatttttatatggtagaaatgaataataaaaaaaaaatgagaatgaaaaataaacaataattaaaatacaagatactaaacaaaagatcataaataaagttgttaaaattcataataataactatcaccgaaaaagtcatcggtgccaaaaaaaagtaactagaaagtcagcaatgctagaaaagtcattaaaaaagtcaccagagttagatgtctcagatataaattaaaatagaactaatttaataacataatgaataaaaacaaataacaatcaaaccaattagaattaaaatagaactgattttataacatgataaataaaaataaagggtaaataactattttggacactgtgttttacaaaagtta

SEQ ID NO: 229890 - DNA, 1853 bp, Cannabis indica
  modified_base (129)..(129): a, c, t, g, unknown or other
ttacatccaagatcagttcaaagagatcccaatgcacacagttagtcatcaggctagccaagttcatccgctgtgcaaacataataaatcaacttaaaaacatggtacaagggctgaccaaccaaaacncataggctcgaactcgacttgacacggggatcctctttctcacatgaaatcgaggctcttgacctaccaccaaagttcaaaatgctaatatagaaaatatacacaggaaaagaagaccctttatcccatttgaagtactttgaaatgtagatggacctgcaaggagtaagaggcaatgtacagtgcaaaaaatttttggccacactcacagaggtcgctcagcgatggtatttcacatttcctccaagaaaatttaattcatggatttatttctcctttgaattccacgcacagttttcttccccctcgtcagcttccctcgcacctaaaagacctggtagaagtgaagcaaatgctgagggaacctctaaggacctacatcagtaggtttatgactaaagcaacaaaagttaaaagactgactgaggagggaagattagcagcaatattgggggcattgagcatctcggagaattatggaaagatatcaagagattaattgtgggatcgatggctgagtttctagatcgagcagatggatttaataagctcaaagagacaatacggtgtgtggataccgtggaacaaaagaagaataaaaaacacaccactatattcggtacttctacccagaatttacaatatcgcaacagctcaaatccaaatggaaaagggtctaactacgacaataacagggtaatggaaagaaaggcaagttcagtgacaatgctgaacagcatcccagagagaatgcttccaaatttactgctttcttagtcctaacagataatatagaaataatatatgcaaccacccagtctatggtgtcgtacaagaaaccctctcctatgaaggacataagtaaaagagatacatctaatttttgtcgttttcatgcagactacggccatgacacgaatgaatgtaataatttaaagcgagagattgaattcttaattggaaaaaataacctacacttacaaaaatatgttaaggccgaccaaaaacaaacgatcgcccaggtagaaaataaccaaaaccaactaatgcctccactagtggacgggcatctacaggtaatcactgggggcccgcacctcgctggagactcaggcaaagctagagaaaagtatgctcaagccttgtagcatgaacaaaatgatacaattctagccatgcaggaaaggaaacctagaataccacatgtaggggaaccaacaataacattcaccaaggtagatgctacataacgaccctgtggtcattaaagtacagattgcaaacaagatggtgtcacggactatggtggataatggagcttcctcaaatattctattcaagacaacttatgagaagatggggctccggcttaaagacttaattccttacacttaacttgtatatgggttctctagccagagtgtagcaccacttagacaaatttgcctaccacttatagttggacaagctccgagaagcaaaactgtaatggcacaattcttggtgatcgatgtcctgttagcttttaacgtcatgttaggctgaccagccctatatgtcttaaagttgtctatcagtattccatctgtgcatcaagttctcaactgaaagtcgagtaggctgtctaaagggaaataaaaggatcgcacgggaatgctacaaacttactctatctaaggtcaagaaggaaaatacctctggccagagtttagataaggggaaga

SEQ ID NO: 229891 - DNA, 1517 bp, Cannabis indica
tagtaagggtgctaagcaccactggtagccaatacaacgctcatattgaaaagctcattgtgatttttattccttactcgattacttgtgtcactcatatttctattgtttcctaattcgagcaatttcaatattagtttttttagtttaattgcaaaatatacgtactttcaaaagaattgtagttttataaagttacatttcaaaattttaattgcaaaggggtcatttggcatgatgatagtgtcatgtgttctctgctaagcaaatcataccgtcagaaaataaacgtgctctatactacaagctagcacactcattttcagagtggtgaagtacttattctcacagccttacaggttgaatgtgagcatcttgagaatgtgaacagttaggtgatgtgtagtgtagtgtagtgtagacttaataaattttgttattgtggatgtccatgtatcattaattgttcccctaatttaatttaaaaaaaaaaaaaaaagatgtttagcgctaacagaaagaatggtgagaaagacaatgaaagaacaaaactaaggaaaaggtaattagaatttttaattctcaaactatgatatatgtatatcaaattatgtcctttcaatttttaaagtcgttaaaaattacctttgaattattgaaattattagatttaaatttttttgtttcattttgataaggaaagtataatatgaatgaaagtttaagggacataatttggtacatgtcaaaattcaaaattcgagagaatgatttggtaaatatcaaaatttgggaagcataatttagtacatgacaatcacagaattagtaaaagtgaatgaaattagacaaaaatctttaaatctaacaatccaagtaattcaagaaatattttttaactgttagaaaagttcaaatcacgtgatttgtacatatcaaaatttaaagagaaaaaatcctaattagcttgaaagaaaactcttaaatgtgagccttcttcaaatattaaaacaatgttgtttaaactttctcactaacttatttcagagtattactattattttagagtattgttattgggcactagtagtactcagtactttctataattgacgcctcacgattagttagcgatattctttaaaagttattttattaagttatatgagacatcatacttaattacactaatagcagtttgtcaccgagaagactaatatacactaatattatcttttagcaattctcattattttgaggtgcacaatatcaaatgagatggtaccaataaatatcaaattgtactaataataatatagggatatgattttgtgccgttattgaactttcacggattgtaatctgtgatgtacgacaaccgtcagatgagggagttatttaatctgacggctgagattgatctagggataattagggttaaaaagttgaaacgtaccctgacactcatctaatgtatcctgaaacccctctaatgtaccacggaatacattccgtaa

SEQ ID NO: 229892 - DNA, 1616 bp, Cannabis indica
tcttagctttaatttattccataacccatttcttcaaaagggtatattaaaaaagggtttgaattttagtttccattaacttgtagtaagtgctaagttattacatataatataccattccttaattagagtatatgttgtttgtcattagcaaagactatttgtcataagttacaagactgtttattatgtaaatttttctttatatttatcaataagtggattttttatttagaaattcacatgtaatctattcaatcataataagtgaaagaaatctgtatagtttccttccaggattttaattagtcgacatactttcaagcgacacctcttttaactttcctaacaataataagtagattattgacacatttgcctaaaattgaataaagcaattcaaaaggaatttcatgaggtagttaaagctatataagcataatctatacatggttggtgctagacaaccttgtttgttggcatcaattttggttcattcagtattttaaagaggaccaaaaagcttaggtctctttgtttttataggtttgtagctttcttgactctgattttgcagtagcacaatgtgttggcactcatttgcgtatataggctttatatctttctatactaaatttaggccgcaactttagcacaatattctctacctagcatgcttcataaataagtattataatatcagtaatgataggtccacacgaaaatatatatacgagtgactatttaacgggtacatttttattataactatgatagttatatttttgttgactttatattagcagttactcgcatgtaaatttttttagaattaaataaactataattaattatttttttaaacaattaattttattttaaatatttaataagattctttttagcaattaatattaataattgtattttttttttatttaagtctctgttataattttttaacagttaaaccatttaattataatatttacaaaaaagaattatttctttttttaaaaaataaacttctactcctttgaaaataattttttgaataattaatcactaagttcgagaatagtgaaatgtaatagaatatgagaattcatgatttatacatatcatctaaactcccatttaatctgcatatcttcaagttacatgttttagagacaacttgaaaataattaacaacttcatatatgtatattttatcaataacacatatttgagatcaataaccagtaaattgtactaactttgttaacgatacatagtcaaaatcaatgattactaataatcaatagcatcgattgttaaatttatgaggaacacatgttcacaatccataaccaataataattaatagctttcatattttcaataatacatattcaagatcaataaccaatacaattattaacttctaaattttttcaattaacacatatttaagatcaataatcgataacaattagtaactttcaaacatttcaataatttatatattcaagatcaataacccaataatgatcaataattttaaacttttgcaatttttctttttcataatttcactctcatcatttgatacatatatagtatatttagaactg

SEQ ID NO: 229893 - DNA, 1924 bp, Cannabis indica
gggcataaaacccaacagaaccatggatgattatgggtgattttaatgatattttgttcaaagaggaacggattgggaaaagagtgaaatacacggaggcaaccgagtttatcaattgtgtgggaaggtgtatgattgaagatgttaagtatagtggcggttactatacttggaataacaagaggaaaggcaatgagagaatttgctccaaaatagatcgtgttcttgccaatcagaattggttagataatttctcctctgcggaagttatttttccagctgaggaattatttgatcacactccagctataatctcattatctcatgaaatacttgggggaaaaaaacttttaagtacttcaagatgtggactactcatcctcgctattctaagattgtttctggagtttggaatcaaagaattgacggttctaagatgtttcaaattgtaactaagctgaagctattaaagggagcttttaaagagcttaatcggcagcatttttctaacatacaaaatgctactgatgaagcaaagaaggagctccttgaaactcagctaaaattacaatctgatcctcttaattcagacctcattgctacagaaattgctgctcgtatgaaatatgggcagctcttgaagggtctcaactcctttttgcaccaaaaatccaaggtttcttggattaaaaatggagatgacaacacagccatctttcatgctagtatcaaggaaaggagaaggtctaacagtattctttccattgaagaccaacaaggagtacgaactgataaagcaaatgaaatctcagctgctttcctttccttttatcagcacctgcttgtctctaaaatggaaggtaggaggaaggttaacagagaagtgatgatgctggggcctcttgtaagcaaagaacaatcagacttgttgctgcaagaattttccaaagaagatgtcaagaaagccatatttgcaatcccgggaatcaaagcaccaggtccaaatggctacactagttttgttttttttttttcaggataattgagacttaattggagaagatattagcgaagcggtgttgtctcttctgcacacaggtcagatccttgaaaaaatcaatgctactgttttaacacttattcctaaatgtaagtgccctaatacactaagtgacttccgtcctattgcatgctgtaatgtcatttataaaaccgccactaaactcatttgtacaaggttgaaagcaattcatcctgatatgattgcacaaaaccaaggtggattcatctctgggaggtttattgcccataacatcatgatttgccaggacttgatcagacattatggaagggcaaaggccaaggctagctgtatgattaaacttgatcttcagaaggcgtatgatactcttgattgggattatttggaagaaattcttcatgcattttagttccctgtgaaagttatcaagctgatcatgatatgtgttcgaactcccaggttttcactcatgttcaatggttctctgcatggatattttgaagggaaacggggattaagacagggagatctgatgtcaccactgctctttgttcttggtatggaatatctttcaagaataatgatgaagattagagctaaacaagagttcaagtttcatgacagatgtgctgaactcaaactgaatcacctgatgtttgcagatgatgttatactattttgccatggtgattataagagtatttactatatgttacatgggcttaaattgttttcatgtacttctgggctgcagccgaatcctaataaatcagctatatactgctgtggcatggaggacactgaaatgcaacacattcttgattgctcgggtttcaccaaaaaagaggtacctttcaaatatttaggtatccctatttgtgc

SEQ ID NO: 229894 - DNA, 1222 bp, Cannabis indica
aatagctatcaattttctacctcaggttcaaacccttgactattttaagaactgtgtcaaaattacttttcacaataacaaattctaaacctttctctgcatcaagttccaacgccaacatacaagaaataatttccccaataaaagcattggcaaaaggcatgcgcttagtaccgacctaaagtatcttcccaacatgatcttgagccacaactgcaagcatcataagcccctccttaatcgccacatcatagttaagtttgatccagtccacaaacagaggagcccattcagtgatagcagggaaaagttaagaatgatccaaaagagattgaccatactttgtataacaataagcaatagagtcactataaaaatttatgttatgcagatggctattatgtaccttatttatcgctctctaaatagtgtgaactagtatagacgcatataaaaaaatatcatcaatcttcacatctctcactggcaacctccaaatgaatttgacatagtcccatatcttggcctttggttccttaacaggaatgatgccccaaggagcggctctctaaagatgagaagccatgttacaatgaagaaaaagatgttccatagtttcttcctctctcccacaaaccgggcaagaggagtctttaatgttcattcgatctataagaagtgatcgaattggaagtgcattggatagaatgctccaccaaagcactttatgtcgttcaagtgttttgttactccaaaatttattccacaaagaaggagcggcatgacagtgtttgtctctctcaagagcttacaaaaggtaagcagatttggtggagaatttcctattcagttctttaattcaaatccagcgatccctccaatgtcctagtggtctttctcttaccaaagtggcactcattgtgtcatgatcatacaacctatttaatttgtaaatatccttactcccgattttctagtaataaatctgccacagttataaagctgggggccgaaaccccatttggaatggggcataaatcgataccatgggccacccacagatcctcccaaatgttgatatattccccatcagctatcacatagcaagcacccttcttcaggaacatccttagccttaaccacattcttccagaacctcgaattagagttcttataattgcaagcaacccctctcatgaaacctgcgggtgatgttcgacaa

SEQ ID NO: 229895 - DNA, 2000 bp, Cannabis indica
caaccgcaatacacatactaatccaaacccacttttacatcacaattcagctaatccaatcccgaggaggaagggaccaagcttcctttaaagatggggtaggactttggagcaaggtatcatacatatctgcataagaattacaaatattatcaatgcatttgttaatatcaacaggacaattattatggaccttctcattgcgcaccctccaaatagtatccacaacaatagaagcatataagaatatatcatcgacacgagctcctttatgttttagatcccagatgaacttgacccaatccaaagctcggattcctatatcacacatcgggtaaataccccaaggagatgaacgaaagaaatgaagaaccacctcacaggatagaaacaagtgttcaatggattcaacacaccttccacaaaggggacatctttgatcctctatatgaaatctagtaccaatcacagctcttaccgggagggcactagacaggatacaccaccataagaccttatgacgctccaaaattttgctattccagagtttgttccaaagctttggggcaacaacacaatggggagctctttccaaggcctgagcaagataagcagacttgcaccagaactgcccatgactctctagagtccatatccatctatcaactctggcaccagagggttgccctcctttgagaatagttgtaactgtttcatggtcaaaacattgattcaacttttgcgtatcccattacccattgtctagaacaaggtctgccacatggttaaggttgggggggcaccccctcttggtttcggatagaaacctttgtagtgaggaatccaggggtcccgccagatattcgtagtctctccattagctattaacttgcaagcctctttcctcaagatagaattagctttcacaacactcttccagaaccaagaatcagaatttttgacctgcagttgagaaaatctttgcccctaaggtacttggcttccagcactctgcaacataaagattggcttccgtttaggatattccacccccattttgataagaaagcttggttcatttctttagttttcctgaagcccaaccggcctaaagattttggaaggcagagtttataccaagccttaagatgaataccatgatttcctttctcgaaaccccaccagaagtctcgcaccaacccatctatccggttgaccattcaagtagagagttttgtggtttgcatagcatacataggcagcaacaggcccacagattttataagagttgcacgccctacctttgacaaagttttagccttccaaccttgaagctttgccgtgagattgtctaaattaaaggtgaaatcaacctccttttgcctagatctgaatagaggcagacccaaatattttatgcacccctctggataatcaatgtccaaagcttccttgatatcacgccgcatttccattggggtgtttttactaaagaaaatggttgtcttaagctgatttaccaactgacccgaccaagaacagaaattttctaggcaactctagaaaccatttgcctcaattaaattagctctacccaccaaaattaaatcatcagcaaagaaaatgtgggagagcaccgggcctccccttctaagttttatccccttgatgaaatcccggtcaagagaattggagaacaatcttgaaagaacttcagcagcccagatgaaaagataaggggagagagggtctccttgacgaagcccacaagaggggttgatgttcccaacctgacccccatttagacagacgttgagggtcgtggttgaaatacactgcgaaatccaaggacggaaccacggaggaatgccagagcattctaaaacatgatcaataaacttgcagctcagcctgtcgtaagctttaataagatcgattttgatagcaaagagccgctccttacctttcttcctattaaaggaatggataatttcttggat

SEQ ID NO: 229896 - DNA, 917 bp, Cannabis indica
attgagctctagttttattctttttctttctctgcaccaatttctagttttggtcggtgaaattgaatgcatacatcaatgcgtgtctatatgtataactttgtgggtgtcattgtttttattattttatcctttatgattaacttagagatgacttggacttctttgaacttttctctggagaaactcttgtggactatcctttttctattgcattatatgattataaaattattgtgtaggtttataggcaagatggttactgttttgaagttcttttgagctagctaaagttctttcatgggtacatattatttgttaacgtatgttttaataatatatatcttgtgtataatattttagatcatgttttataaacgcacacatgacaacttctatttcgaaattcttttagcaagccaatgtacttttatttttttcatttgacactcttagataaaatgagttgaagttctacctattttgttatccaatcggggaacaaatactcctctatgaaaaatgaagaaataattatgtatagtttgctcttgcttggaggtcatattgttattttcgatatgatttgattgtgcatacttatgttgtttcttcctatgtgttttaatttccttggtcatatcattgtacatgtttttttttgttcattatcttttatttatttaccccaaattttgctggtgtggcattaatggtgttggttttctggcttatttaatgacttccaatatatatgtgagttttaatttgcggtttaattcatagaaagttgaaaattttattttgtgcagtgaaaaagttgtgctgtaggctttgaaggccagtgactggaatctcgaagaagcttatgatctattctactgccatccacagttgtaattatttactgattctag

SEQ ID NO: 229897 - DNA, 1220 bp, Cannabis indica
aatatttttattagtcacacattttattattgctaaagtaaaaaattttatagtaccccactattagatcatttaccaagaaaaaacaaaattaccactattagatcctctcctctaaggctctaaatattttgcattgttcaaattttctcttatgcgcattgttaatatgcataatgttgtcctatttgatcacacgttgctttgatcaaatgtagttgcggctgaattctttgaattttaaaatttggcactatcaactttttatttttaaaataattaaagttaaactcttttaacttttattttagtttgttaaatgataaaatttattcgtagtaaaatttgattagttcacgtaatataaactatttaaatattataaaaaataaaaaaatttaataaattctaaaattaaaattttaaaaaataattaatctcttttctctcactttttttttaattattattatttatttttttttcccttttcttctctgtgcattttccctgaaatagtcaaaaccccacttcaatccgaaaatgccaaaattgatcaatacaacattcaacaagatataataacccttcccttgacctccttcttcttcttcttcttcttcttcttcttctcaccaccactacgtacaccttattgaaactttggaataataatccaaatgaatcaaatcgcaaaaccaggatgatcatcagaacttagtaataaggactagaattgtcctcatgagcaggacgatgaagagggagatggttctgattggtgttttctccggtgacagtagaaactagaggaatgatcaatggatctattgatggagcatctggaagtgtgaagaaagtatttggcagaggaatttggccagaatttctagatctaatagctcgagttcttactatggcgattatcaatgataagaaaaaaaaaaaaaaaaatatatagaagaaaaagtttttatgcgtttgatatataccatatgagtaaagagagaattgaatctttattaatgatgaaagaagtataatacaacaaactccagctagtagcagctgagttagttagaacaaaacagtaaaacaaccactataactaactcatataacagactatgcataaccaaactaatatatctctaacacagctaactaaaaattgtaaagttggagcacgcctcatttctggagctggaggtgctcgaggt

SEQ ID NO: 229898 - DNA, 2321 bp, Cannabis indica
cataaatatgagtattggacatagaatacttattactttgaactagttttatgtgattatattaagttttttaaaaatatatgtttaggttttttaagaagtaatatttatagtaaattcaataatataaatttatatatatactaaatttttaaataaatatttaatttttaaatttttttttaaaaaaaaatatatatataagttgaatatatttaatttaattttttaatcatgttttaaaaataatagtatttttgttcaaaattaatttattccattccattccattatatagtcaaccaaacataagaattgtattcaattattgattccataaatctaaccaaacaacctaatcctattcctattcttattccattccattaccattcctattcttattcctattcctattcctattccattgctttcattacctccaaccaaacgggccctaaaggttaaactaaaccaaaaaacgtgaaagacaaaaacaaattctaaactaccctagttataaactcgtttatcaagtaccaaacatttgaattcaaattaaatgaaaaaagataatttaaagagaggtgaaaactagtacatttaaaataggagtttctcttaaaatattatacactactgcatatataattaaagtcaatgcatctctaagccagtatattaaatatatacattaaatgtagtttcatttaagataggtatgtcctggatagctctttatacttgatctgtcgattaattttttattaattgcaaacctattaattaaattagtgtgagagatcttatcacatgccagctgactacactaaaagtcactactacaaattacactatttacgtcggtcaacgctactattcatagcgttgaccgacgtgaatagtacctaaataattggacccgtctctttaaaaacgacgctaataatatgttatttgcgtcttttattaaatgacgataaaaaataaatcgacgagaataatgcaaaaatttaaaaaacttgcttttcattttgcgtctattattaacactcgactattgtgtttagcgaggttttaaaaacgacgcaaaatgtaatagtaccgacgcaacaacatgtaatatcccataaacctaatcagatgcctactgtgttcacaacctaaccctcaatcgtatcttcgaatttgctctggcgaaataggcggctcctcggtcctcttcgaaaccgcgcccactcgagcccttttgttctcttcgaaaccagcttctacaccccatctcatccacttcaaaagtcattgtttttttgttgagtatttatgatttgagattaggcattgagaacttggattcgcctaatagaagcttgcttcggggtcgaaacagagaagaggtaatttggagaagaactgggttggtttttatttttcgtggctctagaatttctaagttttgatttgttagtttaggtgaatatgtgtttgattacatgtgtaaacattcatgcatactgagcgttagattaggtttgaaagagataaccattcatgaagatggcaatttcaagtccatttccttcaaagaagtcactaatttaatctctggaacattcggtggcaacaaccctaatgatcttgatttgggtcaagagataaaggtaataagtatttaagtttgtaataatcatatattatacattatgtgtttctaatttctaatgattatatatgtaagcatgatgtttggataagaagatgtaatggttcgagcaatgagattatttgtttggtttttcatttaccattaaattttgtacttgcaccatttggatttcattgggttcaatttgttatttgatttttacatatatatatttcatgactttctactgtttaaactggttttgatacttgtgtatgattttattagttttggggcttcgcctcaagtatctcggaaggattggtgttgtttgaagattttggattgttggctttaaggtaaattttatgattaatgttgaaaaatttctcaataatctgtaggttttgatgatgaatttattggtgtggtgttttttgcttctacaatactaaaatttttgagtaaatcttcttttctataagaactatcaaaatcaccttgatgcggaaatgctatgttgaaatctcttatggttggctcagaggttgttagtgatttaactttcattgaatatctaggattgtttttagatatggtcactgagacttgttttcaagtttttgttcatatacatgtttatgtttctaagcaagctgataagactccatctgag

SEQ ID NO: 229899 - DNA, 1048 bp, Cannabis indica
atttgattgcattctatgatttattatgttgagaatttgtatacaggatgtcgacattttgtcgataattttattgtgttgagttaatttttatttgagataatatcgacaggatgtcaacaatttatcgacaagtttcttgtgctctgttattttgtttattgagataatgtcgacatgatatcgacattttatcgacatttttttttgttctagtatattgtttattgagataatgtcgacaagatgtcaatattttgtcgacaaatttcagctactacgcatctttgatttgtaaagaaattttatttggcgatagtttatttatattttgtcgatggtgtgcttaccgtatgcttttgttatatattttttcagatgactccacgactcataattccaacatccgaccattttaatggtcgcgtgatatatagaggcatcggtgcttttgcaaaaatcaagatgccgtttgaggaatacaatttgaatgagatggcgaaagcatgcggttttggtaatttttggaatgtcgtacctctcacattttctttggtattatttcactaagtaatgttgcacaagatgaaggttaatattaagaaggtagaagagatgcgtttttacattggccgaaaggagctcaaatttagagtggttgagtttgcactcattacaggcatgaacttcaccttgggtccaatagaagaggagaaggctacgcaggctgcctgctcggggttagaccatttgatcaacaaatatttcaactgatttgatagtgtgaagacagaagcactccaggagaggttctcaaactattagaatctggaagatgtgtacaagcttggcttgtgcatgtttattgaggttgtgttattgggtcgtgaggctaacactttgattacgcctagcatatttagatatgtcaaagatctccagttcttcttctagattccttgggggaagtactcattcgccagacctatggactcctttcaaaaggacatgtcgaaacaaaaggcgcaaactatgagaagaagctgag

SEQ ID NO: 229900 - DNA, 1104 bp, Cannabis indica
atttatcattacatatattatatataaatataatacaattttgacaattggattaagatatagatcaggtcaaattattgttcaagcaacggatttgattttaaacgccttagacctccaaacgataaaccaataaacgaaaacttatttttctgagaaaatattagaaactgagcaaagaaaattcgacccgaagatgtggacttatttaattgcaacctaaccagaccttgatgactcatccattgatgagtcgcttgtacttaaccaaactagtaaggcagcaaaagaacttcaaactaataatataagccaaatgctagctagagaagaaatgggttaattaattaattaaccgcggagcagaccttcctaatttcaccagctgatccagtgagaactccaagccttcccatgttgaccatggaaacaccgaaatctttaaagaaagaggatgttccagagctagatgcgtggctcagaacataagttttagtctcactgtcatcgagaagtgcagagtctgatgagaagagaccccttctcttggccaccacttggaagtatttaacatcaaaggtcttgaaacttcctgggtccatctccaccaatgtagtccggtcagcaggcttgcacttctttttaagttcatcaatgtactctgaatccaatgttgggtcggtatcaccttttccggtgaagttgtatagacggttgttgaaggcagtgcagtgtgaagttccaatggtgtgtgcacctgattaattatgacatatatattgtattatacaccataatattcaatgaaattattgttattaatttataattaccattaatagtagtacctgagagcactgctatgtcttttgcacttaaacccctggttgaaaaggctgttcttagcgcagtgatattggcgaaaggcggaactagttgtcttaaggcctcggttatattcgaaactcttccgtctcttcttccagtttcaacttcccaggttggtccattcaactaaatatatataaatatgtattgaatattttagatatatatattatcaaatttaatttacgaaatattatgtttaagttacgaaattaa

SEQ ID NO: 229901 - DNA, 933 bp, Cannabis indica
ttttaaaaaattactcttaaatagagttgaagcatgagattttagtcaataattttaaactacttgaaatttagtttattcacagtaaacaaatataatgcacgtaacaataacctagtactaaaataataatacatatacacataaattcatgtaataaaattattttaactaattaatcactagaaaatatttgtataggctacaaaatctaatttctcttaattagtaacttaacactgcccagttagcaccacacattactgtattattatatttatgatttaatgacaatagaataattatggaaatcgagaacaatactgtattatttagaaataattaaaagtaccaatgcaaattattttaatcattattactattattataattaattaaacaaaatcaaagcattaagtggccacattcatcacaataatcaaataataataataataatgatcattaacacaccataaccgcgttgagccaacactgttcacagcacattaaacttaattctactgaaccttcacatgctacttccaaaacaaatctctatatatatagctccaacattcaccaccttaaatcatcaatacaaaatacaatcatggcttttctttcttcaattaactctcctcattttgtgttgtttgttatttttggctctttggtattggctgcatcagctggtgatctcaacaaagattttgagatcacatggggtgatggcagagctaagatgctcaataatggggagcttcttactttgtctcttgacaaagcttctggttctggttttgagtctagaaatgagtttatgtatggccaaatcgatatgcaacttaaacttgtcgctggtaactctgctggaactgtcactgcttattacgtaagtaacctctgttcataaagtttactttgtttctt

SEQ ID NO: 229902 - DNA, 2688 bp, Cannabis indica
actgggataaaaagtcccttttgctgtagtgcatttatgctctgatacggtgatactatgacaagaatcatagggttccatcttaaaactaattggtgatgagtggagtagccaatgttcttatatatggctcaatatttttacatttaattcatgtggaacaatgttatctaatatcccccttaagattgtgactatattttgctcaccaatcttgagtcaccttatcacaagctatgtcatttcactactagaaatatggtgtatatcttcgattttaacgatacaaaatataaaaattgaagataaaagtaggaagaaaaagaaagaaaatttgcggacctatatcttcaattattttgaaataaccaaagacataagtcatggagacctttacctttggttattaggaaataaccgaagatataggtgtacctttgtctttggttatcttaaaataactgaagacataggtctctacaactctagtcccatatcagatatatatgcctacatcttcggttattttgaaataaccgaagatataggtctataaaatcctaattctagatctaatactcttatttcctctttcttctccatctttcctctcaaataaaaaacgtcgccaccatctctcttaaagtcctattttctccgtacactatcatttttcctcatttttcttttaaatcttcatattttttgaaataaccgaagacttaggtctcctatacatcttcgggatttttggaacctacgtcttcgcctcaattgttttcggtaacgagaatttttttaaccgaagataaagcagctttaaaaccgaagaaaaatgccatttttctaatagtgtttgctccctaatttttgttcgaatctcgtctttgcactctttagatctcgtgtaattgactttactatctagataggtaaggatcaaaagtctgctaaggtaggtgtggatcgaaagtccactaaaaatatggctctgataacatgaaagaaaacgaaaagatatgttgttttctattgaaagagaagatagaaatgaactgaatggaaagtgagaaaaaaagactgctcaatctcaaccattgaggtagctcatatatttatagagtttggttacaagcgattgcaatcattgctaacagttttaaccaactcaactatccaatgagttggttatgaaagaataacaatttgtaactaactcctaagtatgtaccctactcgctaataacaaactcctcttttaatgtttcaatatatccaacgtctactactctaacattctccttttcaaaatcgatggcacacacacaactattactgctaaccctactcgctaatagcaaactcctcttttaatgtttcaatatatccaacgtctactactctaacattctctttttcaaaatcgatggcacacacacaactattactgctaacttaatgctaaaaatctataaatatagttttatcacttaatgcacagggttagcaaacaattaatctaaccttatttatctcttattaatctttagctcgactttctttatctcttattaattttgttttattttaattttcttttaattcggtttttaaatatttcgataaataattgtataaattgattattattaatttacttaaaatgttaaataaattaaaaaagaatgaaataaatggcctaatttattgaattctgtgttgaaaatgctatatctatttaaatataaatatttactagattaatgaccttaagaaaaaaaccgggagtattatgtagtttcctagcgagtgcatgtggaaggaaggagaatatcatcatcaattctgatttttataatgtaatctccccatagatttttcttgttttagaatatattaataataaatatttccttaaaaaataaataataaatattggatatatagagaatattttatccacacaaatgattctatatactattaattacttaattatagcaaacatgccattaagttaaaaaagttgaaaaccgacaaaactttaggaatataattataaagaaagtgatttgggatgaaatggataggtttttttttcttcttttttggttcaatcaacccagccatcccaagtaagtagtggccattaacagaatatatccaattccatagttaatgtaaggcacgtagaaaagatcatatgtatatatttatagtaacatgaataaaaactttgaatagaaactgcacatatggtttgggtacgtgcccataccatacttgtcaccaaaaaaattaggaaatctaaattgttgttcactctctctatatatatatattaatttatttataatttttgttcagtgaacagggctggtttggatgaagacagagcttaattacttaactatatcaagcaattacaatcgtgctttaaataaaatattaatagaaagaaagaaaaggaaaaatagtttgttcatttgggatgaaataataatccgatcattaatgaacattgccttattatctaattatttggaaagggaaattaaaaaaaaaaattgaaaatttacaaaaatattagggcatggtagattttttttttttatatatatatttttactatacgaaatttataaaaataatgtgttagagttttaaaattacaaaaatattatattt

SEQ ID NO: 229903 - DNA, 1593 bp, Cannabis indica
cccggcaattccaacttaacacaatcatggctcttggcgggtctggattccagaacccgccccaaaatcgttttttccttccccactaccattcaatcccacaatctcttccaagccttccataggcccactgtcactcagcccactattatctagcccaatattagttcccatatttaacctcttccttttactttccagaataaccatctctccatctatgcctatatccccttccacctcattcccattaatcccgtaattatggtctgaccccaatcccacatttttaggtagatttcctgctatattggaattcaacaccccacaattcattgactcatccgatcccttcatcctaggagattgataattaattacccgatttggcgtcttctcccttaattgtccgccggattcctccataaccacccctcctgtactattccgatctgaactttcaccccttgtcaccagaccctgtttaagccattttgagcctatcgtatgttgtctccgtcgtgccaccgccttcaactccagattataaggtttcttaatcaagtgtaatggcgtgtcgaaaagctttgggcaaaacttctcagaatggccaagaatcacagataaaacaaaacgtcggaagatcttcgtacttaaaattacaataacatgtctccccccctcgttgttcaagcttcattcttctttttaatggtaaatcaacacgcaccgaaactctcacacgaagataatcacgccatattcccataaaattgttcttatccgcttccacaaacgtccccacgtaattacctatatctctaaccaccttagcggacatgaaaccagtagtcataccatgtaactggatccaaaaatccaatttgttcacaacaacatttcgtggcacttccccaaccttcagtcttgagaaagctagaggagatctgtcaaaagtccatggacttccttctatcaccctatcaatatccacatcatgatagaattgaaacagatacaggttttgatctaattctttcacatataaacccctacatggcctccataacgatgccattttatgttgcattgccataaaatccagcgatcgatccgttagaaatcttcccacaaggcaccacctatcatcaaaatctgaaagctccgattcctctgcctcgtaccgcagtcctccatcatcttcgtccccttccagtataatttcaaaacgtctgacctcatcttgattagtactatcctggttcgccattatacgaaagtaacccaacagccaccaaacactcagaacataccacacgaacaacacaaaacactcaaacaggacaaaaatacactttactctgtttcacaaggtgacagacacaggtcaacagaccagacttgctacgagacctgatatttagttggactaatatgtgtttgacactttaatttttattccttagagttcttgaaaaagttatttatgacatttttttatatataaataattaatatctacacagttaaaaacttagatatatttatatatatgtttttataaattatatgacagagatagagttatattgt

SEQ ID NO: 229904 - DNA, 1207 bp, Cannabis indica
taaataattttatgtaaatatttttttaaatcaaattaaaattttactttaatagttaatattaagtggctatttaataagtgacgtgtattattttaaatgatgtggcatgtcatctggtgttcagtgtgcaagtcaacagcaaggtacctacagaatgtctgaaagtgtaacggaaggtctttatgccgccaaaattttaacttatgtatttaattgcaattggaagataaatttaaatatttatgccgcaaattactcttttatttatctactagtaaaggaatatgccttccccttttgatattgaaacaaagttgagcttttggttggattatatttaattgtgttaaacaaatatacagccaaatgtactaaaatatacacaaacactaaaattcaagactaagatgaaaaattaactgggtaaaaatatcttttctttttaagttagagaaaaaaaatgattcatacttaaaaatgtatataaattaatattaaatattttttcacacatattttgtaagtattattataaaataaaatattaaaattaaccacacactgaaaagaaaatgtatgatacatatataataagtaaattaaaaatatgtaatgttatatatatactagtaacgctacacgtaggatgtaaaatattgatattataataatttacttcatagtaatttaaggtgacaaaatttctaatgttgcaacatgatagtagcttttaaagttacgactaacatatccattttaagttgtaatggaacttaaaaagtgttcccaagttatggcctatttatttatgtattcattgcatctatggagcttccaaaagtggaagcctatggtatagtattccaacaagtggcctatttatatatatattccatcatagaactttgaaaataacgagcaataaaagagcaagccaatttagaagagaagcacaaccaagctttctactgcatctaatctttcattagaagccttgtggttcttttcatcttcatcagtagcttcatatttcttcttttcattgtcagctgtaattttaagtttttttaagaagagtcaaaagtggagttggattaggatgggaagttgaagcattagagattaattcttcaattgagactggagttgtattaaggaatgaagtgatgttgaatttccatccttcacttgaatcttgttttat

SEQ ID NO: 229905 - DNA, 1480 bp, Cannabis indica
ttttgactatgtggacatgcctcgtcaggtggaaatctttttgggtaacatttatccccctagtccctgttcggacgttgtacggcttgcgacttttcagctcttgtcttcactgaaggggcctttattaagcaaccttatttgcctaagtaccaaactttttaaatgatgcgcttttaaacctttgatcttctttgtcccgtgtataccttttactttcctcatcttgtcctctttgatatttctttgaatttcccattgaagagtttcaagcattttaaagcttttagagctttttttattctcatgttttagagtagtcttttcacattataattcgcttgatacctttaggatttataatgtttggcgagggtttttttcgtggatatgggggctgctatggctgctgattcttcgtgttgaacaaggtggtaaaatgaggaaggcgaagctgtgtcggttcttttatataaccctatagcgtcgattaataccaaataactgacgccatagggttactaaaaagggatttttacatctggacactttttttttctatttaatatcaattttaacgtgtatgttcaaattgtaaatattaccatgagtttttgttattttcaatttcaaagtatttagttgcttattgtttgttgacgtcataatcaattttcacatcatatctatcaatctatgaggtttgtagtcactctcaacacatgcatggtaggtgttgatgtggtgttgatgtcaactgatgatgtgtaatagcttaaaaaaaatacatactgtacgatattaattgtttttcatatttttttaaattatttagttatttaattgatagatataatcaattttcacattatatctatcaatctatgaggtttgtagtcactctcatcacatgcatggtaagtgttgatgtggtgttgatgtcaactgatgatgtctaatagcttacaaaaataaatacatagtgtatgatattaattagttttttatattttttaaaagtatttagttatttaaagtgagagtaaaagattattaatatttatttatttacttaagtttatttttcaagaatacatcatttacctattttctttctttttatctttcactttttctcttttatctttaacttttttttaaaaaaaaaatcttattatgttgttactcgatggaacttaaaaaaaaattattttatcggcttacatgatgatagattgtgtttgaaaaaataatttgttgttcccatatatgaaaaatagactaataggtttattagtgtgttatgtttgattatagtttactttgtattgaaaaatataaaatgttgtgccaacaaacagaaactagtaggtttattgacatatataatggtagactatatgaaataaaatgagcagtcgttctaatatacgaaaagaaaaataatttttttttcaatatgctaaaataaactaataga

SEQ ID NO: 229906 - DNA, 2101 bp, Cannabis indica
ctaaagattcaactaaaggtgttacttggatgagttggagaaagctttgtcgtcataaagatgttggtggtcttgggtttcgaaatttaagggattataatttggcttttttgggtaaacaggggtggcgcttgctcactaatgagaattctttggtggcacaagtgtacaaagcaagatatttcccaaaaggtaattttttacaagctgaattgggtctaaatgcgagtttcatttggcaaagtattttataagctaaagatcttattaagatgggtgctgttagaacaatttgtgatgggaaaactacttctgttttagaagatccatggctgcctactgtggataacagttttattacaacataccatccaagtcttgttggtcgtattgttgattgtctatttcagataggatcaagagagtgggatgttgagctgattagagatgtttttaaccaacatgacagtgatctaatcctctcaattcagttaacaaattccactaggggcgactgctggtcctggtctaaggaaataggtggcggctacactgtaagcagtgcatacaagttgcttcaagtagttaatggggactggttgattaatgatggggcatctttttgcaagaaggtatggcaacttaatgtacctgcaaaagttcagcacctggtttggcatattcttgcaggatgtcttccaacgaaattacaattgaccaccaagcatgttcatgtggatcttacttgtccaatgtgtaacattgaacccgaatctaccacacatgtcttgtttaggtgtaactttgcaagatcctgttggaatctctcctcggaaaatgttcaggatggcgaggacactgatgtttgtagctggttctgcaatattctggtgcagaaaccgaaggcagttgttgaggaggaagcaatgattttatggcgtatttggatggctcgtaatgatctcttatggagtaataaatcaactaaagtttctgaagtgattcgatcggctaagactagtcttgacaattggaaaaatgctcattcaaatggatccttaccattactaaatgttagttttggtagtggtaaagagcattggactaaacctgtttcaactaagttcaagatcaatgtcgatggggccctttttgaaactgaaaatcggtttggttttggcttcattgttcgagataaacatggcaaatttgtggaagctttctcaaatagtaaaattgggttggtggcccctgagatagcagaagctgtaggcgtcaaggaagtcttaagttggattaagacgaatcaattaactgatgtggaagttgaaactgactctttggtagttgttcaggctattaaaggttcagttcaaatgccatctcaatttggtttccttgtccaagattgtcgtttgcttctttctgagttacataatgtttttatttcttttgttaaacgatctgcaaatagggctgctcattgcattgcaaggaagtcctgttttatgtcaggttgtattttggatgagctttctgctccttctgattagctttcgattgtaagagaagataatttttcatgttgaataaaatttctaccctcttttacaaaaaaaaaaaagaaacttatacataataattcatttaataatttttcataatgaattataaagctatatgtaaacaatatatttctttctgtttccaattatttttttttttgaaaagaaaaaaaacaatatattcctaataattgtcaactcaacttacaaagtgattttcatatgccaataaagtgtcaaataaatggatttacctgtactttttagtttttaaacaaaatataaataataaataacattcaattgtactagcactactaaaaaaaaattcttgctgattctttggctacaatcggtcatcctcttgatgacaatgatcttgtaatgcacatactcaatggattaggacttgagtatgatcatgttgttgttcatgttacaagtcttgtggataatctctccttagagtccattcaaactttacttctaacccatgaaagcaggttggaacgtcattactgttgggttttgtgccc

SEQ ID NO: 229907 - DNA, 1416 bp, Cannabis indica
tgttgttggtgttggggtagaatttatcaaaagtatattatctttacacaatctattaatacatgtcaataccaaacataatattgcatttgataatactaatacaaaattataagttaatattaaaattcttaaaaaaaaaagagttgggtcggatctgatccgatctgagtatctgatctaacggggcggggcggggcagatccttacatgatttggatcaggtcggatcatagccggattagatccgacccgacccatttacactcctattaacaatagagatgtaatctttgaaaaggatgtatttccttgtgttactaatgatatttctagtgtaggaacaattttaccaactaacagtgcatgtaccatagtaggctatcactccaatacacatcatacaactaatcagacataagcaccaaacactgatcagatggaacttgatactcaagaccaaataaaacagactgatccacttcagagtgatcccatgaaagatgactacaatcaagtggaacctaatatagaagaacaaccagtaactgaaacacttgatgattaccaaatcagaagagacagggccataaggattcctaaaaaggattcctaagcctaatcaaaagttcatgctaaatgtatgggaagaagtcttagcttatgcctagttaggtgtctcaggattagctgaacctggaacatgtgatgaagtagttaaagaaaagaaagctaagaaatgaattagggaaatggatgaggaaatgatgtccaagacctagataatggtactcaaacctaagggaataagtatcattacttacaaatggttgttcaagtacaaggaaggtaaaactgagaaagaccttataaggtacaagactagatgttgacctcacttttagccaacgacaatgagtcaattaaagtaattagaaacaactaataataattatttagcaataagaacatgaatttgttatagaagttcgacccagtgatgatggtaatagcatgctcctttttttgttgtattaataggggttttcacgattttaatcatcaagtctaaccttgttatgtcttatcgcacaactcttatcgtttacttgcatatatcattaacacatggctaatcataaaaagcttagggtattggcccaatttgcatttctatccaaataaccatataacatacaaatgctattacgctatactctatgtgtttaattcgatgtcttacctaaattttaatgtataaggagaattttcagtccataggtgatcttgaccaactaccggtattcctagtcataaatctcgagtttttacacaatagggttaatcttaaaatcacatttaataatattcacattaaggactctagctctaaatcaaataatagagcttgaaaaa

SEQ ID NO: 229908 - DNA, 813 bp, Cannabis indica
agagctcaaatgaatgaaggtaacatttcttgatcttgatcctctgactttcttgagaaaactacttcattattgaatgttatttgttgaaatactgtaagtctgaatttagctctaattaatttatgagaattaaataataaatagctaaagattagcagaagcgtatcggagtccatagaatcgattatacaaaagtatgatcttccaaatttgcagtcaaaaatcctttagagctttagtctcttaatgatggggattcaagaatatagaatggtacgatactgcaaattggagatcttaacctgttatattactaacttacaaaccagttagtaatacttattgactattttttaatttgacccctcatcaaattagaaattgttcttatagtattcacatattaaaatcataacaatcatgttctaaatatagactacataaatttgactcattcatatgatgatgactcaacacacattttatatatacaattgtgatcgaaataaataaattcccaacattaattgttgtgcagagttcttgcgaatggatgttaagccattcacattcagcttcagtgaactaaagacagctaccaatgatttcaattcttctaataaattgggagaaggaggatttggacctgtctacaaggtatgtaataatgttagtttcattaactaatttcttaatcattttttgatgacacaaaactcattatatgattttctttataactcaacagggaagtcttgaagacgggagagttgtcgctgtgaagcaactgtctgtgacatctcatcaagg

SEQ ID NO: 229909 - DNA, 2232 bp, Cannabis indica
aaaactcttcatttctcggtctcgaatacgctgaaaagagtcaacctttacccatctcatgaagtagtctgttaacgcgagcatgtatacattcgttgtccaagagcggtgggtagcttgccaactatatccacccccatttcataaatggccaaggggatccaataggatttaatctttcaggcagtagatgtgagacttaagcgaattgttgccatttgtcacagcgacgaacatggttaattgaatcagccctcattgtaggccaatagtagcctgcggtgagcgcttcattgttgagactccgtgctccaaaatgattatctcattctccttcgtgtaggtcagtgagaacatattgcacctcgtaagatgtaacacatctgagaagaggtctgaaaaatgatctcttgtatagttgtccatctaccatggtgaatctggcggtctttgcttggagtcgatgggattcattacggtcgaccgataattctccattttgtaaataatcgattattagagtcatcgaacacgtagttctcactgggtttgaaatttgattattggtttccctccacacggcgggccattgtaagtgatggactgggataactattgttgacttcgtctgcatggctgagacgaggttggctaatgcatctgcttggctattttccgttctaggaatctgcacaatagaaaactcaatgaaagtagactgtaaattttttaccagatttaagtaggctgtcattttcacttctcgtgcttggtaggatccgttgagttgattgacaataagttgggagtgggagttgatatatattcttttgatgcccatactttttgcgagctcaagttctgcaatcaactcttcgtattcagtttcgttgttagtggctttgaattcaaagtgaacttctttttgaatgacgccaccttcaactgaggtgaggactatgcctagtccactgcctctaaaattactcgagctgtcaaccgatagagtccattttgatttcgactcaacatttagaaatagtaactctttgtcagcttggtcttttgcagttgatgtgaagtctgcgatgaaattagctaggacttgtgatttgatcaatgttatgggctggtagactatgtcatactcactcaattctacggcccactttgtcagtcattcagaaagctcgggcttgtgaaatatgctctgaaagaggtagactgagactacaataatctgatgacattagaaatatggttggagtttatgcgcagcggtgattaaggcaagtgcaagtttctccagttgactgtagcgtgtttctgtatcaagtaatgtcttactcacatattatactggcagttgttttccttcttcttccctcacaagaactgcactgacagccgtgtctgagacaacaaggtataggtagagtgattctccattttttggttccgacagtaacaaaggtgacgtcaagtactgtttcagttgttgtaacgcgatttcacattcttcagtccacaacaaatctttgacctttctcagagtgctaaaaaacaagtgacatttgtctaatgatcgagagatgaagcgactaagcgttgccagccttccagttagacgttggacatctttaatgcaggttggtgattgaatgtttttaactgatttgatttggtctgggttggcttcgatccccctttttgtcaccaggtaacctaagaattttcctgaagatagaacatttagtaggatttatattttctaagtacctcaaattcctatcttaggtggtcgatatgttgattaacaacaagggatttgatgagcttgtcgtcaatgacttctatcgtgtttcccaacatttatgcaaacattttgttgacgagtctctgggaagtagctctagcatttttgagaccgaacaacatgactttgtagtagaaagttccgcgttaagtaacaaaggcggtcttttcttggtcgtctagatgcttgagaatctggttgtagcctgaaaaaggcatccatgaaactaaggagttcgtaacctacggtcacgtcaaccaccatgtcaatgcgtgttagaggaaaagagtccttcgtgcacgccttgtttaagtctgtaaagtcaatacacactcgttattttctatttttcttcttcaccacgactacatttgctagccaatccgggtagtttacttctctgactgaaccaatat

SEQ ID NO: 229910 - DNA, 931 bp, Cannabis indica
gccgttaaaaattcctcctaaactattgagattgttagatttaatgacttttgtctaatttcattcagttttacagtttcagtgattgtttatgtactaaaccatgctccctagactttgatatctaccaaatcatgcccttcaaactttgatatgtactaaatcatgcctcctgaactttcatccatgttagaattttttaactaattcagggggaatttttaacggcaaaaaaagttcagggagcatgatttagtacatgtcaatgtacggggaaaaaaaatcgtaattagccttttaaaaataatttttaaggttatctaaatgtattttaaatgataagctaccttaatatagcttaaaaataattaattaattaccatagatgtatacaaaagagttttggaggtaactaaaatatatctcaagttatataatataaaaatgaagtttttatgtgaaggtaactaattgatgattcttatcaacacttttagtaattaaaaaatcacttttaaaaatacaagaaaaaaacaaaaaacgtcaaataggtaagatttagctaacgtgacacgttagtaatagtagtaacgttagtaaatgcaaataaatatatatattattgtaaaatttcctatataatataataaatttatagtacattccgtaaaaatttgcttatatttcattttttctttcttttgacatttaaaaaagttatttaatttagttttattataactatgtatattatagttatatgaggtattatttgtaattttttaaaaaatttcaaaaaatttatatgtactgttgaaataaggtttaaataattatttacgtataaaaaataattaaatatatagtaaaacatttaaatcttacttttagtattataaagtattcaaatttttaaaaataattttataaa

SEQ ID NO: 229911 - DNA, 867 bp, Cannabis indica
agttaaatttatactaacactagggtgttatatgtatataatgtaaaaataacttaacaaagtgagttaattaattttgtaatgataacatttgtctaaaataagtaaagagactgaaagtttgttctaatatgaacttttattgtttttcactactcactatggatcaaagaatatttgttcatgtaaataatttttgttgtgtttttttttaaatttctagatttgttaattcggatttactatatttaagttacttaaaataaatttgtttaagttaatcaaatgtgagcccttcaaatgcacaatgcaacacaaattatttacaaaaatatttgattgttataaatagactaaatatcattcctttgatagatctattgtcacatctttcttcctctcatttcatctcacacattcttcataaagaaaaatgaatcaattactatatagatcaaggcatgatcatcatcatcatcatgaccattatgttgtatcaaaacggctaatatttgtgacattacttgatgataataacaatgttatgaatattggctcacccttggggaaattcaaaggtgtgtgccacaacaaaatggaaattggggtgcacaaatctatgccaaccaccagagaatttggcttggaacgtttaagttcagagaaaggcggccgccatagcttatgatagcgctaccatcaaactccaaaatggggacataaatagaaactttccatggactaatattactctccatgagcccgattttcaaagtcattacaccgtggaaacagttctctaacatgatcaaagatgcttcatatcaaattgaaattcgaagagtttattaaaaatgagtatggaaa

SEQ ID NO: 229912 - DNA, 1106 bp, Cannabis indica
gaggaattcaaaatattaacagatacatccgaagtccacaaaatcaaaagaccccccctaatcctattctaggtactttaaacacatggtcaaaaggaagactacgacgtaagctatccccacggccagcagcagctttagctccatgatgaagagaaaattcagtttgtgatttttaacaaaaagggagaggtttcggaatgcccgagggctccccaaacctcgggcattccaactcataagactcatttttctgggcggggttgccccgcaacacccgcctgttccaacgaaagattaatagcagaagaaacatcaacaattgtaggaccagctcgagcacgcttgagaatattcctgatagagtcaccaaccacgacagtttgagggaggaaagcagcccttttagcccccgcaactgctttacccttagcatttccaaaggttcttgggaaaacaccctccatagcaatgccctcactactactttcactagctgtgaccatagcatgctgggtagttgtgaaaggaaggtcacaaagaacagtagaatgaaaaccatcatggctcaagggtgagccctcatgagaaagaccaatagaactatgaacatgatcgactcccagagagccaatctcagtaacattaccgcgagaagcagcacctaaggatccagagccaatgtcctcagtggtaagaaactggctcacagcaacagcgagggactgatccacattctcctgctgagcaagaagttcatccagtggaaatgagtttgaaagatcaaacgggtttcttttgaaagtcgatttggcaagagctttaagcggtattttataaggaagatcaggtggaaatgcacgatcatcatacttttgaaggtaagtaatacactttgtaagtgtgtgatcaaacatgccacagtaataacagatatttggcacgttctcatatttgaaagtgagccacttctcacggtggatactcttgaaatcaaccatgattccacgagtgatgggtttagagatatcaatgagaacacagactctaagaaagagttcagaaactttgaagagagtaagtttgtcaacctccaggaaatcccc

SEQ ID NO: 229913 - DNA, 3499 bp, Cannabis indica
tttttttttcttttttcttttgattgaagcgtcttattagagttacaaaatctgagatttgatcccatgacccccacacacacacccctgtaagccctattgagctagcctcaagtggttttatcccgtttacttgttacaacaacctgagtgtctatcatgggttgaattcatctccaacaaaaactaacttttttttttgaagtataacttctttttatttgtagtagttgtcaaatgttacttgtgcatttcactaattctgattatgcgctatttgcttttatggtcataagtacaaatattttatctgaacttggtagtcaaaatgtctttaaaactacctaaagatgcatggataaggtgtactttctgtaaactttatatgttttgtacactttttgtagacattctctaagaatgaaagtttgaggtattagtagtatatgtgttgttatgtaagagatttaacctatcatcatcatcacgtgttacggaaaagtctcacttcatgtgagttcttttattttttttttcttacattatgtcatctccaattaaatgagcagaattgaacatttttggtttggtttctcttccttgatatggtgcttgcaaattataggttaattaatttaaataatgtttcatttgagatcattattgcccacttaagttgacagatctgaagtgtatcaatgatgttacttgtcatttaattttgtgaatttaacttcatttgaaatctttgcaaacctatcctaggaaagtagacatgtgtgcctatgaataatttggatgagagaagtgatgatttaattttacttttctaagaaaggagaatgcgatatggggttttataaccaccattggcacaatgagtagaattataacattgcatgattttttcttttcctcttgtgatgcagggtcagcatatggtggttccctccatgcaaggcaatgagtaggacacttgagcttttcattttcagtttccttctctatcttcttttatgcactccatgggtggcaaaattacattagttatatcctctttatatgaatattctaattcagtctaagaattatgtttcaaaggctctctttcccattgggtagggatttatttttacctggttaatgatcttactcatctgcagttgtgtaatgtaaatcacttgtctctcttcgtagtatagtgggctcgccatggaagactgcttagatgtatggctccaaaacctatgaaccgaagtcgttcttttctcatttttgcagtatatatggctagtcagcattattacgattgtttttcttctctgcacagtgttcattttgattcatattattacattacatgaacgacgtaactcactcaattttgtgactttttccactctatatacattcaaagaaaattgatagtgtaatttttctacaaaatttccccaaatgtctccttttcccacgttgaatgtttgtatccttttttccatgtgaaatgcagaacaatgtgtaaacgtaagacatgaatagtctaatttttttttttggaggatagatgacaatgatcaagttattccgattagtgatggaaatttggcatgcggggtgggtatccacggtacccattccaaatggggcagggattatccgtcttaatgataatggtgtggggtaggatgtaattttatatacttaaagtgggtttggggcgaggttggaagtgatactacttactctatattcgatctatatatagtttttaaattttttatacagttttctaattagtacgtataaaaagttattagctatacgtacaaagttgattattaatcttaatttactgtgtaataaaatctttttaattggtagaatatttattttaaagtttatatctttgtacgttttattttcattttgaattatattacattattattttcttattattattgttttaatcttaatgagtacctaatgggttctcatacttaatgggaattttgttttcgagagtggggatagggggcataaatgggaaatgggaacaaggttggtaggtacattatccacttattattcactcaatttttattattaatttagactcttacaatttacaaagtttctagtcaatctgtatctaaaaatacatgttggaatattttttattttttttttaaaaaaattatgactatgttcgttacaattacaatatcttttttgtaaacttttgaataatttatcgtgatgacaataagtttaaaattttttagcacatggggtaaattaaatatttgaaactctattttcagtgctgtaactattcggaatttttttaaaattttcatagatgatattgtaacataacggacgaatcttgttataacaaaaaaaaaatcatcaccatgtaattttagatatagaaataaactaaaaagttgtaataagagtttaattagcacttctctttatgctataattgagaattgttctgaatataaaatcaaaattcaattctacaaatataaaatgtgcataaatttgataccttaggctaaagtgtttaacatttatcatgtaaatgtagaagccagttgtcgtcatttgaaattggttgttgtagaagttaaaagttggaaggcaaaactatcatgttacatgcacgtgaattgatatgataatggagagaagagaatgaagaaaatagctcttaagtagcgtggtgaaatcatattatggtcagtcaaagggccatttttattaattccttttcaatttccataacaaataaacataaataaatatattattgatgtgtgtattcattcccccacatcgctcacgacgtgacttattttgttggctccacgcgccagccagctcatcaacagggcacgttattgcattttctaaacacccttttcatgaggatctacctaaaaccctttgggaatttccttcttattatctttgataaaatagaagaataacaaaaaattaagaatcataggttagcgacttcggacccaatattaagaattctatgacccaatattcttcttattttttgttaatatttgtcaaaaatagtcgttcaattgatatgatctctttatttggtttggttattagagattgtaaggaaatacttgctactttgagaaatgtttctatttattttgttaaacggtcagcgaactcagttgctcacgcttctgcaagagcttctagtttttatcctgattgtgttttcagtttggggatgtcccaactgagttgcttcctagtttagttgctgaagttcaagttttataaaaataaatttcattcaaaaaaaaaaaaatagaagaataacaatcaaaatacaaataaaatattaagggtactgttaagaaaattttagaaatggttgtaaggtactgttaactctagtcagggccggcccaagcattgggcagcttgggccattgcacaaggcccccatttt

SEQ ID NO: 229914 - DNA, 1734 bp, Cannabis indica
ggagaggttgaaagacataaagcccgattagttgccaaaggacacaaccaacaacatggcattgactatgtggaaacttttgcacccgttgcaaagttcaacactctcaaacttctatttgctctcactaccataaacaattgggaactacaccaaatggacaacaacaatgcctttttacatggtgacctcactgaggatgtatacatgaccattccaaaaggctatattcatgatggtccccttcccccgaatgctgtctgcaaactcaacaaaagcttatgtggcttaaaacagtcatctcgacaatggtttgccaaactcagctcaactctccttgatattagtttccaacaatcccccaatgaccattctctattcattcgcactacttctaccaattttctagctctcttagtttatgtcgatgacataatcattgctagcaacaatcatgctgatgcatctgctttcaaactattcctacactccaaattccatctcaaagaccttggttcccctcgattctttcttggttggaaatagctcggtcaaaagcaggcatagccatttctcaaagaccatttatactccaacttttatcagaatcaggctcccttggtgtcaaagctgtatccacaccaatggatgcaaacatctctcttagcaaagataatggaccaccggttgctgatcctacttcctacaggagtttgattggcaaactcctctatctcaccattacaaggcctgacatcacttatgctgtcaatcgcctaagccaatttctccaagacccgagacaaccacacatgaaagctgccattagaattctacaataccttaaaggcaccccgggtcaaggcatttttttcagctcccacaacaccaacaatttccaacttcatgccttcaccgatgctgattggggcacttgccctgacacaaggcgctctataacacggatattgcatcttcctttggcaatcctctcatctctggaaatcgaaaaagcaagccaccgtgtccaaatcttctgcagaatctgaataccgctctctagctaacaccacatgtgaaatcctatggctcttcaacatcctcaaacactttggcgttgatcatccacaacctgcaacaatttactgtgacaaccaagcggctctccacatatccgagaatgcagtcttccacgaacgcaccaaacatatcgacatcgactgccatattgttcgagaccaggtcaccaacaaccggctcaaacttatacatgttccttctcggcataatgttgcagacataatgaccaaagctttgtttcctactcaacacaagtttctcttgagcaagatgagccttatcaatatctactgctcaccttgagggggcgtattagaatatacacactattctgttattattagttagctttactgttataagttagttacaactaactaattacctgcttgtatcaattgtctatatatactttgtttccctcattattcaataataacaagatttgattacactaatactgagtacccatacgaatatatgatttgattgtttcgtgggcttagaaagtcttttagtatttcagttcatatgcttgacgagtttgagaatgggtatagcgaagtagtgagattgaaaagtaatattaatatgtgatagggtagtgatattggggatcagtatcaatgtagaatatactactacaatgaatct

SEQ ID NO: 229915 - DNA, 1095 bp, Cannabis indica
attccccgcctaaataaagagcaggacgggaacaacaataaagacaatttttaatcctcgagtgctaaaccgtggcggggatggggatagcaaccccaaccgatgagcctggtttaatagtttttttaattatttatatataaatatatattgtaatattatttagttattatacatatatgcttatgtgtttttataattttctagtaacttcttaaatatatttattttatgttagaaaatattatatgttttgaagtatatatatatattattttttttattttatataatttatttttatttgtttttaaataaattaataggttctctatggggattaccgacttcaacggaaatttctcgcctcgtccataaaagcatctatggtagctttttttaaaggtgttatataactccatatcatctgaaaatataatatttttttttttctacattattttcgatacctttatttctaaaaatactttaatggtataacactttttaagaatgctataattatgatctcacatgttataatatatatatataaataataaatcttttttttttattaaactattatgtatattgcacttttaattttttattttaaaaaaaaaaaaatagggtcaatgtcatggtgtggcatcaatgtaaatttctaaaatagcactcctttatctctaatggtatatcattattttattcttccacctaagtttttacctcataagtattcttcacaatactatattattggcgatgcttttaaatgatatatgtacgaagatggaggcaggcgtgcgtaaattgttaattaataggcaggtacggaggtactctatggccttgggtgggccatggccctctttcaactttttatgaaattatagtattaataatatattaggtaaagctaattaagaaaactataaattattaattttcttactttaattataaggttactattataagatatagattatattatatggcactttgttgtaattttctaaattaaaaatgggtcattaagtaacatattttttttagtggtaaatattattttagatttggtgttttaaa

SEQ ID NO: 229916 - DNA, 1762 bp, Cannabis indica
gttcgtcccgtactcaccatggtcgcgattggtgattgactcttgtgttcactgctctcaatgaaagcactaagctgttgacgtagttttttatcaacgggtctgagaagatcgtaaatgagcaagatgaacacaagtgaatgtcaaacaaaagtaaaccaattaataaaaaagaaaattaacgatgatgaataataaaattttatagtggtttaccccctttcagcgataataagctagtccacttgtagttttattgatctcaatgctcaagaatagttctctagagttatgttctcaagagttgagtcctcaagtgaatttttaaatagcgtaaattagagagagttagagtgtccctttacaattgacttcataacctttatataggtttgcattgtagggtttaaggtttcttaacccgacaatatttttgttcctaactatagttgagttaagttgaaaatataaataatattccaaaacaattacctccaaaaaatgataattcttgtagataatcttagactagctctgatggtacatgcctagcacgaaagtgtctcttcacgtagactcaagttcgtacgagttaactgaaggttgttggtcacgtgccttcacaactagctttgaaggtcgttgttcatgtgccctcatgactctagcaaatcgttggtcacgtgtcctcacgactctagctttgaaagttgttggtcacgtatgctcacaactcgagctctgaaggtcgttggtcatgtgtcctcacgactctagctttgaaggttattggtcacgggtcctcgcatgtcctcacaactctggtcatgaatatataacctccactttggatgtaattccactttggccatgagtatacttgagtggacttttcatggtactcggtgaacttggtcatatgggtactcagcgaacttcgtcatagtacctggaaaacttcttcatgacacttgggaaattttgtcatggtacccgaggaatataatattaaaataatattataatattattatttaatatatattaaatgataattttatttttattttatgataaaataataattaaaaaaaatagtgaagatgtcattttaagcttcattgtttgatattatttttcactttaataataagcatttatttaaaaataccaaaaatatatctatatcgaattctttaaagcattctcatgggggttactcttagtaccctgcatacacactagacaaaccgactagtccaacacagagaatcttcaagtcactcccacggatcatagagacatctaagtaccctaaacaaaatcatgtatataacacttaaaacattttcttcattattttttttctttctcaaaggacctaaatcaagtatttttttttcttttgcctagcctttgaaagctatatgtgttgttcaagtcacccccacggattaatggacatctaaactctaaacaaaaccatgtatataacacctaaaacattttttttttctattaatttctttttttgaataagtttgagaaatactttttcgaataagttgaaaatacttttttatataacacgcctaaaacattttaatatttcattacaatgttcctacttttgttattagattgtcaaatatactcttatctttcactaagtataacacataatttacattaacttaaaaaagtaataaaagggacatcatttataaaaatacatatagcttaaagaatatggaaataaaaa

SEQ ID NO: 229917 - DNA, 2126 bp, Cannabis indica
aaattgaagagagatgatgacgaagaatgagagaaccctgtaatattatatcgatcattgtattcatcttcttcaaatttgtgggcgagagaatctaggagcaccacacacaccagttctaatcgtcgatccttcactgccattgagaatactaaatattcaagaggaagttaaagaacccatcagtaagactcatttacttcgatctagcgttcaacatcttgatcatctttctttgataggtatatttctcttttttatctttatgaagttttgattattgtcagggtttggcattgtctttcaatccttgcatttttctatgagttgttggaataggattttaggcttagagtggttctgaatgttttgtagaaataagacatttagcacatatcgtttgtagtcttgactagtttcagcaaaaaatttccctttatttttgaatatttgatcaaaataggcaagttttagctatagggacaactaaaattgcttcctctatccaggacccttatggttgtgggtgataagtttttgtactttcgattggctatctatgttcccaatttgattgtttggaattcatactctttgagagttttatttttagatgtagggtcaggtggggacttcgccatgcagttttaggggaggactctctcgtgtcgctgctatcttctttagtatgggtatctaacagcttggttgttttatttcttattcttttctagcttctaccatggtataggttgagcaacatgatgaagttgaagttttggagcatgaagttgcagctcccaaagtggtgtacaattcctctccttgggagatggattagttaaccaataagttccagaattatggtaatctctagaagtatgagacaaaacatggcctccaaagtgctctaggtttcttctggaataggctctccgtcttcggggagtcaccctgtaaatgtgcagatggcttcagcgtctggagctgggcccatattgagatgggggctcatcttctgctcaggagctacctaaccaacttttgtgcggtactacgcaacgtcccgttccaattcattccctaagtttatagactggttgtgggttggtttacgctctacaaagcgaagaagatggaggtccctactccgaatgatgttttctagttttatcaagttaagcctcaacctatgcgaaagaacaagagaaaaataggcttttactagcttgagaagatcttcaagtccttaatatatccaaccagcaccctaaagtacactcacaactttagggactattggtttttcaccacgagtttcttgttgaagagggttctgaccctttctttagatttttgtattgcgagtaagtggacttactctttgttatttgcttccgctatccgaaattttgttgacctgacatggcatgtccacttaagcaaagacagagtacaagttgaacacagccttgccaatagcaagataatgtctccttacaaagtatggcaaaaccgttaagcagcaagcgaaagaagtgaagcgatccatcaagtagctgtaccaacatgtctagccaaccaaggagagtctataggccggccaggaagagcttatatggccagccaagatctgggcacaagctggccggccaaaaggtgactttcagaccaagggagcttccgttcgaccaagggaacttgacctctactaggaaaaggtgtacaaagttggcctccacttgccaaaggctgacctccttttggtaaagctgacaggaacatgacctgctagaccctggtaggggcatggccagctagacctcaacctgcagcctttacatggccagccagacctcatcctgcaggtgtatggccggccagcttctccctagcaggacattgatgtgcatttttcacctatggacagcaaactaagctgcgagttgagccttgacaacccaataagatgctacgaaaatatctaatttcaaggggtaacttagtcatttgtatttaataattttatatgtaaatatctatgattttatctgctaattagggtttatgctctcctatgtaaagggtctcaaccctagaaatctaagtcactctaagtctcattt

SEQ ID NO: 229918 - DNA, 1074 bp, Cannabis indica
ggacagggtgatcaaatttcaaaaacaccatttagtgcctaatcttccgaaaatggtagcacggaaaaattatagaatgttgatatcaggtaatcttcctagaagatattaccatgtctccattaataaatacttcgtacacaaagtcgattttcgagaaattgaagcacgtaatgtgcgatcgattgttgtgacatttgagtcactacataaagaagagaggacacgaggtaatcgacttcttgatattacagtgtctagatttatatttatacggacactagatatgcatggtttggggataaacagagtaccatcttctattacaaacttgaagcttctcaagtatcttgatctttccgaaaatgaggatataacagaactgcctcattcaatcaccaaacttttaaacttgcaaactttgaaactctcttcatgttatgggctaaagaggttgccaagaagagggtttgagaatctgatcaatctcaggcatcttgagattgatggctgctacaatttgactagtcttcctcgaggcattcatcaactgaccaatcttcagatattatctcaacttgaagtaagtgatcagggcacctctccaaatattggacttaatacatttaccaaagaggctcatatcaaaaatttggggcatgaaaagtttgatatgaacaggtatttgaatgatgtggtatcaggggttcaatcattgtctttgcaatgggaaagtaatgcacctgagtccaatgagcacaaaacgccactacagagtgagttgttgttagatcttaaagaattgactctgcttggttttaggggaaacatcttattctctgctaactgtccaaacaatttggtcaaactttcattgcgcaaatgtgttaactgcagaagcctaccagcacttgaagggttgtggaatcttaaggtacttgtattggatgaacttatcaaactcgaatatatttcgaagaataagaatgcttcttcagtagccacacccttctttccttcactgaaagaactatggctcacagaactacctaagctacagagttggtggagaaa

SEQ ID NO: 229919 - DNA, 1064 bp, Cannabis indica
tagtaattagctcatcaattttattacaatttaaacatatagagcatgagtttgagctcgtataagaaaacaggttgctttattcaagaaaaataagttggcccgaataaagaacaacacgaattcgagtacggtacaaaattactaagcttgacggtcataccaggcctaccctgtaaaattgttacacgatacagcacgagccatattttttatgacacagtgcggcatgaactatattttttataaaaaaaatatggatcatgctagcataccacacacgtatttaaactcaaattttgcgtatttttatatgtaaaataaaaattacgcccaccctaaaacataatatctttcattctatgtaatatcaatttttagtcaatggagcataaccattacacctttataattttgaatgccataacgaaaaatctcacaatataaatataaatgtatattatacgaaaatgaatcaagtgatcttataagtgtagaagatgaataagcaaacactttccttttctcatgataacattattatgtgcaaaaccttttatatatatatggaagatgcttcaatggttacatcaaatatgtaaccatcatggttacatttatgtttagccattagatcattattgaataattgtgattaatttactaattaaaataaagaaataacttataatcgtaactcgaaaatttatttccttataaaattttaattaatattaattatatgtaaaattaaattactaataatcattaattaatttttttaaatttgttactaaataataattttttaaaaattaacctttttggacttaaattattaaaatatttataataaaacaacttagaatttaaaaatattacacacataaccttaattaataaaaaataggaagaataacctatttaatattctacactcaatcttattatcaatactttaagtactaaataagtgtgcaagtccaagattggttcaagtgatttaatttttttttctaaaaaaaaataaaatactaatagcaattataaaatgaaagataatt

SEQ ID NO: 229920 - DNA, 2031 bp, Cannabis indica
caggtcagcatggtgacagagtgtgataccaaattggaccgattggcaaagtttgcctttaatatagtggccgctaagaccgctaggaaagtcaaattcattaagaggttgcaagaccgtatcacgcgagatgtggttataattgccaaataacctgagtttattcaaacctatgctcatgtgattgagttggccattgctgctgagggtgcaaaagaccagattcgtaagagaaatactatgacaagagattcatcgaagaaaacatctaatgttggtctcaataagggtgttgaccctagtgattgcacaaaaaggcctaatgaaccgtcagctacgggaccgaataagagattctaaggtaaccaaggtttttgacgtggttgaaacaaaaattggcaaacttatctagagtgtctgatgtgtaagatatgccatcaaggcgaatgtcaagctagaacctgcttccagtgtggggtagcgggtcatctgaaaagaaactatcgtagctacaatgaccgaatcaaaagaaggatgacactttagctcctgcttgggtatttgccttgacctaaggagatgtcgatgctggcccttccattgtgagagttcaacttactattgttggtactttattgaccgttttaattgatttcggtgcgacgcattcctatatttcaagtagagtgattggaaatttgcatagacctagtgatgttttacagagtggttttggtaccttgcaagctactggagaactggtaatttctagcaagtgggttaggtcccttctagtgtttgtggaaggaaggaattgtcagtttatttggttgaaccgaatctagaggattttgacattatgctaggaatgaactggcttgcaaagtataatgcaactatagattgtaaaagaaagatggtaacttttgaaccaaagggtgagaacccatttgtgtttgtgggcaaggttcaaggatcctaaagaccattaatcttggtgcttaaggcaagagatttgttatggaacggatgtattggtttcatagccagtgtggtggatactacaaatgaaacaccattgggaccggaacatgttccagtggttcaaaaatttctggatgcctttccagaagagttaccaaggttaccaccaaagcgggagattgattttgaaattgatctaatactaggggcagagcatgtatctaaggctctgtgtcgaatgtcacatgcagagttgaaaaagttgaaagttcagttacagggaaagttcagttcgggaacacaagctttatgccaaattcaagaaatgtgaattttggctatctcaggtgtctttcttagggcacattgttagcaaggatacgatcaaggtggatccaggaaaaatagaatccgtcagggattggcctagaccgaaaaaagtgacagaaattagaagtttcttgggtctagctggttattatcgccggttcgtagaagggttccctaaaatctcaacacccttaaccgagcttacaaaaaagaatcagcgctttatatggtcagataaatgcgaagctagttttcaggagctgaaacagagattgattacaactctaatgctagctttgcctactgacaaggaaatgttcgtggtgtattgtgatgcatccagattgggtctagggtgtgtactgatgcaagccgaccgggttatcgcttatgcctcccgtaaagtgaaggattatgaacaacgatacccgacacatgacttagaattggccgcagtagtatttgctttgaagatctggcgacattacctttatggagaaaggtgtgaaatttataccgaccacaaaagtctcaaacacttctttactcagaaagatttgaatatgagacagaggcgtcggttggatttagtaaaggaagttacgtatggtgagattctttattcaccactgggtaagggaccgaactgtagtggtcggatgccgtcgaggcaggaagggtcccggggccgaggtaggctagcatgattcagatctc

SEQ ID NO: 229921 - DNA, 1017 bp, Cannabis indica
tttttcattaaaattaaaaaattatcacctacagagtcaattattacaaaataattgactctgtaggtatttttattaaaattttattatattgctgaaaaaaaaaccacctctaaaggcttattttctagtagtgattatctcatttatgagataagaaaagtgaactatgagagttacacttatgagatttgtcttgtcatagcaagaacaaatggatcaaaagtggatccaaacttgtgaaataagtcataaaattagaagaaaatttttagactcaaataaaatgaatcaatgtggattcaaaaaattgtgaaaaggtaggtaacaagtaattttgaatcttaaataatcaaagttgtgaacataattgatgagaagtttgtaaactttagtataatattttggttaatcttattgaggagataattttaaaatgatggataaaataatcacattatttggtaaatggtgatatgagtttgatattttatttttgttaagaagactaagaatgtcaaatgatattttcttaataatgatctaagaggtatttaaaaaaaaatgattaaatgaagatatttaaataatgtggaaaaaatttagatagctaaattggtgaaaagtggttcttataaaaaattcactttatgctagaaatgtgggggtgagccacaaatttaatcaaaatgtgttgagacattattgattaatttatttgattttgaattcaaattctaaatcatgtttggctatttgcatacgtgaaaattttaactatttgatgtcaaagtttagtgaaaataattgcaagaaagtaatcaattaaaagagctatagagacaaagtggtcttctatattttaaaattaagatattatcttgatagtaaaatgtgaaagggtgggggaaatactccaacgtgaaaaatttaagacatgcttggtgtcttaaaataaagtacaatttagacatgtttggtgtctaaattagtgtttaattttgatatgcttggtat

SEQ ID NO: 229922 - DNA, 3827 bp, Cannabis indica
gttcagtattttttttagtgttaagtaatagtattagccattaggttcgaagaagctatgttcatttaattttttcccatccttttctcaccacgagttaactcatatccttgtaggccaaactacccaacaaaatttatttccatttgttaaaggagttttatttacacccaaatattaaaaaaaaaattaagtcaatatatacatattattttatgttaattttaataattatttttaattttttcatattttttttaaaccatgtataatattttcgttctatgagaaacttttatatattattttattttattttttctatcataaattttaacatatattttatttttatattatgtgtactttttaataatatgagaaagcaagaaagaaattggaaaaaaaaaaattaatataaattaaagatatatattttcataaaattaaaacataaaattatactcaatatgtttataattctttgggtacaaataaaactcctgtattttttaaaggaaaaaagaaaaaaaaaatactttgactttatacaattacaataatttttaatgtatcttcaaatacataaattaaataaagacaatgggcttcaacgacaattataaactttatcaactataacacaagtcctattcataatcaaccgcaaaaacaacccaatatattatatagttcacaactttcttctatccttcaggttgaaataccagaacataaatgcatgttaaaatcatttaaaaaaaaatccctctatgttacagaaaaatcttaagaaggtggtatgtttttattattattatttattttcctgagcaattttttcgattttcaacaatgacaatgggttaggtttgttcaacagaatatcatcgcttgagttgcctcctcgccaaagcaggaactttcttagggatgtacactttgtagctcacctggcagcaaaaatactgagaatcaatacaaccaaatatacactcgcaaataaaaagaagtaataataataatagaggtccctcattaatagagtaaaacttgcgataggccaaatcacccacctgtaccatttctccacctcgcattacagacattgtcttctgttcaaactgtgagccttcctgagcctcctcttgcagtgtatcagatttagtatctcctggtgaggatttaagagaaggttccaaagcagcagagctactggcattactgatgccttcaccatcattattgttgctactttgggtcacagttgggttagttataacagcagtctcatctaatgttttctcatcaaccaacaacttttcctgagttttctcacatttgggagcttgctttagcgttgaatcagttttagacaattgtcgtttcaatgctggtgtagccaactttgatttgacagtagaagtgcctgcattgagcttttgttttagattatcagcaatagccatctgaaatgttgagcgagcaatattatgctttgtagatacaaattcattgcggccgggactcttagctattatgttttctttgatctgggaagaatatgtggtaacattccctactgcagggatgccctgctgtttcactgatgggggttcagttgatacaagctgttcaacacaagcctctctaggggaattcccaccaaccactctactctcatcttgctcagtgaacttaatttgagcagattctgcctttgtggtagatgattgtggtgccttctcatcaacattatttttatccttctgattggcagaatcagttttcccattagtttggcgacctccgcgaaactttcttagattttccaaagccttttgtcttaaaactaactctaggtcatcattatttccactagtaatagcatcaaatggctcagcttgtttttcatttgcaggatgatttgtcccatattccttagtgctaggatcacttccaacctcatcatccctatcagaaaccttgccagagttcacaagtttggggaatctgagatgtgagacagcagtttcctcacctttctcattctctaacctcttgctccccacatcattactatcattgcttctagaagaagggtaatcatcataatcaaataccatctcttctttatgttcatccttatttaactcttcatcaggcctttctgctatagtaataactgatctcaaccgccttgaggtgttctccaccaaaactccctccttgctctgataggtactactttcactacactgactatatgaaggactccttgacccatatctactccttttaagtggggattcagccttccccaaatttctttcctctcttgcacgcttactacttttgtgcttctttaagtcaacttcatgtccatccttacaacttgagcagctcacagacctgtcgctggaagaactaggagtatcattcctcctgcgtttcttcttggaataatttttattcttagcctcataatcatgttttctctttgacccttttctcttcctcgcacgagaagaatcctcactactttcactactataaaatcgactcttagccttcttcttatcctttttggtgtgactccgagaccttttgcttctaattttcaaatcttcagaactagaagagtaagatgaacctgacattgaactatttgaatcatcatcatcagaaacatgacgacggcgaagcttcttggattcatacttcttgctcctagtctttgttttcttccttgttcgagcctacacaaggaacacgagtaaaaagggaggggcataattagaacttgtcaaatcaaaattttgcagaaaaaagaatgcccaaatcgacgttaaacccgtcaaaattggtttgaacaaattgcaaatgaaaataacaacagaaaatgtgttagcaaactttattagactggtactttcacttagatttgaatgcaaatgtagttacttaatttttgtttatcaaattagtatgaaacaaaactaaattgaagtaaccctaagttaagaagagattgtaaccaatttcacaatcaacgtccgaacctaactttagaaacaaagaaaggaaaatagaaataaaatggtattcaccagaaaaatacagaaaatgaatcaggagtgaaagaaatgcgtgaatatgaaactactatgttgatcccaaaagtataaaaattgaagataacctgagatgaagccttggcattggagcggttcttcttgcgagaacgagaagaagatttagccatagaagcggttatacctgcaaaaatacttaacaaaaccaaacaaatcagagaagagaatcgaaaatcaatggatgaaaacgaggaaggcgaatcaaggcggaaagaattgatttacagttctcactgtttcttttaaatgcaataaattaaatctactgcgtgtgttttttagattaagttaccagatggattctgtttcaaaaaaaaaaaaaaaaatcttaccaggattttcttaaaaactagtagccaccttactcaacactatatagcatcaataattagtcttcctaaaataaataattaacattgttttccctgatggcacttcaacatacccttaaaatattagttaaaaaatcctcgtaaaatatattattatgtctcttttcttagattagtggttaaaaattaaaaattttatccctcaactttaattaatataaaatttagggtgattctaccatgcacctctttaaaagagatgtactgatgcattctctatttattacgacatctgaaagaattttttagtctaatttttttaatattcatgtacgttata

SEQ ID NO: 229923 - DNA, 1661 bp, Cannabis indica
aatgttgacccactttggcccgttgatcggaagctactacatagtttccaaaatttgttagtgggaaccattggaaacaagtatttgagggacgtcttcactggtgtacatggcgtggcttggctctagaagctacttactaaaagggaatggctttctgatgatgatggtgtacaagtatttgttgttatttactattgttatttgttttattttctccaatattataatgtgctcgtactgacttatttgtatgaattgtgtaacatttggatgcagttttccatatgatgaggagaagccaacacttcttcccagagttgtacccacgtaagtgtactgtcatgccatcttagttttcttcatcgttgaaggatcgatgggacatttggaaggaaaatactgaccaccctagctttgtctaggatgagtccatcttaaaactcgttcattgggatccactccaagtcatgccatcttggaaggatatggagtacatatacatggccatcttcttgagcaacagaaacattaggtagctatggagaaaaatcttaagttatggaaggttttcgtcttcaattcaagtattgaaactctgactattgacgaattgaagatgctgatggacgcttggtgcaagatattatccaaattggtggatcggtctggtttattttacacccattacatggtgatggtccctcaaatgataacctttgaaagctaggtcagaacattggattgggatctcatggacaacaaagttgtaccttagacaaaattgaggtaatttaagtgtatttttgagaatatgtttactaattaaattaaaaaatttattactgttctctatgatttaataaattttgcgtttaattactaatgtagtggcgattgcgtaatgtacgtcatagagcatatcgagcataagctatttgatctaccatttggtggagtagatgatgaccatatgccgctcttttctcagagatggggtgtagatttattctaataaaacttgtcatgaactttgggtgtttctttttattatatttgttgaacaatctatacttttagacttttcaatttgatcaatctacttatcactaaaatcacttcatttttaataaaattttctgtataacccgataggttcgatataagcccgattttctttaaatattttacatacaaaaatttgcaagaattatatgaaacatgtttatgccacaaatgtttaacaaagtccaactataattcaacaagaatacacaacagtacaacacataatagaagttagttttaccacaaccctttctccattacaaatagtttggtttgacttaattcttctaacattttgcttctttggttgccctactagttgcttctcaacaggcactccaactgtcatgttctttatgtcatcaggcaactcccaatcatcctcatcacaaactgttatcattgtgccttcatatgtgctccttcaatattctattgtgtaatatagtgagcataatgcgtacatgatttagaacaagcagcaagtgcaagccttttcctgcaagtccactacgactccagtcttaactaatcctccagggtggacattaaccgtgtaaggaccacatgtgtatgttgggaatattttacca

SEQ ID NO: 229924 - DNA, 1402 bp, Cannabis indica
tagactttattggtcatagcctagatcggggggttgtgtcgtcagactttattgcgtgtggcagttccaatacgcctcttcccatgcggcattaaatgcgagatgattgctcagaggaagcctgacaccacccggagatgctttgatgccatcttgctctccgggagcatatgagaccttatatgccttctcctggaggcatatccaaaataatgctttgctttataaagacttagttgtttaattgaaacgctaaaccctttccatccacgtgtcactgtccgattggtccacgtatattgggcaaaattaggggcaacaagtcatgtcactagtattcgatttttcatataataacttattaaataatatgtacaataaaaattaaatctcataatatctgcaggtcatcattaattgagattgatttgacaaaagactgtaaaaaccctgacctactttattgtaaattaacttatttaataatttgtattttataattttaattattacaagaaccagaccaattaagaatagataggtgtaaaaaattagttgagcttctcagaaatttatattaattaagttttattggaacactattttcccatcaattcatatgagaaggatgtactatctagtttcatagcataaaaaatacaaattttgaaattataacacaaacccgtgaagataaatatgtcagaaaataattttttaatttaaaatcaaatctcataatatccaaatatccagtaaagaggtgatgccttactgaaaattttatgtgacgtacactgtgcacacattgaaatacgttattttaagacgttaacttattgaattattgaaggtccagtttatgacgtaccttcaaatacgttcattggaaaaataaatctacattattactgtgttaatatgaatgaaactttgattttcatcttattttttattttttctgaacacgaggagaaactagttgtttattctttgttttttttttttttgttttgatgaatcaattaattaaagttgatacaaaattgtaaccaggccactatgtgtaatattttaattcagttttttcattttttttattattattaaaataggctcaatattgctactgagggagactagtttttgtaagtaccattttactcatagaatcatttcaatactaaactatttaatagtttgaaattatataagaataagatcatataagttgatcttatccaaaaaaaaaatactacttttaattattattacacaagaaaaagaagtatacaatatcagtagatttaattttttcatataattagtgtattaaataatgtgttaattaaaaattaaatcgccaaatatctttaggtcatgatttcctgaaatgatttga

SEQ ID NO: 229925 - DNA, 2332 bp, Cannabis indica
gcaccttgcctcctttgaagaacttcctcggcgtactcctcaatgacgtaatcatcaccctttactaggacatcaccgacctcggacaccggttcccctgcttcattgtaacccccgaagcgcaatggccgagcaactccttcctcctcgacttcagagggactattaggatggacctcgccctggtcctctatttcttagacttcaacgtcccttcactctcctcctcttcaacaaaaggtcgggcctattcagctctcggtagtgtggcaagccgagccacgtgaggatcagtggcagcaattcttcgcatagtttcttttgtgcgggccatcatcctatccctggacggtggttggttggtttgcctagcaacaattacggaaaaagtggcaaaaggaatgccaaaggcaccggaacatggatgacccacagggatggtatcaactacgtctggccggacaatgtatgaccagttggacgacaagtaacgtctccaccccttcttgagttcccaaatgaagcgtccgtagccttaacctgcgatctggtcagagtaaaaatggtgatgcacctcgggttctggggacgctgtaccttcactgctcacctcccaatcctcaaaactcgaattagaaagttcgtcgcttgatgaggatggactagcgtaaagatgaggttgatcctcatacaagagttggagaagatcctggtcgatatgatgttctcctccccaaaactcaccagggttcatctacaaaagataagacacaagatgagtatttggctgggatatcgaacaaaaaacaacaaagtataccgaccaggtccaatcaaaagattaaaaaggaaaatttcacgtgatttaggttcataacccagaatttcaaaacctcaaattaagggttaatccttactaaaccccgaatgggcaaagtgataaccgaatatcgtgaaattaaagtcaaaaagccacaacagtcaagttatatggtcaattacaagcaaagtttcacttttctaaacccagattctaagttttcctagaacaagttcaaggttattgaattttctacaatagaaacccaaaaaattggagattcaaacattaaaaaaggaaaagataaggaacttactcactgtccgaagctttaggttgttcggatgacactgatcgacactttctggaaattcctcaaagaatttgagagaaaaaaggtgttcttgctttgagattattaaacaagaaaatgctaaaagtggtttattaggacttttttgccctatttataagcagattagtgaaaggttgtaatcatttcaaattttaaacgactcgatttccccccaaaagtaaacgttgggaaatcaaaagtaatcaagtacctggagaagggcaaccgtgaaagcatgcgaatcgattggagtgttttgaggtacgaattgatcagagcatttattagccgaataatgaagagatttttggtcagaatcatatcggatcaccaacaggcgcatcgaacacgtgccacccgttcagatacgaacttaagctgagtgaagtctacgcgcgacttcagaagtcccgtgtagacttggggggcaaatgttatcttattttttgcaccatgacatggcaacgcataccggtgacacgtgtctgctattctttacatttggctggagagatattccgaacagacctcagccatacatctgtacggacaaagtctgcctgccgagcagggcaagggcagatgatccggacaacaaacgaagtcatttctccgagcagtgtatcaagacttagctacttcaggattgatatcgtgaagctcaagcacacaagcaatccctacaatcatgggatcgtatcaaagcgatatggtaagatgttcgaatccctcattttatgtattctaaatatgtaatgtatgttcttaccaattatagatattgtaagcaaaatggaaaccttccttcatgcatttagccctataaatagtgatccatcctcactgtaaattggatcgaaagaattgctttagagagatctaagagaaaatgctcataggtttcattgtgagagttttgagagaggaaaccctgtattctttgttctcaagtcaatacaattcaaggggagtagactattactgaactaaagccgccgaacctctttaaaatcttgtgttctttattgcttactgatttttgctctgttatattctttatcgcttattaattgactcactgtcgttggctaaaagcgaggtcaacacattctttaaaaagattatatttattcaaaataattaatatttttacttct

SEQ ID NO: 229926 - DNA, 1332 bp, Cannabis indica
ctcaattctatctctacttgttagaatagaaatcaacactaactatgttcttcccacgacatgttagctcccaaatatcagacaagataatccaaggaccttccaaatttatcaatcctaacacaacagttgaagaaatattgataagggacactaagcaatatatccccacccaaatccaagaaattccatgtaaaggtctctcccaacaacaacaacttccttaattatattttgaaatacaaaattgttcctccattcaatctcctctgaagtattgaagaaagtactcaaataatcaaattgaacaaagtaagtgtaaaacccaattcaaagcctaacaattatgttcatgagattgttcagaaactccttccttatatattaagatccataaaagaaccatctttatagtttaggagaacgcaataaagggattgaacaaaagggcagttacaaaactcaaaattgaagttattattgagaaaatttgagaaaaaagagaagaaaaagtgttaccagtggaagaagtggagtcctggaggagggagcagaaacccctttgggtccaatccgaaagcggcggaggtggagggggaaatggagagaagacgaaaaagagagtgttgaagaggaagaggaggaagaagaaagagctggtaaaggagtggtgtggtcggaaatggtgtaggaagaaagagagagcgccattattgagtgagttgggagaaagagaaaggaaggagttgagttgagttgttctcttccaattttgttggataatttataaaaaataagaaatgttttttatatgcaaggaacaaaaataactttggattctaagtccaatattttccaacatgttccaattacaacacttgtaattgtaaaaacattattaacctaataatgatatgcacacacatcattcacatatacttatgtggtaaataactttaaccaattatttttatttaagaagaatttcatttatcaaaagtaatttaccacataaatgtgtgtcatatttgtgtgtacatattattagtcttaacttaatatgttattggataataatcttgttgtgttttgaatcctaaactctcgaatgttattgctcattgattagcggtttatgatgctgttaagcaaaaatttcacatttagaatattaaaaataaatgcaaaacacaatttcacctatgctaaatttatagcataagagtttattaatttaagttcgacccatccaagattataagaataatctcttaattacaatccttttatttaaaggaaatatcctttgattccaattacaatgacattaaa

SEQ ID NO: 229927 - DNA, 675 bp, Cannabis indica
gattggatgaacacccctactttaaggtgtttaaggttttttgcggttggggcggctgatttttcattagagttttgtaaaggttggctagggtttttttatgggctgaagtacatttagaagatcgcaacctttttagaggcagttatttttttataaccgtctctaaatgggttccaatgtatttcttttgcttttagttataacaacgcttttttttttattgattaaaaaggtatgtacgtagctgaaagtcttttttgaaatggtgatatattaaggaaaaaaactatatgtgtaggtcaaagatgacaattaatattttgcatgtgttacacactatagggttagattaataagcatacagagacgttacacaatcacaatgtttgaattaattatatttagttttaacttaggttggtttaatagctaaaacctctaaagccaaagacattgacaataacgctaaccttaacattaatctagttgaacccgatcgatcatgatcttaaatttaaataagataataaatttacgtaaaatttacgaaatataatattaatttaataacataataaaaataaaattaatatttttaggtaattttataatacactccccaaaagaggtataccgatacacctcttatttgtttcgccatctagaaaaaaa

SEQ ID NO: 229928 - DNA, 1468 bp, Cannabis indica
attagaaatctgatttatattgaaatgtgttttatttaggacataaaacccaacacattgagactattgagtgaagaatgagttattgttatattttttgttagatattaaaattatagaaaatagtacatgaatatttttttttataaacatatagtatgaagtttttaaattataggaataaaaataatgaattaatatttataaatagaaacaaaaaaaaattacaaaaatgatagaattaagaagaaaatagattaaaatatttaaaacaattttagattaatcaccctcatttttattaatatttataaataaaaataataatgaataaaagtagtatgacgtttttaaattataggaataaaaataatgaattaatatttataaatagaaacaaaaaaaaaattataaaaatgagagaattaagatgaaaaatagattgaaatatttaaaacaattttagattaatcacccttatttttgttaatttaattcctgatcttataaatgcttgtagtcacattatattaatttgcataaaatagaatacctaactaataatttttgccaatttagctaaaataatatattttactcctaaataatttgtacgttatatttttttaaaaaaaaaaaaactaattaaacatgaatagtaaatataattgatttttttttattgaattagaaattttgggtaagttaagtaaatggaaatgaatattaaaataactatacatacaatatatatgattatttaattttattataccttaattaatttatataaaaatataatttctgtgattttaaatagatcaaagttataaatataatatccaaaatatatatacacaccttaattataaatgattaattaaataataaaaattaattttagaaaaaaatatcttgtacgtaaaaatttcattaaactaaataaatattgttatttgattataaaaataaaagtaataaatattaataacataaaactaaataaaaatattaattggacaacaaatcaaatttaatattaaaaaaaaacttgactgaaatggtagtcgtatgtcttctttgtattttttctaattcaacaaccacgaaaggccatcacattcaaatttataaaaagtaatctataactatataaaaatgagaagggaaatttgaatttctatacttacataacctaaaaatttgtcccctaaatgcaaagttattaaaattggtaatatatgaccattttatcaattttcctaaattacccctctcatttgtaatcagcctctctcttcgtctctctcagccgatttcccacaccaaacccacacagtcgctcgctcgccgaacccgtgacacccaaacgaccagggaacacagtcgaccaacgcaaccccgaccttcgacgaactcccaacatcgacaatgtcaaaggtatggtttttttttgtttttttagaaa

SEQ ID NO: 229929 - DNA, 765 bp, Cannabis indica
catgttatcatggtcagaatttaatgccttagcaacaaccccatttaacaaatggttcagcttcattaatccagtatctactgttacatgtatcagtcatataaccaagtaaaaaataaatttggaaatcctaatttacttttcctcccatccaataaattttcttatatctagacagccaaagccaacatatataattcacaaggcaatacatattcttgaaaacgtcactataagaaaaaaaaaactcttgttggtcaaaagacttagaggctatttggttgtgttttcaatttttagctctcaaaaaatagttttttccaccacactacttttactttttggtgaaaatgaaagtattcatttgtttaactaaagattgaacataatacttgttatacgtgttttctgataagggatacgtggactctcacagaggcccaccaagaaaattgggcccattatctggcccaaagtggataaaccaatcaactcattcactaagaacgagtaaaaccggaaggttagtccaaatctcataccattctccattgatatatctggatagctagtcaaagattaaaacttcatactaaacagacaaacaacacctaaatctaaggaggaggcccttaggggtcatttgggaaacagaatacaaaagtacgtacgggataggtcattatctcggaggtcgcttgcgtggtatacctctgacacgatctttagaaatttggcgacctgtcccctctgttaaaacttgga

SEQ ID NO: 229930 - DNA, 1180 bp, Cannabis indica
aactatttatagtaacatatatgaaaaaagttgttactccctctttcttccatcaattgaaccattaagagataataaaaacaaatattaactacataaactaatgttggcttgaatattaggaaccaaattttgtgggaaaaggattcacaaagtgttaatagccgtactggttaaggcggattcatagcctatattaggaatataagtgatgtagacaaaaattggattgagggaatttgtttataattgttttaggtggttgggtgtataatataggggtctggattgttattggtgttgatgtaaacattggtttacaagtgaaatacaatcatcttatttatcaaaaaaaaaaaaaaaaaaaatgttggcttgaataaatttgcattttatgagagatagaaaaaatgataaggacatggttggaataacactaaagacatataatatatgtatacatatgctttatttaccatgaattactagttactactagttgaaatataacttcaacggtaaattgaaataaaaagagagatgttttttttagtgggatagagatatatgggaccacaattgcacaaagaaattattattattagttctttggaattataacaagatagaagagacatgtatagagtgtaactaagtcaaaaaacagaaagacgataagaacatcaaatagggaaagacaattcagggagtgacgtcaccactgttttacccttctgtgttttttggtacttattatctcacttattgttatatataaatattgtatgtatatgtgtagagaaatgcacaacagacccaagagctggagtacttagttctatacttaattcggctatactgctaatataataagagtagctatatatttagttcatttagcagctcaatgaaattatataaaaacatgcatacatgattttatggccaacaaggatcactatttatgcaagtagctcatgatgatttatgagcggactactatagctttcgaaatgctcttgtttacggtgtaattcattagtaataatttaaaattgtgttaggctcccttttgaaagttgagtctcctgtttatttttatttttttttattttcttctattgttttgtcacactcctttcttttaagtccatgtcaatctttaaggatgtggaagagt

SEQ ID NO: 229931 - DNA, 1288 bp, Cannabis indica
tacgtttaaaaatcacgtaatatgcctaagttagttagggtgttacaagaagattaattttctaatgaaaaattttgtttattctttatatattacatggttcactcaaaaaggtaagacccaacatacattcaagaaattagatggtgtaaaaaaaaaaactttataatacaacatgcatatattattagatgttctacatgaaagatttcttaatttccacaaacatatttaaacttgagtaaactttctcgcacaagacaccaccattgtcataaccgaaacgaagagcgccgcgattccaacaatgaacaataaaataagggcatccatattgtttccataccaagaagtagtgatgagagtgcaagaaaaggttattagagagattgtagaggcaaacaatgaagagatgagaagaggagaggagactcttccactaattattggcccattgttattattaaaagagacaataaaaatcccaataataataattgttgaaagggtcatacacaatgagcttgtactttttatccaatcttctacatctccaaacaatgttttgtgagttgtattgaacaagtcttgtgctgttaatccttctgaattttttttctctatataatatggttctacaacctttttcacttcctgcatgtgacaaagaagatatatatatctctatttatatatttgttaaaataatataaattaattaaaataacaacacatatatcccttaattattccccaattaataatagttgtcattcgatattggtacctaaggtacttttttaaaaaataaaatattaaaatatagtattatctagtttgcactgtacaaaaaattgatcattgaacatttatttaaatagtagtactttgttttattttctaaagtaaaaaaatattttttaaaaaatatatttagtaaaactgttttttcgttattttttatttttaaaagaaaaatcaaaatttttaaaataaactttatttaaacaattttttaatcattgcctattttataattttatttattaaacatatataattcaaaaaaaataaaaatttaattttcaagtaaattattattattactatatatgaatcaccatatatggtatacattatatatatatatctcaccttgaaccattcaaactcttgtcgaagctgtaatatttttctcatcccataatcatattcatgacttgaagccacaaatgttccagcaagatgtaataaattattaccaaatttgtcttccattagatgtaat

SEQ ID NO: 229932 - DNA, 1000 bp, Cannabis indica
gactttggacttgaggtaaaaaagtgaactgtaccacatagcatgttaaaattatgatatgataattatcgttcatacgaaacaaggcaatgatagtgacattagtaactcgttggtcataagggttaaggatactttataaagtatttcaattggcttatcttatttgacaaataattgattactagcatttgattatattgtgaatatttattgaagttatatgtttaaatctatgttcattgttgcttagaattttatgttatatatgatatttgtgtttttcttgcttttcttgctgagtctttgtgactcacaggtgcttagtggtgcaggtaagggaaatgagaaagtagatcagccatgagtcagaagtgtcctagtgaatgtacatatcagcctctttgtcttttgtgctcagttgacaagatccatcttttgtatattttgaatatgtaacaatattttttaatgaccagtataatggccttttagttaaaagtttgtaaccaagggaatccctgaatccagtaatattttaaaaaagagtttaacttatactttaaataattttctaaagttttaattaaatcaattttttttcttaaaccgttaatttattattatacactaatttataaaagtacacacacgtgacactgggcgttatagagatatgttgggctttgtgccctaaataaaattctatttcaatgtaatcttttctattcaattatcaataaagacacagatttaatttcattacttctttaatgtgttatttggttcatgtgatcatctatttatttatttatttgatttataaattcatccaaacctttatcacactgatattcttatttattgtgttgtcaacacagtggaaagtaaacacgattgtatgattaaatgtattcctagatttatcagtacacagggtttaactgatataataatctacaacgtagtgttggattttatgccctaaataaaactcttt

SEQ ID NO: 229933 - DNA, 1896 bp, Cannabis indica
aggtcaacctgggcgatgggctctgtttttggggagtcgggtctccccaagtttattagaatatttgttatttctgatgaggaaaaaaattcccaaaatgctttttgttgaacttgatcgaaaacagcctaggctgataaaatttcaacctaggggcagggcccagccctagtgtcaacctaggtgctatgtcctgcttttggcccctcaaaaattccgtttggtcgccaaaaatagttgaatctcaatattttctaaagacaaagaagatgctcgaaataattctagaaaaaaaccattttaaatggcccaggttgacaaaatgtcaacctaggcgcaaggctagccccaagtatcaacttgggcgctgggccctgttatttgtgctcaggaattattttttttttcctttggaaggatttatttccatatttttgatgaagaaagatttgatgcaaaagtaggatctctgatcaaacacttggaaggtgcccagattgacagattgtcaacctgggcgttgggtgctcagggccccaggtgctcaaaaatcaacttgctctgattttgattttgttgcctcaaatatgtccatggtatgtttagttgatgtcccaatgcaagtttttaccacttttcactaagacgatcctaaaaactaaaaccctagttgaggatgtcaacttagggatcgggtaaaaccctaggtgcctaagttggcttccacattgcaagttcgtgtaatttcagctcccaaggcttggatcaagttgctctatgtcttcatggtatataatactaaaatatagtgggttcgattcaagttattaaagtccgaacttccatcccagagatcccggagtcaacttgggcgcagggctaatgtcccctcccaagttgactgctatgactcgggtctactcaagtctgtgatgtcatccttcatcccacatgtcaaccattgatgtccacattactagagaaagtttccgggttaacattttccccccacgtcaactttacacttgtgtggagttgacttgatgacgtgaaccaaacccgttttgcttgaaactaccaaataggcatcaattttgacacttaggcacttgtatctattcttcaagcattcccaattttattaggacttttagcacttttgattcgtccttgggaatttcaaaaattaacaaagaaaaataggaaaaatcttatctttttttttttttcacttatcttttatctctttctttgaaaatttgaaattttcttattttttgttatggcattaggattaattgaattggaatcctaatcctatttgaagatgccattcagaattagagagagaaaggaagaagagaaaagacttttggccttttgcttatcattttatctttttcctttaattctctaatttttccttagttccaatcgcattaggaattgttgttaccttttaaacttgtattacttttcctagttgtataggaattcaaaatatggttaaaaaggagaaggaaaaagatataattataccttttatttatcatttacctctttttttataaagctttaaacttaaaatacacccattagctttaagattttgatattgtactcaactataaataagtgatttgagaaccaatattttttttatatataactagggaatggtaccgcgcttcgcgcggtttttacaacaattgagaattacatatattaaaatcattttttatttatagtaaactttgtatgttttatgatttaaattatggttaattttatagttgtggtgcaatttaaattattataaaaataaatttgttagtattttttttctcctgatttgaaaaaaaaattctttgaactattactgatgtcaaatattct

SEQ ID NO: 229934 - DNA, 2677 bp, Cannabis indica
ttcttttagtcttgattgcctcctagtagattgaggagctacgttcgtttgacccttcctttctcggtgccgtaacgtctttttggcatgctacccacccagatggttattttcttggctacgagatggcccttctctgcgaaacaaggtccttcataatttcctgcattctccttggggtttggctcgttgacaaggtcaagtccaagggtgatgtctgtgattgctttggacatttttcttactttggtccttgtcagcctttcattccggcctgttatccaacttgattgggtaagttttcatgaaggttgcggagacgtcaaagaagggattcaggtgcatttttcttttcttaaaaaagtttttgctaaacgtgattcttatcaccgggttcacttctgtagtttttgagggaagaactcaagctttttctctcggggagactttggttgagaacattgcctatttttattgcatgtatactctttggctaaatgactttggcaaacagacataagatattgcagctgtcagcaatcagacatattatacccccccaaatgagttgggaattttgcacccaaatttctggtcatttactctgagtttaacttgtgcctctgtctctgaggagttgggcatagctttgccttatttcgggacgtacattgcccttctgaggtagtttcatagtcactttcacgctctgggaatggaaaaatgggggttctggtcgagaccctggttgcatgccttaacaatctcctcatggcgtaaaccccgtaagtgagattcttgtggcacgagcggccattggtttcctagacggaaagctaagcttgcgtccttgtgcaaaccatctctcttgcataggggctgcttgagtaaaaatcatgttgaactctcatggtggctttcactaagaaaggttaaaagtgcgcaaggagttcaaacaatatatttgcttgcaaatgccgaagggtgcagtatcgttgggttcataagagtaagattgggttcaagttgtccttctgatctgggaagaagggttgaagatgtatcgtacccccactaatcttttttgtacaagaaacaacattcatgcgagagtcatgttgaatttttatgtaacaagcttcgacttccaagaaggaaggctgaagttgtataaaaattcaagcttagacttttcttgaaaagatcaaggggaaagaatcacgtagggtaggatagacttcaagcagtccttccaatccgagaaggagggttgaagacatatcgtacccctagtaatcactcttgcacaaaaaacaacatgcatgcaagagtcatgttgaatttttatgtaacaagcttcatcttctagtttctaccaacagtaccataaccaggtctcactggtaacccagcagccgttgatggtactgatggtctcctctcaagcggtgcccattggaagatctgtttctaggcaactttaccacatgtagaaaagacaggggaagtagttgtcgggagatagatccagccctcgcaccagtgctagtgccaaagtttctagttggatagagtcattgcatctaacgaccctttctgagttagtagtcataactgcattaggacataactccttcgttcggctctagtgcccttgcactgctctatctacgcatagtgatatgaagggggatttgagcctgaggatttcgacggttgatcttgcccccagagagttggctggccagatctaggcttctaaggatggatatcagtgcagcaggtgctttaggactgcatgcatttgatttcgccacctttcttgggcagactgtggcaccaaatcttttttctgggagacacctcaaatctgcgtgtttttggccttcagcctaaccttttcaagagatcaggaggtcttccttatttcttgcacggacctttttcgaacaggcttgcgccggtagccatcgtgcatatgtctttcttcagctctcaatgaaagaaccaaaatgtttaccgagttttttggaaactgaataattttagagcttaagaaggtaatgaagttatgaataatacaacaacaagcaaaacacttttacgtggttcaggcattaactatccttggtccacgagtccattttattaggttctttggccggaggttatgtatataaatacaaaatgatggactttgctcctattctcccatgttcctcttgaagaagaataatcttagtaggaatattcaggagttaacagtagggttacaaaacgatgtgtttcattctttttttttgcgaagggaaggtcttggatcttctttgttagagtccaaagaatgggtctggatccccttttcatgtgcacccgttggagtatttataggctaattccatggtgcggatcatcttgaatggatcttcgtagggatgaacccctaccgttggattggtaggtggcatgttttccatgtggtcttaccgatgtcagatcgtactggctacaccggcagagctttggacacatgtcatctcagggccattcttatttgaatttccctcgtccctagccgttggattgcttagcacgacaagcgtgctctgcatggtatcgtggcgtggtagacaaactctaacattgtacatggaaaaaaggtgtggtcagtgggccc

SEQ ID NO: 229935 - DNA, 627 bp, Cannabis indica
attgtagcttattagcaaattagtatttagtagagctagtaacatgtactaattttttattatataaaaaaaaattattaatttcatacttaaatgtattttttagttaatttgtattcacacataaataataccaattttagtagttttaattttctaaatcgtaaaataaaatgtaaatttattataaaacaacagtgcttacactatttttaaaatacacgaatgtatagtatcaactatcaatcacatattttcagatttaagaatttactttcaatttcattaacggatgctcatcatagtagtgattgttcatatattaaatcatatttgtgaactttaacaagtactaacttatattcgagcatgtcaattatcatcacgcaacccttaataaaattaataaaaaatttgaattcaaaaatcttaataaattttaatggtctacaaatttttaaaagatgattttgatatatgtcaaaatatcaagaaatatttatatattcctaattagccacatatgtattattatatatttgagatgagatggtgtggtgtggtggttctaaaaataaaaaaaaaaaatatgtgtattttacaattattttaaggctaattaggatt

SEQ ID NO: 229936 - DNA, 765 bp, Cannabis indica
ccatgttagaacacctagttggatggagatttatttcccttccaactcgatatccacttttgactatgtattggccattcggagtataaggccaactcaaagaatcctcaacatacacgtcaatcagaattccttgaatccaaggaacatcatttatgaaaatgttgtttgaccttttccatgtgccattgcccatctgttgtgatgaaatgatggagctttgtgtggggttcaactccgaggttttgagtgagcatagccccagaaggtcggggtaaccatttgtcctcccaaatctgaatctcttccatttccaaccctccatcgagccccttccttcaaaatcttcctaccccaatagattcctttccatatacatgaggaacccgatggacaccaagcctccatgaaggacatagtaggataatagctattcttcaaaactcgagctaataaggagtgaggattttggataagcccccacccttattttgccaaatacgcttggttgaattcagttaggctccgaaacccaagacctccttgttccttaggcttgcaaagtttatcccaagacccccaatgaagtttcttattttccttggtgtccccccaccaaaagttggctgccaaagtgtgaagctttttgatgagcttcttgggaagacgaaagcagctcattgtataactcggaatggcttgcacaatagcctttataaggatttcacgccccgcttgggagaacatcgaagccttccacccttt

SEQ ID NO: 229937 - DNA, 1361 bp, Cannabis indica
  modified_base (1339)..(1339): a, c, t, g, unknown or other
gaccacagacccagtgacagggacgattactgcaaggtggttaagaggacggaaggtaagtgaccatgccactagttgtcattttgataagagctcaatcagctgcccaagaaccaataaatactggaaaaataaaagataaatgagcgcttctcaatgattaacgccaaaagaaaattatgccctctagagatggtttgcgttaatctaaggaacagtctctcattgatccctaagagagaaaggacatgagaagaatgcattatgcttgagcaattaggagtctagtgtatgatttgttgtgcactatagcagacatttgctatgtagtgggaattgtgagcaggtagcagtccaacctaggaaagaaacattgggcagcagttaagcatattctaaagtacttgaagaggacccggaactatgttttactttacaagggtggtgctttgaaccctttaggctatactgactcaggttcttaggcttgtgtcgatgacaaaaagtctacatataagatggtattcacttttgggggtggagcagtagtttggagaaggattaagtaatttgtaatctctaactctaccatggaggttgagtacatagctattgctaagggtgctaagaaattggtctagctgaggaagttcttcacagagtttgcattattctagatatggaaaacccactggtgtgacaatactaatgctatcgcaactagtaaagattctcgaagacacaagaggagaaaaaatatagagaggaaataccacatactactacaaaaatgggtatttgtgacggtcctcaaaacatttttttttggatccggaccgtcgctaataaatttaaatgactattttaaaccgtcaagaaaaattgggtattcgcgacagtttagaacaatcatgagagaatacctcgagcatgacgatatacgcgacgatttaaaactatcgcctatactataacacgtacgatttaaaaattgtcgcctatactagtttaaattatcgtgaatacctcgagcataacaaaacccccaacagctactccttctttatttctcacatcaaaaaccctaacccaccctagctactctccctcttcgccgaatatcccaaattctgaaccctaaaccctattttctcgactaaaaccacaacccaccactaatgaaaaccccattttctctctctcattctcaccgttcttcttccatctctcttgctcgatctcttgttctccccttctccattcgacgaaaaaaaccacccaccaccacccaaacctctctttctctttctcgttctcgtcatcttcctccctccccccncccctctctctctctctctcta

SEQ ID NO: 229938 - DNA, 789 bp, Cannabis indica
aaaaatttgttctatgttaagttatattgtttctattttataaagttattttatttcatggtatgctatttctattaagattatattgtttatttttataaataataaaaaatataaaataaaaaaacctcaaataaaaaaaataagtaaaagctcacacgtcattctcttttattattttgttttgtaaaatatataaactaaagaaaaatgtgatattttgtcaaaaagaaaatagaaaaatgtgattggctaatgattattaattaatatgaacaattaatatgattcagtattcaactttgttttgaatatagaatgccgtacaagaagtaaattctattttaaaaaatattaaatcggtagatatttttcttatatattattcaatatatatattttttttaatgaaaatcattattcaatttttgattgtctttctcctccaattcgtgcctcacaaaagaaaaattctcacatcattttctttttttaaggcactttcgatagtggttgatacacttgtttagaaaaatgatgaatgctagtatgctacgcaatacttatacctaaatctttcaaatatatattatacatttttcttaaagaaaatatgtacatgcgatattaataatttgtgtgtatacatatttggaaaagggtaatttgcggcataatttccttaagtggccagtttcttgtaggggtgagcaacagtcggtttggtcggttttttatacaaaaaaaaatccaaaattcggtttcggttttcgattttcatggttataa

SEQ ID NO: 229939 - DNA, 1740 bp, Cannabis indica
gagatccgtatccattggcctaaatgtctagctctaactagagatttgatctcatctcttaagtagtcacactcattagtagtgtgtcctacctctttgtggtacacacaccttttattctggtccctgttgtgtttgcctccccgaggcttctttgggggcttccgatagtggaccatgttttaggtttcgtttttacacattctcttgagtatcaattaagctagtgtacttagagaatttggattcatactcagtccttggtttttttttgaagtttcactttgattctagtacttccccacccctcatactcctggaatcgcttatgttctattttggaacttctactagttgcttcaattgtccagaagcggtactacatttggtttgtgccgctccatacctaaaaaaatgagtttgggtaggtgttttcctggatgtagaatgtccatagatagtcggagaatacttagttccaagagttaggacttgcgcgatgaagcttgataaggatgcggaaggagctagagctggagggactctaaaagcttgctgataccttgtgctttggacataaactcagacaaattcttagccctctttctctacatctctccccataataaggagccaactgtgagtttagattgaagggctacaagtttcatgtcatcgctcaccattgtctttgcgactgcctccatcattcgttgaatgaagttttttaagctttcacttgcttgttgtttgacattggtgatcgacccaaattccatgtcatagtcccgtgcacctataaaattgtgattctttccagctatgaattcatttagcaggtagccttttccaccaatcctccgtagacttggtaagtgttgacaaaaaacaaaagcaattagcatcatcgctcactcttgacaactgtatcatcttgttgtacttggacatgtgggttcctaggtctgtatgaccattgtacaactcaatttgtggcatcttaaagttctataggaatagggctttcgcgatctgcttggcatagagttatgggtcctcgtcttctaagtctgagagggtcccactctacttctagacaagtttagttagggcaaaaatttggtcctccaacttttttgtgtcactgtctacaaggtcatgtttgcaagctttatcatttagatggttcctaagatcattaccatgtgacctcaccttttcctctttaactttttttgtatttagcgtcaagacgccttcagatgaccacagttgaccaactatcatcagagtactatccctctatcttgccattctgattaatagaatcattggggcagtttttccttcccctgggcgtgggtacttttccactaggtcctttttgtgcaactctaccattgggattagaaggacgtttgagcccaaaggcattggcggccttctatatccgcaagggcttgttggctaggttcatatttttctaggaggtaagagctattgggttttgaggattacctacttttggcttccccttgtcctttgtaggttttaagatttcaacattagtagggttttctctattgtttctgttgacaagttccatcgaggcatcttctttagaatcctcttctaggtttccaaacttttcttggaggcaggcaatcttcctctccatcttctgcaaaaacttctcttgatgggctaacttctcctaggtctcatgtatctcattggata

SEQ ID NO: 229940 - DNA, 650 bp, Cannabis indica
aaaaaaaaaaagtaggagcacaaatacttctaaaacaactttcaaaaatgaaatgtttacatagcaccatataacaaagtttctttcattgtgatcactcaattaaagcattccattttttgtaatttcttctaaaaattggacagcccattctacacgaattttattaatttcttgttttgtataagtttttttctcattgcactccaatgatagataaatatttgtacatatatatagtagtaattgtaataggatagaaaaatattttatcatagtatatataccccaaatatatatagcttacttgagtggttagccaattgataagtctagaattcaggcaaaagtcacgcatgtatctcattatataatatgacccacactcaaaattcgatatttgtggaggacactgcacatatttatgaaataaaaacacatagataataaaaaatttgtagaataattactatattgtaatatcttaatgtaattttaatcttacaactaacttttataaattttcatgtaatgccaaacttttttagccgtctcttattggaagcattgtagtaatcaaaagtactcctaataaacaatagaaatattaaaataatttaaaataagaattaaattagactaaaccataa

SEQ ID NO: 229941 - DNA, 799 bp, Cannabis indica
ccataagattttagcaaaaatcagattccaatttaaagtttcaaacttctgggatcaaaaattctatttctgggagaaacctttgctttttattctcaattcaagcctggtcagcatataaaatctatttttcattcgttactccaaccaactcttattctcttgtctcccaccttttgtaaatgaacccttgtgtgttttgggaaggctactatcatattgaccaagatttgtttaacttctatatgaagatcacccccgtctccgtgctagcccatcctcatctagtgatgatcttttaaattctagctttgaaggttgggaagtagtgatcatacaccttccctgaagcctggggtgcaacatcattactatgccgacaaaatttgtggtgagggatatgggcatttaatcagggaactcaagaaaggttggaggcgtaactttcctactagctagatgtatagggtccattcgagcgtggttgacaccttgcttgagggctgcccaatcccagctattgaagggaaacctactacctaatttgttgtgaccattgccaggcacacttttgataaagctccatccaaacgtaggatgatggcaagaaccaaatagactgttaggaaaccttcagctaccaaccctcatattgcttgtttagctactctggcatgggtggaacatgctcgtcctaccattgaggaggaagagactgcttgggatgttgaagtccagaaagtggaggaccaggcaagctccgtcccgctactccttctgaagccaaaggtaatgaaga

SEQ ID NO: 229942 - DNA, 2133 bp, Cannabis indica
catatataatcatacacacatatgtatatactattattaaaaaatacctaaatacatatacatatatatacaaactcacacacatataaacaacaacaatatttattgaatcatatttttcacaattttcacaacattagataaacttttcttaaaagaaaaataaaattattatcctaatattatacaatttcatacaaaaatattatacatacatttacataatcagattttatttcaatataacaccaaaaaaaacaaaaaaaaacaaaaaatacactcaaaaaaaaattatatttatattctttaaactttttaccaatctctgttttaacacaaatcaaatttttcaaaaacacaaaaaaaaaagtatatatttaaagaacaaatacataaatccacaaatactttttttctaaaaaatataaaaagaaaaacaaaacttaccaacaaaaaagtggaggcggggcataggtccaggcgatggccggcgggatgggtttgggcaattggtggagtccgggaggtcggtgggggaggcagggggtcgggcttttatttcagacgaggattttttttttggtttagagtagagaaaagaaaaaaaaaattgagaagagaaatgaagaagaagaagaagaagggagcgggttgggtttaatgaaaattggtaagacttttaggggcgacaaaagtggcccctaatactatgggtgggaaaaatctcaccttttccaatggaaaaattttaatatttttagaggcgaaaaatctcgcccctaatacactaaattcgcccctaaagttattcgtcgcccctaaaagttccaaacaaaaaaaaaaaaaaaactcagtttgtttaggggcgacaactttatgtcgcctctaataccccctctttaggggcgacaatatgtccctcctaaaattgtctcccctaaaaatcaaaattgttttagtgaattgtctctaaacttgaaataagcaaagatttgggtctttatgtaagcaagttgtagaaacgcaaaaagagatagataaaatcttaagtgctaatgcccttgaggttcgaatggatgaagtgatggctctagaacttaaattggatgaccttatgaacagggaagaactttattagaaacagagatcgaggtcagagtggatgatggtaggtgatagaaatacgaaagactttcataacaaagtgttggtgaggaagaagaggaatactattactgagattatgacggaaactgaccaacaactctgtgttgaggatgagattgttgttgatgaagtggagcggtactttacagatatttttaaaattaccaacccgaaaaatgagcaaatccggcgtggtacaaagattgttatttcgcgtatttcggtggccaataatgagcatttaatgacaccattcactcaagaagatattcaccaggttgttaaagctattggcgtaactaaagctatgggaccatacagatatcatgctttatttttctagagattttgggatattatgggagaaatagtcaaccaagtatgtcttgcaatcttagatgatggtgcttcggtgcgacaatttaataagtcaaagtggagttgataccaaaagtacaaaaactaagattggttaaagagtatcgtcctattcttgagtgttgaggctgaattggaagattattgtgtaaactatttagtaagttcttagattggatgtttgataaattaatacgaaaagatagcgagagtctcttgataagatacgagaggtattgtttctcttttcatatagtttagatttaatccatatatattatattgagatgtttgggaatatggttcatattagattaaattatttttaattaaactcattgtcgcttttctaactctgatatggaccgtaaaaattaacacaagtctgggtatgggatcagggtttggggtttggggtggggtccgtgtctaggtttaggttcgggtttggattcgagtccgagtcgggatcggggttccggtcttagtccggctttgggtccaagtctaggttaatgggactgaagtctaaaatattgattaaaataaaaaatttgcgtaaaaaatttttgaaagtgattttttttt

SEQ ID NO: 229943 - DNA, 1078 bp, Cannabis indica
ccagtccaaagtctgcccttgttgtaaccagtgaccctgttgtctcagattccagctcacagatttgctctcattgcactctgtcccttgtctcagattttgacttgtggcacaagagacttggccacccttctcacaaggtggtcaaatctgttttacaatcctgcaatatttcttgtaataaagcttcaactagtgtttaccaagcttgttgcttaggcaagatacacaaaatgccctttcccaaattttctaatgcaatgtactcaaaatctttacaactgattgtgtctaatttatggggcccttcccacaatttgtcatataatgggtaaaaatattacatgagctttgttgatgcttttagtaggtttatttggatttatttgctcaaaaacaaatttgaggctttaaagacatttcttgctttcaaaacagaaactgagttgcaattgggtaagaaaataaatgtgtttcaatcagattggggtggtgaatatagaaatttttctaaaccacttagacaagcaggtattattcataggcacccttgtccaaccactcatgaacaaaatggcttaattgagagaaaacataggcaaatagttgaacacgggctaagtttacttgctcaagcttttatgcccttaaaattttgggatgaggcttttaggtgtgctgtatatttacataatggattgcctacccctgtcctcaatcaactttcacccattgaaatcttgttcaaaacaaaacctgtctacactaatctcaaagtgttttggttgcctatgctatccaaatattaggccttataatcgacataagttagactttagatcctctccttgcacatttttttggatatagtcttaaccataagggttataagtgccttgattcaaatggtaggttgtacatctctagatatgttatttttgatgaatcaagtttccttatgctaccatctttagagataccaaaccttctcaatctgagttttctacatccagtgttattcctattgctcccattaattacactgttgagtctctttttaccacttcatctccaccta

SEQ ID NO: 229944 - DNA, 1275 bp, Cannabis indica
cccaaaggttcttaagtgcattacgtttgggattttgttataccacatttcataaagggttttcaggcctataacacgatttaggcttctatttataaggtaggttgcagtagctagagcttccccccaaaatggtttattaaacctggaacataacaataaacatctaactgtgtttaacagtattcggttcatcctttcagcaacaccattttgctctggggtcttcactacagttcaatgcctagtgatccatactcttgacacaacatcttaaattccgagtcaataaactctaaaacattatccgtcctaaggttcttaacttttatatcagtttgattttccatctgagttatctaaattctaaactgttccaggcagttattctaagttgctagcaaataggtccaaatgcacctactataatcattaactatagaaagaaaatattgcttactagagtgagtagacactttttatggcctccaaagattagcatgcacatactcgagtatcttcttagttgtatgccttcctaaagtgaatttcaacttatgttgtttctctaaaacacaagcttcaaaaaatgataaggcaaaagaatttaaattcttaattataccttatttgtgcagttctttgtgaccttattcactgatatgtgcaagtttgtgatgccatagctgcatatatgattctagccctttcatcaaaattgcctctccagttggaacagtttctccttggagaacatataaactattgatattttcacctttcataactatcagtgaacctttggtaatcctcaaacatctgtgcatggacttgtattcataatcctcaccttcaagtgcacctagggatatgaggttgtgtcttaacttcagaatgtgccttatgttcgtcatcaccttgattctacaatcatactatttgatagcaacctttctagttccaatgaccctgcatgaaagatcatttcccattagaaccttatctttgtcaattgatttataatcaaaaaatgattcctgacttagacacatgtaatacgtgcattcgaagtcaagaatccactcccacgttcattgaagaatcttagatggagaatgattctccatccattgaaaaactgtctctatcttccgcaactgtagttgaatccttcttgtggtgatgatgtcagttgtccttcctatctccactatgattcttgacttagacacattaatacgtgcatccgaagtcaagaatccactccctgttcat

SEQ ID NO: 229945 - DNA, 835 bp, Cannabis indica
aaacttattctcaaataaaaattgatttattttattccattatctcccattaagcgcaactttatttaacttaaatattttcttgcaaaataataataatttatgttttcttttcttgatcaatcaagtatattttcggagggaagtattagtatcataaaaagaaaaaccaggaagcatccaaaacaaataagaatgaatgacaaattttaaaaaatttagcgtgtttggtaaaaatttgttttaaaattatttaagaaaaatttcataaataataaataatgtttaaaattttacttaatattaaaatttagcttcctaatatttatatagtaatatatgcctatttttatttctctttcctattctaccaatttcaattaaaaaatcacgactctttatcttcctccattttttttttctctctttctctctatttgctcagcgccaccaccgaaagccccactccctacaacctcagtagtgatgaaaccccagaagccccaaaaatacaaaactcggacctccatagcactcaagcgtcgacaaaaccaagaggccctaaatatccgtctctgtcttcgtctgtgagcatcatccatactgagatagtgactttgtctccgagctcgactagaagcccactggattctaccttcatctttgtgtttttttttttttttcaaatttgtgtttgtttgagaccttggatgtgtggtggttatggtattttttttgccaaaacgtacttatcgataggttatcaataatttatcgatgatttatgtatgtgtaacactactttgtcaattaattgacatttatcgagataggt

SEQ ID NO: 229946 - DNA, 882 bp, Cannabis indica
gctgatttcaatttgacattttttggtaggaacataatttttgtttcctatgtgaaactaatgagaaaacaataagtttaagctaattaggatttttaacctctgaattttgacagatattaaatcgtgcttacaaaatcttcaggttgttaaaaaaaatttccgaactattgacattattggatcaaagaacttctagcaattttattaacgaacatctgatgttgatgaaagttcaagaaccaggatttgttatctgtcaaagttcggggggcacgattttgtacgtggacaatcgatacattcgtaaaattgaacataattggacaaaattcctaaaatccaacaatctcaatagttcgggagaatttttaacgacctaaaaagtttgggggcatgatttggtgcatatcaaagtttgagagacaaaaattctaattagccaaataagggatgatagttaaggacatacaatgcagttataggtatctaatataaaaccaaaccacataatcacatataattagagttgaaaaacaagaagagcataccgttgagctagaatgtccatccgggttccatgaagaattgttccactgatcagattcatctccatatgttccccaagctgatatgtgtaccagttcatctaatattgtagcacccttgaaaatcaaaacatatatatacataagtcaatcatcaaaatggaatactaaaatttttaacaaaggaacagatataagccaatgccttataatggtgttgatggaacagaacatcaaaagtgaacaacaatcattgatcaaagtagcatttttgaggaatgaaaaatcaagagacaggaacaattacaatttatagtgtaattattaacagtta

SEQ ID NO: 229947 - DNA, 1397 bp, Cannabis indica
cgagcgtgctgacggttattacaagaatttcaaattttatgggcatcttcggtaatgactcagtggcctgtgccacattctagttcaaggatgatgccctggtttgttgggacatggtgtccctgactcgtgatgttactaccgttacctgggaagagttagttgttcaatgcaaagtactacaatgaggcggtcaaaagtgtaaaaggaaaggaatttactcagctgacccagaaggagaatatgagtgttactgaatacacaaaccaagtcaaacggattggctaggttggcctcaggaattgtgccaactgatttcagcaagaaagaaaagtacctggatgggttgaatccaaagataagacatgatcttatgattactactgatgacaacaccacctaagctgagattgtgggaaaggcactgcgagctaagggcatagttgagtgcacccaagagtcttgagggactcaggttgctggtggagcctttactcctcctaccgctggttatggtaggggtggtagtgactcgaccatcgacaaaaacgaaaggcaccattttcacctggtggcctaggtcagagtaagaagttccgagggaactaggattgaggcaaccgtcagggtggttctgaaacccgatatacttacctggaatgtcccatttgtaagaagcatcatcttgatgagtgtagaggacgatgatgtttccagtgtgggttaccaggacactataaaagagattgcccgcagctcaagaaagaggaacaaaagacaactagaaaactcgctctagcaagggtgttttctttaactcaggctgatgcagaagctagcccctcaattgtttcaggtcagctgtcggttaacaactcttacttttctatattgtttaactctagggccacttactcttatgtggtagccagtatttttagtaaattggatagaccgcatgataattatgataaagggtttggaaccttactacgtggcagagaattaattatctctaaaaggtagattaggtctataacaatcagaattaaggatagggagttgagtgctgacttaatagaattgggtttagcagatttcgatattatacttggaatggatttcttatccaagtactcggctagtattgactgtaaacgaaagatggtgatcttccaacctgaggtcgaggaaccgtttaattttgtgggatcagtttagggatcccaaattctagcaatttcagtattaacatctagagatttattacaagatagatttttaggatttttcgcagtggtattggataccacgcgacctgagatagttcgaccggaggatatcactgtggttcaagaatttctagatgttttacttgatgaacttccgggtttacc

SEQ ID NO: 229948 - DNA, 628 bp, Cannabis indica
acaagatattaggaattcatatgtaattaccatctcatatccaaatacaccttgcattttaaaatatagtgtaattactatactgtgtaattaccaccctagtaattaccctacctaataattacacagttacttccaaacgcacccttaattaattacgtttttctataaattctttaattagcaaaggagtgaacaataaataaaaaatactatagaatagattcaaaatgtaattaaattaatgaatatgttatcaatttatttgcagtaatttataataatcttaaaaagaaataagtaaaattaaggtgaataaaaatagactatatatatataaaaaaatgattatgatttataatatttttacatttaattgatatgaaacaatccaatactcacaagtaaatagcccatatatatttatatagtaataaaaattagacaccaaaaactcaaaaactataacattcttcaaagtatcgtcaacaaaacttattttacataaattattaactagttaacaagttaaaacttttttttaaaaaaaaaaaaacatagacctaatatccaacatctattaacaattctcaaactatatgggtaatatttatagggacacgatttt

SEQ ID NO: 229949 - DNA, 1420 bp, Cannabis indica
gggggtatactgctacttggtcatgcctttcagactaacaaacgctggtgcaacataccaaagaatggtaaactggatgttcaagggccttctaggatgaaatatggaagtttacgtggacgacatgctggtcaagtccaaagcgtgcgtgagccatgcggacgatcttacaaaatgcttcgaagtagtccggagatatggaatgaaacttaacccgaagaagtgcgcttttggggtcaagttagggaaatttttgggattcatcgtcagccaaaggggaatagaggcaaatcctaaaaaaattcaagccttactaaacatgccttctcctaagaagcacaaagatgtgcaaagcttgacgggaaaggttaccgccttaagctgattcatttctcgatcaaccgacaagtgcatccctttctttaacattttaaagaagtgccaaaaatttgaatggactgaagaatgcgaggaggcattcagaaaactgaaagagcacatgaccaaaccaccaattctatcaaagccagttcacggagaagacttgctattatacctggccgtctccgagaacgctgtcagcgcagccctagtccaggaagaagaaaaagtccaacatcctatgtactatgtcagtaagcgtatgatagggaccgagatacagtatccattgattgagaagctagttttctacctcctgatggcttcaagaaagttaagaccctacttccaaagtcctacagaagccggaagcgtcagggagactcctcaaatagaccatggaattaagtcagttcgacatacactacgtaccacacatttccataaagggacaagccctagctaacttcataagagagtgcaatgaagcagaggctagtgcaagcatgcccaaaccacaaaccccgacatggaaaatattcgtcgacggagtgtcgaacaaaaatggatcaggagtcgggatagttttggtatctctgaacaggcttcgactccaggcggccctgcgtttcgaatttctggcttctaacaatgaatctgaaaatgaagccctcattgcaggattgaaattagcaaaaatcgtgggatccgcgagagtagaagtcttcagcgattcgcaattagtggtaaaccaagtctcgggagagtatcaaacgcatggagaaaaaatggttgcgtatgtagctattgtacaggagctactccatgaattcatggattacaaagtggaagaatccccaaagaaaagaatactcacacagactgttaattggctaagttggcatcagacaaagaggttgagagactgggggtggtgcccgttgagcgcctcacggaaccaagcattaaagttaaagatactgtggctacaattgagccggagcccaactagatgcaccccatcatcaaatacataacc

SEQ ID NO: 229950 - DNA, 1084 bp, Cannabis indica
aaaatttatatagcaatttacattgaaattaatgaaataataaaaattgtaacccaaatctatataacaacccatatagtaattactagagcagctacccaagcaacctatataataattatcggattaattaccagagcaactcaaaccgtaaaaaataaaaaaaaaataaaaaaaaaaaacaataatttatggagtgattcccaatgaatatatctacagtgtcatattgttaaaaataagttttattagctcctaaaaatttggcagcaaataatattttttcgggtagctaatatatttctaccaacaaatttggtaacaagtgttttttttttatttgaccaacaaatgttataaatttatgcccactaacttttttattgctaccataatctgtagaaatatgtttattttattgtaatattttggtagaaattaaatattaaagttattgggtagttaagaaaaataggttacactaacaaaaatgatcatgatcaaaaaattaattaatattttgtgtacacaaactttttatatccattggaaatagaatctaagattggcgtgttattgaaaaattatatttatctaagaattattaattatccactcaaaatttgaaaaattaacagtaaaataatgcaatatcaaattagttaaaagaaaaaaaagattaggttatataaaaagataattaacacaatatgaaagagtaaaaaaaattagactttttgattgaataattgaaatttttttctaatatatatataagaattgaattatatatatatatatatatataattcttatatataagaattgaatattgaatataaattgtcaagggagaagtgtgttgaccataagtgacgagaagggtacgactgtcttttccatcttgagccggataactatccagggttagggtttttaggtttttcaaatcttcttcttgctacagtcacacctctcttctacagttacggttctaatgggtttttaacttcttctctttttctttttcagatcacgagtagggttagattctaatgcggtcaagcttttaatctttctactc

SEQ ID NO: 229951 - DNA, 985 bp, Cannabis indica
taccagatttagtaccataaaactaacaagtagagatagattatttttacgtggtttgggtgttactgaaccttagtctataagtcaatcatatttgactaagtcaccttgatgtatttcaatggagttcttacaagcttacaaaccctagcttcctgctatagtgtttacacaataaatttccaactatttccatgagggcataatgttttatttattggggtttgagtataataactcaaaaatttagactagacttctaagccacactcgcttgctagattggtgagaataaaaaagtagaaaataattataagagacacagcagattaatagtatttcactctttatatcgcgatagtaatcaggctacatctacatctacttcgagtttttatttctcacgagatggtaattacaacaatagactaagtattagaaactttaaactctagagagagaagctctcaccttgtgggtagttttctgattatgaaaacgagctaagggggctctccttttaaagatgaagggggcctacaaaaataggagaaagatacaaataatttactttccattgttgatgatgatttaacggtgaaaattagcttctggtggtgatggccaatttttggtgcccggcgggtcccatcgcgaattactcggagcttatttttgtaactttattgagagtgacatttgacgatgatagcttcaaaattacacctatagtgtgagacatgacttgatggagcatttaaatatcttaaagactcaagtttaatcgcatcaatcagataaaaattaagtgagttatagctattttactgaaggtagttcaggtcccagcgcccaggttgacatctgacatcaacctagacgttgtataagtgtaggatcgtctaaggggtgtccttttagatacctaagtgatagtttgacacctcttagtccatttataggttctagcaaagctggtcactag

SEQ ID NO: 229952 - DNA, 1712 bp, Cannabis indica
aagcatcagcaagctgatgtgtgttgttgacatggacaagtctgattttggactcttaatttgtctcggataaagtgacaatccaattatatgtttggttctttcgtgaaaggttggattgttgacgatgtgtattgccgattgattatcacagtaaatgaaggcagggttgtgttgaggaacttggaaatcgttgagaagatattgcagccaagtgatctcgctgctggtagcagcaagagcacggtattcggcttctgctgaacttctagacatggttggctgttttttcgtgcgccaggaaactatgcaatctccaataaatatacaaaaacccgtagtggagcgacgtgtggtgggacaagaagcccaatcagaatctgagaatcccctgagatgcagagaagattgtgttgaatatagcaggccttgtccaggactacctttcaaataccgtagcagatgatgggcagcttgaagatgtggtgtccttggagtgttcatgaattgacttagtgtgttgactgcataggttatgtcaggcctggaaagagtaagatagagcaattttcccaccagttgtcgatattgtgaaggattttcaataggagtaccttgttgatcatcaagtttaattttggggttcattggggtcttggcaggcttgctgccagtaaaaccgtgatcttcaagtaatgttagagtatactttcgttgagatagaaatagaccttctactgctcgagctatttcaaatcccaagaaatattttagatttcctaatgtcttaagagaaaacctgttgtgaagatcagtttgtaactgatgtaataattgaagattcggccctgctaggattatgtcatcgacataaactagtaaggcaatgaaggattccttgtggcctttggtaaacaaggtgtaatcagcctttgattgcgtgaatccttcctgtatgagagcgtctgaaagctttcgataccactgccttgaggattgttttaatccgtaaattgatttgttgagcttacaaacgatgttggaatttttatccataggctcgggtagattgagacctttaggaagctccatataaacttcttcgttgagattgccatttagaaaggcgttgtccacatcgagttgcaaagtgtgccattgcttgatggttgcaatagcaagaaggagcttgaaggtaaccatttttgctataggagaaaaagtatcaaagaagtctaacccttcttgctgtgtataaccttgtgccacgagtcttgccttgcatctttcgacggatccgtcactattgtacttaatcttgtatacccatctacatcttatggcccttttgtttcttggaagctgaacatatgtccaagttttattctttagaagggcgaatagctcacgttgcatagcttgattcatacacggtattgagatgcttgattgtagtttgttggttcaaaatgagctgtcaaggcaagaataaacgttttataagcaggcgataagtgttcataagacaaatatttatttagagaatgtggagtggaagttttgtccagtataacggagtgacactcatagtcacggagataagaaggaggtcttgttatttctgtttgagcgccttggaactgtggtgttttcatcttgctgcagcagttggtctgtagcttcattatttccttcaggagtggcagtcaagt

SEQ ID NO: 229953 - DNA, 852 bp, Cannabis indica
acatccacataattattaatatttataacacaaataaaatattggaaaatgaaattaataaagtgagtgtgtaaattatatataatatatgatttaacacaataaataggcatttaataaactgaggaagtctctctaatctgaaaaataataagagtgacttttttttagttttatttttcttcttcttctttcttcacttctaatcaaaacctaataataggctgaaaaaacaataataatataacacgtgcttgttgtgatgatatatgagaataaacattattgatttaactctctcatgtcattacatgaatatttatatatatatatatatatatttatagtattacgggctaattacaactttctattataatcttttagttaatttctatgtccgaaatcacatgttaaaatatatattttttttaattttttttatttagtggtagtcgttatagttacagtatcatccttgttaattttttttacttttctaaaattctgtaataatttactagtatcgaaaacagaattcttgatattccagtttaccgtgtgtgttcataaaacttcaaatgtattttcggcactgtaaactatttgaaaatttttcaaaaatttacagggatgatgttataaacgcaacaaacaccgccgtggaaaaaaattaaaaaaaaaatattccgacgtatattttcgaatgtggagattgactaagaagttgtaacaggaagttgacgatagcacttctttaaaactaataataatagcaaaatatacgtttgtatatatttagaaagaacattattattagggattattttacaaatacataaaaataacaaa

SEQ ID NO: 229954 - DNA, 999 bp, Cannabis indica
aaatcaagtagtgtcaaaagttctgcaaacaaaaatactaattattttatattaagtagtgcagcaaaaattctgcgaaaaaaaatgaagacttggaaagtttgtcaatatgtaatagcctaccagtagtatgtaacttccaagaaacgacatagtatgaaattgtcacgggtcacccaactcaagagattggcttctctttttctatattttgtataaaatgagcaccattagtttaaactagtagtactcatgcctatatatcaacattttatacaagcaattcagaaatttctattattacaaagttaattatccagtaatatatatatatatatatattcatagtcaccaaaatggggttgttacatggtataatactccttcatttggcactaactgcagcagggatcatcaatctgcggcgagcagaagccaaaaccccagatgaccgctgccccagatactgcggaaatgtggaaattcgctatccattcgggatcggtggcagctgctacttgaacagcaaattcaacatcacatgtaacgactccatagaccctccgaagacatatctcggaaaaggtaacctccaagttcgtaacatatctattatagatggcgaaattagagtgttgcagctcatagccaaagactgttattataagaatggctcccaacatcaaaacgataggctccggtctcggctgcggttgtccagcttcaccgtttcatctacaaagaacaagttcactgccatcggttgcaatacttttgccattattcaaggctttcaaggcgaacagaggtacagaacaggttgtatgtcgttttgtgatcaagctcgagacattaactactatgggacttgttctggtgttggttgttgccaggttatgtctatacctccaagactaaacaatttcacggttagtttgagtagcattaattcaagtaatacaaaggtattggattctaatccatgtagctatggtatct

SEQ ID NO: 229955 - DNA, 748 bp, Cannabis indica
atacttaattgcacctatgacaatattaacacataagaatgtgctaagtaccagtagtaccctttatataagtgctttattatgtatgtgtgataatggtgcctaacacattctattcgtatcattttgtaattggttagtgatactttataaaaattattatattaaattatatgatattaacacgaatgtggtaagtaccagtagtagtgccttttatagcatttatcttatgtacatgtaagttaattgttatattagaaagtacgtagatatgttttagtcgaaattaatgatattaacattatgaaaaaaaaaacgataaatttgtaggaatttcaactacggacagtgtggaagagccataggggtagacttgttgaacaacccggaccttgttgagaaagaccccgtgatttcattcaagacagcactatggttctggatgaccccacagtcgccgaaaccgtcatcgcatgacgtcatcaccgggagatggaacccgtcaggggctgacagggcagcgggtcgagttccgggctatggtgtgatcacgaacatcatcaatggtgggatcgaatgtggtatagggtggaatgctaaggttgatgatcgaataggattctacaagaggtactgcgatatattcagggttgggtatggggacaaccttgactgttacaaccagaggtcgttcgccagtggtgtcttgctcaactctatgtaaactaaggaaatggctctttgc

SEQ ID NO: 229956 - DNA, 1627 bp, Cannabis indica
gcgagtcaattcgtattgatttcatgtcacatgtcgttaaaccctaacccaaccaaataataatcgtgtcatttgagttcgacccaattttgatcaatgcctattttttattaccttaacccacaataattcgtggacttcatatcgtgttgtagtgtcatgatttaaattatcactcttacatcaaatgacctttattattattattattattaaattttatatttatctttacattattattattttatatttttaataaattattaaaaaaatattaaatgacatattaaattttatatcaaaatttacaattatcagttagatcacaataataaaaattatgtaaaaaattcacaaaaccgtattttgtgccaaatataactaaaattttacatgtctcatggtgcatgtacatttcctataaatgaaactacgctttgttattttagttttgtacctccaagtgtctctgtccgagtattttatcttggactactcttctttaagcaattacactaaatatattttaatatattatgctcacattatactctagtgattatcgagttatcatttacaagttgattatactactattatactgggataaaatcaatgaggaaaaacacattcaatagtatttttattaatttcacccatttctactttgagtaatttgacaaaaataacacatatagaagttatcttaacaatacgtaccactaagctttcttttattaacgattaatactttactaaaagttgcagcaaagtgtacaaaactctcaaaagtgggaaatgatttgtttattactatttacttctaattaaattcaacaattgttcatgcacttacatagtttccaactctataaataccgtattaacatcctcaaagtcaatcatcacaacaacccactatatacaatactacaaagattatttaactcatcttattttatatacattactacgagtacaacacaatggatttgtctaaaatctcaacaatgttagtacttattatgttaacttctgttttgggactttgccaaggccaaagcgccccacaagacttcgtcaacacccacaacacacctaggagccaagttggggtgagcaacatagtgtggaacaccactctggcaacctatgcactaaactatgcaaaccaaagaaaaggagactgtaatctggtccactctaacggcccttatggggaaaacttagccaaaggcagctcagcatcgttcacgggcatagtcgcggtcaacctgtgggtggccgagaagccttactatgactactactcaaactcgtgcgtgaatggacagcagtgcctccattacactcaggtggtctggactgactccactcaagttgggtgcgccagggtccagtgcaccaacggctggtattacgttgtgtgcagctacaatcccccaggcaattacgtgggagagtacccttattaattacttactgatcatgatcatgatgagctgatataattaggcacattgatctttaataaacaagctatagtagaagaaaggtttgtaataataagattgttttggtttttctcttgatatacaaggaatgaccattatataaatatagg

SEQ ID NO: 229957 - DNA, 1317 bp, Cannabis indica
ctttgtgattgtgtttattgatgttattctagttgattatgtaccggaggaagcttatgagcaacacctctgcatggttttacaatgtctttgagtattcaaactttatgcaaagtttaagtagtatgaattctagttgtcccaagagagtttcataggacatgtggtaagtagagacgagatttcggtatatctgataatgattaaagctattcgggactggccacgacctaaaaaagcaattgaagttagaagtttcttaggattagctgggtactatatgagatttatggaaggctttaccaagattgctaatccttttaccgagctaacccgaaagaattataagtttgtgtgggctaataaatgtgaaaacggcttccaagggttaaagaagagattaattatagttctaagcttgccaataagtgacgagaagtttgtgataaactatgtcacctattggaaaccatcactaactggcttattcttcatatcaacccctgttgcttttgtttgcctattatcttccttaacgacccatgctttcttactttctatattctttctacaatcagctatggaatatcccaagccgaaacaatgattacagataattggtttccattcatagttaaccccaacttgtgtgctaacttcatgttcatcttcaaaatcaatcatgtctggtagctctttgtttaaagttaccacaattagcactctaggaaaattgagtttgtctcgatcctttgtaacagaatccaccatgacatggttccccacctgtcctataatcttgaatagcaacctttgccccagtaattcatatccaaatcctctaattggacccaaattggcacaattcaaacaacttctttatgaaatttgtgtttggatcccaagctttcatgatcgctgtttgtcttttgttgaagaataggtatcctcaattaagaacttcatcacgatctttaataattgtaaatcaaattataaagataccatgtgatagtacctttattctatctattttatctttccatactcttttttgcaagtccttccagaatgtgcaatggtggattagaaccaagcacataacagacaagtgaaggtttctagaatgctacctcatccactatatcctccaaagtaatcttaacttttgtaggtttccagaatgctacctcatcctctatatcctccaaagtaatcttagcttttgtaggtttctcaaaattattaaagggggattatagtgtccgaactgcataaccagatcgcaatattagaggtctggagttcttaccttga

SEQ ID NO: 229958 - DNA, 1134 bp, Cannabis indica
tttgttttttcattttttctttggggtgatgagtcaactcggccgagtgatgagctgactcggtcattacaggtattggggtagtaggagagaggcctggcccaagatggtgccccaaacatccacggtgtctaaggtatttggctcaagagctcgtgaacggttcagatctgatctgactttaattgaagcaacggtcaggaatgaccgtggtgattcttaccgtgggctgctgaagcaggcgaccgctgctctactcaattcttactcaaggaaagggtttccgtacacttcttgggccgtgaagactcttcttattaaagctttggtttctgatgatgctgcggcccttcaggcccaacatttttatattgctaatgaagcttgcaattaatgggcctaatctccggcccaatagaaatatatatatgacttatcattagtcttactctgtagtttcgtacatatcgtgcgtttgtttaaatttttaatgatgatcttttgtgaaattctttgtttgtttcatgagaatttcaatatattattagaatttcagtctacgttaattttggtcatgctaatttcttttttcttgaaattactcaaatcataaatgaataatatactaaaataatttgtgttgacgtttcatatagtaatagaggaagaaatatatcataattatttggtaatggaaactttacaaaatcatatgaaaaaaaaattatgggacatgtttaactttttattattttcttatatgtagtttatcatacactaatgagaatgtaaaatcaaatctatgtttaggatcttattttttaagttagtatttagagtaacctaaaactctttaacacttaaatttaagattcctttaatattaaatcttatcatctaatgcccaccaaataccccttaaaatctaagtttttttttaagtctcatgtctaattacaatttgactgagttgtacatgaacaatctattttcaaaagctaattaagtattttgtcaaccgaatttcaacacatgtaccaaaatcaaatcatactttctaaattttcagaacgttaaaatttagaaagttctatttgcacactacgaaataataagtacatgtacatcctaata

SEQ ID NO: 229959 - DNA, 1152 bp, Cannabis indica
aaaaatgttatattgagcgtgtcacagtataattataagattattggaaaagttagtaaatgatgtaaatttccctttcttttcatgtcgttttcgtcgttccgttacgaaggcccaagcccatcaaataaatttacaatagttgactttgacgaacggcattaccaataactctcagaaaaagggtttccattacgcccaaattaccattctgcccttgcttcgccccagagattctccaatgtccggcgaaaccaccggactcacgtcccaattgagagaagccggccagtcagcgatggccacgcggcgaccatggggagagttctttgacccgaccgcactgagcttcccttccagcgtctcggacgccaccaccaggctcgcccagaacctgactcatttccgattcaactacgccatggcggtcttggccgtcctcttcctcagcctaatcttccacccgttttctctagtcatcttcttgatcgtcttcgtcgcctggatcttcctctacttttctcgcgacgtccctctcaccgttgccggtgttactgtggatgatggaatcgtcgtggcggttcttggggtggttagtttggtggctctgttcatgacccacgtgtggctcaacttttttgtttcgattgctattggagctggtttggcgtcgttgcacgctttgcttaggagtacggacgatctagtcatggatgaccaacaatccccttatggacaattatcagatgattctccgggtacctatacaattgtttgacctgcttattatatgaggtgagtcttcttcttcatttgtattaatttctttaacttgcaatgctaattttgcttcttgagcgaaagcccaagtgagcttttttatttatttgtttgttgttggtgaaaaacccaactgagcttggttactcttttcatgtttctggtggtttggattagtaaaatcaagatgttttggaatacgattgcatgttgtctttttagtccctttaccttaaaaagatttggcctttttcttgccgttgtgatgaagaacacaaagattgtgtattgcaatgataatgaggaaaaaaaattctgaaaaaactcgtgtttggtcacgcttttcttgcttctgttggtttgtattagtga

SEQ ID NO: 229960 - DNA, 1288 bp, Cannabis indica
tgatccagcacaggaagtgatgcatccatacatatgaaacaacaattgtatctgaaattatcgactcgaccccagttctgccctgccacatacaatattgctttattatattcaaaactaataacaattaaaacgtatatacaaatatcttaatgggctaatcataactggaaagagcagccagagacacttactggatttcacaattcagcaacatgccaatacaaagtacatgaaaattaggtgtatatcacatttaatcaaaaaggttccgaaaccgaacagcttttgcaaggtatatatagatgacaaaacgagtaaataagtacatatttacaagaaaaataatacaaacctcagcagccttcccctgaagaagttcactagggagaatgccaaaacgagcatgtaagctaaggtactgactaatctgcaaaaagttgtacgatagagaaaatcaaacacagtcgtattaacgtgttactgaagcatacaagttatctctgactctaataatagctgcatatagcatcaataagaatatatacaaattcatagaacagaatgtataaaaagtatgactgcagcaagattcaactccagtaagcactgaatctacattatggaatatcatggaacttcaataaacatcattgtaaccaaactatattcgaggtaacaaaacacgaacacttcataattccatcaataatagctaacaccaacataattttatatagatgtttaaattttaccctgcttgaaataatttaaacaataacacctaaagcaaaatgaagatagtaacagtaaactaaattttttctatcagagatgagaatgaaatgactaaaacaaaatttaatcgaacattcatctacaaccagaatacgctaaattatatgaaatttttatcatatataacactaacataaattagatgttttgatgctctgctatgcatctctggctcggcaacactatcgatggcttcatttaaataatgaaagcatatcaagtgctctcacgaattgtaaagcagtaaaataaatattactttcacatttcaaatttcaataacaaaacgacacaggaaaggatggtagcttacttttctatgattgttaggatggattctgtttgctgctaccggatcaatgcttttgagatggtcatagctatcagttattccttcacaatccaacttagacaatggttgtatatcttcatctcctatgtaaaagttgaagtcggtgtttaataacttgaaaagggtaagacaaaattt

SEQ ID NO: 229961 - DNA, 2291 bp, Cannabis indica
accaatctgtaataaatttgggttagatttgatatgatccgagcatctgatctagtggagcgagacggaaaagatttttatatgatttggataagatcggatcatcgtcaaattaactctaacctaacccaatgacattttgaacaaaatattcttatatcattaaaatattctgttaaactaacaaaaattattatatataattacactttatatataaacataaagatataaataaaaataaaatattaacacatattttaatggagtagttggcctcctatttttttctttcaaagtagtaccataaatatttgctaataaacaaaaataatttctcagtaaatagttatagttcgttcattctataatttggctgtatcctaattattatatgcttaaaataaataatatgttccttgtttgacttttaaatgggtttgtgcaaaattataactcgaaaagaatataaagcaaacatatacatataaagtttggttttatatatatgagccataccaaattttcctagctagagagacatttttagcttagtagagtacatagctaatctatgtatttaattagtgagttgtaactcaaatattagttataaaatatgtacttatttttgtgtgtgggcatattttgataacaaacgtataatttgaaattcacaagtttctctcgaacgcaggagaatttggaatctgacttgagaaaagttgattgtggtgggaaagaaaaaagagacttttttgtttttaaaaaattgatattgatttttctcataaatcttaatctaataataataataataataataataataataataataataataataataataattacagtaaaaattctcaaaaacttaaagttgatgtaagttagtctccaacctcgaaaattggcggtaatagtccttaagatcacaatttgtgtaagtccattagtctccaagttaactcatctattaaacccaaataaaatggcacttgtcaatttttaattgatccaaataataattttaattgaaaaaatttaaaaaaaaataaaaaaactcaaaaaataaattttaaaatcataaatttatttcttttttgaaaaaagaaaaataaataaattattttgaaattaaataattgtttcatttttatttttttcattctcacgacccttgctcttctttctctccttcgtctacttcattctgtaccaaaaccttcatagccaccatggtctgaagctctgaccaattttcaccctttccactcatcatcctatctctcttgaaccccaatctcaccagtcccacaccatcgcatcaccccaaaatccaagtattcgtcctcaggttctccttgcctttcccttcaacccagtgacgccatcatcacctcctttcgtgcttcgattctcttagatccattcgagctgcactacctcaagattaactgccgtcccatgtttgtccaatgtcctgttgtccccatgctcccctttcataccccatccttcttgctgcccaaatttgattttttttagcaaaataggtttctagtgagaggtctaaaaatgcctcgtcgtcgaagcctcaccctgtaatggctccaatttgggtatttttaaagtccgacgagccaatctataattttggattttgatacgatggtggtgaaaggcagagaaggagagaagatgctgaacaaagatcttgcaaaaaatttaaaattcaaagctggcggttaagcatatcaggatggcaaatgaggttgttccttagcctctccatcaatggaattttcatggccatggacgagtttatccacgaagaagaagaagaagaaaaagaagaagaagataaggaaagagaaagcaaataaaaagaaaagtaaaattaattttttttttttttgcaaaaatatcaatgtttttatttatctatttttagtaatttttattatttaaattattttgaaattatttttaattaattattacttggaccaataaaccttcagcatgtggctttcttgtcagtagtacttaatagatcagttaacttagggaccgatagacttatataaaatgtgaccttggggactattagcgccaattttcgagattggagattaatctgcatcaactctaagtttttaggaacttttgccgaaattataatgattttttactcaaaaatctagactagactactaagccacacctgctcactagattggcaagaataaaaaaagtagaaagtaattaataagagagacaca

SEQ ID NO: 229962 - DNA, 1375 bp, Cannabis indica
gctctctcagagcagtttcataagttccttactaaacctaataatgtcatgtctgtctcttcttttgtaggtcaaccatccactagcattttaggtatgtcatcttctacatgggttttggactctggtgcttcacattgtatatctccccattctacattgtttatttctttatttgtgcctgtcatgaatattgattatactcccatgacattagttaatattggttttattttcaaaatagaaagttggtgattgtactttatttattggtaactaaagtaggtaaactgagtcttgtttttttattttcaaacatcataacaagaaagttggtaactattaattgagaatggacagtgtagtttccattctcaacccccaaacagattatctcagttcaaattttatgacacaaataaataagcaaggataaacagaacaaaaataaggtgtaaccctgttcataaacagaaaagcataactacataacaagggctgttagtttcactcccaagcccttgctccatcaacttcactcaccattgtcttgaagcattggatgagtttgtctttctctttgtgatggcattgcatctgctactatgcttgtacttgaacatgagtcatacaaggtaggatcagttgtcccttgttcaatttgactcattaaggtgctgacatcgttgaatttccaatcaactaagtaaccaggcctcgaaacttcagtgctcacatcagtgtctcctgaaagcattgccaccactcttgacattgatggccgagctacaggtgatgtttgagtgcataaaaaagctacccctatagttctcctcacttcttcagcttcaaattctgatagttttgaatcaacaagttcgatttcacggtctttttcatgtaaatcccaagcctattgagcaaaaacaatgatataatgtatgaagaaatttgaagttgtaaagtaagatgaaattcatatagttcctagcctagtgaactatatgaatgatgtgaaatttgtgtttgctaagattagaattcattaaatatgatatgagacatgagaagagacaaaggctttagtaccaagtcaagaagaaaagctccttcttcacctaagcttgagtctgaatttggtctgccagaaacgatttctaatgccacaactccaaatgcatagacatctgttttctctgtaaggtgtccacgcatggcgtattcaggtgcaagataaccactgcagtacaaatgtaaaagttcagtgaaaaaataagcacaaaacataacaaagtttaatcataaagaaaaagtcttacatagttcctgcaactcttgtacttatatgagtctttttatcatcataaagtttggc

SEQ ID NO: 229963 - DNA, 2313 bp, Cannabis indica
caattctccagtaggaagtaaggaaccaaaacctcatcgtaaaacatcactaggtttatgcagatttctaatcactctacttgacacataagaatgtgtagcaccagaatcaatcaaaacagtcaacatagtaccatcaatagaaatctgacctgtcacggtagaaggaccaacatcagcctttgcctgggttagagtaaatactcgagcaagaactagagtgtcatattttttgtattcctctccctataactgtgggcaatttcttgttaggacctgtagccggtgaatcgttagatcttttcttacggtcattagggtcaacaccctttctagagcccacattagacgtttgtttcaacaaatctcttctcatactattcttcttttgaatttgataatctggaccctcagtagtaagagctagctcaaccacttgagcataagtttggacaatccctggttgtttggtagctacaattacttctcaagcggtgtgttcttccagtccgtaaatgaatttggcttttctagcagcctcagtggtcacttcatcaaaggcaaactttgccaatcaatggaacttggtgacatactctgtcaccgtcatacagccttgggttaagtgtatgaattcttctgccttcgcagctcgaatagattcattgtagtactttcgtaaaacaaggttcggaaggcatcccaggtcatgttattcagatcatgaccctgggatacaattttccaccaaatgcgagaatcctcacacaacatgtagatagcacacccaacctgatcattactctcaacccgcatgaagtcaaaaatggatgttatcatgctcatccattgctccgcctttagtggatcaacaccaccttcaaacactggcagattctgcttcttaaactactcatacaacggctccaaacaatttcccacatcctatggcactattaaaagtgctagagggttaggattgggattaggagcaggctgagctttctgctctctcagctctctaatctgatcaccttgctgtcggatagtctcttgcattgtagtgttcatttattcctaattttgtggtagtagagggttcgcaccctcactgctcgacccaagcccagaaagctcacgattaaccctattagatgacctcgggtgcataatcaaatacacctacaatcacaacttttgaacttttagattcttttaagccaaaatcaatgctaataagcattaccatacatacacatacacaacgactcttatttataacctatcatgcttttttaataacttgcacattcaggtaagcaaataattcaaacaacttacaaataatctaataatcaactaacaattaacacttactgaaccatgagtcgaacgagtcttcacagccaatgtacatatcaaactagtcttcaggatctttaaaccttggtcactttgatatcatcttgtaacaccctattctgtagggatgtcacatgtgtacttttataatttagtctataataaactaactgtttaagaaaagcatggtttaatttaaactttttagtaaaatttattcaaattaaaacctaactttcttttaaaatactgctaaattttgggatccccttatttataaacttttacaacacaacacaaaactgttattacaaaatgggattacattttcaaacacgatcaaaaggtgaatcctagcagttatgtttggtatcactttcattcactttgaacttcgttcatatttctagaaaagagggtctttattgtgtagaagagtgtgtgttcgactctacctgtatgtttacatctctggtattgtctttaatatctatagtcaagtctataaataagaagaacaatagtgcaaacctttaggagaaggttaataaagctttcgggagaaagtttctcaagtcttgtttcaggaggaagcaagcactctttaagcaaattgatgggagttcgatcacttgaggttccagcaagattcatttgagaatgtagaatatgtcaagcttgtagcatataataagagagaatctatatacactaagtcaattactttgtgtttttgagatttatctaatgaatcttatctttgggcgtgaccctatggactagtaacaatttgcaaggtttgttgataccacatataaaaatcttgtattttttatttatctacactattttttttgttctattatataattaggttatgtccttttccagggtattggcaaagtttaccagtatgggatgtataaagtatacattggaagagaccgatat

SEQ ID NO: 229964 - DNA, 626 bp, Cannabis indica
tttttaaaaaaaaaaaagtttagctatttattaaatttaagttttcagcattaaattaagttaatatattgtaatttatagctacgtattaattaataaatatgtcatagtaatgtaatctttattaatattatcgaaacaaaagaaaaatacagttgaagaataaaaaaactcaataattcggtatgagtccctaaattttgattattgggagactcttttggccgagtgctttctattaatggtaataattaattcatttttcttaaagaaagaaatgggtacaactccattattaaaaataaaaaacaaaaacactatgggcgcaaacaagcaaataagaaagaatattcaccaaaaatgtcagtaagctttatctatcaactctataatatactaaaatggctataacttatcaatcattgaaatttcagtaatcaaagtattaaattcaaatatctttcattaataattataagagaaatttacacctctatccattatacctattttatactacactttaaaatgttcttgaagaaacgtatttgaatatttggtatggtatacgcagtcctttcttttgtcattttttcctctttacttattctttctctctttcttct

SEQ ID NO: 229965 - DNA, 942 bp, Cannabis indica
accttgatcatcctcaaaagctgtttgtttcttcttacttttttcgatgctggatagttgatattaggaaagcaagctttaatattggaggtaggtaggttagttcttagatagacaattgatatttttgattctgaagacaatatgagtgagttaagcaaactccaaggaactcattggacttcatttagggacttttttctgtagccaatgccattatgcaaaaactatttgtaaggaaggctgtttgtgaagtgtagttgtatatgtcttatatataaataattaagccatgttttgttatgtgtatattaggtgaataaataaaaggttaaaacttgaaaaaatgaaatgcgcccaccgtggggctcgaacccacgaccacaaggttaagagccttgcgctctaccaactgagctagacgggcttgtgatttttactggtcttcaattgtattacaattaaaatgttatgtttcaaaaattatgccaaataatttacatcagattttttaaaagtgctaaattaaagatatcacaggacaagttaccatttttttaaagtaaaatccatcttaaattaaaaaaaaaaatgctaaaaggcacaattattcaattaatgcttaacaccacgttactcaatgttatataactgttactgtacttaaatatcgagtcccatataagtagagcattgaaaaaagtacttaacaatttccataccatataaattttttttttgagaagaatacaataatttattattttttatttctcattttcttctttccattttccttactaaaatccaacttctaaccataccttcatacaatttttttttgtcataaaattattatttaaattttttattttctaacgtttcccatctataacccaatgctgcattagtcacattaataataaaatttatttattatta

SEQ ID NO: 229966 - DNA, 1739 bp, Cannabis indica
agactgaaacatatttatgttagaacatatatgttttgtagcaccaaaatctacaatccaagcattaaattttggcaatatagagtttcatgataataccatattagtgttacctcctgatgtatttggatcagaggtgggcataccagcatgttgtgttgctagaagattgagcgattgttgatattgtgttgttgtcagttggggaaaaagggtgttgttatcgacaatgtgattgcagccttcattgctggtttccacttgatttgctacaacatcctttgtcttcctagtcttgttatatcgtggaggatatctatgtatcttgtaacacttttaaatggtttgaccatgaatgttacaatgtgtgcaaaaaggtctgccccttttaggtggatgtaattttgaagcttggaaattaggcctgttattggatggattttctttctagaaagcaaaggccagattttgattggggtcaacagtagtgtttaggtgtcctctttgagtttcttcttggataacaagatgaaaaactctgttgacttctgaaagaggatctatgatcaagatactgctcctgacttgtgaataaaaatcagacaatttcatgaggaaagacattatatattccatatgataatgttcatgaagtttcttgactcatccacaagtgcatccattacaggttgaagtaggcctatagtttgaaagttgttcccatgtagttttaaatttagtgaaatacatactcactatttgattgtcttatttcaaattcatgagttatttccttagattgaagatgtgaggccatttctttggtgaaatcgcacttttagatcagtacatatagctgcagcaaattcatcatatagaatacttaaagagatttctttagatacagagtttaatatccaagaaataacaatgttattatttcaaacccaaacattgtataaaacatgatcagaagaggaaggtttaggaataaaactgtctaagaacctgagtttgttcttgacagagatggccagctgtattgctctactccacataatgtaattgtcttgtcctataagaggttgtgacaccaaaacgtttcctagattatctccatggtgaagattgtacggatccgtaggatcttcaagtatatttttggttcttacaacttgcattccctaattgccttgcataactggatcacgagggttgtcgataaatgtctagctgtaactccatctccagtacgagaaccttgatcttctgaagacatcatagatcgtagagaagtttaaagatgggaagagattctgaatagtcgaatcgatgatgaaaagaatcctttgaagcagtatcgagatcttgatgctgagagaagaatgtcgctagagaagagaacacgacgatgagagaaaagaatttggatcaagggaaagcattattttctcgctctaatagcatattacggatgaagaagacgagaaagaagtaatgaattgtattaagcaaaattctctctaatacaaagtatgaaaggcaacgtttatataaggagctagtgagtacaacagcccgaatcaagaaagctaacagaagataagttgagaagctaattaatcaactaacccaaaacgaacttaactaacaagcagagtaaacagttacaatagaaaagaccaacttactgactaacactaaagcctactgaaatctattatcagtccacttcacaa

SEQ ID NO: 229967 - DNA, 734 bp, Cannabis indica
aatgcagaggttcaaccatatataacgtaagttatgcatttggttgatcaattgaattcataatccattcaattaactaattttttttacatatattatttttgattttcaatttattttggtgaagggtagtgagcatatggagttattacagtcaatgattccgagaggtcacaaaaacaaacagaagtgggttatagatgagcatcgtaaaacatttattaggtggttaaagaataccattctagcgaagttacgacaaccaaatcatggagtatcagatgtgttgaatcgcatagctcttggaccaacttttgacgtatggaagcatcaagcttacattgtcaatggtaaacggtttcatacaaaatctagagatgatgctcgaatggttcagaatagtggtgtatgcatagttgcggagtccttacattttgctacttcaaaggataataatccagtttcaggtaccatgacatattatggagtggtgaatgaaatatgggagctggattatacattgttccgaattgccctctttaaatgtgaatgggtagatgttaatgttggaattaggaccgacgagcttggatttactttggttgatttgaataagaaaggaagcaaggatgatcctttcatcatggcgacccaagcagtacaggtattttatataccagatcctgctaatggtaaatggtctgttgtgttgtcgacaccagaaagaaagttcg

SEQ ID NO: 229968 - DNA, 1062 bp, Cannabis indica
aaaagtatacgagaataatatcgtcggtgcaaaactcaacagagaggggttccatccagaaaaatgatgaccaaccgagaacacttgattttgttagaatttatggtcttacactaatcaattagaatcaattcaggataagtagttcttgaagtttaattgatctagattagaaaattgagatttacatttaagaatgcaattaatcttgaccttgaatgtcaatcttgattttcaagaaagaaacatatatgatagtatgaatcaaatgataagaaacaatactaatacaatgcaagataatgacatacattaagtaatcaacaacagaaggggataaatatatgaacgcaattaagaaaaagtagacaaagattgttacaaagatataactcaaattagtaactaataaagactttgtcacatttaataaaggagttttttttttttttttaaggaagaaaggagttttttctattggtgtacaataaatattattatattacaaaaaatgtacaaaattacttaattaagaaacttatacaaatattggagatggtaaaaaaaaataacactcttaacaactctcatatttttaacacttttaacaactctatcgcacacaagtgatgtgaaataccttagagctagaatcctaattaaataaataacatttttttatcatgaagtttataacataaggataatgagtccatgataaatttgacgttgtagtgtattttattttattttatttttttataaaaaaatcttaagagtaaattagagttcttaagagaaaaaagattgtcacaaagtagtatcaatacaatgtttggttggaggtaatgaaatggaatggaaaggaaataatttttatttcattcctttgtttggttgcattttaaagtaatagaatggcattccaattaaatgctctttctaccattttggtggaatggctattccatttttaaaagaaaggaatgaacattcaattgtaacaagaaaaaagaattaataatttttttattaattttttttattcattttaaattttat

SEQ ID NO: 229969 - DNA, 946 bp, Cannabis indica
gtataactaaccttttctgtttttttttcccaaaattactcctactttagttggttgaaatagtatgtagtggtctaaaaatttaaaaatggaggtccacttccaagctatacaccctatatttatttcatatatatatatttataaatgtctcattaactaaaatataattacaaaagtactaatgcctttttggtgaagtgttaaagttgactaatgatcaaacaccaagacatgttcatgctataaagcgggctagatctatacttaagactcaaaatttttatacacatgaatatgtaaaagaaaaaagtggtaattttgtaaatattgcgaaaataggcccaataatgcctaaacccatcctattgcccaaagccatttcttaagcccatgaaatattagggtcgaccctgctaattaggcatcaagtacactagccaagaatgtaaaaatgttttttttttggaaaagttacaaaaatactgaaatttaggttaattttacaaaaatactgtcacacataatttttttcaaatactatgtttttattaaaacaacagtagaacacaaacagaacaactaaaacaacagggaacaactaaaaaacaactgtagaataacagtgaaaacttgacacagtacacaacataaaacttacactgcattttttaaaaaaaaaatacattatttttgaaaaaaattccatcctataacataaaagtaaaaaagttaaaaatttcattacatggtgtaattatccacatcagtaaaaaaattgaatgtaaaaaaaggatcacattttattgatatagatttcagctagcgtaaatatattgccaacaaatttacagtattaaagaaagtgagtaatttataaatgtagaattatcaacgtaatcattcttaataagtccttaaaacaactcaacatatattgtcaaac

SEQ ID NO: 229970 - DNA, 4504 bp, Cannabis indica
tcgttgaggtcagctagagacacatctccctccaaagcacgcacaatctgtttaaatcgtgtaatatagcagagtaagtttgttggcttcccaatagtaacaatgcataattgaagcacaaaattctaagtatatagtcttaatgctttatttgaaccgaaagtatccaatcctaacttatctctttgcagaaaacatcatcaggcaacaagaaattgactatctacctaggaacttagcctagtgcaaacaatgaatggaaattttatcagaatttgattgctaaggaaaaatcacctgactcatttttggtcggcgcctagcagaatgacgtacacaagctgcagcacaagcaaccatacgaaccatctcattttcatcataattcttttgcagcctgtggtcaaccagctcatcaaaatttctgtcttccaaagctcgattgagcaacggccttgcctgcaataccaacacagagtttacttatcgaataacacatcaaggattgtgtcagcaagaaccaacagagtaagaacatatacagattctaaaaatcatgctactcacccaatcgaccaaactatcctccacataagagtgagtcatatcaacaggtcggcgtccagtaattaactccaaaagcatgattccaaaggagaaaacatctgacttttctgtgagcttcccacttgaagcatattctggagccagatatctgcaagtaattaaatatgaaataaaagttaaatcataccataacccataaagcttgtcaatgatgaaactcatcaggcaaaggacaatttatcttgaagtaagagagaaccatgcagagcataaaaacttaacagcgtagtatacagtgcaatgccttatgcaaattaacattcatgttggaaaatttaaaaaaaaacaacaaaatctgaattccagcttacccaaaagttcccatcacacgggtcgagacatgagtattgagatcagaagtaaactttgctagtccaaaatctgcaacctgcaaaaacaaaataaaagattaggcatgttgcaaacttaatgattaaagtcattacacccaaataaaattaattgaatgccaattcttcatctcaaagaagtgtgttaaaaatcaaggaagtgtacagttaatatcatgatgaattaccttggcctcaaatttgtaatccaaaagtatattagctgatttgatatcacgatgaatgatttttggatggcctgcattcaacattttacaaagttaaaattgaccattgtctttacatcagcaatgcaaaaggccagtacccatgaagactgaaagagagagaacttacagtcctcatgaagataagcaagtcctttggcagatcctaaagcaattttaagtctggtggaccattccatggtgggacgtcctttttctgcaatttataatccaccaaaccttacagtatcagcaaatgtagaataaaatggtgaatcatcttagtgcaaaatctaaatagcaattcaacatacaaatgtttttataatttcagatacattttattagaaactaattgaaagcagaaaaaaatgtaccatgtaagtggaattccatagtgttgtttggaacaaattcgtaaacaagcattctctgggccccaaacatgcagtaaccaacgagtgaaacaaggtgcttgtgatgaactcggctaataatatcaacttccgcttgaaattcacgctccccttgaccgcttccagctttgagctgcttcacagctacttccttcccgtttggaaggactcccttgtggacatatccaaaaccaccttgcccaaggagattggcatctgagaagccatctgttgccaatgctaactcctcatatgtaaatgtgctctttgaaaagcctaaagaatagcctggtggaggtggcggtggatgaggattgtcagatcctgaataattagaggcagagcctccactgctgtttgaaaaaagtggaggcggaggctgtggttttggactatatcctggaggctgagaaagccgcgatgcagctgccggtggaggagatggtttttgcatatagacatgatcggaaggcggaggattttgctgccaatgttgcgggggtcctccataattgttaactgagaatatagcaaaaagcagagagaatgacttattagaacatggaattgaagttgcacctttaagactcaaaaagttaataaaagtaaaacacattctttttcttcttcctagaaacagagcttgaaaactgtatccacactagtaatgtttcgtaaacccatgaaatcagacagccacaatcgatggtcccatgattcccgggaacattttcttaaaaaaaggagaaaaataatgattttccatgagtaaaactttaagcaaaattgatgactcttaaaaataaacagcagaaaaatataataatatccctgaatcagcattagtcttgaacaactttaacggctaatttaaattcaggcaatatagcaccatttcagaaacgggttaaaaacttcaaattcataggaatgcttgtcaatgaccagatctaaaaatgtttcccaaccaaaaaaaattcaaatactatcaaatttttctgagattcgaaaaattcaaaagtcagattgcatgacccaatattttaaaaaaattatagaaaatttgatgaagataaaacttaaataatatatatattttttgaaaaaaaaaaatcacttgcgtaaatataagaagaaaaaacattacctttaggcccagaaggtggtggaggaacatagtaaccttcttggtcgcgtctccttctcttcttcttagtgcaacaaacgcatagaatgctcagcacaactaagatcgccactgcacctacggctatcccaaccacaaccccagtcgacaacgacggcgaacttgagggtcccggtgctgaagaagacctagacggaggaggcgggctccggctaggattagaaggcgtcgaaggagtgttggtacgagacggaggcggaggagtaatcgacggcgtagatggggtcgacggagttgtggatggtgtcgatggtggtggcggagaagccgatgaatccggaggcggcgttgtagtagacggaggcgagggaaccggtgtagtaggtgccggtggagagggagtaggcggggtagctgccggcggagtgggagttgtagaaggtggcggagatgtagcagccggaggtgacggagtagctggtggaggtgaggcgggagtcgttggagtagccggcggcggtgcgcttggagtcgaaggcggtggcgaagtcgagttagtagccggcggcgaagacggcgccggtgaacctcccggagttgacatcgggattaccaagcaaaaattctgttacaaaatggtgctcagtcagtagtcgtaaacccgatgcttctttctctctctatatttcgattgtttagagagagaaagcgtatcagttcgtaagagagagagagagagaattgagcagtgagtaagaaaaagaacgagtttttgaaaactcagtttcttttttccagaaaaagagagatattaagggaatgaagaggaattatcgtctgctgcgcgagacatactaagcagctgtagcctacttcgtacaataagccaaaggggtaaaccggtaaaatggtggagcccacacgattggcccgcgcatttctccgtcttttactcgctttggattttttctaccgtggggtcggctttatctaatatatttttattttttttaaggtgaggacgcctttgtcatgtgctaatttcgattttttgaatttttattttatttttcttttaattcaattctgagttggtaatgttaatagtagtagtgttgcattgctttgcatacgctttacgatattccaaaaaaataattatcaatttaaatattgtattgtgtggggtctttaatgatattttatcacgtatgagttcacactaaaaacaagcacttttatcctttttttctttttctcatacatattatatatacatatccaattaataataataatatgcttctctgtatattattcattctttaatggttggagaatatttgagacttgataatcccaagtaccctctaatccttttttgccattttttaatataactacgaaattgttcacattagatattaggttaagaacttaccaattcatatatatctataggatggctaatttggcaacttataaatttgaagattttactttttctttaattcggttacttttatgtggtataggatgggttgtttcctttcgtagttacggtagattattaactatttttttttttttctgttcagcaaaaaaaactaatatttctttttttccatttgtataaggattgtattagctgatattgaatattttatttgttagagattttataacaatggaagaaaatcaagatttattacaactctattgtaaaataatacaagg

SEQ ID NO: 229971 - DNA, 774 bp, Cannabis indica
tttcaaaaaagaaaaaaaaagttaagggcacctttaatgataatttaatgttatattgctaatttataaaattacacaaaatgctttacatcattcttctgtgttgtacaaaagctttgaagccaaaaacgagaagcgaaaagcgcttagataagggtcccgcccttgacatattcggtgaaagcgagggcaatcaagcctaacatggcgaacctgccgttccaaagctcagcgttagaggtcataagcccactggacttggactccacgctgactcctttaaacagtggaactagtgaagccaatgtgagcactatgctagttcctacgaaccacgacactccaccgttgcttatctgagaaaatacatcttgacccttcgatagctccactgccatggcagccatgaacccaaccattgctaatctaccattgatcctttctggtgctggaccactgaatgccaacacgtctgagaaactcgtgctcacctgtgttcccaaccaaatgaaaaaaaaacccattaagatcaaagttacaaaacacacacacatgtatgttgcttaattgaatactaagctaccttaggctttggaggaggagaaggcgccactggctttggttgtggtgctgttgactctgtaataggcgtcagcggctccttttcaccatcctgaaatataataagaaaaccaaacatgttaaggcatgtttatataaatgtggaaatttttttgtgtatcgacttatatatacgtatacgtacctcggcca

SEQ ID NO: 229972 - DNA, 1196 bp, Cannabis indica
tatatttatatttatatatacatgtatatgatgtagaaagggaaataaataagacaccagtcaacggaactaacaagaagaaaaaagaaagttttaattaaagaaaaaaaaaaaaaaaaaaaaagaaaaagaaaatgaaagatctacataggtgagtcagataatgaggattttgcagatatagacatgaagtaattgatataaataaatgaatgattatgtcgttcaactcaaaaaaataaatgaatgaatcatgcaaaagcatgggctctccataatatactatataacgtgggaggtcacagcatagcacaacacatgaaaggaggtagggcatttatatattgattttgaatatggaaccgaccataggattaatggaccccacaaaatgcccccaaaaatcctcattgggaataattaaggtgaaaagcaacgacatgacataatcacttaaatagaaagttcaactgccattattttatatgtcacctaatgatttgttctgctttttttattttttttcttcctcttatcttagattttggaatacttcttaattaaccctctccaaaaatatatctaaaaatttaaaattttataattactaatgtttcatcaaagcaagctttgtctgttttaattctattggaatataactattattcaaagatacctttttttttattgtttgttttccatataatttttttttttcaatggaccaatgtatggttgaggtttttcaatagatcactatctatgtgaaccataaataaacatattttagaggagaactgagtgaggagggtttcctaggtatataattgaagacctgtttaattggggatctatatcttttcataaaattaaaccaattcaaagattgtgaattgactggtgagaaaacactagtcttacctgcttttataacagaagtggaacaagccttaattaagggacgccatgactccgtcaagagtggtaacttgtttttttttaacatatattaatgcttctttttcttcttcttcacttttttgttatattattttttatatataaatgagataagatcatattacttccaaaacaatactatttacaaactaattagcacccaacaacaggcccaataatctaattatttacaatgaaacaaaccactctatgtctttttgtttagcctttgtttt

SEQ ID NO: 229973 - DNA, 920 bp, Cannabis indica
gaccttccgttggaataaccatagtaggctgaacagagcaaactttatcccagtgagccaatttgccacaagtaaagcataaatggggaagcttctcatatttgaattgaacccaagaatcaggcttcccatcagctttaagaaagaaccctgatgggaaggggtgagccaaccaaacctctatccaacatctaagataaccccttctcacaatgtcctctttacgcctctcctccatcttaatcaggtttcctactttctttgcaaggatagggacgttctcatttgataaaaaacgagtagggagtccatggaattggacccagaatagtgccacatcaaattctccaactgagacctctccttcaatcggccaaggcttgagattaagaagaacaccattgataatccatggccttttttccataacaaagtggtagtcctcttcttcctcaaaaaagaaaccaagaactccatcgtcacacttcttcattcgccaataacccagcttcctccaaacgccagcaaggattttcttcactactgatgccggcatatccttacacccaactaccttacccacacaagccttactagccacaacatcctccaaagtaatatcttcaaaaaagttctaacatttccatctcaagaccactgtctctagctaacagttcatctttctcagtatcaacaaactccacttgaatctcttttcccttttcccccatactaacccggagaaaactttgcaataactaggtaaaacactgatcagacccccaagaaaacccaaagaggcacacagaaccaccaaagcaagggacacaagacacactagctagaaccgagaacagaacttgctaacaagaacaaaaaagaaataaggtcaggccttaaccacaatttgttggttgatg

SEQ ID NO: 229974 - DNA, 992 bp, Cannabis indica
aaaaaaaaaaaaaaccaaatgactaaacaaacctttctgcaaatgtttccactattgggactgacactgggaccaaaatctgttacatacatatatatatatatatatatatatataaatatatatatgaatattgtttattgatagagaggagtattagagtaaagcgttttatgagattaactaaaataaaattaatcaatgataatccatattcatttttacaattgaaaaagaaacattagaaatattgaatatcacgttacatacatgctttgccaaactcttttccgaagaacatatcttcccactcttctgatccagccagtcttgaaataatcgtatcgccaacccactttttgccacaattatttaatgtcaaaagaataattgatcattgagtattgaataataataatactaataattagatcatgtagtaatcatatctacaagcttttattacaaccaaaactcaatgattgcagagcagtggaaaatagtttcattaagagaagcttttaacaagtaatatacgtggacttgattaacagttaactttgttttgtaattacttctaacacaaataacagagtagagaaatatagttatcaactcttagtgactaaatagtaattataaaatttaccaaatatttcatagattgtaatacactcttaggaacatgcccattttattagcttatcataatactttttgaaaaaagtttaattttgtgttaaggaaagggttttttgttgtagtgtattttattgaattagttaggttaagttgaaatagaattattttattgtattaattaggttaattaaattgttgttttgctgttttgttagaagtttcgaaatgtatagagattggagtacaatgtggttattatgttatgaagattatccagagtttcatgacgtttgttaatcctgcaagttttttgaaaaatcatgtaaacatgaataactactcttctttat

SEQ ID NO: 229975 - DNA, 637 bp, Cannabis indica
ttatctcatgaaaagctttttgacagatatttttagattcttaacaaaatgcttacattacattcaaaaaaaaattagccaaaaggtcatgtaggataaaccatattattttataaaaataaaacaataaaccatataattttttttttatatggtttaaaaaaccatataaaatttaatatacagctatatcgagaaaaaataatacatatatataaacatttatatacttactccataaagtaacatatttatactagttatatctgagtaaacttatactacaaaaaatagttatttttcatgataatatatttttttttgaagaaaaaaaacttttaatcataataaaaaattatttgtgattaaaatataatatttaaatacaagttgtcactaatttacttttagtcacaaaaaatattatgattaaaagcacatgtgacttaagtatggtaatttataattggtcacgactcttttacttttaataacaagttttgttatgactaaaagtaaatttttttgtagttagtataaatttattagaaatgctaaaaagacacccatagtgcctagcatcttcctacgtgtttgtttatcgaggttttggaaaaatgaattataactaattaga

SEQ ID NO: 229976 - DNA, 1580 bp, Cannabis indica
agcaacaatggtggaattgtacatgggcccacttataaaacactcttcttcatctctacatgtacctatgcttttggcagccaagaaatttttgatattttcttcaaataatacacagtattgggttcttggtggccttttattagcagctgctaacttatgtgtttccttttggaatactcttcaggtaaacattaaaatatgatatatataataaatctttttatataagtgtgaattttgtcttattgataagatgactgaaaatacacctaatataacattgagtatatgaatttggagatcgtttagaacgccgtattaagtcgtattgtattgtactgtattatattgaattgaattatgagaatattttagttcaatactgttttttcatcaaggtgtactttttagttatttaaaaatatgtgtaaattttgaaaagattgtgaataatttccaatgtcaaaattaaagtttaaatattttatggtatattgtgttttctcttatatagtttttgtaaataatgatttgaacttagcttttggaattataaattatttaaatttttttggaaaaatttatataagtttgaaatattaaggggcacacatagtatttaacactattctgatgagtaatattgttattggtgcaactcaatattataaataatcggtgactcgttatagggtaacagaatcacgtgtcaacttgttgatttaccttataaatttatgtaaatatatattactggtatataataataatatatgaaaatggtgatgatgatatgatgatcaggctggaactgtgaaacaatacccacaagtgatgaaagtggcatcgttttacagcaccattggaacactccaatctgctttactttcagccttaatcttcgaaagagatcttaatgcttggaaaatagatcttaacaccacccaactccttcttattgttttaacagtaagtactaattaagttctcattaatttattgattattaaaccaccaacaaattattattattattattgtttgacgttgaccaaccacatttataattaataaaagaatatgcattgacttattaatattatatttataggcaagctttatgggtgttattcgaagttgtgttcatctatggtgcatgaggatgaaaggtccattatatgttcctatgttcaagccatttggtgttgtttttgccactatttttggtactagcctccctgcaagtactcttcgttacggaaggtacatatatatatataatatacatatattactttatattatgatatcattttctagagcattgttacaatagaataccgatatgacacgttatgagtggttaatgatatttttaaaggtggcatctaataataattagttagtgatattttttaaaagttgctatattagattatatgtgttcgatacttaattacaacgatatggtaacgaggaaatgttagtaaccactaagatggttttttagtatttctctttttaatataataagattattattctcatttgcatatacgttattaatatatattatt

SEQ ID NO: 229977 - DNA, 1726 bp, Cannabis indica
attctggtgttgaatctttaattttgttctttttatattcaagcttaaatcaagaatttggggcttacagagaccaataaaactacaagtggataacatattatcgctgaaaggagttggaccactataaaaactttatgttcaccttgattaaatttctttttgataaaatcaatttattgtgattaacaaatccttgtattcatcttaattatttacaatcttctaagaccagtaaataaaaaaattgtatcaacaataattatatactaaaatagtaaaaaagtcacacaaatatattaattttatagtagtcaaacatgtacaaaatttaataaatttattaagagtaattataattatcatttaaaatacacttaaattatttaatcttctaatcaaagtttgggtttcgggtccagatcctcatcaatgccattttctatgcactttcttatagtcgatcttaacttccaatatggataaatgaaaagataatagtgtaagactctgcacactttattgaaaagtattactggaagatagcaaacgttttccagtagatcacaaactttgtgtagaagatcccaaaataattctactacccttttgctccttgttactgtgtacaatataagaccaaagaaagacaatccaataagaccagtggcaatagcaagagcaagggaaggtgacaatactgcgtatgtacccgtaacaaatgctatcaccattaatcccatagccaccattgctaaaaccatagacacaatatagtacgacactaagtcttcactatgttggtcagaagacactatagtgaggaagaggttcataaagacagaggtagtagagagcaccatggctattgtgtctgttatcatgaaagcttgaaaggctttgttattggtgagaacagcagtgccaagtagttgttgttgttgttgatttttaagctcattacttaaataacctccgggtaaagtgaaaccggctgtaaatgttactgttgcaattaatgttgctgcaactagagctgactctttgtattttgtagtgatgaacttttttctttcattccactcatttctctcctcttcctttaatttttcgcggtctgttaatctttgttcgtagtgagaatttactagcaatgatctttggtaaatattctttaatattttttgtttaaggaggatttcaagcagtttttgttggatctgtcatataagaaagaaaagaaaaacattgtagaatttttataactaatagcaagaaaagaaaagaaaatcacaaagttcatattatgctaattagaattttttttcacccaaacattgacatgtatcatatcatacccctgaatttttaatatcgttaaaaattctccttgaactattgagtttattataatttaagatttttgtccaattttagtaaaatttaacatgaatgaaagtttactgggcatgattaagcagatattaaaatttgaaagacatgattgggtagatatcaaattatggggagcttgatttagtaaatggacaataaccgaattagtaatattgaataaaattgacaaaagttcttaaaaattcaatgatcttaataattaagaagaccttttaacgattcatattaaatacgtaccttcttatgttgttttttatccagacgattcaccatatctaaaatattgatgttttgtttgttggatgccatc

SEQ ID NO: 229978 - DNA, 933 bp, Cannabis indica
aacaaattgcacagtcttcttcttctagtacatctctttttattattcgattctcttcgtaatttactctctgatgaaacaatttttgaacatttgagcaataccaccttgtttcgcaccgctatctactatgggaatatcttcttcttcatcaatgatgatcattttaattagtctgttgtattatgtgtttttgttgaactttcttgttaatatatataataacttaattaattctaattttagtatatttgaatttgaattagaaaaagataatattatattatgtgagaagataaataactgaataaataatattgtataattagcaatatatagccatgtcactttatatcatattatattattattatacaatatatatttttttatatagaaataattaattaaatattcaaaatgtataagtctctccaaacaatataagtcacgaactcaatgaatcctctctacactcaatcgatgtggtgttacagttataataaaatgcataaaacaaaacgataattgcttgaaatattcaaattcaatgttaagaaactctttaattatgttagtaataaagagtaatttgcagtaaaaatatataagtttaacttctaattataaatataaatatctaaatttaatttttagcggtaataaaacataagttttatgagtttttttacaactaaccctcttaaatatcactcaacttgcatatttaactctctaagctcaaattttgacgatatataaactccaaactactgaactgcttgtaaatttaaggtgatatctattttttaccgttaattgtcaatataaactacttatgtatacacttttgtacatgtgtcacatttatattggtacacctactattattttttaaaagtatataaattatttcaaaatttacaatgtttt

SEQ ID NO: 229979 - DNA, 2562 bp, Cannabis indica
atttaaattaaatttctttacataaaatatctatataatttttaattttaaatatatataataatattataaaattaataaaaaaatattttaataattaataagatattcggttagaaatccaaaaattatcgttaaactgaaaattctattacatagccacactttatagaatagatatattttattattattatttatttattattttatatatataactttgactccgtcaaaaatggagtctttacaaatattcattttaattatactcaaattttatttatttatttatttatttgacaaattaatttttatttctaataaaattacacctgaaccaaaacccacataggcaactaaaagacttgaagagtgccacatatgcccataacggagagatgaacaaaacattaaatttgcaaacataactaaacttaaaaaattttaccactaaaaataaagaaaatagggttaataactaaaaaaaatatgcagattgatagtgggttgacggtgggttttacttggcatggttttccaattcggtacgtgcatgattgatggtgataatcatgtatacatattataatacaaaaaaaagtatttgcttgaactaagcgtacatagtagttgaattatatttgagtacaagactcaacaaaagaattaatccctgaataaaattgaacctgtaatacaattctacaccacttatttcaacgccatatcacaaattttcgccacctaatcgtagattaataatttatgaatcaaactatgaaaaataaaaaccccaagaaatcagaacagcaaattaattgtgaaccatttcttacactctatacctaattcaccaacaaacaaacaaattaattaaatgagtaatttaaaaatcatatctctaccgacatacacaaacgatcttccacccctaacttgttatatatacaagtaatatcaagatactaattaatcaaacattcaaacctaaatagaatatagatttgaaaactatggcaaaattggctgcattttttgtgctttttttcttgggctacggcagcttcatcagaggctgcgatttcatgcagcgacgtaattaaggacctgagaccttgcgtgagctatctaatgaatgggtccgggaagccaccggctccatgctgttccggcgtctcaactctggcgtcggcggcttcgagctctgctgataagaaggctgcttgcgaatgcattaaaaatgcagctaagaacatcaaactgaaaacagacttagctcagtctcttcccaaggactgcggcatcagcttgcccttcgctgtttctcccaacactgactgtaccaagaataatgttttttatatttctattataaaacatgcatgcaaatagtgtagttaatttgctcaaaattatgtgtagtaattattaaaatataatacgataaaattagtcatatatatttttttatttatcaaatgcatatctttaaaataaaaatattttatgaaaatgttctatactagcgatattatactattagcggcaaactaatacttaatatataagtgtacaacacgttatttgttgcaacatgtggaaatatggatgacaataagtagtgttatataaatgtatatatatttaatgatgaaaatgttgatctctctttttcccatagagaagtttgtaatactgaaatataagcaaattaatttctagcgaaatgactattttatattaataattatctccaattcctgcatctacattttccatttgtaatttagagttcaattgcataatattctgacaatatatacattcgactgcaggattgggtgaatgttgaagttgatgggttctatgaagcgtactgctatatttggttgtatacggattcgagatcgtacgttgttctattcgacttttgtagtaggaatgttatttaatattttatattttgaataagccccaatttactggtgtattcctgggattgcttcggcccttgttgtactatcatgcttttaagcatgtttttatgtcatgcactttgtgcttgaactttatataattagatttggcttttatttgaaatataattaagggagattaatttacaaaacaaatagtggaaacttgaacttagttttaacatatgtaggaaaaaattatattaattcagccaaaatatgattttttataattacaattttacaatttgagataaaatgaatgagagtccatcttaaaactaattggcaacgggaggagttgtccattcatcttatatatcgcaatttattttcacatattagcaacgtgactaactctaatacatcctcctaacgtttgggcctagaatgtgggtataaccaacgaactttaagagaccacaaggtcaaacgtgatatttaaaagaatcccacaaggccaaatattgagaaatttgtgggtgtacacgttggaaagtttgtgcattttgaaacaggtcaaagacccaacactggaaactactggcacacattggccgaaaggtctcaaatggaggttaaa

SEQ ID NO: 229980 - DNA, 1824 bp, Cannabis indica
aaaaggaagcctttcctttatatttcccctggatggtgcgtatgttgcaaaggaagcggagaaagtgttggccacctgttcttcgaatgcaaatttattggaagagtatggcgatacgtgttgggagaatttggattgtcttgggtcatgccacggtctgtatcacatttgatagcatccaagctaatcggaagtaaacgcaaaacaaagctatggaaatcagcgatattagcaacagtttgggccgtatggctagaaagaaatgccagaattttcgaagggactactaaatcagaagaggaggtatgggagcaagttaaattttggacagctacttgggtctttagaactaaacactttgaggacctatcctttttagatttgtgtagagaatggaaaactattgtataggggttgtagatggttgtatctatcccttttttttctgaggcaaagtggggtgtactttggcctagaagtcatgttttgttattaattgtaaccatggttttctcccaccacaagggaggcttctaatatttatcgggaaggatcctgtcaatgacaaaaggatcctctctctttttcaaaaaaaaagaaaggtacagcttcttgctgctgacttggatgtaatactagagattaccaatgaccctttatttacataatctgtttcatatataaaaaagttaacatcttttgaaattagtacagggatagtgttcagatgaggatgttaatgaaaatgcccaatgagcaaatctcatgtgtgtcaagtatcctcaagcaccctgtttagcaataggctgaaattgatatgataaaattgatcatccgtggactgattcacggttttgtggctctgtacttgaatgttaagctgttggatatgtagtatttcaattctgacaacaggcttagtggttttgcttaaaaacttctgcattttatgggataaatgatcctttcagatgtttgttgcaatatcttttttgagaaccctttgccaattcttttccctatctctaagttggtgttttggctcaataatcaattctagctcttgctgttgatcatttagcctgagtattattgtttgatggaagtggaacagtggtgctattgagcacacaatgcacccattgattctttggatatggctgtttcaagctttagcatgaagcttaagattatattctcaaaacaatcaaatcctattatctagttgcaacatgtatttgaactttattatgtttcccttgtgacttgtaaaaatcatttattcatacatattttttttgtgaatctgctgtgtagttttgatgagttcttgatggacatgaagcaaagtaaaaggaaaaatattcgacaagaaaggaaaaaggttagtatttcttaagccagatttattaagcttcagttagatgttaatttagggtgatcaaatcaccaaattacttatgatctggtaaagaaatttgtgcacacaacctttgcactaggatcctccagacttcgtgccatatataatgtggacctatttcctaaaaaaatgttgcaagaaagatgacatatcactgagttttaggtttaaattgttgaggaatactgtttgtttggggtttgtaagaaatctttctttctgttgggcaattaatgacatttatccatgaaaggattgaacacattaaaaacacattgttacaaagattgacacttcttagatacaattttgcagtaaatggtagagtatgacttgctctttgaattttgtagtaaatgtctccttttgtccaacagtagtgttatttttcttattaaaat

SEQ ID NO: 229981 - DNA, 1364 bp, Cannabis indica
accataaaaatgttgaagtggtcttataatcatgctaattaacttacctgctgattgctcatatcctcatacccaatgttgacttcatttgctaagacctattagcaagcaaaaaagaaacagcacactatgttaaggtcctaatcgaataaaataactcctccagggtaatgaccaaggggaaaaaatatcactactcaaatgaatcagttgacctgggataagaggacaatctgttctcctttaaacctagccaaagagtatcgcgcctttgtcaacagtttcaactgagcaaaaaagaggctaagaaatcagatttcaaaccataaattatgtactttggtgcaatttttattttcaagtacagcagtacataccccaatggagtcttcacactcctctctgtccaaagaataaaatattagaaggatattaataaaataaaaaagtgcacaaatgataccagcaacaacaatcttaaaggtaaagaacacttctaggataatattcactacatttctaagtgtcataaaaccaatgtggcatactctattagtggttctgagagtggggtaaacaccaaaccagcaatgatcaagtaagaaggttgacctccatcaatatgatatggaacctagtacaagaaacacaaagtaattgggattagaaacttttgtgataacactcaccactaattagcaggatctgactaacttaccaaatgcactcgtggttttagaactactttaactttcataaattccccagctctaataacaccaagctctgcaacgtcaccggcaaatctgcataaaagcaccagaacattattgaattaatttaacggcctaaaagtacgaaaaatatggacaagggaagtaggacagcaaggaataagttctctgtacacaacgtagaaaacaatatgaataaagctttctaaatgaaattttcattgatcagaatgcattacttttgacttatgagatatcggaaagcaatacgctcatttgaccggaatggcactgttccttcacatcctacacgaatatcatcgaagcttactatcacgtccccctgtaaaagagcaagatttactgtgtcactaaatttgaaatattttgacactgcagaagttcaagcaaatactcagtgatgtgtttttttcagtgctaaagtatacttagaaaactgaaataacatttagaaacaaaatatgtaaaggcacacaagttttagcagctgttttgacacctcaagaaagaaaaaaatatcccagatgacctttatgaacaaatgtggtgtcggtttttttaggctttacgttcccactttatgttcaaatgtccttacaatccagtcca

SEQ ID NO: 229982 - DNA, 2088 bp, Cannabis indica
taaaaaaaaattgtgtaggaataaattaaaaatatataccataaaaaatgtacataaactaaacaataactattcaaaaaagacacataatgtgctttcttttctaaacattagtaaagatgctttaaagaaatcaatgctaccactattatcctcattccaaagacagtgtgcctagattcagtcagttattgtagaccaatttcttgttataatgtggtttataaagtggtgacaaaaacgatcagaattacttccataaattatttttgaaagttaaaatggctttataaaaggcgggcagatagtgcacaacataatagtctgccaagaatggtcagaggctttgaaaggaaagcaaaaaaaatcagcttgtcttttcaaaatcgatttgtagaaggattatgacactgtagactgagagtttcttaaaaagatgtttaacactctcaacttctcgagtaagtttgtggagctaattatgagtcgtgctttccctctcttctcttttatggtgaatgtgtctttacatggttatctccaatataaaggggtcttcgacaaggggacccaatgtcacctattctatttgtgataagcatagaatacttgtctagaatcatggctagaattgccaagacttatgattttgccttccacccgagatgtaagagcttgagacttaatcatttgtattttgcagatgactacttattttttgcaagggtaacttcaaatctgccttgctccttcttagaggcttccagttattttaatttgaacacttctaggcttaaagtaaatgttgggaagtctgttgtttatggtgcaagtatggaccctcttttctttgatagaattattaatatgtatggatttcaaaaaagtactttgcctttcaagtatcttggaatgacaatttgttcaaaaaggatgttgaaatcggattgtgagggtctcgttgagaagatgatagctagaatcaaaacttaaatttctaggaatccttcttatgttgaaagaatggttttatcaactctgtgttgctgtcaagtaaatcttattagtcccaaattattaacttgcctaaagttgtggtcaaaaaattattcaaatttgtcgagtttatctttgtaagggagtgaacatgtgtaatggtactgaaaatgttgcttgggatgatttttgtaaacttaagaaagaaagtggcttgggtttcaaagatataaccttatggaattagtgtgctactggtaaacatgtgtaggctatttattccaagaaagataatctttaagtaaaatgggtcaatgatgtgtatctcaaaaactaaggttggtaggactaccaagagtcccattggaggctagctgttgctattgaaaaagaattgttcaagtcaaggaaaggataaaattaatcttctctcaagaggactaaatatcaatttttcatagctggtttgtgttcaaaaaagtctcaagtagacgtagttagatggcattatggtggcatttaggatagattttgtgctccaaaatataggttcataagctggttagctttgaagagtagactttcgacatatgacagactttgtcagtttggttataccaaatctttatcgtgtttattgtgtggaattagagtggagagtcattctcacctcttctttggatgtgtgtatagatatatagtggttcaacatgtttggttttgaactaaaatttctactcaaaaaagagatctttatgaagtctttgagtggattcgacaattaaaagctttgagagttaggagaagagttcttttgagtgccataacaactatgatttattacatttggcatgttagaaacaaagtacttttggatcaaaagttacttactgttaaggttactacacgtattgttcatagtgtttattctagaatacattggttgaatattacgaaaatgagtagaaatgatagaaaatgggtggaaagctttgaataaagctttgtaactaatatattattctaacttaccaaaaaaaattaaaaaaagtgttaaaatagcacatacaatagatgaactattataaacta

SEQ ID NO: 229983 - DNA, 1394 bp, Cannabis indica
aataattacatatttaataaaatatgtctatttaaatatcattttatttttttcggaatattacagcatgacacatgatttatcctgcgcattgcattcctggtttgaacactcttttggtgtgtattgacttgctaagaaataagttctaaagctaataacttattaggtttttattgctttatgaccacttaagactagctattgattcaagtctttaatttcctctatgctatacaatgtagttactaagctttttttttagggtttggatcttggtattgacaattttgataatcaaatagtgaagctcggtgaagggaaaaaagtgctattttaattttacttcttcgccttattcatatattgcttcctaattggaggactttccttgatgtgggtcatagaactttctatctaactttcttccctaagttgttcgtggttgtccatggtaccttgaatcttgaatgtctattcgttatgttgccttttgtaaggaaattatcattttttctcttaagcatattttcatcattttataacagatattattaaatttggttgtaagtttcggcaacttatctcactgcaattctttatgacttttccttgtttaggtgttatgaaaaaatataattaaatatataactaatattcaccaagagatgattaaatagtgaagattccttgtgcttatttgatctttttatacacttaatttaaatagccagcattgccaattttttctattcttacatgtgtatagtcatctttattcggagttgattattacgcgtggagtttatttatttaaattataatacattacaaatcacaacaattataacaattacaaagcatgattcactaacaattaatccactttatgcataaggtagctgtacttaatatatagtgtgattatttgtctcaatatttttgaaactcattttcctctgtttgtttggttaaagaaaatctatgtcagttaccaaagggtctactttggccagtacgagttctcagaaggtattactatcatgcttgagttcatctatattgttgcattatgcagaagttgtgctttgatttctatattactatcatgcatgagttcatctatattgttgaattctatattgttctttccaatttctgctctgtatatcatacactgttaaatatttttgagtgcgcgaaacttactggtgttttcttatgttgttttcattccacattcgatttcttgatgctttttcagtgttttaggaatcactagggacaacttaatgatgagaatgaagaaattccagtggcaggatgtcattgatttgaatcttactagtgtatttctatgtacacaggtgtgcattgtgttgggttttatgccc

SEQ ID NO: 229984 - DNA, 1244 bp, Cannabis indica
tttatagatttttaagggatatatctgtctttttcatttttaattaataaaattaaaattaaaattaaaataaattaagtaaggaaaggaaaaaacattctctataaaaatgggggagaacctttccctttgttttctccctaatttgtgaaagtcctagtttctccctttccaaaatttagtttctccctttccaaaattttgtaaacaatggtatgggaatcaataccataccattcattctcaataccataccattcattcccattccttttaagtaaacgtagcattagggtaaaaccgttccttattccttattactgtccaataggcaataaggcaaataaaaggttagtatatttatgatgagtctctctaaaccactagacacatgtctcttgacattataagaccgatcgagtggatgaaagattatcacattcgcatgcacactttaccactttttcctttctccaacttccgaaggcttatggcaagtagacttaccaatagtgaccatttggagtctaaacgattacgtgaaccaataatgatacctgaaacctgcaattactacatgtacatagttttgttagttattaaataaaaatatattaaatttgatactaaatatatatactatattattagtataatatttttgtggtttatttaattttatcctaaaataaataaagtagtagatggtagttgataaatagatgcaaatcaaatacctttcatttttttttataatagaataaaatgctttttcttttttatatttttttagtgttttaatcattaaaataaaaatggtaaaatgtgttaactcaaaatttcgttaacattatgttcaaaaaaaattcagttaatacaaataagacttgataattaatgctcagaatttctattgtaataaatgatttacaattcgctataaattacaatagagaagacgtacaattttatgtagttttatagttaaaatctacatactatttaagtctatattatttaagtttcttaggatgagtttacaatttggtagaatttttctaagtcgaaaatttggtcatgttattttacaatgttggctctattatttataggagtagaataacaattattttttatctaatccatacaacattatggaacatagatattgcccacatttcatatacttaattaacatgcgaaaaatatatatattcgcccagtaattgtcgagcttgattata

SEQ ID NO: 229985 - DNA, 1099 bp, Cannabis indica
tccaccatccgatccgatccaattggatatttaaaaataacatccaatccgatccgatcgcaattggatatccaatgtttggcggtcggttgtaattggatcggtcgattctcattggattggattgatttatgcacacccctaatctccaagaacgtgcggtgagacagacacaataacttctagagtaggaatccatttatccaagtagatagaaaaagtagccccatcacacaatcaccaaatatctctaccacgaaagagctccattgcccacaaaatattcttccaaacaaaagaactcaatttagaagacaaatgtgacccaaagaaagtcctctgatgataaagacctttgatcactttagcacccaaagagtgaggaaggttatataatcacctggttaaatagatgcagattttgaaagctcatacccccaacttgcttgtgcaacaacaccgatcccacgtacaccattgcatttttttcttcacatccgaaccaccccaccaaaagcgagcacacatcctatgaatatctttagtgaaagcctttggtattttaaatatatttattgtatattattaaatattattattagctagtattcaaaaatattaaagtaaaattatttgttcaaaatatttaatatgcaccgtaaattttaaattaataataaaaaaaaaagaatgtaaactatatttatttcaccgtaaagatttaatattgctaaaaactaaacattcagagatggctatttggttgtgttttttaattttaagttttcagaattatatttttaaaaattagagtaggaaatagttttttgtcattttaaaaatttaaaagtatttggctaatattttcgaaaaactacttttagtttttttttcggcaaaaaaaataaaatactacttcaatattctcacaccataccacgataagaacccaaccccacgtcaaacccagacctaggacctagacccaaacccgacttcgggtcctgggcctgggtccaaggtcggtctgagtcctagttcaagggcatgtcggggatgggttcgggtcccaatggcgggttcaaatcctaagaccagg

SEQ ID NO: 229986 - DNA, 2559 bp, Cannabis indica
cctaaaagaaaaggtgcataaaattaaatacaagtaaaagttgactagaaatcataattgaaaaaaaggtcaaaaaacctactacatcaatctgactcttaagactgtttgctacgaaagttggatctccactcattgtagcaaattatcaaaacctaatttgctacaagctgcagtattttagtataataaattcgccacaaaaggagcaagatctgaacccactctaggccaaagcctttcagcaacctcttgacgattaaaaatgggaggaagtggtgtatttcacttagcaacatcaacaaattcagctcttttcttagtcaatagcaatgaagtttttttcttcatttcgtcatactgagtgtcgtacgtgtcgtacctcttcgcaaagaatttttcaaccgcctccatctgggcacgatcttctttcgacaacaaagaagggtagatgggcaaagtgatcttgaaagggggaagaggtggaagatttgttctatcccttggcaactaaatgaaatgagcatggattggttgtgatggtggaggctaagagctggtaatgttgttgttggaatgagtgctctacttatttggcctctcatttccctaaatgtccgctcctcttcgttcagaagactttgaagcttgcttcctgatagcagccaattgctgaagcttttctttagcctcagctcttcttctctttctgtctccacctagctcggagctagaccttttcctttgagaccatcatcctactccatcgtccacgataattggtttctactagagaggaactatcaccaaggcggtgtcattcagtccttcatgagaagaagaatttactgttgctgaagagttttggggacgggcaacaatttctaaagtcagagccttaggaatagcttcctagcctttggccggaagtgctggcttcctaactttagcattagaaggctgcccagccttccctttacctcagttgcccttggcagtctctctgatctcatctaatctcttggcaagggtgcccaagaatttgtccactagacccatctggaatacgagtgggttctctaaaaataaagcatataaatgtcaatcccacgaaagaatcaaacaaaaaaaatgaaatgacacacaaaggcaattcagaccgtttattctagcatattgggggttccctctagcaaatcagaagatgtcttcctggtctaagaagcttccatattggaagaatcctggatatatcatttcatgaaaggagtctaccctaatgatttcttttgtcttatctttatatctaattactggatacttatgaccatctatacgcaggaagtcaaggtcaaaattgtcctggacaaaacaatttaagtaggctaaggatggagcattaactagacggaaggttgtcttaccacttccagatgtactcacttcaggagtaccttcatttaggacaacgtttctaaactagatttcaagtttctctccttcacttaaagcctccaggaaattttggctctagtctgccaaagattcatgatcagccttgacagcctttagagttacctcagtggtaattgctgcaataacttccttaacatcaagaggatcaccaaaataaagatcccggatgggatcgttgctctgatgagaagctagtaaaccagcttctcagagattcttagtatttacaagctcccctatttataatgtttttttgaaaaatattggtataaggttttccttgcctccatctctagagttaaaaggaaagcaaggaatgaaatctagaaataatacgagggtagaattagatatgttccaagagtgaaaataaacaaaagaaaagtctagtaaatgactatacttgtaatattaaagtcgagactgagatttgtcactctctttaaggggaatagaggtgtagaactagtagacctagatgtcgtaagtgtacttcacagaactgactgggcaaaccaagcttttggaatgcctctctagcctttagtagatgttatttgtaatatctgtatcgaatataaattgtactaagagcactcatattagtgtagctaaaatcgctcatatttaaattgttagctaaaaaatgataaaataatgctatatcaagtgagctaaatccttcttcattttagctcaattcattcttagagcacttctaacaccttctatactctattatttagaaaacatcttcaaaactctactttttctattttacaacacttttacattacaccatacattagtttctttaaaaatacatcacacaattttttttttaatattttaatatattttattcacttcaaatgtataataataatatatacacatatccccatgcaaaaataattattaaaactcaaaacaattaataaagtatgtttagagcaatgaataatattctataaatgtagagcataaatattaaattttaaagaaactttaaaatgaaaaatgagtttagaccatctgttgtagctatttttagtatagctaatacaaattaatcattaataa

SEQ ID NO: 229987 - DNA, 1481 bp, Cannabis indica
tgaaatatttatcagtttattttgaattctaggtagatttttgttgttggttcatcaaattctttttctatgtttttgtttttgcattgacccatatataaatcctaaataaaaaaggattgatcttaagcaaaatgtaggaagctcctaaacaatgaaatgtgttctagctccattattttcgtaggcaactatgataaaagatcataatcatttacttttgtagaaaccattagattgctagacatcatttttttcgtaagattgctacacaatatcattagatatacattctttggtatcagttgttcttgtctaatgtatgcatccccacaaaacaaaaatatagaaaaagtatgcatttgaagatttagagaaccaataataaaaatgcgaatagaattaaatctttataaactaaaaaaacaaagtttaaacaaaatacttattaccaatagaattaagaagaagaaaactagtaagtagaagaaaggcaaaaacttgagcttgattttaactcagaaagatactctcaccaaaagtagcaaagtagagacactgctgttgtttacttatatattggatggtcttagttttgggatcataaaagtagagaatatgctcatgtttctcatcaccatatcttgattgaagtaagagtttaccattatgtgagacccctaatggcttgaagctacttattccaacagattggttaatcgaatccacggaaaagagtttagtccaagaatcccacacaccatatttcttcatcacccatatctcaatacatgatgatgatatttgagtgactatagataggcaaccacccaagttacaaacacttgtatcatttaataaagatgaaggaaatttgatgagcttaaattcctcactacttagatcaaacgcaactattgcattccttggaatatgcctccgagcaaaacgcattggccaattaatagagaataataattttccatgaattttttttaaactataaactgaaactggctcacctaagttaccaaacatgccaattggcttagctaccactttgaaatcattgctcaatggcctcgtacccaaatccataattgagggattccaaaagtaaacataattataatactcttctaccaaacaaatcacaccattatcacaacctacaaaccttaactccttcgtcttatccttgtgatcatgaatattgggggatataccagatgaaatctcatgtaagttttccgagctacgaactgcgaacaataatttacaccacaataggatacgaggtacttggtttttgtggaggacattcatgaaacttgggtcgcaacatttgttcacacacttaagccgtaacaaggatttcacatctaatcttgacactatattttcaattatttcaatgggtaatttcgaattacagaacaccattgctaaatcaactctagaaaatattaattgaatatctc

SEQ ID NO: 229988 - DNA, 867 bp, Cannabis indica
tattttattaaatataaataaaaaatcacaatttctcataaaccaaaaattcagttataaacacactttatatagaatatatatatatacaaaataataaagtgtcttactcatactatatctgtaatctgtggatgcaattagtttgattcttgaaattttggcgaaactccatgaaaatgaaaagttagtttctccaacagtaagtatcaaggtttattaccatcgtttcctgctaaaaatttatgcagtgcttcaccctctcccttcctcctttctttgaacgacattccatccactcttccttctctcttctcatagagcagttgttttaagctctctcttctttgtactttttccttcttcagtattgttttgttctttctttttctcctcttgattttgttggctaagagaagatccgcacgagactatataagaggggacaaaaaaattaaaaatgttagtttactcaaaatggttagctacttattattagttctaaagaaaaaatgtatagctattttaagcaacacaaaaaatcactacactatttccatttgatttagcttttctttttttactttttcactttttaccttagttttttactactataactaaattaatggaagattgagttttgctctattagttttaatcatttttatttttttctatgaactttgtgaaatgtgtatgctgctaatctaaatctaatcaagaagatatgactttatgtcagttatttgaagtaagcaatttggtaattggttaagtaagctatatttgtatatatccgaataatcctacaccattacagataaagagttgatataagtattatctttagcattttctacttaa

SEQ ID NO: 229989 - DNA, 1123 bp, Cannabis indica
taaataaacgaaggtccctgaatcccatacctccatcttccttatgtaaataaagtttatcccaggtccaccaatgcatcttttttttctttttcacatcattaccgctccaccaaaagcaagcacacatacgatgcacatgtttgataaaaggtctttggaagcttaaaaagattcatagaataagtaagaatggactggataactgctttgatgagaatctcacaccccgcaatagaaaacaatttagatttctacccacttcttccaaatcctatcccgaatggaatcaaacaaccttgccttgctatgccccacaaaataaggaaggcctaaataagtctcatggcattcaactcccttcacacccaacaaatctaccaaaatgtatttatcataactcataacattagagctaaaaacacactgcagacttgtcaagatttactagctgacccaaggtcgccccataccaactcaaaagctatcaaaatctcacacgacacacatcagaagccttgaaatagaacaagctatcaccaacaaacaacaagtgcaaaataacagggccaccatgaccacaaggaaagccatacaataatttattttcacaatcctttcaaaccaagctcgaaaggccctcaacacaaagtaaaaaaagataagagaacatgggatcacattatctaagcccacgttgaggagtgatagagccattgacctcaccattcaacaaagaagaatactccactaaagagatgcagtcaagaatcttttgaatctaaacaccatgaaactcgagcttctacatcatctgctccaaaaaaacaccacttaacatgatcataagctttggacatatcaagtttaagagcacgaaaactatcacctctcttttttttccttaaagcattgatacattcaaaaccaataagagcattgtcagttataagacaactgaggagaaaggcactttgctcatccaaaatgatgtgacccaacacctcacgcatgcgattatctgtagtcttagtaataatcttgtaaaagatattacaaagactaataggacaaaagtccacaaccctaacggggttgtcaattttaggaatcaaacaaataa

SEQ ID NO: 229990 - DNA, 1119 bp, Cannabis indica
tcagataaaccattcacaataaaatttttgcacaaaaatcattctggacctagcttgctaaattagcagtttgcttctgcttttcatattccttaacagtatcacaaacaacaagtttattagtcgtcataacataagcaacctttttcaaagtgagaaaaataacattttttgttttcatcttttaaaatggtttccctcaaaacaaaaaagtttgtttatatcaacaacaccagaattctcatcggtagtcaaggaagaaacacaacgttttaaaattgttgtagatagttactgcaaaaaaaaggaacgaatttaccgaattaaaatttgggttgagtcatgatctaggtcactctctttaagacgttcgtggcactatctagaattgtggaattagattatcaacctcatcatccccatgataaaactcagcttgggttggtcggtcgtacgacaatggtgcacacgtgtggtggtccagtgtgtgagtcatcactcatgcgcacaaaaattaagtaccccttagggccccaacccaagttctaaatttgcacattatatacacttctaatgaagtgcattaagaatgagctaacccgagttagttaaaatcagttagggaagttggttagaagaagttgttagtttgttagtcacttgttacatgtaactaattagtttttgtatctccaagctatatatagcttgtactctgtttttatcaattcaacgaataataaacgtagttttcactctcttattttctttctctttctgcgatctaatatggtatcagagcaggtctttttcttggctaaaataattttcatgaacttcaggtaagttgacattttctctaaggcctccgcaaatagaatgttgatatgcaactttttgaatattttcaaaaatttagaaaattgcttgtccatgttgttcttgcggagcctctgcagataaggaattttaacatggtgctcgatgctgatacgtggtgaaacttctttcgatgcaagaccctcagaattcctcctttcctttagtgtcggtgcctactgatcctgacccacttcttccattaactgcttctcactaggcccctcataactctttcca

SEQ ID NO: 229991 - DNA, 1104 bp, Cannabis indica
ttttttttttaatttcaaagtttattttgcaaaagcttcaccaccatgtggattttattttatttactgaatcatgaaatggtttttcagcttattgatgatatcttgtctcgtaactgcttgccagtcatagttgggggtacacattactacatacaggtataaatctactttattcttcagtttacatcagggaaggccagaaattttcttgttgcaaaaacagttatgatgcacctatatttttatgtttagtgttctgttctctagaataatgatgtcttttaataactgtggctttcttcttaaaaaattgggatctatgcctactcaccacttatagaaagcaaatgctgattaggtagttaaatatttgtgtattgtgctaaatcttttatcgtgcatggagatatagctacttctctccgctaagatcgaactctctgaccatcctgctacatattgttttcattcactgtctttgttcaagtgtttagcttataatatttgcacttctcaggcccttataagtccattccttctagacgaaacaacagaagatatggatgacaattgcttatatacttctctaggtaatttttgccaatctagtttaaattttgtcttacccttttcaaattattaaacaccgattttgacttttacacaggagatggagatatacaatcattgtctaagttggattgtgaaggaataactgatagctatgaccatctcaaaagcattgatccggtagcagccaacagaatccatcctaacaatcatagaaaagtaagctaccatcctttcatgtgtcgttttgttattgaaatttgaaatgtgaagccactctttattagtaatatttattttactggtttacaattcgtgagaacgcttgatatgctttcattatttaaatgaagccatcgatagtgttgctgagccagagatgcatagtagggcgtcaaaacatctaatttatgttagtgttatacatgataaaggtttcatataagtacaggaagttaataatttagcgtattctggttgtagatgaatgttcgattaatttttgtttgtcatttcattctcatctctgat

SEQ ID NO: 229992 - DNA, 2650 bp, Cannabis indica
ttagaaaatgtccttaaattcaacaatgtaaagtacagagacaaaaatcatatttagaccaaaaaaaaaaaaaaaaaaaaaagacttatttttatttttgcaaaatttggctctaaatttacatctctgtcttaaaccctggcttttctgtactccaatcttgcgttctttggtttagattatctggttacgatccaggtaggctcatggttcggattctcgattgaggcttttaaccccaattccaaatcctaacttcattcgattgttgctaacatccattttccatttactcgtaaaaagttgaacaggtattctcttggagaagatcgagatgggttcagctgaggccgatttcgatgatctttttgtggagaagaaacgggttaggaacccttttgttccccttggtaaagtctcaaatcacccattattaccttctcccattttcatattctattgttttaatattaaagtttagcattttcttataacggagtcaagtttcaattggattttagggctaaatgtttggatttataattagcattttttgttttgaataagcaataggatagaatagatatgggattctgaaaatttattttcaatatatgaattaactgcttggagaattattcaaagcaatgtacttttttctttggttgttatattttgtgtttggaatatgaatttaggagttggttattgagtagcaaggttcatgttattgagtagggactgaaaatatataccatgctcatcagagccatcaaaattatgtgtgtttagttggatatgggttttattggatctaacatggaaagttttataatgcctctgatctgatgagaatggtctatttcaactttgatgaccatgctcaaattgtactttttgtcacttaaaattttactaatagatatatgacatgctcatttatgcattgaattgcatactttgaatcttcttgaggtgattgtataacttttattgtggtatatatagtgatatgctaaagttgttccggttggagtttcttttgatccattgatggagttgactcacattcctccaacattttgcactaaggcttgatatagttttttttaataaaaattctggtcgaacatgcttttggtatgctttttcataaaattgagaagaattttttttcttaggggtgagatttgaatgcatgttggatttccatgttgaatacaatctgtgtgctaaactctctagcatgagagaaagaggttgaacatgaagtgtaaataagtataatctccaattgtattcatgtttttttttttaactatatttgcaaaagtaatacatgtgtaacatcagggtaatctggtatactgaatgattttgtcatattgaattgtcatttgtttctgtagtataaacttgttttattgtagtcttcatgggctaagataaacattttcaggggcatttttgactgcgggggtgctcacagctgggttaataagcttcaagcgaggcaattcccagttgggtcagaagcttatgagagctcgtgtggttgtccaaggtggtacggtggcgcttatggttggcactgcttactactatggagataatccttggcaatcaaagtaaactaccaaaattcttttcgcacatgtctttattactttgaatatactgcagttttctaattgtgaaggtattcaatttgtttgtacctactgtttttgcttggaaaaaaatatacatatatatttataggcataggctattctcctaatagaataatgttagtcattgcagataggataatggcttgtgcttgtggtaatgccacattatataataatgaagtgcaaattttcttataacaatttttcttttccttttttactataaactcaatttgacaatctaaaacagggacaattctatgagtactcatcaataggactagagacccttatattagatatgagtgttcttttgttttgattagaatattatcacagtaaactcttattactgtgataaccgagctccaaagttagaagtagtgatgtggatgagactggtaccaaagaaaacacttctctaaacttcacataatgacgtggagaccaaatcccaatccagttcaaggagacaagctttttagttaggcatggaaaaatgatttgaatttttggatcggattggagcactctgagccagaacaaatggatctcttatcggatacccgatacgccccactagcaatttgtatgtattggatccaacctgccctggtttcaatatattaaaaaaaaatcaaaatactccctaaacggctaatccgctaacctcccctaatcgttgaagacttgaatccctatatctcgcatctctacctcactccggtgtcactttctcctttggtggcaattgcctcattcgtcgtaataccaattcgaagaatcgagtgggtggctccgcttgaatcaaactcggtattcctcgtctatgataaggtaattcttagctttaatgactgttatcccaacaaaattcatattttatgtatgaattcaaagtataacctatgaaatcagtaacacccatttgcctgtttttgatgtttttgtctaatttttttaaatgattttttttt

SEQ ID NO: 229993 - DNA, 1273 bp, Cannabis indica
cgtatattgggcgattttaggagcaacaataagtaaatctgattatattgaaatgagttttatttagggcataaaacccaacagatttgactaacattttgtcctcaaatccatccgcaagtaattttttcactcaaactatcatttcttgtgttgattgtgaaatgtagtctcgagctcgtacaaatttattgttttgcattcctaggattcgagtttgaaaattatggttgctaaatgtgaaattcttctgcatgagctcgtagaaatttattgttttgcattcctaggtctctcctaaggtactttcgctttagcttgggttgaaatggatatttattatttggaatatttttggggttcagatgtttaggtcaaactttttttggtttacactagtttgcaaagtaacccccgtttgcttctttatgtatgtatttctctttgttgtataaaaagagaaagtctgggtctttttgctattattgtgtttttgggttccctattcatcgtcgtagtaggttactttgcaagggtaaccatgtaggtgatgactccaacggggacctctccaagtagttttgggggaggccttccctgataccctattagtcatttggatatagggaattaactgcttgtgtttttgaagatagtgacttgtatttagtacttgtaaatctcgaagaggctcccagagcatcttccatggatgcacctatgggtacatgtagaccccccgagacccctgctgtagaaagaggggggccctttttgaaacgccgtcccagatcaaaatggcgacaaaaaaataagggcaaaaggcaaaagcaaaagccacctctccatctccctcttcgtgctcaataattctatttacgaaatagatcagaggccaaatctgttaaggaattatggcatgttggaggcgtattctgctgatggaggtgtttgaaatattttgggactcatgtggcaccggatgtctgtccctggggaatcgccgtcccaaagtgtggaaggctttaaagcatggagttgggttcacaactcatgcagagctcaccttccactcaggacatactttggtcagttttgcatcaaagctggagccactcctttccagctccttctagttgcctataaactgctctctgggtggtttttattttgtagatcctgtggtcagacctccccaaccccaaaagagatattgtacttctatgagctaaagtcgcaactgttgggttttgtcccctaaataaaacccatt

SEQ ID NO: 229994 - DNA, 1753 bp, Cannabis indica
tgaagaacagatttcacaatcttttctgatggatggccaagacgaatgtgccataaatcatactcggacatgtgaaaactattgctttcagtacaatttgaagaagcagatgtattatttgaaggaacagatgcattattgggagaaacagatgcagtaaaggcacaggggacagcaactggtgtgattgattgcacattgaactgagatggtttaaaaatatagaggccattctggtgtatcccagtgagaaggatggcttgtgtttcctggtccttaacaaaacacttgtcagcatgaaactcaaaaaagacatgattatcatgaggaaatttagagacgctgagtaagtttttggttatttcaggaacatgcaatagattatttagcacaaggggatgagagttattagcatgaatgaaagattggctaatgtttctaatagacagacctgatccatctccaacatgaagttgatccgtgccttcatactcggtgctgatattgagattttgaagattaggagtgcagtgattggaagcacctgagtcgggataccagctgctatcatcaacaggattgatgtgagctacattagcttgagcagtaggagagtttgatgggggaaaaaatcctgtaaagcttttatcaaagcgataaaagcaatcaagaacagtgtgtccaagcttgtgacaaagctggcactgtactcgactggaagaagtgggaaacctgcctcctctactgaaattgaaaaaaccagtagaaccacgattgttagcatagtttggactaggagagagattggtgaaattacctccactgttattattgctaactcgattgttgaatcctcgtccattgatccttgctgaaccagaataggatgatgttggaaatttgccttgattggtaaatatgttgccacgattggaatagttttgataggcaatattggcttcagataattgatcaaagtcagcagtagcaacattaacactcatgtcagtttcttgatcaatatcaatcttttcgattcgagactcggaggcaagaagtagagcctcaatttcagcaactgaatattcttcaatcctggtatttgttgatatgatgaaggtatcgtattcagacgggagtcctttaaagatagcagctatgtgatctctcgagcttagaacctctccaaccgaagcgagaagatccacatgctgtttgaccttcaataagtaatcattgagagacaatgatccttttcttaatttctgcagttttgttctaaactccagaatctttgaggagacttgtaaagtgaagtgtttctcaagcgcactccaaatttgtctcgctgtgttgcatccgaccatgcgtgtgagaagactctctgtcatcgaagagagtaaccaggaaacaagtagctgatcttgaacctcccattcaataaaagctggattgtaggtgtttgaggcttgatctgcatcattcaagaattgaggaggaggagcacggtcttggatgaacttgatcagtcgatttccacgaattgcagcaaggacctgctgtttccacaacaagaaattgtgatcgttcaatctaattgacatattgtgattaaagtataccggattgaagccatcgcagttgtttcttgattaattgagattggaagctccgttaggctgtgaaccagatctgttgggattcgaactgttctgattgttgttggtagtagctccaacattcgccatgttag

SEQ ID NO: 229995 - DNA, 1944 bp, Cannabis indica
agagagagagagagacgactttatttttttgcccccctaaaaaaaggtgttgaaccatacattgtcaagattggtttcctttatggataggacaaagggatatattttagtgcgataccgacccttaaggtgacgctactatgttaagtcatggaatctaaaataatgagttacactcacaaagtcatgtccgcgtctttgacattaggggacataacttgaccaaataaataaaggaaaatatgagtttttttaattgcaattaataaagacaagaacaagtcttgtagattatttgatattaattttgaccgaccctaaggtagaattttaatttttggataatcttatcgtggaatttttaaattattttatgtgtttttctaagtgtgttcatgcatcatatttaaattccaaacatgatacttattttttttatttatagtacttatattgtatttatgtcctattacttattttttgcgttatttatattttatttcagcgtaataataaataaaaatggaacgataatttaatatttatattttctttttcgggcttgtggcgtgagattctcaggtctatcgagacctcttttgtggggtgtcttattggagacggtcgccacaggggttgggagtctccaccctccaacgaagtgattgacattattaacccatcttgctgaattggtggctctcttcgtgtttcaccttggtttgcatctttgcctattagaggtggttggtttttagcgtctggattttttgagtcttgggcaactccagtgaggggtgatgggcgaactttcctggaagcaactagcttagttttttatatgggaacctcgatgtctcgaagatgtcagtaacgccttggcatctttaaattatgattgtgtatttcaaggaacaacgtagctttgtgccttgtcgtttccacaaacagcgccaaattattgacggtaagaactcgtcaactaaataattagaaaaaatgaaatgcaaataacttagagagaatgtattaaaaaagttaaggaactcagagtgagatatattgcattgttctattaatttttcaagctcttttacaaataatttgtaagaacccttataacatttcaaaactaattatttatatttgtacctttagagtctctgaagtgtatgtggtccctaaagtaaggggcataattccttttgtactatgaagatcagcatgataggcaggtagtggagaagtggtggtcgggtgccagtggatactctgagtgagacaaaaagcatacccactacccgtacatgttgtacttctgttcctcaagaggcgtgcatgcttccaacaaccttgcctctgacgtatgttcccttgatatcacactttttagggtgaatattccggaagtgaggttaacacttcgaaaatttagccaaatgttaaatctatgaaagcttccttatttatagggggaatatgtggaattggttgggtagtgtgtttgaatgaagggaaagacatttaggtgtgagatggagtagccttaggcatgtgtggtgtaaggaataaatgggagagagagagagagagagatgacatcaccaaaatttgacagcctcgagagattagaatgcgagattaagcacactaagggcttgtttggtatgccatattgtattgtattgtattagtattagtattatttaatgcaatactatctttgggattgacttgtattaataaattttgtatagttataatatattttcaatacacttgaccccaacaccaactacgagtctgggtctgggtctaggtcccgggtcacgagtttgggtcacgggtccaggtcgcgggtttggatcttagtctgcattcgggtcttgggtctaagttcgggttcgggtctcgggtcctgggtctgggtctcgagttgcgatt

SEQ ID NO: 229996 - DNA, 1551 bp, Cannabis indica
ttttttgtcaaagtataaatgtaaagtttagaataaagttagtatttagtgtaaataccccgaatttatatatgttggtagttttttatttgatttgggttggtagttacttaaatttattattttggataatatttctcatttattatcgatttattattgttatctgcatttctatgaagtataacacgtgtcatttaatgagggataatttaatcctccttcacttgaagtcctttgatactactccgtcacggagaggccctggaattggaaattatctaggacagaaagacacacataagcctactcatacctcttaacttccctgataaggaaggtgaaatacttctcctagacccggaagggtataaaaagagaagctcactaagacgatatttggatgggcactcgaaaggtttaacatggacatcaaccatcatacaaatgttgacattttatacatgtcaggtcaccaaagtgatagttatactttttctgacaaagatcagatcatgtcttctacatccaagcatggtagtgcgcataccaccaccaccttttggccaggaagatattacaaactcctgctcgtaaaggaacaagctttgaccacatgtggccccaacttttaagggttgaaactttgagtgacacgtgtccatgtgggacaaaatggtctccattatctagctcctgcatgcatgggcataatatttcccacgcgggtcatgggtttgcccatacctgccacttagcctatacacacccttcaattctcatacaaagggggcatgacaacttacgtagctaaaactctgccgagattactctaggtctttttttttacttcttcaatagaaactcagagtaaagagttagggtttcctgctaaaatattgtaaacacatcaaattcaccttaagaggctgatagattgactcgtgaactaagatttattaacactcgaaccacgtaaaaaaccttcatcttttatttctgtcatttgtagtttctttagttcttaaatatttagttttaaaaatcttggtaaacaattaataattttaaaaatattaaaatatctttattttgggttattagagtattttagttattggttattagagttataaagatattgagttattgaagttttagagttattggaatgaaaatttctaagttttgcgacttcaaatgatatgtttgattcgctagagaataatatttttagcagataaattttttgtatgatactttcagtctcattagaaatattttttagtaatttttattagttgctcattttctttgtattttatgcagttgaaacatcttattttcaaatagaacatttggagaagtgaaacaagtatcgactgttaatttaggaatgcaagatggagatttttagtaattcaagcatattttttttggcaattttaatgatgttggataggattttttcttcaaaatgtggctgcacatggattagctgtgcatgatctttggatggataaataatttgtttcgctgctagatgactgt

SEQ ID NO: 229997 - DNA, 960 bp, Cannabis indica
tccaaaatctaaaacaccatgaaaatgtgttagatgagttgttagatcaagaggaaacgtattggcaacagcgatccagagtggactggctgcaaaatggcgatcaaaacaccaagtttttccacgcttatgcatcatctagaagacaacataacaaaataaagtctctggtaaatggtcaaggtactgctgtccattcaaaacaaggcatgactgacataatcacttcttattttagtgatttgttctcagctactgatgtgcatcctgaagcattgcttcatacacttgatacaatcccgactactgttacatcagccatgaatgattcattgattagacctttcacaagtgaggaaatttacagtgctctcaagacaataaatcctgataaaagcccgggtagcgatggaatttcagcaatattttatcacaagtattggacaattgtaggagatgttgtcaccaaagttgtattgggtgttttgaatgatggtaataatatggaatctattaatcattcactcatcacacttattccaaaaaccaaaactcctactggtatgggcgattttcgaccgattagcctttgtaatgtcatatataaaatcatctcaaagactttggctctaaggtttaaagatgtactcccagcagttatctcagaaacacaaagtacttttctctcaaatcagcttatcaccgataatatccttgtggcttttgaattaattcatcacttgaagcataagacaaggggtggtagaagctattcagctctcaaactagatatgagtaaagcttttgacagagtcgagtggatctacatccaagaggttatgcttaaaatgggttttcatcacaaatgggttgctttgatcatgagctgtcttagttctacaagattctcatttatgcttaatggtgaagaagtgggacatgttcaacaacccagaggcc

SEQ ID NO: 229998 - DNA, 2478 bp, Cannabis indica
aataaatttaatgtacctctgtgctgaattctgccaaaattgaaatggcctgtgataatagttcaggcttgtcaacaggaacaaacagctcataaacagtgtcatcagcagatgttactgcattctggcaggcaccaaattctgcaccaatactttcaagaaacttcacaatatcatgatttgtgtatttctcagtggcgctaaaagcaaggtgctcaactatgtgcgcaactccacgctcatcgtcctcttccaaaactgatctgccattaactcaacaaattagcttgactatcataagtgtgtgcatgtgtgtgggtggcgtgtgtgtgtgtgtttattattatttaagcttgttcaataatgcacataaaaatcaagatgggaagtgtgacatgtttatggtatataccctagtttacataacattttttttcttatttgctcctctcttttttcatatcactaattagtacaacaacattacgcgtgattgttagctattatattgtattgttcttatccacagaaaggctcgagccaattcaagtatggatttttatattccgtagtaaattaccaatgggagttttctgaaatcaaaaacaataattgaagcaataaataaaattactcaatagcgtctatcctgtgcctggcttaccttgataaacattaataactacatttctttagaattctgaataacctaaataaataataatgttgtttgaatatgaaaatgaaaatgaaggctccctcacaccacgccaattgttaaccgtgtaatcttgagattctcatagtgatagtgaattctagtgaatcaaatcctaccgcaattctaacaccaaagattaaccgaaagcaaatttcatttcatttcaaattcatcataatccaacctaaacagcaaataaactaagattaaggaaagagctcaacgaaaatgaatcaaagacaaaaaaaaattgaagctgacttatgtataatatacagcactacgatatgaaaaaagaaaagtaagagagtagaagagagagagctgatatacccgactttgacagcgagagcgagagcagctctcattctgggcttagaattagaacgaacataataggagaggccattatcaagtttgccatagtgaactccataaggttgctctccaagaatttggtccatatcaaggctgacaagcttcaaggacctgaagccatgtttcttcagcaattgggagctctccgggggaaggaaatccatgtttgtcaaaaatttgattcagggtcgaaggaaagcatagaaatagaaggtagaggatctgatcctgtattgtgttgtgttgtgttgtgtcacttcttcgaaacaactctccactcaacgccaatggcctgggccctggcccgcttctgcattatcggtccgactccgaacctaaacaaatacttcctcttttcgcaataaaattactaggggtgttaatttttttatttatttatttatttttcattttagttttttttaatgtatttttatagaattttacaaagaaactcttatagcaactaacggagcaatctaaattgtaactaaaatcggtatagcaactcacatagaaatcaccagagcaacccaaatcgcaaattaaaaaaaaaataattaaaaaatagtatatgggataattcctcttaaaaaaatttacaaatcgctctctccaaataaaccgctcaaactaaattgaataaaccgacaaaaaaatacaattcaaaataatttaacaaaaatctaaactgcttaattaatatatttagtggattaaaaattattttaaactgttcaattaacctgaataaatcgaattaaataaagtcttatccctcgagcataaggagaagaattcaagaaaaaatccaaaaaattcggtgtgattgaagcttctaatgttaaagaattgaaaagtgtggagtagcgcatcaacatagaaattcaatgtcaaggtgctaaaagacaaaagtttggtagcaaggtcgtatttagcaagtctatggcgggcctcaacaatggaattcaatattgaggcatgaaaaccttaaatcgctcactgcccaaaatttagcttcaagtgtcgtgacatgtcctccagtgttgcagtgcgcctcaaatttctagaaaatttttaggagcttctaaaagacacaggtagcgacatgcttttgcagtgtcgtggcccgcctgcttaaagtgacaaattttaggattttaactctattgaaaagctatatgaaagacccttttgacactttcaaagcaccaatgatagtaataagggacgaaaattaaaagcgataagcgactctaaagactttcatcaattatttttcgtaagagtttttttttcttttgttttctctatgttcttaattaattgttgtgcagttatttacaatgaatatgagtagctataatttcaattagggt

SEQ ID NO: 229999 - DNA, 612 bp, Cannabis indica
atttacgtaatttacttgctttacataactaatttttctgtgtcactttttaatcgttatttaacataactggtttcactaatttaaatttatttgtatgttaagaattctcttgtagtatgctatacgttttttaattaaattaactattttgtgtttaaatatatcattttattattttaggcttcttatatttttatttttatattagttgttagttttgttcaattagttatcaaatgtaagtagtttgtgtattttttttaagaaactagtttaaatatttcaatttattttttgattgttttaggttatattggtaacttgtttctgtatttagatattatttttgttattttacgtagctagctctaacattatagtttttaattcggttaatttaaataattagtttctcagttatagtttaaactagttgattattgtaactgatttctgtgtgtcaaattccaacgtctaacactattgacaattcaaatgtctaactcaggtgccttttcagtaatgaaggcaactctgatgactttttttgatgattttccaatgatgataacaacttcggtgaatattctcattctattttctattttt

SEQ ID NO: 230000 - DNA, 1687 bp, Cannabis indica
cgggtgctctactgtacaggaaaaggtaatcagtctctgatgccatgagtgcgagaccttagcgatgcttgtacatgttcgggccacactagaccaagcgggttagggtctaccggtgatgcattttgtaattctaattttgccgcttaggtcggctcgtaaaatgaacttgtaatatttttatgaaaatatttacaagatctcgaaacatgtatcttttggttgtaaagtttaaagttgttacaagtttaattttcattctgtttcaaatctagtttaaattttttgcgcctatctttctagtaatcccgatttaggggattagggtgtcttaatcggttggtgtagcgtgcctaatttttagggagttatagctatgatcaaaacaaccttcagtgagaaaaccactttgactgcttgaaacttcaataaccattcctcatttgccataactcgatcaatttgtgaaaaagatctttcctcattgccttgcttattattccaggtataaaaagacctagaatatttgatgtctttcattttaccttttttcacataattcttgaaagcttccaagaaactcatcttgaatctcttactaactctcttattagaatggagaatatcattaaaaccgccaagcataatccatggttcatttatctttacagctagctcttttaaatcttgccataatataaatcttccttgctcttcattaaagccataaaaaaacggtacgaaaagatttcttttccagaagttgttagaacttacaagtgaattagttggatagaacaccaaattatattatctgaaatatttgaggatttccgctaactataatttgacctccagcataccatgcattattcgaagtaaaaaactatcctccaattatatttacatataagtcgcacaactttgatacctttctctcgtctcgagaaaactaaccgaccctatgttcattttatagattaaaagtttaaactctatttatttttttgtggttattgatccctcggatgttctaactcataatctcatcccttaaaaataggaggctctcccttcttttgtacttgcaaattttctgcactttttgagcattcgccaatttcatctagtgcctgaaaagcatttaaaatatgaggaggatgaagcactatagcattttgtttcctgcactttttcacttgttggaacccttttgaatcaaccactatctttggtgctacaaccgggtcttccactaacaatttcttcttttcaacccatatcttcttttgcttcataccttttggctcttccttttctctacaaacgttcactttgtgccccttagccttacaatgattacaaactataggaatcgattcatatttcacttgaaatttaatatcctgattgatttcattagtgaaagaaattgtatagggaaagtcttgatacatgtgtacttcagtaaggatccttgggaagttaagtctctccttattcttagtaatctcatcaagcataataataggagtccctaaattatcttcaagaacaagtagatcatatatgcctttcttaagcttagagagatactcgttacattttctcttctagtgtctcattacgccataatagaaatacttgcctttttcctttttgtccttagacttaggattggctttgt

SEQ ID NO: 230001 - DNA, 2147 bp, Cannabis indica
ttgggattaaagctcacaaggcacgccccatcggtatcccacttgttatttgctgatgatagtctccttttctgtcacgcaaatcagagttctgctttagccattaaaaagattttggagacctaccatcaagcttcaggacaattccttaataccaacaagtcaatcatgtccttctctcccaacacttcacatgatgcaagaactttcttcagccaaactttgggaatgccaatctgcgaatgtcatgagacttacctaggtcttcctgcatactcaagtcataataagaaggagttatttagtagtgtcaaggacagaatatggaagctcctaactgcctggaatgacaaactgttttctattggggggaaagaagtacttttgaaagcggtggtgcaatcgattcctacatacgcaatgagttgctttcgcttgcctttgggtttctgcaatcaaatagagtctatgatggcaaacttttggtggggctctaataaggatgggtctaaaatccattggaagagatggaagttactctgcaaatccaagtttgaaggtggaatgggttttcgatcttttgttgattttaatcaagctatgctagccaaacaagcttggagattattcaaaaacccaaactctcttttagctcgtcttttgaagcacagatactttcctagaaacacctttctagaagctcacaagggtcactccccatctttaacatggcaaggaattcactggggtcgcgagctacttcttaagggactacggtacaagattggtaatggttttcaggtacgatgtggactggatccttggataccaggacatgatgagttcaagccaatatacttctcgggggaaccatccacgccagtatctacttatatacatgatactatggaatggaatttgccactcttacatgatgatttctcccaaattgatattgatcggatcctcactatccctttaagtttttaccaatcaactgatcggcttatctggcatcatactacaaatggtctgtacagtgtcaaatcaggctttcaccttgcaagcgctatctctgagaaagatcaagaatcgtcctcggatgatcacaagtcgtggtggaaatatttttggtcattgcaaattcccccaaaggttaaaatttttgcttggaaagttgtccaaaatgccctaccggttgccacaggtttgcacaaacgaaatgtaattgactctgctttatgttcaaggtgtaaacatgcatgggaatcaattggacatgccttgttctcatgtaaatccgccaaagctgtttggaaaggtactaagtttctaattgattatcaccatgctcacagtatgtttaatggagattatctaattcatttggcaactacaatggaaaaaatggatgttgaagaaatcatatgtgttatgtggagcatttggaatgatagaaacaaggtactacatggtggcttaccaagagatcctctttcaattgcaacctttgctttgacttacattgagaaatatagaagtgcaaagaatatatcctgcaaaaaattgcagcaggatattacacaccaaaatgccacttccccatcaagacctgtacaactcatggctgtaaatgctcaaggaatgcaaacactacaccccatgtctgcacttagccgatccccatgtctgcagattagagaaaaccatactgcaatgcaacctcaaactgcctcgcaccagcacccagtagcagcagcacaacctccacggaacaattctgatgcagcaggcagtacctcacgtcagcagctcttagataacattacttggactcctccagctatgaatgaacttaaaatgaatgttgatgctgcagcaaattttcaagatcacacactaggaattggcgctgtagttcgcaactacaaaggagaagtgatagctgccctctctaaacgagtccaaggttgttttcgtagtgatgaaatggaagcaaaggcgctctttcatagtctcaattgggttaaacaatatcctttttcaattactatggtggaaacagatgcgctacgagtttcctctgctctgaactcttcacataaggatttatcatgttttgcagatttaattgatgatgttcgttg

SEQ ID NO: 230002 - DNA, 600 bp, Cannabis indica
atttgagctaacttcatcattaagtgatgaatggagagggggtggattatatacatgttaatatacataatatatatgtgtgattatataattaatgaaccaccggccaccactaaaataagtaaaagcagtactatatttatattttaattaaggaaaaaggttatttagtaataataataagagtgtttggattgtgttaaagacaagatataagggaaagaaagagacaatattgcatgttttcagcaaagattgtcagccacccaataataaggaacctacgtacttatcacaaaacatcacacaccacaccaccaccacatatataatattttttatgtaaaattatattaaatgacgtattgtattatattaaattgtattgtattgtattgtatataatatttttatgtaaaattatatgtggtattaacttttatgaacacctaaatatataatatttttgtataaattaaagtttacaaaatattatataaaaatataatataaaatccaattcaatataataatacaagggtaatttttagttatatacgtaattattaaaaatatcttacatataacgataaaaaaata

SEQ ID NO: 230003 - DNA, 1641 bp, Cannabis indica
atctaaaacattagttatttatgttgtaatttacccaaaataaaatgagacaattatgttggttttactaaaatctaaaattttaactttcttatttaattataaacagagataattaattgtcgtgttaataaatattacaaaaattttaatttttagacaataaaatttatgataaaaataagaacaattatttttaaaaaaaagagtactactacaaatttagttgacaaagaaaaattattaaacaaaaatattgatccacttgaaaaaacagacctatattagtagatgagaaatgaaaatttttttacaaaaaaatagaggaagctatatataatatatttatgagaaaaataaatatttatgcatgaccgtaatttttaaattatgtggttgcttttatactgactcatattacttggaaatttagacaataaaaaaaaaacttcaaaaaaaaatatactgacacatgtatataggtggaggttgtactatagttacacgtgacacttatacaattaacattattcaccttgatttttgataagactagaatacagtaacaaatccatataaattaatacataaatactgctaagcatgagtgtctttaagttttctctctactgtccacgactaccctacacctccgattactgaaatttatctcatctttcaaaactcgtcgtagctttgattcggtgatttcgggctttgtatgcctgcttgtgttttttgactcctttgttgagtctagtctgttttcatttagacttacttctgacctcccatgttgagtgtgggtgtttattgtattctgtttcgagttcagtatggttattgttaaagaagtaagcaatagtgaagaagttgctataggggttgtctcgatagataaggaagctgggaaaatactggaacgggatagcgagatggaaatcgagatgatggagctgtttgaagacttaaccctggaagacattattgtcaacaaggcttgtgtgggtaagataatggggtgtaagacaatggctgcctctgttgttcggaaggcattaacgggtatttaggaatctgaaaaacccttggaaggttaaaaattttgaggaaggagtgttgggtttcttctttgagtcagaggaggattgcaactatggtgatgaatcgcagaccctggctaattaatggagtgcttttaaaaccttggcctgtggagggggaagttaggatggctgattttgatgttacaaggttttgggttgagttccatgggctccctaacaagatgtttaacagaagccaatgtagctattcttgccaaaaaggtgggacaactagtaaaaacagatggaaaaaagaaggaagaagtggttcgacgtggatttttacgatgttagatcgatgtttggattcaatttccattcccaccagggttctttcttcaaaactggtgcaaacccttcgacatgggtccaatttaaatatgagaaactgtccttttctatgtttcaactgtgggaggcttagcacacttcaacagggagtgcactcagcccacggcgtgggttactccagcatcgggtctggcggttagaacatatgggccatggataaaggttgaaggacctaggggtaact

SEQ ID NO: 230004 - DNA, 942 bp, Cannabis indica
ttgcattctattctcaccttggctcctatatcacacaagtcaaaaataaatgtaaattttaatgtattaaaatgaagaatatcttttgagtaacgattgtcacacacacacacttaaattatattttttacacttataaattataaataaaagtacaattaaagtaacgtaatctccacttaaaacaatttataactaaaattaaacacagatcttgtttaatttaagtatgtatatactggaactactgatataatttttgaaattaacaattcattatcctctctaatccaaatctagcagcctattcaaatttagacttaataaataagttggttatttaattatttttttccttttctaatgggtaagaggtttggcacaatttttgatagaaaatgtcgggaaaatatccatattgaaaatctgaacaaagatttacaagatccaattaactcttcaacgttgctatccgtacgtataaattataattgtttttacaatctaaatataagaggatggtttccacaaataataatataataatagaaataatcggatgtttacaagtccacacagttccattccttagtcaaacacagtcaaaatcattcagatcaagtagatcatcaacttcactatcataatacaacactttcaaacatagatctacaaaacacagaagcacattctatagattaacagttactcaaacaaaatatacgaaaacaggccctaaaatttatgaaactcagaaaaataaaagatgaaaagagcattgtgaaagcaattgttaccggcgatgtaagtagtggcggtggtttcgtaaccagctaggcatgtgtcacagtaaactttgccttcaactacaaggggatccttcacccaacgggttgccaaagccaatgccggaaggaagctaagcgccattaacaaaactag

SEQ ID NO: 230005 - DNA, 1616 bp, Cannabis indica
ataaggcaaaactgaatcctctctactgagaatcaagaaggcagtagagtcactgatcccacactcatttctgaggctttcctagacttttactggaacctgctgggctctaaacttgaacatagaaggcaggtggagcagtgcattctcacatcaggtccaatggtgagttcggcccaagcggattttcagcatacctactaataaatccctgggccctgatggattctctagtggcttctttcaaaataactgggaggctattggagatgacatatgtgaagctattttgtccttcttggactcaggtaacatattaaaagaaataaattctaccatcattactcttgtgcctaagattaagtgtcctaattctgttaaagattttagaccaatagcttgttgtaatgtaatttacaagattgcaactaagcttttgagttctaaaatcaataacatccttcctgaaataatttcacattcacaaggtggctttgttaaaggaaggtttatagggcacaatatcttaatttgtcaggatttggtgaggcattatggtaggaaggcaaataagccttgttgcatgataaaattggatctacaaaaagcttatgatacaattgagtgggggcttattgcagagatgttaacaggtctgaaattccctaaaaagttcatacggttagtaatgaattgcattactactcctcgattctccttgatgttcaatggcactcctcatggtttttggaaggtaagagggggataagacaaggggaccctatgtctcccttgttatttgtacttggcatggagtatttgtctagactaatgttgaaaattggggaaaaagaggacttcaggttccatgatagatgctctgagctgaaacttaatcatctagcctttgctgacgatgttctattattttgtcatggtgactttaggagcatcctctacatgttacaggccctaaaaactttttcacttacatctggcttgcaacctaatgcaagcaaaactgccatttattgtagcaacatgcagaatgggactgtgaatcatattatccaactttcaggtttcataaagcaggacatgccttttacctacttgggaattccaatttctgggaaaaagatatatgggaaagaatgtgatctgttagctgagggaatgactgctagaattaaaatttggagctccaggaatctctcatttgctgcaagaatcaccttgataaactctgttttaactgctatacaggcttattggagtcaaatgatgatatttccaaagaaagtactgaggtctattgaagccatttgtagggatttcctgtggaaaggacaagcccttttccaaggaggttctgtagcttggaacaatgtgtgtcaattaaaagcctcgggtggattgggaatcaagaacattgaacattggaatcaagctggcatttgtaagtacatatgggcaatttcaaataaacaagaaagtttatggcttcggtgggttcatagtgtgtatatcaagaatcaagaatggtgggactactctccttcaatacattcgagtgttgggttttatgccctaaataaaactcattacaatctgat

SEQ ID NO: 230006 - DNA, 830 bp, Cannabis indica
ccttcgaggattaacaaggggacgattaatgttgatgttgcggttggtcagactgatagttgttgtagtattggtggggtggttcaaaatcatttgggggtgatcactgcagcataaggtattttgttgaatactcttctcttctattgttgttgagttgctagctattaaacatgagattgagttggctggtttattatctttggaccaatgcaagattagatttcttctgattgtagtatggttgttgccatgttggaaaggccaactgagttttgtggggaatgagatttacttattgtggatatacatcgaattgactggaaaatatgatatcatctatgtatctttaccacgttctattttgtaatatttgtcactatatataatctatttatttttatgtcctctaattattcagtatgtgtgtcaagttttatcgagtgtgacatgtaaaatgctcctgtggatgcaaatctgttaattttacttaatattttgtacgtatttttaatactgaattaatttttaatttgattttttaaaaatacatgttatattttaattattttattttaaattacgtgataatagtctaaacatctatcaccattttatttaaaaaaataattttataagggtgtacataaatcgatccaatttaattacaagtgactattccaattaaaaccaaccatcaaacattaattattcaattgtaattgaatgttatttgcatacataaaaattaagattaaaatttgacttttttttctagagtagatgggatgattaaaattaattaaatcagatcgaatggtaaaatctaa

SEQ ID NO: 230007 - DNA, 1484 bp, Cannabis indica
tgggtttctccaccaaccgttctagctttcaagagattgtccaatgtctttgagcaaggcctccttgggcaattcgaatgcttccttccctctcctgagcagttggcaactcctatgggcattaaatacttgtccacccttttgtgttgtacccaaataagtaattttccttttggttttctttcacatgcttttaactgtgctggctttaattttactttattgtgtagatcaatttgaagatggcatacacatactcccgagctaagtatgcgactctgaaaactaccaccaccaacaagaacttgaaaaaggaggtggaggaagctatgaaggaggttgagcagaaaagcattcaattgtgttaggttgacaaaaagcttctagctaccaacaagctcgttgtaaactagagaaaggatattaatgttatgccgccactgctcagctcaaggtggacaatgagggtctagctaaggatttaaacactcctaatgacaagagagaaaacctttgcatccttctttccagttagaacaaggagaagaaggttctgcatgagactcttgactccaagaagacagactatggtgcctagcaggtacttaagaaggaggtggaaaacttggagacggctgtcgtagacatcttctatgaattttggaagactaacccagaggaagattacatcaatgaaaacatggaggcatatcttagtttatgtgaagcctaacaagccaaggaagaggtcgaggcagccaacaccaatcctctgatcaacaaagacaatgaaaccccaactgttgacgacacatatgactcgtacaaagaactaggaactccatccgtatgaattttctttttcttttttatattagttcggcctatgggcctttttaatacaataaagtcgaataaggggcttttaaacttggataatttttcattttctttcaagacaatagactggccaggtagcttttaatcccggatttatcatgcttttttattatttcaaatgaatgttttcacttatgtttaaatagttgcacatctcattatgttttttttatcttgttacttacctattctttttatgggtattgtttctcccatgtgattgagcagacttatgactcttggtcacttgtatttcgtaagttcaatttttgtttgtttggctactaggtttagaaaaactgtttgtacacattttcaatggtttttacataacttgctataaaaagaaataaaatagacataattagaatgataattaatatctttattcatttattggtccagatatgttgttaccgtagtaatgtacatttattgaattataaaatcttttacatgatctaactgatatttagctaattaaaacataaaacataaaacaattgaacgatataatccatccaagagacattgctcatgacaaatgatttttgaaaatactgtaatttaggagtggtcatcta

SEQ ID NO: 230008 - DNA, 1337 bp, Cannabis indica
tttttcttcttttagtgtaatcttatgatggtttttcctttgtatatatatgtcataaaatttgaacatgcttcaaggcattgtgcatgtatgtaattgagttacaatctatctatatatatttatatatatttattatgaaactatgtcctatgtagatattaattccttgtttaagaaattaagataggaaagaaagaatgatttgaaaatatcattcaatttttgtattgttaagtttacatatttgctttgttgttggatatttggttattaaaataggtaatatatttaatataaaagggatatgttttgagtatgtgtgagttgctatgaatatgtaaagatcaaaagataaagtgtaaagagcattgtttaagcatgattattagtatctttaacagttaagctttccttttcttgaccttgtcttatactatatttatacacccaacttaatagcccaaattctgttaatacaactgaaagaagtttatctttctttcttttatttatttatttatttatttatttttccaatacttcagttctcttaaaactaaaatttgatagataatttaggacatatttgtagttaagtaatggattttgatacaatctagaaaagtcttttggcacaattattttgtttatggtggtttttttttaaaaaaaaaaaaaaacttaaataattaataatgccaaaaataaaatttatttatattttgttaaacatatcactttatatatatttaaatatatttgtgaggtttcttccaaaaaaaatatatttgtgaggtaaataattttttgatagtaaaaattatttaaatttctaaaatttttagtagtggtaaataattataatgtataagattgtgaaaataactttatgagattatttcacaaatacacaaaattataaaaatatggttgcacgaaattttaattttttttatgatttttacgattttatttacagattttacgttcttttgatgtatttttatgttgtactttttttaatttattgttgattttttattaattatattttattttttgttgttgttttattattgttttgatgttgtttttctattacttttatgtaatttttttattattttagggttgtttttatagaataacgtaaatatatatgtatataaaaaaattaaaacataaaaatgtaaaaaaattaccaaaaaaaaaatgagtgcattatataattattcgaaattttattgggtgtattttggacttatgttctgtttttttttttgtttaaattttatttttcccatgttttgcatgaagcatattggtagactttg

SEQ ID NO: 230009 - DNA, 1578 bp, Cannabis indica
ctctctctctctctctcgaaaagatttctaccattgttccaccatgatcaggacacgagctactggttctaggaattccggtagaactcctccgtcgcatacttcttattcttccattccagatgctccttcaattgacacaccaatcattcctcaaatttttaatccctctagagaacatcaacattagaatcttcttcccattcctcggcatgcacatgaagataactctagtccatattttcttagctcctgtgatcatcttggtctgatcttggtcactcctcctttgtcaaatcataacttccagccatggcatcgtgatttgaaactttctgttggtgctaggaacaagaccgtcttcctcaaaggcccttttacaatcactgtcttcgctgcaatcaaatggttatgtcctggattcttcactctgtgacatttgagatcaaaagtagcgttatgtttcttgacacagttactgaaatgtggaccgagcttcattcaagatttgattaggtaatggacctcaaatttttgagcttcgtgaaaccttgatcaccttacgctaaggagaagactttgtaagttcttactttactgaactcaaatgtatgtgggatgagattgaagaacttagaccaagaatcccatgtacttgtgctacttctactggtaacttgacttttttaaacaaacaacaagttctataatttctcacaagattgaatgaatctttcttttctgttcgagctccaattcttctcattgaacctttcccttccctatccaaattattctccatgattaaacatgaagaacgatagaggaaacttaagaaccctcatattcctcttattgcatctgtccaacaaccaaattcctctgttgctcttgcccaaaatcccttggcatcagcatataatacaaacattggatgcaataagaaaatgaggttttattgttcaaactgtcacaaacatgatcatttgttggttttcttcctggatatgggaacaaaagattgttagagaatcaaccagttgctcacagggcttctacatctattgatcaattggtggccaattgaaacaaacatgaaaatattcagacactcatatctttactcagccaaaaattgcaaccaactacttctacttctagtgcatctctactttttgtatcaaatatatctaataattctcataactcttcctgtttatgaattattcacagtggtgccacacaccatatatttgttataacatctccatttttactagtttacatgatgttgtaattgctaattttgattttctcccaaatagtactaagataaaagttcacaaataaggaaacattaaattttcaaataatctttgtctacaaaatgtactctatgttcctaaattttatctcaatcttttcaatgttccaagcttccttaccattcttacaaatagcatattttttcactcacaattgatgcattctgttggattaaaaatcctatgtgggcacatatgtataatgtatatgctattataaagtgtgatacaaaattaagtgaccaattatgtt

SEQ ID NO: 230010 - DNA, 698 bp, Cannabis indica
cctttatacagtagtgcaatatttgtgttgttttcgtgtatgatatatgcattcactcattccatacgtgtgttggtgtgttatacgtcagcaaagacataatgaaagaaaaaaaaaacaagtatatcattttcgaactcgcatcgacgtacacattggttgacggttgaaatagtagttaagtcgatcgtaaatttacatttttttgtgacattatttcttaattttactattgtttaataaatttgaaacgtttccttcaaaaaaaataaatttgaaacgtcaattaaaattctactattaaatactactgtattatcacttgggtacatgcatatgtggcatgttttattgattttgaattttagtctcacctgtacataataataataatctcaattgagatttaatggtagtatttaactttgtgcaaaaattaaaatatgagaagattttctctctaattattttattacatattattaatcttttctagaataatttgacgcacaaaactaccgtcttttctacaatgattccatttataaacattttttttgttgggtaaactttaattttactagaaacatgctatttacaaaaacatcatgtaattttacatatttaagacggtacaatggaaaataaaaatatatatattttcactaggaataaacttggactaagacaaattagac

SEQ ID NO: 230011 - DNA, 1142 bp, Cannabis indica
aattaaaatattaaatatgattggatggacattggatgatattggattggatcggttcggttatccattggatcagatgtctcatccaacatccgatccgatccaattggatttttaaaatttgcatccgatctgatccaattatgattagatatccaattctattagatcggttgggattagatcggtcagttgggattggattggatgactttctgcacactcctaattcaatatgattaatttaattgtcttaatctaggaaaagatttcaaaaattaaaaagaaaatctaaaagaaaaaacaagggtcaatattaaattagtaaaaccttaaaaataaaatattaaaaaataaaaaactagtagaagaccacatcccaagataataatgttgaaaaggttttctggcgttgtttcctaagttggctttgcattttagtccctcaattatgttttttattatttcgaccccaactttttactttgtttgtagaatctactgatcaacaaattattaataatatatataattggaaatttaaataaaattagatactattttagattttatgttttgcaaaagttattgattggatcatttattttgttaagtgacaaattaaactctatattttttaaaattgtataaaatagtatactaaactgattttttattaaaataaaaattaataataacctgatctagagttattataacaaaactgagtacattttttgtatctattcgtattaaaattaattatattaaaaaatatatataaaattgagtttagtatattattttatattattttaaaaaattattatttttaaaatagagaatccaattttaaaataatattaatacctttaaataatgtaattttgactattattgttgttttttttttttttggtttgtagtatattaaactccaaaccacatgtgattgtgcttttcatgaatttatttataatatgtgatttttagtctcattaataaaatattaggcttcctacttccatgcatttttttaattttatttttagaattaatagtatatattcttttaaaatatagtgatagatctgatctgtccatgttaataataataataataataataataataattgacc

SEQ ID NO: 230012 - DNA, 1706 bp, Cannabis indica
gagtcgcaagctccttgttagtcttcgacttgcggttaagaactgagacactcttcaaaaagtcacatctataaagaaatacactaagtataagtaatcacatgaaatcgcagtggaaaattcaatttcaactaagtataatgggggcacattacctacaagttgtcttgttgtttgcctagaaagatattttttaatcttcactttctgcttctcaaacggctccttgtatactggttctcgttgaagtctggcgttagcttgaatcaatctgtgttctcataaattagcaaaagtacaaagaagatgccaatatcaatctttgattggacgactgttcaagacttgagtaattttcacgtggtcccaaggtaattctgatcgagctagtctacatgcaagtacgaacaaaggtcagcattcataagataaaaaggaggaaaatgctaagtataaaaatatgcaacgtacgaggacaggaattaaagtctattctaactccaagtaatgaaaacgcataaaactacttcgatttctagtctcccatattggaaaccgtgccctctactctattgacctatgagttgacttattttctaaagcagtgaaagccattgtcatggccaacgttcttgatgttgtagaaatagcaaaaatcctcgatagtaggttctccttgcgtgtattccatatacatctagaatccaaggacaattctataacttttggggtgtgttggaaaggagaaacgtgtaatatgtcaaaattgctttgacaaagggatggaaaggaatcgcgacaacacaacgatgctagtcggaataatcattgggatggtgaagggttggtaaggacgttgtatcgacataaattttgtacaaccagtattaatcaactttagtttttgaaatatcgtcaaatcagacttccttacccgtgaaaccaagtcctcacaagaaaaaggttcatctagaggggcaactacaagagagtccacatcatctccatcatcattccattcatccttgaaaggaggtaactcaaagtctttccccatttcctctacttctgcatccagagcagcccttagatggatgaagctcccttgagcagatacggtggactcgttttcctgtatctcgatagcaaccaatgcatctaactcttaggccattcaacctatctcgccattagaccacgagtcttggttatctactcttgttggaatcatgtcttctgactatgacattaaaataaagttgttgcttttctaatgtttatccgtaattactccacccttagatttgaatatctggctattgtctgagagatcgctcatctgaaagatagaagatcttttcaacgtgctgtgaagtaaaatttaagaaggagtatcctcacatggataataattcaaattgaatataaatatcaacaaaaataatgaatctaacaccaaaacaaaatagagtggttcggtatttcacagtgatttaatatttgttcgtctgaataaacatacacccaaccacttagtgaacattttagactctatcaaagtttggtaccaatatatgagaatactcaatgtgttctaactaaaagtttgaatattcaaacttcataataaagatgatgcgaacattcaagttacaggcaaaaattttctaaaaatttcctctatttgccttatttcttcttggggt

SEQ ID NO: 230013 - DNA, 1712 bp, Cannabis indica
atgagatgaaaagcttcaaacactgtaagttctgtgatccaccatctctgcctaaaatcactgcatcttttcgtctctcctaaggatgatgattctttttcattctcaccgtcctaaagtacacaacaatttaattggttttatatgttttttatgcatacatgtaagaaatactctaaagggaaggatttattttcaaatctgttgttcatggctcatttagttacgtccatacccaaatgatatataaactcactttctatgaccaagtttcaatttttgaattaacaaacataattacattaagcccattaaagttaacataattactagtagtttcatttatagctttttggggattgttcatttttgacgtaaaaaacacaaaatccatatctttgcttttgggaaagggcaaaaaaggaaggggctttagctttatttgcagagaatcaaagaaatgaagctgttcaaatcccaatgggccatatatagtggggactattgggacatatatagagtggggagagagagagagaaagagagagatggcattggagaaagaaaatgagagaacatgaaattaagcaatgtaatttatacttccataagagaggaaaaaaatgtaatgtataaacttattatatattagtggtatctaggcatcatcaaagtcatcaagccaatgaccaagtgtgggagaaggtgtcatggtccacaagatttttttaattttatatgtaaaatataactaaaattcaaaataaatattttttttatgttttacatgtatccctattaattttggatttcgatatgtcattgaatctagtgattctagtcaattaatttatttattcacagcatgggcaattaatttatgattttatcaaaaaaaaaaaaattatgttcaatcacattgactgtgcgtactatcaaattgttaagaggtctaaatcaacaatatgaataacaaattgtgaggaaagaatccaatacaacaacactacacttgtcataaagcaataattattaaattaaatcaaatgaaatataattgtatgtggtaccactaatttttttttagcatttttctcaagggcattgtcattatgttttctatgggtgtatattggtagatttgatcgagttgtattattatactccaaattcgactatttatcaaaaattaacatgtgttttacaaaaggaatataaatgatcccaaaaggatatagtaattaaattgtactattaaatgtgatttaaaataactcgttccatataattaaagttgatagaaatattcaaactcgttgactacataagcatatgcgagataagaataataactattgcaactcattgacccacatacttgaaataaaagcttgcaactcattgacccacacaattatacatagagaagattacattcatccatctcgctcttaacgctacctcgctaataactttataatatgaagaacaatgcgagaagaagaacaactatacttagcgttttttcccttcaaaaagacggatcacaaagataactcatattcaacgagaaacaaatcttcttaattagcataaccgtttaaaagataaagacaaagagcagttgggtaattattaaatattatctcacctacatatagatgaaacgtgagaaatatccacgtttcatgagcagttgtaagtgaatagat

SEQ ID NO: 230014 - DNA, 1545 bp, Cannabis indica
ggttgttttattaaacaacgacaaagacattagtatgccaggtgaggaatcagagttgttttcctaagaaaatggtgagtatggttactttatgaagtaacagctatagttattatcattggactggtaattgtgtatagttctatacctttatattgatattcattgtgtttgagtatctatactgaccatatttaaatatatgagtaatgtacaattgtttgattttgatgatgtgagtttacatggtgatatttgtgtgatgaattatatgatttttgttttcacttttcttgctgagtcttcatgactcacgggtgctttgtggtgcaggtaaggacaagagaaaactagagcaaccataagatggcagtcttctccgacaaatgtacatattgacttatccggcttgtatgcttaagttgtcaagggttgctttgggttgtgcctgatgtgtattttgacttactgttgtatatagttttagcaatgtcatcctatttattgctatattttattttggtagattttttaatattatcacagataactctagataatggtacatgcatattctagataactctttgatattttgtgttcacacttgttgatgaaatccaatggatttgtctcgatgctatggtcgagtggatccagatcaatagttatcatcatattttatgaatatcagatatcccattatgtattatatttgtatcctattgatataatatgatgcataattagtttttgtagacattagtgtttcttgagatttctgtctgttgacactattgcatagtgagagcacatatatgtgtaattatgtagtccaagtggaggaatgtcagaatattttatgtggaccaacataattaagtgttcctcactcagtgttggtattaacatataatgataactatataataggtaatgcatggaattaccattaaaaaataatgggatgggcataaagtaataacacgcttgaggtccatggacacgctccaaagcacctttggtcagcccattgggctaagaaaactaattctctcacattgggcatgtaagcctaattggcccatgattccttataaaagggttgtgctctttattttgtgaataaggtgtgagatatgtgtgcataatggtatgtgagagaatagaagagtaatgttcattatgcccaagctttcttgtttttgctctatgtgagtagatcaaagaagtttatgaaatcaacaatagttcatagctcttgaagattcaataccaaatattaaatgaggtatgtttactaattgtaaagtgaatgctctaaaattaaatatttgattttggtgatatgagcatgagtttgtattaattattgttgatgatagcatgctcattgtgtagtaattttaacacaaacaacaagaatccaaaatctaagtgtcagaaaaattttcataagttatgacagagagaacatcagtgtcaatttcaagccttcaccagcaacttttgtggaatctaatgtgtctttacattcttgattcc

SEQ ID NO: 230015 - DNA, 1507 bp, Cannabis indica
cctgttgaaacctatcagaagattgagtctataatggcttaattctggtgggttcctatggtaataattctaagattcactggaaaaaatggtcaagtttgcgtcgttctaacttctttgggggttaggttttagatctctcattcatttcaaccaagctatgtttgaaaaagcaagcatggagaaattttaagcacctaaactttcttctggattgattactcaaagctaaatattataatagaactaattactttgatgctatcaaaggtcgtatgccttctattacttggcatggccttttgtgggaaagagaactttctgagtaaaggtctgatagtggaaggttggtaatggtcgttctattcaaactttgcaggaccattggatccctcacttcaggtacatcacttacaaagttctcatatccctccttgctccactgtttctttttcattcaccctggggctattgggattttgaaaagttgaaccatttctttcatgatgatattgcttttgaaattcgtacattacctttgtatgatatatctaaaccagactctgtgatttgggctcataacccttcagaaaatttcacaattaaatctgcctatcatttggcaaagactagttcaattccctcttcaagctctacttcagattatatgaagaaatagtggtcatttgtctggaagactaaaataccccctaaaataaaatattttgtttggagaatattttactatctccttcctgcaactttgaatttgtataattgtaaagttctttctagtccaatttgctctcattattatcaagctaactaaaatgtgactcatgctctacttgattgttccagagctaggaaaatacagaaacaatctccttatctcagtttttatgagaataataagcttatgggtattagagatttttcattgaatgattatgatactctaaccaaatctgattgtaagattctactaggatttctttggatgatttggaacaatagggatgtaaaactctttgggaaacatattgtaccagcccaagaagcctatcaatggattgctgattatttgaatgagtataaaaatgctcaattaatatcaggaatgattatgaggcaaaggaacactcagaagactgattttagatgaatacctccaacacaaggtgaacttaaactaaatgcggatgcaactttgtaaattgaaagtaaggttattgatataggggttgtgattagaaatcacaatggtgaggtgattgtggggtgtgctttgaagcttctaggggcttattcttagagttaggatatttcagtttgttagttagcttcttttctgttatttctgttattttcagttataactactgttggcttttgcctataaataattgcattctctccatgtaattttacaattcacatttcaataaacttttctttacaaaccctctgtcattagtgttctatttctaatatggtatcagttgta

SEQ ID NO: 230016 - DNA, 721 bp, Cannabis indica
aagttgtaataagagtagtggcagatcaggatttaaagtaaggagggtataattttttctgtaaagcagaaagtaaatttaaaaaaaaataatagttatatgggaattgaactattaacctctattaaactaaagctaatagtatttattatagttataacattatttttataaatttttaaaaagatttcaaaaaattaacaatactaaaaatgtaaattcgaacagagggtgactaaatttttttaatagaaattaaaaattaagactcttaaatcttaatataatttttagaccgacttaaataaataattaataataaataaagttttttaaaaatattatttcttttcctttaaccattcacgaggtggaaagtcacgtggaagggcacgtgcatttaattttatttattatactaatttttcccttttaaattttttttaaaaaaaaaaaaaacaagcgatagtaacaaaagaccgtacaatttagcttaaacttaaactcgtccatcaccgttagtgtgacggagattttcttacattaattaacactaatatttatagttaaaaaataaataaaaactaatacaaacaaaatttgaagaaaataaaaaaaattacaggcgaaaaaaaaataagaaaaagacagccgatattttgattcccgccgatacaaaattttgccaaaaatcgagagataatgactgtttttttcattt

SEQ ID NO: 230017 - DNA, 991 bp, Cannabis indica
atagatatttgttaaaaaaaaaatcgtgtatatagataaaacaaaaaattcaaagtatttatatctttttattcttttatcaacaataccattttggacctgtgttttgtaaaagttactgattggacgataaaagttttagacactgtggacgataaaagaataaaaagatataaatatattttttttttagctaatacgataaaagatcatactaatttatttaaatatttattgtagctatttcattttaattattagttcacattatagttcacatactgttgttgaaaatcaaataatttaagggataaagttagaaaatttgcaaaatataacttttatacaataagaacataattacatatcactttcatgtgaatcaaataaatgtttcaagaaattgtttactatatagtgaataatgacaccaacatatatagagaaggttttttcatgataacaaagatgaaataatgcacaaactcaaagtagtttcaacagctgcacttcaaagatcaaaggctcattcatgtgagacatgaggctgcgtcgaggaccgaactacaagtaaagatatacgaattatatgaaatccgagtacgaaaaactcgatagacaaacaaggcaacaaggatgtaattttctctttactaatgagacctcaatttatggagtgttgcaaaattgttaggtggaaacttgaaacaaatttgggatttaagctaaagtcaacctatgacggccaaattgttgcccttgtgttgttcatttagatatatgacaatgttatgacaatttatgtttctcatatggatatttgcctcacgggcaggaccggcccaagggtggggcaggttggacccatgtccaagcccccaccctgaccccgaaaaccccttaaaagaaggcaagcccacaatttagtttttaataatgctatattttgtaattttacaattatttactaaaaaatacaaaaaaaaattat

SEQ ID NO: 230018 - DNA, 975 bp, Cannabis indica
gtcccccccccccccattactgaccaaccagcagctctctttacggataatggtctaacaagaaaagataccctgagccaaaagagaagctggagaaggacttgagaaattccaaaaattatcaccccttttgcaatatttagcccagaataccttacaccaaagggcagagtttcgactggccaaactccaagccagtttagagataagggcaaggtttaagtcataaaacttcttgatacctaaaccaccacaaacctttggcaaacagatagagtcccaattttccaaacaaggaacctatttttctttgcggatctgacccataagaatttacaagccaatttatccaggccaaacaaatagtcttgggaagtgagaacgttgacatagtatatagcggggtactcgagataacaaaattcagcaaggtagtctgacccgcttgagatagaagcttactacgccaaccttgaagacgtcttttaacccaatccaccatgaactggaaatcatctagtttaattcgagagaaaaggagaaggttgcatagattacggtctttcggggataaccgcctataccccaactggttagagatctcatcaacagtcatacaatacttatcaacaatcatgacatggacatttttagaaaaaaccaaggccgatttggccacattaatcacttggccagaccacatacaatacttatcaaggcaatcttggacccagtccacttcctcattgttggccctacaaaagacaaaggtgtcatccgcatacattaaatgagagatagcggggcattgaagataaaccttgtatccatgtattaacccctcagcatccgctgtgaaaagcaaacaagaaaagactttgcttcccaagataaaaagatagggcaagagagggtcaccctacctcaaaccccgagaaggcaaaaactgttttaggggtctgccattgagcaaga

SEQ ID NO: 230019 - DNA, 924 bp, Cannabis indica
gttgcacttcctggtaacaggaaagatcaatgtaagtaatcgggtattcatcgttgattacatatgctaaggtttcatttgtagagtagaactggactagattgaattggattaaaagaatatagaagtttgaatgagttgataaccaatcactgaatgacttgaatgagtggatacaaagtttgaatttgtttcttatcattgataaacatgaaaatgatgattgaaaatggtaaaaattatctcaagttcttcactgggattaaactttccgaacgagtagtttagagaagtgagctgactcccaagtttgttgtttttaactacaggcaatataaaatgtgagattgaacgggatggaagagtccaaattgaaggggtgatgaataatgatgatgtaggtttaatgaaagagtcatcaaccccagatgaaccgtttaacatttggtttaggctgccaggtcctgtggatccgcgtttgttttctcctagttttcaaccatttcatgatcatggtatattggaaggggtggttatgaaacacacagctatacctccacaacaactttcctgatcattatctgaagcttttgatttgaatctgcccttgcaaagattacttgcctggactaacactaagacaattaattattattattattattattattattgtagaaactaactagatcctttgtacctgttttttgggtttctactttttagttgaagaacctcatggccaaatattatagcctctattttgatttatagttttaacttctttttttttgtatgtaatagttttaactttttgttgttttttttttttgttttgatttaagcgtttacgtattacaataatgtataatctggaactcgaactcagaatttccaatacatacgcaccctctatggctattt

SEQ ID NO: 230020 - DNA, 1918 bp, Cannabis indica
ttaccattaaagaaaaaattattttgtcaactaacttgccaaaaaaggactttacagaaataaataattcaaagagagaacaaaacaacacttagagttttttatgtggttggggctttagacagccttagtccacgagtcgatattattatgtattttagctagaaaaacttttgggaatacaatgagtatattgttcaacccttaatccgaaggattctgggagtatttatagagtttacaggaattacagttagtttccctttccctctaatggagagtttacatagaaaatacacaagttagggttgtattcgtgaggcccagcccatgggacaatgagtttgctgactaggcagatttaacatggtcaagttgtcattaccatgttctttaattgtgggtaattaattgtgaattaattgcttcatcttcattttaggtagtttccccttttagcttgatatgatcttttggccgagatttaaggagagttaattccttattctgtgcaatttccaggaacacattgtctggccttccagaagcgagcaattatgactgcttttgagtacatgctatccttggcagaagcttgtctgcgtgaggaaataagataccttcttggaaggtcttgttagacttgggtttggcccaggttaccttctttgggcccactagtgggctttggatgctgacctagaatccacgtgtcccttaccagaaatgcagataacatttactcccaagcttctagaatactgtgtattgtggacatgtggaggttaaaagtaatatttttatttctttccaggtgctagttgatcgcggtaggtggacttttgtcttcagctttgggaagcagtcgtggcagtcatctagtggtggaggagtgcatacgtttaccgaagacttgctttccaaaaaagcttttattttgatggctgtttattattggtgcaaaaaaaaaagaagagtactttcatcattgatttgtgcctcagttccagggggcattaaatgcttgacatgcatggttgttggactttcgaaccataggataagtttgtgcttttggagagacgatctggatcgttcatttttcttcacgtggtttaccatttcgagtgtaaatacccctaaaagctacgatttaccaccttattcccattttaaagtttcattcacccaagttcaagctttcttgagagcaaagtacggtgaaagattttactagagagtgagcctagattttcatgatctcctttgaattacttttcgcttgagaaatcattttctaccaaaccatccactcccagtgatcaagtgttttcagaagagtgacctggcaaatctcgattttaattctgaaattgattcattgatttccttagccaaccatcttcgtgaaaggtgtgcttgcttgcactatctagattcagtgaagatcacttgggcaccttcgtcttcaccaccaggtatgagtttgttcagtttctcacctttgattatatttctgagtccactgtagaggttagggtttgcatattttttcttcgagtgaaattaggatttcttaggcctttggccaatgttaggtttatttttatgcatttttagagttcattttagtgtgtttttagtttttttattactttattatgcaaatttatgcttggtttttgctattgtatattaggagaaatttttggagatcttcaattttggtgttctgcaagcctctataagcaaaaatgagaaattataataaagaaaggaagcttcttttagcttggactgattcactattgcctaaaattggtcaaagattgtatttttaagctccaaaatttgtggtccagagtcaagagtgatcactttccaaaaataaattaaaaaattctaagttttgaatgct

SEQ ID NO: 230021 - DNA, 1370 bp, Cannabis indica
tttaatgtcattggaattggaatcaaatggtatttcctttatttaaaaggattgtaattaagaagttattcttataatcttggatgggtcgaacttaaattaataaactcttatgctataattttggcataggtgaaattgcgttttgcatttatttttaatattctaaatgtgaaatttttgcttaacacgtacattcccaaaacgaatacaaatttaaactcattaatcaacctagattgagcacaaattaaatataagacattttcttaacttactttttcggtcgaaatgtacattcagagagtcacaaaattcaaacttacttttgctgaaacacaaaattcaaacttggtaaaagtaaaatcaaattaaagtttagacccaaggaatgttacatccacaggtcgttaagttgccttaaaattcaaacatcttttagattaaattatcaaagggtgtaaagagtctcaaaacaaaaatagaagtattaaaaaaaaaaaactcgactcacgcttctggtgctttctcaggaatcaaacaggtcgtcaaattacaataatcaacaatacacaaataattcaagagagaatgaaagagtgggggagtgttacgaggagatgacagacaaattgaggcaaagaaaggttttcgtacaatttgtgtgttttttttaaacaacaaactgttataaaactcaaacagatatgacaaataatattgtaggagctctttcttctattttctattcagtgtacatcctgtacgtgtacctctatttttagttgaatacgtaagatgcatccaacatgtatactactactagttgacatgcactaaacagatgcagaagattgttaccaacaaacattcaaacactccactttataaaagagtaaactatagctaaatagctatattagcatagataaatgagatattataccagttagcaaaacttagtaatgttgaacaactgggataaattttttaaagcaattaaattccgataacttttttcttttcttttgtccttcccttgatgaatgagagaagtgagagtgctactaaaagttctttatactactcaaattaattaaccataacctatatagttaaacttaaagaactagaacactgttaaggctgaagaaaaaccagtgaaaagagcatgggatttggaatatcacttctctctgctttttccactatcacaccttaaaattgtacaagaaacttttaaccaatatctaaccaagatagctattaagccaagagaaatgttatgatacctaagacataatcatggaagtaaacttaaagaaaaatatatgagccaaagcaatgttacaaaacaactgagataaaat

SEQ ID NO: 230022 - DNA, 1259 bp, Cannabis indica
tcccctttttttactcatcaacagtctgtatgtaatcgtactttttgctccttagtcgtgtacactcacaactatagcttcatccctcgttctttatgtgagacaagtgagcccattgatatcctcatcattatgcaggtaccccatctttcttttattcccatttttctaattcactctaataatacttctacattattatgtttttattcgtgtctaataattatgcaagtctaatatattgcttgttatttttcttagtgcagtctaacatgtttgattaatcatgtagaaagtggcttttgtatacttatttttgatttggattgtgatatggaagaagataccattgccatatgaaatgagtgaggagtctaggaatagagtttacttaattattgatttatatttttatgattaatgataaacaagccattgatttgggagaaagagttttactgatccataaaagctttgatctgtttctatttttcttgaagcatatgaaagtagacgagaaaggcataaggaaagtgaagttgaaaatgtctttcagtctaaaatcaattcgtggtctcaaaaaccaaaagctaatggaaaaacaaaaggaaaataacgacaagtatcttccatgtgacatttataaaagaaaaatcatttggagaaggactgttggtttaaaggaaaaccacagtgccaaaattgtaaaaaaaaattaggcacactgaaaaaacttgccgtttaaaaaaatctcatcaagctaattttaccgaagagaaaatgatgagaataatcacttctatgtctaccaagctgcaacagaacaaattaaaaatacttggtatctttacaatggttgtagtaaccacatgacaaaaaattaaaagcatcttttgtagtcttgatacatctaagattaaagtcaaaattggtaatggtgacttcatggaaacattcggcaaaggcaccattaccattgacattaaaaaaggcaagagatatatcaatgatgtactcttagtatccaacattgatcaaaacctacttagtgtaggccaaataattaaaaaatagtactctttgcattttgaaggagattcttgcacaatctatgataagcaagataaatcatttcaaattgtaaaagtaaaaatgagagaaaatagatgctttcctatacaatgaagatatgcatgtagtgtggcgatgcaagcacaaatagatgaattatggcttttgttgatttttatggtccatat

SEQ ID NO: 230023 - DNA, 852 bp, Cannabis indica
agggtctaaattttgatatgggggttttattaagggcaaaaattaaaatttccctttgaaaaagcaataacttttcttttatataattcagcaaagcatcatgaaataatttccaagcaaactgtaacactaacatttaaatgtattttccaaaatttctttcaccatcctgaaaaatagcactacagggcacacaagctcaaatttgtatctactttgtcacattttatttttataattaatgaaataataaaattgcgtatttttttattgcttcaattatttttatataatttttcacatcaaattataaaaaaaaatcattaaactattcaaattaaaatatttaatagtaaatattcaaattagtattgttacaattatgagatataagatttttaacatgtcaccccttttagaatagattattcatgcttatatgtcatgcatttcgagcttgtcatgttgttcgtgcttaagcttatattgttcttgctgtgttttgccaatttgtaaaactgtatctaagtccatattttttcatacctaatcatactcgtagcgtcaaaaagtacaattcgtattacaacactaattgaaaaaggtgtttgggagatatcaagcgatctgcattctaaccacattgttttcattttatgatttaaatgaatatatactatgatttaattatttttttaattcaatttaacaaaggaaatatattttaaattagtattactaggttaaaatgaaaaaaaaaaaagtaaaaaatgaaagaatttgaattgtacacgtgtccaatgcactaacaaaaattagtaggtattagcagaagtttggaaaaaatcgaat

SEQ ID NO: 230024 - DNA, 950 bp, Cannabis indica
catctcaaaagaaaagaagaagatgaaactaaaagtagtttggttaccaacaataaattatttatgattttagttgaaaacaaaatcacagtatttctcattttttttggtaaggatttctaaattaaaattatatatgcttagaacagtgaaaacattgtttttcaaactatataactttatttttaaatgataaagactatttttgactgagaagagaagaaattttggaaaaacaaagtgagtagaaaaataaaaggaaaatacacgttttataagtgagaaaatatgataggagattaaagaaaatttctgttattgctgaaaattagtttaacaacaaaattgtaattaaacttagatttttatgctagaattgtccttgtcaaaaattacaactctacttgattactttattcctcctaaatcgtcggttgttctcttctcaatcagtaatcttgaattgtgataagaactttttcagagaagcaatttagtagagtttcgatagactagtgtgattaagaattcatccctcatttgaatgtcaagatcttctatttagatgcatgaatcaatgtcacgcgttctttataagtcatttttttgcatgttttcccattcattccttcttccgagctcaactatattcttcctaatatcttcgttctttctttccattttaatgaaacgacgtgtttcgtctcttcttaccacaccgcttattaatttatatccattcatgtcatgaaattatgtttatattctccaggttaattttacccttacaattatatatttattctttattttaaatcaaaacaaattactttttaatgtgataattattaaattttaattttacttttttctttctcaatttcaaggggaaagaaaacttctttattactcttattgccattctctttttttttttttattattattat

SEQ ID NO: 230025 - DNA, 1856 bp, Cannabis indica
cgtgagataagagttgcatttggccctgtgattaatatgtcatcgacatataccaacaaaatcacaatattctatcctgtcccatagacaaacaatgagctatcagctcgagagccttgaaatccccaagacacaagtgtttgtctcaacttgtcattccaagctcgtggagcttgtttaagaccgtagatggtcttttgtagcaagcaaacatgtgttggattatctggatcttcgaacccgggaggctgagacatgtatacagtttcattcaatggcccaatttaaaatgcatttgcgacatccaactgagacacattccaattcttgcaagtaaccctttgcaaccaatcttgacttatatctgtttaatgagccatctttgttgagtttgaccctgtgaatccatttgcaaccaatgacattcatggagggattgtatggtactagggtccaggttttggcttttttaagagcataaagctcactgtccatggcaccatgccatttaggatttggcaagagctatcttttaaggttcttggttcagagggtaaaagggattcgggtagtggatgtttggttgctatgtaggattttggttttgaaatgccattttgtagtctggtgcgcatgctatgagttcgggtagggactgatgtaggtacagatggattaggtacagacataggattggggaattggtcattttgtattggtggtggaggaggtggtacattttttggacttggataactcggtggggagagtagtgatagggacatttgctaaagtggtggtaggatgatcagatgctgcattattagattggtacatatcggttaggccattttgggaaaaaggtgggacagtgtgctcattgtcattagtagcaataggattgagaccaataggagtggggttaggacagtgagtcatattaggataagtaaactgagcagatggaaaagtagagtgagaaggtacctgtgtatttgatgccttggaaaaagctggaaaaactgttgcattaaacacaacatgcctggcaatgaacaatcggccttgtgcattctcacacagatattctttatgtgaggaggagtagccaaaaaatatacattattgagttcgaaaatccattttatatctgttatatggtctaaggtgtggataacaagcacacccgaatggttgaagtatagagtagtcaggtttttgacccaataatgtctcgatgggagtgctgtattgaagaacaggtgttggtaacctgttaatgagaaaaacagcagtatggaaagcatgccaccagtaaccaaagtctaagccagactatgcaagaatggtgagtcccatttctataatatgcctgtgtttgcgctcagcacgcccattttgttcactagtcttgggacatggatgttgaaagtggattccttggtcacttagaaaccttgagaagggtctatattctcctccccagtcagcctgaactttcttgataggtagattgaactgtttctcaaccatagctttgaacttgacaaaggtgtccagggcctgagacttttgtgtgagaggataaatccaggtatatctactatagtcatcaacaaagtgaatgtagtagatgtatccatccttggatttgatatgagatggtccccataaatcagtatgtataagctcaaggggttgtagtgctcttgaatcagtgctagagaatggttgcttgtgacttttgccaagttggcaggcatggcaaaatgaaagttgttgtgtgcttcctttgtgtggtatattggtaagtattttatttaggatagtatgagatggatggccaagttgtgatg

SEQ ID NO: 230026 - DNA, 947 bp, Cannabis indica
tagaaaccactagtcatgccggagaaacatcgacactagtagccaccatagggcacttctcgcctattacaccagccgtggtgtctaaaggaatcattcaattaacaacgacccaatatacaaccatgtaggagcaaatgcgggtgttgcaggctgaagttgacgagagagccaggatccaacgtccacctcgagtcttgaacatgtgtttgggtaatcctcaagtagctattgcgaataggcaacaaaatgattgtcttaataataatcatattcgtagggagcatgaaaatgagtagaagggtctggacttgaaacaacccacacataattcaatgcaaaacagagagccagccattcataacactggtcgcactagggaggagggaccacaaaaggaagaccctgagcgacggaaccctcaaaaccgggctcaactgcgagttaggtaaataaagtcgattctcattcttcttccactaatagtttctctccaagtgtttatacgaggtcaggctctgtcgaaacacgatgaggaggaagataccatgttcatagaggtgatcttcgtgatcatctcaacgaaattttcagggcacaatcccagatgccaagaaacaatgataacaacgagcctcgtgatccccaagtgagcgatcaaggcacgtagagcataaacaacccgactaatgcaccatctgcgactacggaggtgatgatcccaaccaacatagctacggttgctgccataccaatggtaacacatgcaaatcctattttaccaggagggatagaccaagaaagcctcctgcaagcattgagaatgatcgagcagcagagaaagcccatttgcaaactccatgggacatcaccttttactgtaagaagtagcgacaagactcgacgtcccaaaacgggctttaggctatctgaatcgcttaaaatac

SEQ ID NO: 230027 - DNA, 1562 bp, Cannabis indica
tactccacgttttagttgggaacttaacgcacagatggcataccaatgcatagcttttagatatagggcttgctaaaagctgacaggacgtcgatcaccaggaattgtgccatcacagttatggtccttgaagcttgtccaactgtaagtggtaggcaaatttgtccaagtggtgccacactctgactggagaacccatagacaagttgagtgtaaggtattaattctttaagatggagccccatcttctcttaggttgctttgaataaaatattcaaggaagctccattgtccaccatagtccgtgccaccatctcataggtgaatgttattgttggttcccctacacgtggtatttaaggtttcctttcttccacggctagaattgtatcattttgttcatgctgaaaggcttgagcataattttctctagctttgccctagtctccagtgaggtgcgggcccccaatgattacctgtagatgcccatccacttatggaggcatcatttggttatgatctgcatggctggctatttattcgtgattggtcttgacatatttttgtaagtgcgagttgtttttttgtaattaaaattcaatctcctgctttaaattgttacattcattcatgccatagccataaactgcatgaaaatgacagaacttagatgtatctcttttactcatatcctttttcatgggagagggtttcttgtacgacaccatagattgggtggttgcatagattgtttctatatcatctgttaggactgagaaagcagtaaatttagaggcattctttctagaatgttattcggagttaccagtgaacttgcctttctttccattaccttgtctattatcgttgttagacctttttccatttagatttgaactgctcgaatgttgtgaattttggacggatgcaccagctatagcgatatgctgctggaaaattgttgtgtgagtttgctagttattgttgtgggttaaattgttgggtttcaattagtgatatgctgctggaaaattgtatgagattattggacttaagctcaagttcttgagcttgaagagttgtgtgtttgagcatgtctttgtgttgatattgcaatctgattttgggcgtttattgttagatgttgatatatgtaatatgttattttgactctcttttaattagtagcaaccttgtttagtgatttgagagtttggatgtgctttgagatgaattaattgtgttgtggttgctgaaattcgtgttgttcatggctgatttttgggtttggaacctaggcccgctcccttgaaccggaacctgggagttggtcccaggtgccgcggcatggcttgggcatgccgcggcccgcccttgaattatttggacagattggagttccaactttgaaaaatgcataactttttttttccgaactccgatttgggagttctgtataccattggaaagctcgttccgagctctatatgattatctggatttttaaatgccatgtgaataatttatgagagtgaaatcagggattaaccctatttgtgaaa

SEQ ID NO: 230028 - DNA, 781 bp, Cannabis indica
ttgaaaatgctgttttagtaaacagactttgaagaattgaattcgtgagtctaattttggtacatgaaagttaatttataacattaacgaaaaattgaggtgagcatttagactcaaattcacacaaccaataatcttagttagagtacattaaaactaacaaaaaaggtaaaaaccagcagccaaatcacaaagagggacaaagaaacagggccaactactgaaattcaaactcaattccttagcaaactaaaagaattactaagaaactaatcacttgaagatccatcatcatcttcttcatgttgtgtaacaactttctctatgaacctttggcgaacttcatcaagaacagcttctctcgattgatcgcctccactttgaccgtcattgagtacagggtctgattggcagagaactaatgcaacacctgatattccaaacactgtagctagttaacagatgaaaaggctagaaaatactaattgtgtcaatgaaaatggttcagaaagtaccttctggtgtgcatctcctaccgaaccgttgaaggcctacataattagctttgactgcactattgttgtacactagaagagtgggaagattcatatctgggtaattgggaatgcaatctgttgatattatcttacaaaatttagttgcagggtattttgtagccaattcttccaaacattgcatcagcaccccacattctgggatcctacaaaacaccaatttacaacattataaacagaaaacaacttcactgagatttgttatg

SEQ ID NO: 230029 - DNA, 1711 bp, Cannabis indica
gctggttcatgaaccattctattttaataatcaattctattgacccagttattcacaaagtcaaagcctattattcattggtacaggaatgttaaaagtcaaacttactgaccttctctcttgagtcataacgacataaccaatggttggcgaaatggctttctcaatccttatctgtcttgcaaaagatcatatcctggttgtattgaccaaatttagcacgaccctgtaccaaagttttggtagtaaactttaattttattttggtctaataagtgttaatgggaatgtccgtacacattataaatttttattgatcaataaaatattaattatttaaatattacaaaaaaaaatcaaaaattaaaatcagtaaaataaatgataaaagaattcaaaaataaaatattttttacctttccttctgtttttttcttcgtgtgtccagtaccattgcaccatcaggtacttgagagcaagagatctcctcaatactcattctctgagctagaaggacacgaataggcagggcatcagaaagaatgcatcaccagagtactttatgcctctccaaaatgtttgagttctagagtttgttccacagtgccgcggcaacaacacaatatggggatctctctaaagcgcggatcagataagcagactttatagtgaatttaccatttgactctttcgtttaaactcacttatctttaccaaggccactaggtcttccccttttaatgatgttacaaatagtttctgaatcaaagacggttcggagtttaggaatgtcccaacccccgctgtctagaagaagctttgcaaccttggtcaccccaagggttgggagtaaaggccttagggtagaaccccttgccatgtagaatctgcaggtctgtccagatattggtctctttcctatcagaaatcattttacaagcacatttttttcaagatttctttagatttcaccacattcttccaaaaccaagagtgcgaacttttaaaagagtactccaagaatggctttcctcttagatacttagcatttagtactttacaacacatagattgctctttattgaggagagcccatccccacttggcaagcaacgcttgattcatttcaagagttttttgaaaaccaaggccaccccttgattttggaaggcaaaggcggtctcaagtcttcaagcaaatacttcgattaccttgttcacagcctcactataagtccgtgatcataccatctatagtaaaggcaagtttttttgaatgtttagtagtttgcatactatagataggatagccaaccctaatagtcatatcacttaataaagtagtattaatgatgaaaaagaaactttcttattaaaaggttactttctttaaaaaaagaataaggaaaatagaattaaatagtctatttttcacaaataattaggtactctagtattaacaatcaaaattaagatttcctgttaaaaagtggtattttataggaataattacataaggcactattttttgtaaaatatttacatttttgcgttcaaagaatatttttttttacatttttacagttttccaaaaaataacacgaaaacaacataaaatcaataagaaaacaacataaaagtaacatcaaaatactaacaaaaaacaacattcatataacaaaaaattaacaacaaatgaacaaaatttcaac

SEQ ID NO: 230030 - DNA, 3969 bp, Cannabis indica
gactttaaattgcttaagtttaagcaccatgggcattttggtaatttggaaagggagggttaggtggctggtgggttgagtgacacctagccaatctagttttcagcatgagtttaatgtagttaatcttttacacttaaaaaataaagaaattaaagaaaataaaaaatcaagagaaactatttctctctctctctctctctctctattgctcggctcacatagaacctgaaggaacccagctaatttcatcatcttttttgggaattcaacaacaattcaaggagtaattaatgaaggtaagccctagaaactctaactttatgaattccttaagttttagttggttttggcatgtgattttggatgatagggctaaatttgtttttgaatcagtttttaagtttattttgagcttgggttgagttcttccagctggttttgaggtttggtgtggtggatgcacaagttggagtttgaaaactcaagcttggttcatccatggcatgttttgattttgtgtgtaattctggattctattgcttgaaatatgttgtgggaggtcaatatagtaggtgttcttgaaagtttggtgagatttggacatgttttggacaggttttgaattgtttggggaaacctggtgcgaatcggtttactggtttgccatgtcctgtaaaaccggttaacttgttctgggactggtttcccgaacaattctttttgtcgattcgtgtccatttcaaagccttggttgtgtgattctctatatttttagggtattatagtttcagttgtctatggtagaacctgtagttggaggttcgagtttcccggattagggttttgggcgagttatttacccgattattttatgtgattaaggcatccatccagcatgaggttttctattcaggtcggccaactcacttgaattcggaaacgaggtaagaatagcgtagaacatgtgatgtacttatgcgaatgtatgtatatgtaaaatatctatgcatgcttattatgcttagtacattaccaacacttgtacgaaaatggtacagagtgcattggtatagtgtacaatgtataaaagtacattacagtgttactagcacaagtacgggaaagtacagggtgtgtgtggtatattacttagagatactcacggtacgaaacaaaccctaccaacactcgtacaatgtcggtacgtagtgtatgtggtacagtggctgtaccctagtaatgaacattcttgctcatttgttaagccttgtaaataggtgtatgggcacctagacacaagtcggtattatatgatttattatatgcttttcttactgagtctgtcgattcacagttctacttttacttttgtgtgtaggtaaaggaaaggcaaaggctaaacaggatggagcctcgagctagaaagatgttgtacatgtcatggcaacgcaacttggagtgttcggtatcgggacatcttggattttattttgtagtcgttgtgcgacctaactaaatgtattttgaatattctataaaagtttaattacgggatcccagcttttgtaattatatatatcaaagtttataaagtttaataattaaatctaaaattttaattagacatgattttcaaggaaacttctttgattagcaaagatggcactgtaattgaaaaatccctgtagcgtgcctaagtatcatggcattacaattctggtatcagagctgctaggtttgtttaccaaagagcgccaagacatgtacaatcatcattagagaaaagctcagctcacagttcaataagccattacttatttagtattgtatgtgattattaatgcatgttaagaagcatagtagtttataattacttattttaatgcattgcctttaaatccataagagcgctattgagttttatgattgatgtctaacttgcctgacttatgggttcgcaggctaagtcctattaaatggacgcccagcgaaatacaaggagtcagggtaatagggtcgagaccggaggcggtcagggaaatcgaattccccagaatccctgtcgacacggtagaggccgtggaaggttttagggtggtcgacatgaaaatccacctcaagctcctccaaattgggagcagagattcacaaaaaatgcaagatcgtatccgccaataagatgaagaaattctgagattaaggtagcagggtcctcctgcagtgcttccaccacaagctcaggccgctttagttcctgtggtgccagtagaacaacatgttgctggcaactatatggagccgttgtacgagaggtttcgcaagcatgcacctccaatttttctgggaggtccaagaggtagaggattagggcgaggtccgtcctgatactccattagaagccgaggaggagggagcagctcagaggctaccctttggtgggttcaacgaagatggagaacacgtgtctgaggccggtgaaatcctggatgccggtgaggactacgttactgaggaatacaccgaggttgttcctcaaagaagacaaaatgcagaaggggctcggtgggtttctcctccatctatagtaacccaggcaaaactgaagaatttggagaagcacggctacttgagggatgtcaaaagcttccttccctctccaaaccactgggcaaccagtccaagggaggggtactgtgcttggtcgggcgctcatactaagtagggtgcaatgttgcccttgcttccatactttaggagaattacggattactaccatctttgcccaacccagttcactccaaagggcatcaaatatatatccgccttgttcatcctttatgcctcacaaagatggagggagccatccccacacgacaccaagtggctctttgatctaaagtcaactcccaagtagaggaggttggggtatttctatttttctcagctcgaggagaagtggctaatgggcaccgtggacaccgatgtcagcaagataggacattttgtgtatgagtactactttgtccagggcatggatactgtccacactcggttccagcagatcccctcatattgctgccctcccttcactttggggctcatgaagagggcacagagaattcttcagctagcaaatgctgctcagaacatcaccctgctgggcactggggccaattatgttaagtataaactcttcccagaggactttgtgccaaggcccgtgaaggagaagaagaaggcaaagcctagctaggtcgaggtgactgagcaggagaagctgagtaagaagaagaagaagaagaaagaggaggaggaggctctccctcgtgaccaagcaccagtagagcgtgctatcaggataagggaacctgatatgcctgtctggtcgttagccccagtagagggaaaagggaaagtcatcctgatggagtaggaagaagactcttcggacgatgatcctccgtcttttcttgttcgggcaaatgctcctgcccacatgcatggtattttgacttgtatttatttctttcattacatgctttatattacacttgcttctaactatgttgttttgtttgtgtagtcatgtcccagaaagtactccaagctctaaagaagagggttggtgaaaactcgggccaggctcccctgcccaagaggtctaaaggcaatgaggctccgtccaaggagaaggagaggaagaaatagacctctctgaggaacgacctgtcgtggaccctcaagtctagaaggtctcaaaatccaagagttccagtgggaggagctcaaaacggcctgcattagctccttatgtataatgcacccgctcggttttaagtcaaaaaagtattttcttgtgaaaaacttcatttgtatgctcgatatatatcccgagcacttagaaaatctgtattttttattttaagaaaactagctctacaattttttataaattttctcctattt

SEQ ID NO: 230031 - DNA, 1302 bp, Cannabis indica
taggctggcctcagccctctcctatgagatagggtacttctttgagttgaaatattttttgaaacagaatcagatatgatacttctactttatccatatcagttatcagtggttgggcgataccaacaacgcgttcttgtcaaaagtaggaggatatgctaggaattattctattgattgggacatccaataggttccccattgcttctagagagtgtcgatctatacacgctccatccccaccctatagatgcgggatagagctaatcatattctatccatcccagttgataggaggaatatactaaggctagcatgtgaggccaacttccagaggtatgatctataccctccagtgtttggcattgaaggagctgaggagacatgcccaggaggtgggcgtattgctatcatggatgatgatatccccctctccaggattgtaaagaacatggagagaagagagggagccctccgctaacgtttggctcacggaggcactgtgggtgatgccactctactaattaggcctagaggccaagattctgccaagcccactcaccccatgcctatgtctagaggtaagggcaaggctactgctcgcagttcaaatgactcctcttctgaggatgatggtagttgatagttgataacactaacttttctactcttttcttgtattgaatatttgtaacttgtattctaactttttactttctttttgtagatatagcttaggctaagagatcttattggagagccctagggcagagcttcaagtcgtcccagggtcaaggtggcctagacaacacgatctggtgatgttgtagggtccttactacctccccatcctttggggcctgcaccggctagtcagccaatgatccttgatcctccactgaggaacacccccttccacgccaactttcaggcaagggcacccaaagatctagctatggggcatgcacgaccatcagacagagagttgtaaaggctgcttatagctgtattggcaaggttctgcccattgttgacggggagctctagaagctcgaggatgaagatttggagcagttgtgatcaagcagtctccaccacttgattgcgctacgttacagatctgattttactcaaattgttgcactatcaacagctagcaggctaggtattgaactttacaaagctggccaaccagagttgtaatattgagatgctggctggccagggaagcactagaaaggggctggtcggccaggttcttcttctagcactaactcaatttttgttttgatttcaagccct

SEQ ID NO: 230032 - DNA, 911 bp, Cannabis indica
atttaatttataaaataagtttaattggaatacaattttatctttttaaaaaataattatttattggttaactaaataaaaaagaaattaaaataatactttttattttagtcctttttgcaatgacaataaagaaatatatatttctcacatatcaaaatgatcactttaaagagtagtttgaaatagtataatttttgagattaaacaattatcggtgtaaccgaataaatatttaaaacttataaaaataaaaatattttttcaatataaaaatttagtactgtatacctaaaaaagagaaagaaaacaaaaatgtaagaaatacaaatattagaggcttagagcacgtgaagtgagggaaaatgtatttatttattttttaataaaaaaataaaaaattagtgaggaagctaacatgtatgcgcttaagacaaataaaagaaatagtcaacatattacggtggtacacgtatcataaaatattaagattatatcggtatttaaataaccaacactaaattcataaataatttaatatttgtttggcgtaatttttctattaatatttgatatttgatgatttcatttgcatgcagtatatctataaaacatattgttatccaagagaacacgagcagttgaaggagcttagggaagccactgtcaagaaatataaactaaagtatttttttcttccttaatcttttttattttataattaatttaatttgggtatataaatttttataggcaatttctttgggtacatcacacttggtctcgtttgttctgagggttaattctctcatctttatcatttaactagagaacaagcccacgcttcgcgcggttttaaacatctttttaattttatattaaaataaattaaattttattttattataaat

SEQ ID NO: 230033 - DNA, 1469 bp, Cannabis indica
cctaggcagtttagggggaggtcttttgcttttttagaacaactgtattaatgttactgttgtctcttactctcttaaccatgtggactgttatataaataattctaatgatattaactggcattttactgggtattatggttctccttatcttgattctaaaatttttacttggactcttctcaatcggttatatgacactgcaccccttttaccttggttagtaattggcgattttaatgattatttatctttaaatgatcgtaactccacttccacccctccctcccatgccatgcaccacttccacaactttctgcatactcgtaatatgacccctctcccccattctgggaataagttcacttggcgccatggccacattcttaagcgccttgactaatgcacaatttcctctacttggaaaagcctctttccccatgcctctctctctcatttggggttctatggctctgatcacagagccctaaaactccaattagaggacactttttccaaacaccaaaaacaaccccattttcatcttgagaattttctaatcactatccttccttctcaacattggtccgtgactcctggtgccttccttcctattccccccttcctcctttgcaacactttcttaaaaaacaatctgcttgcctctccaacattaaggaatggcaagcttctcaaccatctcttaaactccaaattgcaagaacgcaggttgagcttgatcatttgttgaatgatgatcaccctgctcctcactctactcaacaaatttcccacctccaatctgagctcaacagacttctccttaaagaagaaatcttttggaaacaacgatccagagtagattggcttcgtgctggtgataaaaattctaggtttttccatcaaaaagcctctattcgtaaacgaaataattatattcgaggtttaactctccctgatggttctatcacccatgacactcagaccatattcactcaattccattcttactatactgaccttttttgctctcaaggagtttccccatctgctattgcctccattctccagggtgttaccactaccctctcttcttcccaatctgcttttcttgctgaggagtttacagcagatgagataaaaacagccatgttcagtctctctggagacaaatctcctggtcctgatggtttaaattcctacttttatcagaaaaattgggatattcttggatctgaccttccaaatccttaacaatcagggggacatcccaccaatcaataacactattttggtcctcattcccaaaaagaagaactctaaatctgtgcgtgatttcgaccaattagtctttgcaatactttgtataaatgcctatcaaaagtcttggctaatcggctcaaaactgttcttcactctgttatgagccctaacaaaagtgctttcctcactggccgtcaaattactga

SEQ ID NO: 230034 - DNA, 1001 bp, Cannabis indica
aacagcttcctaccttctttcttccggtaaacattagtagcatgtcccatacctttgcaattggcacatataatgggcttccattcatatgtaaccaaaaaaactagtatcaaaaccaagctcatcttcaaactaaataagatcacgaaaatctcgtttgacaaagatttctatgagcactcatggaaaacttagtttatccttgagtttagtcactgaatccacctgtagaggcttccccaattgtcctacaatgttgagcaacgacctgtcacccctaatatttcaaatcaaaattagtaagttggattcaaattggaatcgttgtgacatcttctttttcaaaattagtattggggttctaaactttcataaccattcgtcttttattgaaaaagacatatcctccattaataacttcatttatatctttgatagaatcaaatctcactagaaatactccatatgatagcatccctactttgttagctttatctttccaaattcttctaacaaaactgttaagaattaaaagtggcgtagcaaacaattaaagattcccaaaagctacctcctcttttatatcttccattgtaatcttaacttttctatccttttcaaaattgaaggaattttctaaataatagcaccagaatccacgataggaggattagtaggattacctagtgagatacctcttagagcatttattgattagcagtgaggaacgcaatgaagtctgctcttatatcctattgttgttgaatcgatctcatagcaactttggatgacaaaggttcaggaaacatatcagtgatagcttgctccacttcctgcttcgttctcgactcctgactctgagagcccgaatttgtctcctccaaaaaattatcttcatcatccgtgaaagctacagttccctagtatctctgccatatattttgtcttcctaacatctgcaatagatgtcagacctcgcttcttaggtttcttagcattca

SEQ ID NO: 230035 - DNA, 1118 bp, Cannabis indica
gcttagcttaaatttagaaattagcagataattagggtttaattatgaaaattatttattagtattgaattattaatttatggtgatttatttgaattcataatgcattttatatgtcatatatagaaattttatgattttgcatttttagtgcccggcaacattggaacgcggtgtttggctattagaatcacatcctagtattttaagtatagcggggcagtctagttagacattgggaatgtcgggatatgtcgggattttaaaatttccaaaaataccccttagtgatctttttatggcttttgtgtgggaagggcattttggtctttttcccactttgtaatttgtcctttagtgagatttttaatttattttaaattatattttattatcaaagagctgagttatttattaaaacaaaaatcattatttatcttatttcaaaaaaaaaatggaaaaggaagctcatctctctctttcaagctctctctcattcgaacccctagaccagctagggtttgagtttttcttcagcaattctaagtgatttctagctagtttcaagtgtatctgatccaaggtaaagtctcttgtatctccctctttggtttcttatttttgaagaaatgaattatgcatgtttttggaattttagttgttgttcttgttgttggtgtttgattgtgttctttgtagttaaataatgtttggttatgttggtttgagctggttttagtggttgttgattagtttaaccaagctttgagtattagaactcaaacttggagctttaatgacatttcttgtttctgagtttgggtattagttttgttgcttggaaaatgatctttaggatgcttagaccagatctggaaagtttggtttgaattggggttgatttggttgagttgtggaatttttggtcattcctgcactgaaccggaatttcggttcacaggggcctgtaggaaccagaattctggttggtccgcaggaaaccccacagatccgaaattccaattggggaaccggtctaccggttggggcagttttgagaaccctagtttttcccatttttgagatgtttagggtgtttcaagtttaaatccccggaa

SEQ ID NO: 230036 - DNA, 618 bp, Cannabis indica
ttttttctttgttttttttccttgggttcctctgcttctccttgtccttcttctctgaatcagtttggtctttgggcatcacaaccagtgactgttttagtctctttggccactgttgcagtggctttgacccaagaagatgctagtaagtacgtttctttttattttcatatttctgggttgtttagtttaaagctttctcttttaccaaatggaaataatggtgttatactgcaattcgttgtgtgaattccagcccaaaactctactgaattctttcacaaaacacttgagctgaaagcaaatctaaaattcttgcttgaatcaaatataaaattttacacactttaaattactatgatgaaatcaatagctctatattaccatctttgtatgacttttcttcattttatcagcaagttaatagaggactacttgtaacatttgctttctcttttctgtgtcatgttctctgctaaaagaaatacaaatgatataggaagtggagggtggagttttgaaaattgcctattgcagaaagaggcgagaagtgacattcaatttgtttgttgggaatttgtcatatgatgctacagataaagatctcaaagagttctt

SEQ ID NO: 230037 - DNA, 1197 bp, Cannabis indica
gaatttttaaagcatggaaagcttgaacacaatactggaaaatctaagaaaacaagtagataacaggattggaaagcttacctactagtaaaaactttttaggaagatggtggaaagcttagatcgtcgaaacaaagtgagaatatcaggtgttggaggactaaggtgagtccacctcaatgggaagtgaagagctttctttgtttccttttttgaagagagagaatgagaaatgtggaatgagaatgagttaccccaataagttatatagattattgtatgtccctctctcatttaccatggagcatgcaaaaactgatatgcagaatattataaaatttctgctaaggaatgtgattagaaaagcaagagcaaatgtttcataactgaatatattacaaaagcttccttgttaaggctccatttgtccaaactaaagctggaaagtccctatccatacatatgccggcatagggacttgggagaaaatgttatcccaatttttgaacacatgacgtggcatgtccacgtgggcaagattaatgtcacgtggaataaacttgtcaaaaagaaggccaagtcatcgtaaaaaatatatcagttgacaggaagtctgaatacttcagcaggataaagagataacgaactcgccaccttaaggggtctggctggacccccctagctggccctttggccagcctaggcaacctcaccactagcaaagaaagggccaaccagcctacatcttgacaggcacttagccgaccagcttacaccctcgcaggcacttggtgtgcaaccttgatcctagcaggcactttgtgcacatagggcttcaaccaaccacgaaaataaggtataaatatcagctatttacctattattggagattaattaatatattaattgtttattgttttataatgtaaaaaacatattatatttcctctttttaagggatattaacctattattctcttgtaagctctcctatataaagagcatcaacctaaacctaatttccctaagtctcaagcattctaacctctcaagctctaagtcttaagccctaactctctctctccctctcttctacacgccataggcattgtcgaagagactaagtgtagcgccctaaacctcagggatgccacgtgtgtgtgttttaaaaaaaaaacttattatcactaatctata

SEQ ID NO: 230038 - DNA, 2043 bp, Cannabis indica
tgtatatatatatttctaaaaaacgacaatatcttctagaaacttctctatattaattttgtgaatgaatgtttccactataaagtttctaagataagctagatattgagatgtttgttatggatgcatagctggataaccaaaaaataacaagagtatttgaaaattgacatgtgggattgatattgtctttccatacgtaataacttttaatggaattgtgtcgaaggcatgcattgttaattcagtcttccccgacaaaaatattcaaatcatcatctttcgcttcgcactatatatgtttatccatatataatagtatatatggagtttaaataagtgttgcttgtgactcgtaataaagtagggtagtggtcgtgaataatctgcaatacatatctctatctatatatagagagagattaagcccattaattagtttcatgatcaacattattgcttcttttgatatgctgcattacatcaacatttcttcatgaatattcactagtgtaatatctagtgaacacgtacgacgtatacgtgttatatataagcgtatatataaccgcgctggccgttgaaaagtaacacaattttttgtttgaatccaaacatgttaatatactaaatatagatttttgacattatttatcatgtaaatcataagtccatatctcacttcttaagcaggaatacaatatatttttttcgtggctacgagattcgctagtcttattcttctcgtagtgaattagtaataattggatgtttgttgtatggttattatttttttttttaaaaaaaaacacaatgaatatatcattgattaaaaatcataatgtatttgattatatatatatatgttacaacctatataatattacaagtctattgtaaaataatataaagactaaaataaaagattgattatatatatatgttacaacgtatatatacactattatatattgcaaatatataagtagaaagaagaagaatacaacacatgtaatataatacatatatatatataacaaaagaagaatatatatataaatacttactcacaatcttgagggtagattagtgggaattaccatatgacttgaacaaggtatattatatatatacctttgtccaaaaacttatttcccctatctctaagcacttaggaaactctctaggaaataattttaggaattatcaagccttttagggtttcttgcaaattacttttttgatagaaaacttctcatctcaatatgagcacttagacctctttatatagtgtttaagatatcaccatttgaaatttaaattcacaactcatagattccttaggatttaatgctcatatagctgaaataaattgcctaacagctatttctgctttgaataatagactaatttttttttctcaataatcttggtgttatattatttataaaaatataatatataagattaaatatgtgtaataaactaattaataatatgtaacatatgataatattaattgttattattttataatatttaggggagttatacttgttactatgagtaacctccaccattttcaccaattaatattaagtgtgtaaaaagttgttacacatcttaatttaaaattcttaatgctatatgagttatagtgtatgcatgaattacatttgagtctataacatctaaatgccaactacacacttttcttaaaccaccaccagaaagaaacctttaagaagaaaagaaaaaaaaacacactaacatttgtagttaacataatataaagtataaggataactgataaacaaaactacataaataattaaatgaaattaagctataaaactaaaaattactaattactactaatagacaagtggaataaattattaagaacataaaataaaaatgaaaaaaatacggaagggcaaactcccttcagtttatatttataataactgataaaactaccaaaaaaaataaagttttaagaatgtaattttttcatgttgaggaaattatttgtaattaatc

SEQ ID NO: 230039 - DNA, 916 bp, Cannabis indica
gtaaacctataactgagctctttgtggactttttttttcttattgtcattaagctgtctttaactttattattacttgatattttcgaatataatctgttattatgttaattattgtgtgtagcctttcaatttatgcagcttcatagatattgttagaaacatatagactacttcatttggtttgaagaaaacgttgaaatagcacaaacatgtatagagatcatattcactttcaagaaaactctgtagtccatccctctcaaattagcagtgttacatcatgtttacccaataggtagacatatatgtaaggtgaaaatgcaatatgaacatcatttttatcgtatattattttaatgcaataaacttatttagataagttttctctctttctctcttttttctttcttcgacagaatcaaaataaaaatattgatcgttacatattgcattctcatgtagagacattcccggaaaactttatttatattactttagtcttagcaagatattggtacaatgcatgaaaatgcccaatgtgtcaacttttttattggttcatttttcatgtagaagaaagtgtaaatgagggaaaaatttcttctaacttattattttttaaaaggggaacgtattctacctattatctggaagatgcatgaacggtcttgagtctatgtttttctatttgtaattttcatttgcaaaagcttttcttgttatcttcatcttggttttcgaggtatcttagagcacctccaaggaggcagcaaaaatggatatatgaagtggttaatgctccaaggaggcagcaactatgactgcaaattgagggtttatctacagtgcacggcatatctacagtgcaaattgaggtatcttagccacgacattgattttgttttttttttttt

SEQ ID NO: 230040 - DNA, 1803 bp, Cannabis indica
aaaaaaaaaaaaagataaaagtagtgatgttaattctatgtttcaaggtttttataaagagtttttcactccgtgcatacaacacgagattcacttaattttccttcatttcaagtagctctttcagcatcgaaattcatttctatattacttttacaattttagagcaaaaattaacctaaatatttataaatattttctttgtggattttgtactgtgcggctttgtttcagctatatgaatcctgcttaatgtttcgattggtttcggttggtaatatttcataagagtaaatggttattttcatttcatctccactgattttggattacacaacatgatcaaaagattcaaaactgtgttattagtttttaattaccgtatttttttttttcctttgttataatatttgtgctacattcagttaaaactaaaacttatcacaaattgagtgattaattgttaccattgcagaaatcacaagaaatggccacagctaagacagtgaaggatgtaaatcctcacgagttcgtgaaggcttatgcagcacatttgaagagatccgggaaggtggagctgccggattatactgatttggtaaagactgctaaatttaaggagctagctccttatgaccctgactggtactttgtgagggctgcctctgtagccaggaaggtataccttcgagggggtcttggcgttggagcatttcgtaggatttatggtggatcgaagaggaatggaagtcggcctccacatttttgcaggagcagtggtgccattcttcggcacatcttacaacagttggagtcaatgaacattgtcgacattgacacaaaggggggacgaaaaattacatctaatggtcgcagggatcttgatcaagtcgctggaagaattgtctctccatgaactcttattttctttagtggtttatattttaatttttttgcttggtagacaattttggtaacctacaactactaattacaactactaattgagattcttaaaaagcatgtgttgctaatatcgtattttagttttttttagtagtttttaaatattttctgtattttacttggtgcgcttaattattactcgcttggtttataaatacttgtttttcccacttgttatatctgtaattataaatttaatagtataattctcattgtacatatgaaaagtattaatgttaacttattcttttcaaatataaaaaaacgcagaattggagttaattatcttgacaaatttaatttaattttatgtattattagcaaatgtcaattcaactccaattcaagctttcatatgttctgagtattattttctctgatttgtaagggtgtttatgaaatatttaattcaatttgcaaagtgtggatatctacactgtgttgtgcgaaacgaaaataatcaatgatttacaacttagtataccagaccaacaaaaacacaacacaaataagaaataatgaatcaagagatcttaaaattcaagtaatgaattaagtagcaaaacagaaaagaataataccaagtttaacgagttcaagctacgtgcaatgctctacatcttagtcgaaacaataacaatcatatctttgttaatatcagtgttcaaaaagttacaagaatcttcacagagattacgagaaaaggtttctctctctaggttagactagtgttgtaaatacgggtcggactttttgatacgacgcgaaactggcacgggcttcggcatgacacagcacgatgctataaattaacacgacacgagacaaaaaatatgt

SEQ ID NO: 230041 - DNA, 1847 bp, Cannabis indica
tgtaattaatttgattaataagcattattgttattattttgtaacggtctcattatggccattatttgtaaccgatgcctactacctataagtaggggcttccccctccattcaaaggggggctgatctgaataaagaaacagagctagagtactcttttcaacagtggattaggcaggccaagcccgaagctcctgctgaaccactatatttttctgtgtctattttatactattcacaatactcgcgtatattatacactatattctttgagtactcgctattctaagggagtactcgcatatctattttttggtatccaagtaacccttgaatactcgcacaaaactggtgttgtcgaaatttgctcgacaacacatacatgtgttggtgccaacacaatgacttggacttcaagttctttgatgcgctacagggtgaggtggaggagtatatctgcaggacccatgcgacccctgccaatactcaaggtactactgctgatggggagcttgatgaaaaaggagaagaggctacttctcacccggtcccacggtcttgaggagaggagcatgggagagctgtgccgtgatggtagtgctttttctcttggtgtgacacgtcatacaaggagtggggaactctcttaatgcttgactttgtatctttattgttttccgagaacacatttatatttgtgtctctttttgctatatacacttttcttagttgtgcattgacacttaagtccacatgagtgggtttatttatgtccacttggcatgaagtgcttattagttaggactaacaagtctttttcacatctttagaactttttaagcgtatataacttagtttattccgtatcttagtgactttagaactaagtttaatatatttttttgcacttattttattttgatacttattatctttgtaacacagggtatttaagataacattaattgttgccaatggtaacttgcattttgctagtccgagcaagttatcggcatggaccttaatactttgggtactcgattttagcacgcaacccacttgtcaaagtctcaaatgtaggccatttgagatgtctttattaagtggaattttttgagctacggctccttggagcaccctcacttgacatttttaggaagctttgacttattttttttttgaaggtgaatcatattttgggagtcttggtaccccaaaacctaaaaaccctaatgggagatctacactatcttttggtgccaaaagatggcacaggtcggctagggcttatgggaagccctttatggtgtttcctagttactttagtcatatggataccagaaaaatactttggccacattagttcttggccaattggtaggagggacatgtgtcatcttttgggacacaaagatggcacaggtcagccataggtgttctacacctctttgtgacttttctcacttgtatttgatactttgatgttggaaatatattttggccaaagaaatttctctccaattaatatggccgagctgtgccatcttcttgtgcaaaaagatggcacaggtcggctaggtggtttctacactgcttggttttaatatgttgatgatgaaaaattattttgggcacaaatgtccttcccatttggtgtggtcaacctgtgccactcatttgtgcacaaagatggcacaagtcaactaacactgattcttgggtgaaaatagtttttttcacttgtgttgtactccttggtattgagggaccacatttagacaaatcttatttggtgtttcaaaagtagagacaagtgcatctttttatgccaaaagatggcacaggtc

SEQ ID NO: 230042 - DNA, 1294 bp, Cannabis indica
  modified_base (1181)..(1181): a, c, t, g, unknown or other
cttggttattatgattattcaagtgaaccttcaacaataatgaaaacaaatctatagtattaatcataaatgttcattacataatattaatatatagtaagatgattaattcaaagcaccaaacatatatctaattaaaaaaagataaaataaaagaacaacaacaatatttgtacctgcaaagctgataggcttgctgaagctaatgccaattgaagagtgtaatttcttgacaatatcacatcttccagtttgaatttcacttgccatgttgtatgttgatatgtcccgttttgtaattttctataatattagaaaatagtagagattactataattgatttcaacataaatgaagatgtatatataaatatatatttataaattaagctttctattttacctgttaacatgagcaaaaaaccaatctcgtcgataatcacttacaccaatggtgtatatgagatcttcctttggatacaaatctgtataacgatcccacaaaccatattgcctgaatctatttattgtttaagcaaagttagaagatacattatgtatgtatataatcaactaaattaatataatagtcaaaggttacattgcaatattattactataatatcaaatttcataatgcatatacggtttttttttatttgaaataaaataggggcttttttcatttttaaacttttaaaacaggttttttttttttattttttttagtatttttaacgaaattctacatttaaactcctattgcaactagcgttgcaacttaaattacaataaaaaattgtatagaaatctctattgcaactacaaccactttagaaacttaaaccataaattttaaaaaaaaaaaataaaaaaatagtatatggttgactgaattggttgcttacacgttggtcactataaatgtcatataccacatacaattgcaaactaaaaattatttaaccctaaaaaatattaaaattaaaaaacaactataaatacattttttttagtttacctattttctagattcattaatgaacaatggatttgtgagattaggcaatgggtcaaggcacatagaactctgaggcagttcggtcaggaatgccaatttcccatacggttggaccgtttcgttggtggtatataactagattgtttaaatactattagtnttccctattatatataacaaaataatataaaagtgaataaatttcaaatttttataaaatattttaatacttagtaaaaattggtaatattgtatatatatatattatatacc

SEQ ID NO: 230043 - DNA, 1678 bp, Cannabis indica
taatctggattacattgaaacagagttttatttagggcataaaacccaacacattgaagctaatgtcaaacctcctgtagcatttttgcacagtgtgtcgaggacggccacacaattgacatatgactcgattttgagggtaagatcccctacctccattagtgcctcgaccaccatttgagtttcgtcctccgcctttataggtattgggattgccacgattgctagtgttgctgggatttggaggtttctttgactgtgcaaaattagcagaggcaccagagaaatctgccatttgtgaagcagtgttgacttcgattcgcatttcttggttctgcagtaagaactggacttcttgaaaagttagatgatctctggaagtgagattgatgacaacgacttcataatcggtgccaaggccagccaagacataaagaatcaactgttcttcagtgatttgatttccaacagctcgaagtccgtatgccaagttcttcattttttagaagatatttatcaatggcgagagagccgtttttttgaattctgaagttgattcatgagatggatcattcgagctcgagatgccgtgccaaagagaagctcaagggtgcgccaaatgtcatgtgccgattcacaatttacaacatgacccagcatagattcagaaatagatgagaaaagccaagagaggagaaattgatcaagacgatgccaacgaacgaattcagggttactaaccagagtagttgattcaggtggctgacgaattcgttgttgcggaggatcttgattcagcaaaattccttcaagattatgggctcgaattgctggaaggacttgagagtgccggaagaagtaattgttgcgattgaggcgtagaggaggcaagaacatggtggtagggactccatagttgttagtcgactcaccaactccagaggatgtcgccatggaaggaccaagggtctcctgataccaagttgagaaagcagaaaaaagagaattcccaaaaaggaaaaaaatattgaattgattcaaagagttcaatacagagatgagcttttatatacaaaagttacagaccaacagaaccgaaaaataaggacaaaaggactaactaatccttaactaattaaccaactaatgacctattttaacagaaattcagctgtcatgtaacagactcctcaacagtgagaattacagtatatggaggagatcaatgatgatcgcactggttcaaagattcttattttctttccaatggtaacaatccaggagttgtcacgttcgaccttgttgtctcttaaaggtcattctttatacctacatttttcaggcacaaacgtgaggagggtgtattagagttagtccgacattactaatgtgtggagataaattgtcatatataagatgaatgggctactcctgacattgtcaattgatttttaaatgaaatttcattcaccttattcccgaattctaacaaaaataaataaacaaataaataaaacaaataaaaattaaaaaataaaagtgttaccaagaccgcttaaatcatttaggaaaattctataatgtacccccttaaaaaggattcaccgatatatgtctatccgttttagtatctaaaataattttttagtcaaattttttctcatggtcatgtaaatta

SEQ ID NO: 230044 - DNA, 1907 bp, Cannabis indica
ttcctcataaaccatctctccaccccagccttagctcacaaatcaccaatcgaaacactcttcaacgttacactgaacctgaaattcctcaaagtttttggaagcacttgttttccacacctatgggcttacaacaaccacaaactcgattttcgatcttccaaatgcgtgttccttggatacagtcccaaccacaagggttacaaatgtctacacccaagtggacgcatatatattgctcatagtgtgtctttcaatgaactcgaattcccattctctactgattttggacaaaccgaatttacctcatccatatcatcaccaataattcattacaatcattggctgtcttttctatcctctcccacgtttcacgagaatgttaatgatgatgcaccacatgttaccactgatcattctccttattttgcaggaaccgaagcaacatctcactcaacaccttcatcgtatggatcatccaaaacacaacatgctagtcccaacaccactgactctttttccaccatcccactagccatacatctacctattcacccaattacaccaaactcaccatccccttcccctacccctgcacccgtgcctcctatgccctcttatccaatggtcactcgctccaaggctggcatatttaaaccccgcactttcctagcctccctccttcacaatccccacttaccagccttctctttatccactccttcctctcccgaaatagccttgaccattcccgtttggaagaatgccatggatgatgagtactttgctcttaaacgcaacaacacatggtaccttgtacctcgcctccctcacatgcatgttgtggataataaatggattttttgccataaattcaactcggatggttctctccaacggtgcaaagcccgtctcgttgccaaaggctttcaacaataactgggtgtcaacttctttgacacattcagtccggtagtcaagccatccacaattcgggttatcttatcattggctgtcactcatggttgggatgtccaacaaattgatataaacaatgcttttgtcaatggcacactagaagaggaggtgtacatgactcaaccgattggctatgttgatccctcttttcctactgctgtttgcaagcttaatcgcgccatctacggcctcaaacaggcaccccgtgcctggttcgatactcttcgcaatgccctgctcaaacttggtctgcagaattcggtatccgacacttctctgttttttcttgcagaaggcgatgctcgtctctatgtcctagtctacgttgatgacattctcctcactggtaacaattccaacagagtccttaacatcatctcccaactcaacactcaattctctctcaaatccctcgggtctgtcacctatttccttggttttgagacaagtagggggcatgatggtatgcacttatctcaaaccaagtactcactggatctcttaaaaagaactcacatgctagaagcaaaaccgtgtcccactccaatgatccaaagcaacaaacttcatctacaagacagccctccatttgaagatattactcaatataggagtgtcatcggagctctacaataccttacactaagcagacccgacatcgccttctcggtaaacaaattgagccaattcttgcaagctccaacacaaaatcattggctggcatgcaaacgtattctgagatacatctcagggacaatcggagagggtatacatttcaaacgaaccgctgatcccaccatcgaaagcttctgcgattctgattgggctagctctcttgacgatcgtaaatctacatcgggtatttgtgtttactttggtggaaatctaatcagttggagctcaagaaaacagaaatccgtagctcggtc

SEQ ID NO: 230045 - DNA, 1988 bp, Cannabis indica
  modified_base (1612)..(1612): a, c, t, g, unknown or other
agattgccataaagaaaagcattgcttacatcaagttgtttcactgaccaattggatgagacagcaatgcttaatacaattcgaacagtagtaggcttcacaaccggactaaaagtgtcttgatagtcaatgcccggagtttggagataccctttggcaactagccgtgatttgtacttgtctaaagagccatcagcatttagttttattcggtgaacccatttgttatcaataatatgcattgatggatcatatggaaccaatgtccacgtgccttgtcttttgagggcttgaaattctgaggtcattgcagcatgccacttgggattattgagagcttcctttatatttcttggttcagtgggaaggagagactcgggtaaagggtgtctagtggcaagataggctttgggttttctgatgacactctttgatctattttgcattgggtgagtattggactgtgtagttggggcagaggctacatgtgtgggacaaatattatggcttatggggttttcattttggtgaggaagctggtgtatagtcgggtcagatggaaattgggagggaacaatggctgttaattgattaatgttggtggtggatagagggtcatggggaataggaggtggcatgcgtgcaacatttgggggagcctcagaagacaaaacatcaaaagcagcaccagatggtgcattaatattagcaccagatggtgcaccagggacaacaccagtagcaacattaacacccgatgttgcatgaataggagcaccagatgttgcattatttggacaccccaatggtaatacacaagaagcaacatcattaggattgtgaaagtgaacaccagaaactgttgaattaaaaataggaggtgtaattggtgtagaatgtacctgtgatggtgcttcagaagttgatgttgtgttaatgaattcaccaggaaagaaatcttcaataaaaacaacattacgagctatgtaaatcattccttctggtgcttgacaaatatagcctttgtgatgagatgaatagcccaagaaaagacattgttgggatcgaaattccaacttgtgtttattgtatggcctcaaatgtgggaagcaagcacatccaaatggtttgaggagagaataatcaggcttgttgtgaaatagaacctcaagaggatatgaccaattgagaactcttgttggtaatctatttattgtgaaaacagcacaactaaaagcatgccaccaatatgacattcctaatccagcttttgccaaaagagtgagaccagtttcattaatatgtctatgtttcctctctgccctcccattttgttcatgagtatggggacagggatgttgaaaatgtatcccttggtcttcaagaaagtcgtttaaaaggtctatattcccctccccagtcagcttggacagatttgataggtaaattgaattgtttttccactaatgccttccatttgagaaaaacctcaaaagcttgtgatcttagggttaagggaaagatccaagtgtacctgctatagtcatcaaggaaatgaacatagtatttatacccatcaatggagagatcatgggaaggaccccaaagatcnagtgtggatgagtgcgagaggttgagtggctctactttgtgaaataggaaatgggagagtatgacttttacctaactgacaagaattgcaaaattttaaatctttcaatgtgccagtgtgtggtaagtggggtaatagacggcttaaggtttgagcattggggtgcccaagcttgcaatgccaattgttcacatctttattgagagatgaatgaaaaatagcatggttacaaccatctgtagtatgagaaaaagaacaatttttattgcttgttggagaattacaagaactgacactatggtcagtattacaagagttgggaatggactcattagacatatcgagaagccatatatgcaagattgcattgcaatac

SEQ ID NO: 230046 - DNA, 2769 bp, Cannabis indica
ctctctctctatgtatatatatatccatatattactacaaaaaaagcaacatttagtgacaatcttttggtcacagcataaatttttagtgacatactaattaaatgtgacttttggtcacaacaaaaacttacttgtaatgaaaatatagtatttagatacaggttgttactaatttagttttagtcacaacaagtattgttattataaatacatttagtcaaaacaaattgtgatttttggtaagcaaatcaattttattaacattcttaatttgtaataaaaaaaaacagaacatatttggagctgggagtgatacatcagcagtaactattgagtcggctatggccgaaatgatgagaaatccaagcgtgatgaagaaagctcaagatgaggttagagaaatctttggcaaaaaagggttagatgaatcttcaataaatgagatgaaatacttaaaattagttattaaagaagttttaaggttgcatcctccagcttccatgttagttccaagagaaagtagagaaaagtgtgagattaacggttatgaaatacctacgaaaactcggataattgtaaatgcatgggcaattggaagagatcctaaatattggattgaacctgagagttttatgccagagaggtttgttgatagctctattgatttcaaaggaaataattttgagtatctcccattcggtgccggaaggagaatatgtcctggtatatcatttgctctcagcaatgttgagcttcctctagcatttttactataccatttcgattggaaactccccgatggaatgaaacctgaacagttggatatgacagacagatttggcattgtaatctatagaaagaatgatttgtacttgattccttcaaaatatgatccaccttctatggacaaagcaaagaagatataaagtagtttgccttatgctgatttctcttcttttttactatgttgaactatatatatatcagaatacacaaataatcagattgaagtaaatcctaaaagcatgtatatctagtagctttgtaatataaagaaaatttgtatcactttgaaataattttatcaataaatatttactaaataaaagcactgcatatgtttttttttacctttttttttttatgaatcagctcatctgggtttttcattaacataaaaatgtacaatatctatgtagcacttttttcacatataggctgcatttgtattctattacaaacactaaaaccaagttaaatctgtgctagtaactttcataggcataatatagttctaattctaattctaacatcaacctgtatttgttttacaattagtggaattctttgaacactttgattccaataggcttcattattgacacctccaaatatggtataccaatgctgctaccgcaactccatatacctatttcttaagtttttacactttagctcttttaatcccctttaaaatcagtataagggaaaatgtcaaagtttgccaccccaaacacctttggatctcgtgcaggtcaaccctgatcgaaatgagctataggcaaaaaaaaatttatttagacacttattataaagataaataatatttttaaaattatttttaaaaaaatatataatttttaaaaggaaattttttaatgtggctcccaaaaatgagtgggccctaagcgcgggcctagccagcctatgcccaaggccggccctgcctgtagcctgagtttagtcaaggtgcatttaaacaacaaatgttctcttgtttatctatagttcccacacaagacacatagttcaccttaacatatattatacttgaacaatctggttttcaattgtaacctatccaatgaagcaatccagagtataaatctatgtttagggattgaaagtctattccacacctctccatgccaatggacatttggggaagaacatggaattactttgtagcattcttggttcttatatatggctgaatcataaacctcgaaactatgctaaggattttaaatttctctttcactcttattatctgcctcgagtactagctattgttactaggggcttcataataccactcgtcattatctcctaagtatacttcatgtacccatttgacttataagttttcaattggctactacccaaacaaatttaccaatggttgcctcattctatatttgagtgtttctaaaatcagagcccctcacactttgttttgcacatgttttcccaggaaatatgcctagaacaatgagaaatgcaattcatttccaaagaaagctcttgcaaattgaggtcactctcttcagcactttcttatgaattatcattatatctgccaagtacgaatgtatagcaaggattgagaaccgagttaactaaagattcactttctatatatgataagtgtctcgtactccagacacaaatcctttgaaccatcttctctatcatcacctcacattcaactgcggggagtaacacaaattggtgtacgtataccaagataccgaaatggaaatcaccctaagccagttcatgtccaatccgagcattgaacattggaaggccttaaatggttattgagatattcgaagggcacttacgattatggtctgacatacgagaaaggaaaaggaaaattagagttaaaaaggtttatggatgctataactatgccacaaatagagataccaaaaaatcaaccacttcttacgttttcttgacaaactggaactgtataag

SEQ ID NO: 230047 - DNA, 1191 bp, Cannabis indica
atttttaaaaattataaaataaagaaagtgtaaaaattttattataataaacgtgatcaatcataattacttcacttagttactactttttttttcttaaaaaaattcatagggtgaaaaacctttctccacccattagtagctcaaacaatctcaaaaatcacgtattaactatacgagttttatacttcatgctctcttaattaggtcataggtatgcagctcgaaagctcctatgagagactgatttgaattcttgaccaaataagaaagaatatcagtaaaaacatccctattactacaccaaacaacacgtaattacttaattactatttgatgtatgtatatataatttatgttgttactatttattatatttaacttttaaaactcttataaactatctgactagtaatttttttttaataaatttaatcaccaagtattaaaatatatatcattttatgattattattcacacattttttcttatattaatactattaaatatcttgtttaataatattgatgctcctatatttatcaaactattagtgttatattatgatacttgttgatttgagttttcaagagttacaaattgaacttctgttgttagtgcaagttggtattggctaaattttgaggcgtgaatgtattttttaaagctttgaatgatggtttaataagtgctttaatggatctagtaaaagagaaaggagtcttggtgaaatattgatatggatttaagagaggaagagacttggaggtaattttattttcagctggaacataaaaaagctcataaaggaagtctaacttattgaaagttgattttctacaggtaggaaatggtataagtgcaaaaaggacagaaagaggagcagtgagtgagcttgatgattcgtcgaagctagtcatagtggaaagtagagactcatccatttatataataatttgatattaattgatatccaaaataacttgtatgatatataatttatacattattatatacttaatagtatcatacagaatttatacaaattagtttctagtttctaatcatttagattaattacaagttggtatcctaatgattttattaaccacataccaatagaagaatgtgttcctcttgtgtatgagggttttttctccaggcctctgtgaaataaactagggcatgtc

SEQ ID NO: 230048 - DNA, 877 bp, Cannabis indica
tcatccaccacctgatcctcctatgtgtaacacttcatcatctgctgagtctccaataccatcacctattcacataccagaagtccaaccaacttagtccaccacaacttctccaagtgagcttatcacagttgcatttcccaacttaaaccagttagttgatgttgaagtacagtccacttccaatttgcctcctctcaatactgttactaatgttcatatgactgttatactagttcctactaacatgtctaatacagatttcagtactcacagaaacactactacaacaattgctactcatcccatgattacaaggctcaaagcaaaaattcgaaaaccaaaggctgttcttgcttcctttgagccaagaacagtgaaatcaacccttcaaatgcctaaatggaatggttctatgactcaagagttcagggctctcaccaaaaacaacacatatgttctagtcaaactaccacccaacagaaaatctattggctgcaaatgggtgctcagaatcaaacacaacaaagatggctttgttgaaaggtttaaagccagattggtagcaaaggggttccatcaacaagatggctttgattttgatgagacattcaatccggtagtgaagcctataactatgagttgtgttaaccattactatcacaagaggctggtccattcgacaactagatgtaaacaatgctttcttgaatggagagttgcaagaagaagtatacatgcaacaacctcctagctttgtgagtgaacaacatccagactatgtttgtaaacttaacaaggctatctatggtcttaaacaagccccaagggcttggtttgagaagctgtccacggttctactcaccatgggctttca

SEQ ID NO: 230049 - DNA, 852 bp, Cannabis indica
ttttattttattttttttctttattctatataactcccctagaatttagtcattcacgttataaaagctgtactgtagttatataaaagcttttgaggaaaataaggaaaagttatgactttgcaggtaaagttagtgttgaacttaacccaatctcatagtacacacaactactgttatttttattttttatttacaaaaaaaattattactttaatactaaaataatttaatgttgttaaacttgagatctaatacacatttagaaaagaataatataccctcagcatcttattataatcttttagttaaattctgtctccaaaaatatatgctagaatatttttttttcaatttctttttcaagttgtgttggttataattacaatattatttttgtaaaattttaaaaaaaatttaaataatttacagcgtcaaaaatagatttagagttttttaaatacacttggtaaattgtaataacaagaactctgtattcgttaatataaacttttcgaattttttttgaaatttacatggatgatattgaacgaatactattatgaaaaaaatattccaacatatgatttcagacgtagaggttgactaagagattgtaatagggggtggtaattaactgtgaaagtcagtagtcccgtgatctgtaaggggaaataccggataagttgtacaatttcacaccgcctgggaaggtcaagtgggatcattttgtagactgtgtaggcatgagactacgtagttaaaagagtttaaaatggattgattggtactacctatatcaacaagaggcatcttattttttcggtagcccatcacgaaagaactccacag

SEQ ID NO: 230050 - DNA, 1194 bp, Cannabis indica
gagagagagagagagagagagagagagagagatgcttctaagtcctctattctcaccttcttcctttctttccttcacttaaccatattattatcatcattttattttctaattactaaactaagtaaaaggcaacttctagtagtcacaaaagtcaacataaaataactaataaaatgacctatttgccctctcaataaaaaccaaacacttaactaacctaagggtagcttgatcattccaatcctgaaaattccaacacccaacaaaaacaccccgataaaacaaaatattccaaaacatataaaatgtgactctctaaaggcccaacgtcgctttccacagcttccgaacacaaacacagaaattgagtaatttacataaaatagcatattaaacatatatgaacttaaatatattccacaacatgaattttataaataatacttaaattccataaataaaccctaattatttcataacccaaaatattaatcttaggcggtatttacagttatctttactactccaccacacctgatcacgaaaaagtatagcttggagatgaaagcagaaccccgaagacgtcgaaaacattctattggagccaaatggctccgagaagggccattagtaggaagcagtagctccgacagccagtgtgaatcattagggtagctccaaaatattaatcattaatggaggatttgatgagtgatgtaaatcagttaagagataatgggatacgatccccactaatcatggatggaagtaatgccaatatgcataatgtgttaagtggaatgggtttctctataaatggtaataacctaggtcaaaccgaaagtaatgaggagaatgaattgttggtgttggaaaatagaagaaggaaaatgctatcaaaagatttggttgatgactcacacgatcaagtctcaatacaaaatgtaaatgtgggcccaaaaagcttatctggtgtgggtgctggttcccaggcccgcactcaattatgaatgtcttgagttggaattaccgtgggcttgggaaccaatgggttgttcaattcctaaagagatgatttctcaaaagacacccaattttgtgttcttatgtgaaactaaatgtggtaaaaatagagctaattttgtgggcggtctattgggctttgaaagaacatttgtggtggaggcccaa

SEQ ID NO: 230051 - DNA, 1984 bp, Cannabis indica
tttagaagtgttgttatgtccgagaaagtctcgatcaatagatgaagatgcaatgttagtaggtatattgctactattatgagataatctattggtaatatcagagaaatgaattgtggtagatgttgactttgatatgatagctttatttttagaggagatggtattgttggaagtatggtgagagtaatgtaaattagtgtagggagggtaagtggcaaagggaagagaaggatctgtaatggaggaaggaagtgagactggtagataagatggaaaagggataacagaggcatcattggaaatgttttgtgatgaattaccatatgttgggtgcgttggttgatggggctgattcatagaagatggagatgaagcttcagtcacagtgagaaggtatgaatggggatttggcctatccacaatgcgaggtaaggctgcagcaaaagatttttttgctatactagtcatgagaggccatacattgcctttgaagaaatttgatctatatcgatcataacccgaagaaggcaaaggtgctcccatcatttctggaccgtatgacagtgaaggttccgaccattataaatttgatcaagaaaattaggacaatgttcaaatggatggccaatgataccacattcgaagcaaaattcagggagacgttcgtagcaaaattcaacccaaaattcctctctagaatcttgaattcttaccattttgcctcgtaaaagaggtttagtaacatctaacaatgcctggaatcgaagaaagggtccccatccctcatgaagagagtcttcatcaacctctagataagttccaacaatgttgccagcccacacagccatggctttggatttgcttagaaacgggaggcgatgtaattgaatacaaaagagtgaatgatgcatagattccacagtgacttcttaaagagcacaaggtgcgcgtaggacaatatgatggttttgaaagtgccaaggttccataataagagccattttcttgtctcctgcgcatccaaatgtgaccataaagagaccagaatggtgatcagtgatagttacagggtatctacccttcacatgtacactcatcttgatgcgaaatgtcttccgattaatctccttggaagacaaaactcaagcaaaaagagtatgatcatcatgatttgaacttcgtaactgaactgaggctggtaaatcattcacttctctctaaatatcagttagatagatgttattacagggagaaggaggtcgaaatgccataaaagaggagattgaaaaccatagaaaaaccaaaaagatgaagaaggtgatgaaaaagggtgtaggaaaaaacaataaccgtagaaactcaaaggaaatctggaaaaaaactgttgaataagcagttaaaaacagttgaaaataggaaaattcaaaataagaaaaaacggccacaaaactttctaagggcatacatgctcactaactcccctatttctattattttttactattatcggcttgtggtctgttatccttattactttagtttgtccttgtagttgtagaattatttgtggtataaatatttaattttaattttaattttgtaattacttgactattaaatgttaaataaattactatgtagtaatttttgattaatttaaatataccaataaaaaaatgatatgtggataataatttaatatttaacaagtactagaattattactgtcaaaaattacttaaatatttatttacaaccgagtattcaacttaagctaaaaactactcaatattttgaactaacaagttgcttaagtttcaactccactatttgagtttgagatgtaatgaagaccctatgtaaagtgctatcaataaataacctcaagaaaagaatttgtaatgaaataataagtcttttcctactacaaaatctaaaatttttgtcatccatttgcatcattcaaaaatattgatcgaac

SEQ ID NO: 230052 - DNA, 3314 bp, Cannabis indica
ctattcttttttttttctaataatactgctggtgctaattctaattttaggttgtcctactttctcagccaatcccacaatatacaaccaacaccaaccacaaatctctacctgaatacctgtgactccaccctctaggcctcagccacatatatctgcccctcaggcatccataccagaaaataaccatcaacttcccataccagattcacctatcacagatatttcttcacctcaaacacataccaacagctccagtatatccctacccactgcctccaatttgcagcaacctgctgttgcatctgtgtctgcaacagatgtcaccactgatccgacttcagtaactacaaatgcaggtgaaaattctggtatgcaacagcctcaacctcctacttctagcattatctctcgagtccatcatatgaaaacaaggtctcaaagtgggatttacaaaccgaaggcatacttggctactagacatccactcaaagaatctctctttccaactgaaccaaggtcagttcagcaagcaatcaaagatccaaactggttcaaatctatgcagcgagaaaatacagcattgatcaggtctaatacatggactcttgttccatatcatccggatatgcatgttattgacaacaagtgggtatatcgaattaagcttaatgcagatgggtctttaaacacctacaagtcccgattagtagccaaagggtatctccaaacacctgggattgattatgaagagacttttagtcctgtggtcaaaccagtcacggttaggacagttttatctctagctgtcacttcaaattggcctgtcaaacaattggatgttagtaatgcattcttgaatggtgatttacacgagacggtctacatgagacagccaaagggttttgaggatcccacaagaccaaatcatgtgtgtcatctccataaagctatctatggcttaaagcaagctcctagagcttggaatgaaaagttgaggaacactctactacagtggggatttcaagcttctagatctgacacttccctttttgtctatggcacgggctctaacttgatcatcttactagtgtatgttgatgacatactagtcactggacctaattctgccctcatttcaaaattggtgactgatctcaataattcatttgctttaaaagacttgggtccgatacattactttttgggaattgaaatttttcgagatgcaagtggtatgtacctctcccaaagtaagtatatcactgatttacttactcgactacaacttgatggtgtcaaaagttgtccaaatccagcaagttctcatcaaaattgtccctaaccgatggtgatcctttccaagatccaagtctttatcgaagtactcttggtgcactgcagtatcttactttaactcggcctgatgtcgcattcatcatcaacaagcttagtcaatttattcgtgcacctactgttaatcattgggaggcatgcaaacgactacttcgatatctcaaagggacaataactgaaggcttattacttcgaccagctgcatgtatggacatttctgcttattctgatgcggattgggccagtgcgattgatgatagaaaatcaacaggtggttatgttgtttttcttggtggtaaccttgtctcttggtcagcaaagaagcaaaacgtagtggcaagacctagcactgaaagtgagtttcgaagtttagctaacacagctgttgaaatcaaatggcttgttaacttgctgtccgaattacacatatctcttgcctctcctccagttatttgggttgataatcaaggggctgctgcccttgcagccaatccaatcttccatgctcgatctaaacatatcgaaattgatcttcacttcgttagagatcaaatacttgcaaaagaactttcggtcagatatgttcctgctgtagatcaggtggctgattcactcaccaaagctttgtccactgatcggttcatgtatctcaaaggcaaactaaaaatggctgctaccccttttcgtttgaggggggatattaacccatcaatactgttgtaatttctgttagttacagtcagttattttaactgattcttgtccttgctttgtaccttcttttgcttataaataaaggttctaactcacagttgtgagttaagctttcttgctatcattcctctgttttctcttctctacagttttactgtaaatggtctttacctctgtttggtctttaccattaatgttagcttgttaagcttctacacattcaaagctttccgtatctgagctgtcgtctcacatctgatcatacgatttgtggttttctcaaacattgacgataggagccaagaagccagtaagttgtcctattgttctcagtcttcgaaggcaggattgatgacattgttagcttcatcagttgcattaagaaatttaggaagaattcgagtaggatcaaagaaagacgacttcctttgattgatgcaagaacctggtgtttccagagtaagaaattgtgctcatcgagcttaatggacaaagaacgagtaaacaaaacagggtaggaacgagggagaagagcagtgtttgatcttgatgcttcaccattgccacttgcagcaaactctattgaaaccaacgatcaaagctttgataccatgttaggttgagagagaagagaagaagagagagagaagatgaacaaatgattgtcttattaattgaaatgaaagagtgatgcaatttatacagtttaagtctaactgacttgaaatgaactaggacagttagcaactataacaacctataactaaccatccaatgaacaactaactaccatcttccttaacacttctaaactatgatcacaattattcaatctatttctatataaataacatttataatctaaatatgcaatgtgtatctgtataaataacaaatgtaactggctatttattcgggatgcttctttccacaattttttattctgttagcaagtcgggattacttgacattgcacaacaaatttatgtaggtgtgttgaggttgcaaacttatcttattttcgttgaatcatgcatcctattatgtcttacaagattttatttacaggtgcatttggctcctagaagtaaattttactttcaaaagtatgttaagagtgttccttggataattgttggagtaaggtaatattctatttatgggtgtggttagtgctttttgacacgacaccaaatcgacatgagtaaaactaaaaaaaatattttcttagacacgaaaaaata

SEQ ID NO: 230053 - DNA, 2195 bp, Cannabis indica
aacaagtacttaaaatggtatttaaagatcttgatagaaaaatgcttgaaatcaaaatctcacaacctttgatctccagaaatattatcattttccctttataatgaattcaagggccttatttatagtgagccttcagcactttacaacttcaccagatccctaatatatcgaatgtggagtcactttcactcctgataatgttgtatcctaggtggtctgatgtatataacatcataagttacactaaaaatgcccatttcattttgtacctcggtaaaatgaattttatccctattaacactcgttgtgccatcataatcttgtctgacactttctcgcttacactgtttgtgtcaagagggaaaagaataaccgtgggagtgttggaggctagcgcaggcacagacaggcgcggacgggcgtgcggggcgaggtcgggcgcgcgaacgaaacgcaggtgggtgtggctgcaaatgggtgtgcggtcgtgcggccgcaaacggacgtgcaaggtgcgcgcgagcacgaatgggcgggcaggggcgaacaggcgcacgagcacggataacaggcgtgcaggaagacgacaggtggtgcatgggcagacgacgggcggtgcgtgggcagacaacgggcaacgcacgggcggacgacgggcgacgcacgggcggacgacgggcgacgcacgggcgacgcacgggcggacgacgggcgacgcacgggcggacgacgggcgacgcacgggcggacgacgggcgacgcacgggcgacggacgggcggacgacgggcgacgaacgggcagacgacgggcgacgcacgagctaacggtgaatgacacgagggcgcatgggcggacgccaaatgatgcttgggcacgcaggggaacgataggtgcgtgggcgaacgatgaacaacgtgcgggcacgtgggcagacgacaggtggcgagcgggcgcacgggtagacgacacgcgcgaacgactggcgggcaacacacgggcgtgtggagctccccttggcaaactttcgggcataacactaatgactttaaatatttcacttaataatttttaggggtcaacacttgccacctagtgtataagaattcttccaagtgttctcgtagactaagtttggtgaacttcatctttacaacttaatttttcttcttctctcctctttgtcacccttctcgaggagttttaagatttatcttggcccgttttgaggtttgtgtctattgcaatgagggagtgttaactcgctgagtttccttaacctgttataggttactcgctgggtataagggagcttatggctccttaggccgcgcgcgaccttttcataaatttaagaccatcttgggggaacttatggccttttaggtagcgctcaaccccttacattgtatcagtggtaattacagcgtattttgggtactagaaagctagtctccttttagagaggcgtctctctcaaagtcttattcaattactcttttccttttaatattttaagagagatgatggtttcgtgaactgccttgacttttctttttgatatttcaagggagatgctggttttgtgaaccgactcaaccttttgttttatatgttttaagggagatgatggtttcatgaactgactcgaccttttatttttgatattttaaaggagctaatggttccatgaactgactcaacctttgtttgttttatatgttaagggagatgatggttccgtgaatcgcgcgaccttttacttatttaacttttatttgttaccctacacatgatgctttagggctaactttgaagagcatcctcctcattattctgagtgctttctctttcggaactaacttcaggctttcactctcttcttggaccgctagggctagtcgatccctgtagtcataagagttttttttttgctttagcaattttatttgacaagtacaacgagcaagttaggcaaacatatggagagtgatgaatgccatatgtgaagtgaaaatatttcattgataaggaaaatatacgatcgcccgactacacatgttatgttcagagatcaacctaaaagcctcatttaatttagtgaaatgtaccataggtaaacttgccattgctaagagcgcttcctcagatagtgatactttacttcgaggagtatctcagatgtttgatttt

SEQ ID NO: 230054 - DNA, 887 bp, Cannabis indica
ttctcactattgtaatcttaagacagccactttagaatccacaatacttgtgatctgagtggtattatctctagtattaatacaaccaaaaggggagtaggtcatgaccctctaactaagggggtcaaatctctataaaaatattgtgctctttactttcctattcttattgtgtacatgtgctaatatcagtcataaatatgattcttcagtcggttggctaaattcgaggtcaacaaccccaattgtagcttatctcaaaattagaaagcttccaagtgaaattaatgaagctcgaaagatgatgagaaaggtttcatggtatttaaacttggatggagtaacgtacaaatggggtttctctctacctattttgaggtgtgtaacaacagaagaagggttctacagcagccatgctgggggcagagttagtctaagaaaatcctccgacaaggatatttttggccgaccatgattgaggatttaaaagcatatgtgaagaaatgtgacaagtgataaagattttgtaaagtgccaagggctcggcccgatgaattgatccagatgtaaagttcatggtcgttttccatatggggaatagacttgatcagatagctcccaaagggaaaatgttgtgggcaatatgcagttgtagctgttgattatttcacaaagtagatagaagccaaacaactagccactataacttccaaaaaaaatttagactttgtggtaaaaaaatattatatgtcgatacgaacttcctcaaaaaattgtgtcagacaatggaaaataatttgacagccaaatgctcattgatttttgcacagtacatggaattgtgaaaagcttcttggcagtcgcacacccctaggaaaatgttcagg

SEQ ID NO: 230055 - DNA, 895 bp, Cannabis indica
aataattatgtttaaagtaagacttgaaacaataataaagttcatttcacattaaaaaaattattaaatgggtaacacatcaaaatatcaagactaagaaaaagaaaccaacattttctgtgcatttttagtaattgtgaataatattactgtaataattcatctatataattttttattttttttactatatgtatatttgtagatttcaatatcttatggaagtacttgcaacacccataatgtttttagtatttttctaaatgattagacatgttatgactttaaacaattactctcttctttagaaagaacatgagtaatgtatggatttttttttatctttttagtctttatgaatttttctttttttagtcttttatttagttaaattgttttcaattataagaaagaaaaaaaattcaaactcgaactcaagactttctctttgtgatgagaaagttatattgtatcgatatagaagagagagcctagagaaagtgatgcggtatccttttctaatattctctaccttctttaatttttagtcttcccttattttttctattcaacatttattaataacaaaatttaatgaaaaaaatatgaaattctaataggcaaattgtgttaatcaaaatttctattatttaacttgtaattatagagtatgtcataaatgataatccatacttataaaaaagattaaaaagcttgataacgaatccttatcatgcgataatatttttgtccacatgtattttattgtgaattgtatagtttttttatcctttatgtgttctatatgtatcatttataataatttatatgatttttatttttgtatttttcgatttttatttttacagaaatgcatgattttgagaaaataata

SEQ ID NO: 230056 - DNA, 1933 bp, Cannabis indica
ttagattagactcttgctaatgacaacaccagatcaaatttcaacaaaaacaaaagaagagaaactcagaaatacctttctttgaagacacattttcttgtaaggaagaaggagttcaattgtcttccaatgcatttccgttttataagcctctgtaatgtcttctctcacgtccgaaataggaaggaaatttcccactgaatcagaatatcaaaaaggtagatgctagaatgaaaaaactgctctatgtaaccatagcagcaaaaacaaaggacttttttctttctttttctttttttgaaaaaatagcaaaatcttacttgccgtgggaacagtcagaatcctgggatgaacatgtatcaatttgatgttaatatttccctctggaacaaatttgtttagtgcccattgaaccatgtatttgctattcttgtttccattgattgcaataccaatctctgaactacatgaaggtgttgccattgaaaacctttcatctgcttcaacattttctcttatactcattgcttctttctaagaaaaaatatagataagaatgatatgacaaacaaagcgctgaaactgcagaaacagattttttgacagaaacccagtaagcataaacaatttaaaaaaaaattccagaaagaaattttctctttatcagttataacaaacataagaccagaaatttcttcaaaataataatggtttctaaaaataccttaaaataaaaaaagtgttcaaagcttcaaaaaagtcatccctctatgcagatcccttaccaacctttgatgttcaaaccaattttcagattttagaaagttcaatcatcaaaaaaacagatgacgcaaaacggagctaccaagaacagtccaaaacataattttgtagattactaaatttctttgaaatttacaaacagaatagtacaatctatttcttttttttattattattattattattaaaaaaataactaggcaagttgcaactttcatggattagttagtttcgctgtgttaagacttttggagtcttcgttatttttacttcttatctgttattatttaatctctaattatatctctgccacttatgtgaaaaatcactaaataaatcgttagtaaaatccgatccctttcttcttaaacttaccatatctacggatggtttgtttgttcacgtggttatgaatatgatcatttttagctcaataaaactaacacgttttttaaaaaaataaataaaaataaaaataagttttcaacttaatttaatagggagtaaatttttggatataatttctacttaattaattttttaaaaagcaattatgatttacaacatgaggaatgataactacctgggttggactcatatgtgatcatcaaccaatatcacatttttgaaatcagaaaatgtaatttctttctttctacaattatcaaatttctaattttttttttttcattctccattataaatatatattttttttgtcaaaataaaataaaataaatatatatttacaataatttattttcaactacccacgcgattatcatgagtggccgaaacaaagccgcccaaaaaagaaaaccttctagaaaatatgagacttcctaaaaaaaaaaaaagaaaagagaataaagaaattatgagacttttaagttatcagttatcattatccaaaaaaaataatcagttatcatctatcaaaaaaaaaaaagaaaaattatcaattattttctcactcataagtaaaattcataggatttcttttttcataacttttaagttttaattccattcaaaaaaataacaataaagctaaggttttttttttcgataagttattttatgatttaatttaattataatttattttttcaacttaaatctgaaaaagtctcctttcacttcaaaaggc

SEQ ID NO: 230057 - DNA, 2880 bp, Cannabis indica
aatagaatttttttttttaaagaactttcaaatatgaaagctttcaataaaacagacatagttttataaattaatggattatgagtgatcttacaagaaaaaaaaaaaaagattacaaatatatagtatcaaatcgattacattattaatagtagatctagcaattaaacccaacaactagctatcccattattacattttataacaaaaaaaaaaaaaaaaaactaagctatatcccactagtgaattaatgtgagaaattagaattaaaaagtaataatatcttgaattcatccaaaaaagaaaaatgatttatcttttcttagatgcgagagaagaaagagaatggcccaaattacgcatccaataccaactggaaagttgagtggtggggtggtggacaactttggcacttcttttttatttaaggataaatggaatttggattgataataagtgaagttggaattactcaaacaataaatataaatctccctaaagagataatcaatttcagcatatctatgacatctatagaagaatggatgtttgctaaaaacaaaaagaaagacttgttttgtctttatatgtatgtgtgctgtttgtggtagaaaactaaaagtgatatgaagtataccacatgaccaaattacctccttaatatttttgtggtgttaaatgctaattgggtgaatttacaataatgctatataattaaattatttttggagcatttttatttttacactttaaaaacagtatatttttacagaattctgcatataaaacccctcttgcaactagcgctacaatctaaattgcaacaaaaaatcgtaagaaaacccctattacaactagcgttgcaaccactttagaaactcaaatcgtaaattttaaaaaaaataaaaaaataataatatttaagataattctccattattctttatttctgaagaaaattttcaaattcttctatggttataatacaggtgttattagaaatttttaaaactaagtaattttattttataaatagcaggaactcatttacctctttttttacataaaagaattcacatattatttgtgtatttcttttattatttttttttatcactttcaaaaaattatagtaaccatttcaatatatataaaaatcataatatcatagaagaaatctttcacaaaaagacaaaaaagaatgacttatctttgtatttttgtaaattttttttttacaattttctttaaactttttttttttttacaattttcttacaataattttgtggatttttttaaaaaatttctggtaattgacactaataatagtatactgttatttatggtatttaacactttgtataacattttttttataaataatttgtttttacaacaacttttgagagttttttcttaatttcttgtgaataattttatgtatatgtaattttttaacaataattttttttgttaaattttattaatagaacattattattttacaccttaaaatatcgaatacaatacaaataataattacttagcatgtttccacattatttactaaatcaaattttgtgagacccgatattaaaatacatcaattacgagttgtcatcattttatggtatttaacacctctctgaatattttacttatcatctccagtaataaatatataatttaagttaaaaaataaatcaatattatatttagcccaaattttataatagtgctccaatgcatttagagtagaattaatacgttttatatagaaatgtgtaataaagtcaataaaagtattaaatttttattagaagtatataaaatttttattaaatatataaataaaatgtaaaaaataattaattacatttagaagtggtataataataataaaaagtaatatttagagcatctgtaatggtgagctataaatgtggtgtattgtcctttttaaaatattttgttaaaacttaacttcaatagcgatgtaaaatgtgtgccaaattagacccaagcaaaaaattgtgtcaaatttagcacaaaaaatatcatgggctaaatttttgtccacaataaatactatatttttaataggattatttaacaaatacacaaaaacaataaaaaaaattgcaaaaatatagttgtacagaattttaaatatttttacgattttaataattttatttacaagaaatatggtatttttatgttatactcttgttaatttattgttgattttttgttatttgtatgttattttttgttgttgttttgatgttgtttggatgttatttttatgtagttttcttgttggtttttataaaaaaaaccgtacaaatgtaaaaaaaaaatctttaaacataaaaatgtaaattttttacaaaaaaaatggtactttatgtaattattcttttttaattaacttttttccactcattaatactatccattaataaaaaaatatttttatatttataagatattaaaataatataaataaaatattttttatatcttcaatgagtattaatagtagtatttacttttatagttaatttgcagtttgtgcattgaagcacaaatataaaaattggatcaaatatagctttatggtatattttaggccaaatttaacccaagatatacaccatctattggagatggtcttactgtgtgtaaattttggctcatgttatattttatgctaaatttagtacaatttttagcatgtgctaaatttggatcactttataccacattagaattcacttttatgaaaatagactaaaatatacatatacaccacacttttagctctccattgtggatgttcttgttggattttattttatcaggatcttagat

SEQ ID NO: 230058 - DNA, 758 bp, Cannabis indica
ttaattccgggtattacacttatggcttgccttaggaaaaataaagaaattttttcttggtcgcatgaggacatgaatggaattgaccccaaggttatctatcattctctcaacattgacaaagtgaatttcaagcatgtacaacaaaaatgtagactctttaacaaatagcatgccaagggtctcaaggaaaagttgagagattgcaggaaaaaaacttcatcagggaagctttttactcagtcaaggtatcgaaccctgtccttgtgtctacactgaatggaaagtggagaatatgtgtcgacttcactgacataaataaagctttcccgaaagactatttctcggttcctcaaattgaacaacatgctacatccagccataaaatcctcacattcatagatgcttactcgggctataaccaaattagaatgtacatgcctaatgaagagcacactagcttctaaatagatatactgctacaaagtgatgccctttggtttcaagaatactgacgccatatatcagaggctagtcaaccatatataccatgacttaatcaggaataatatggaagtctacgttgataaaatgttggttaaatctaagaaatctaaaaaaccacatcaacaatttcaaggaatgcttcaacatcctatagattataggatgaagcttaacatcctaaaatgtgctttttgtgtttaaagagaaaagtttctcaggatcattgtcaattaccaagggattgaaccaaa

SEQ ID NO: 230059 - DNA, 756 bp, Cannabis indica
ttaaagaattggtcaaagaaaaaagttccaacaaattatcatttttgtgattaatacatttagtaacagaatttttagtcacataataataataataatttaattagtcacaattttacttttagtcacaaattttattgtgactaggagtattttttttttttttgtgacattctacatattttatattttatttttgctatatatatttggggaggtctgttgtgttgtaccagtacatcaccttcccggaaaatatagaagccagagttttttttttcatgaaaatattcacagtaaaggaatttaatttgaaaattttcaaattatttataatgtaaaaaataaagttcaaattaattatttttacacgggccgtgcaacaaataattaaaacttttttttgacaatgtaaaatactgagaatatttgaaaattgataggatattcatcattactataataaacatattgtcataaaataaagaaatctgagaaaaaaaatctgatatgattttggagagggagttgtactggtatgttacctcccataaaattaagatatagaaattttattgaatttaagagaaatattaaaatgaatcaattaagatataatatttaaagaattatttgttcaaaaaaaatatttaaagaattaatatagagaagtgtataagtttattgtaatgtaaaaagtttagatctaaaatataaaaattagaattgcgtagtaatattttttttttaaaaaaa

SEQ ID NO: 230060 - DNA, 1314 bp, Cannabis indica
tacaatatctctaaaattgttgatatgtcactaccaaatagttacaaaatcttatcttctccttaacgaaaaatctgtaatgatcaattatatatgcacgatcaatatatattgtcatattgttaaaaaaaattagttactctctcaaaaaaaaacaaaaaaaaaaaaaaaaaaaaaaaaaaaaaaattgttaatttttttttatcatttctatagtcttgtagttttaaaatacatacgtacataaaactaaagagtaccgaaatataaaaaaactaaagattaatgaatatagtattctctatatataatgtagtgcatgaataataaattttaagaatatatgttttatgatgtttaatttatttgaatttgaattttaccacagaaattttttatgagggccagaaaatagtaagaaaaaatgaagaatttttttccataaatttgatatgagagtattttatttataaattattttatattttataggaccaatttgatacaacaatattgttgtgagaaaaaaataattataactgtgttgtgagaaaaattaattgtaattaaatgtgaaaaaaaaaatacattaattaggtgttctattaaattataaatttgtaacatgatctggtcgagagataaggggatcgaaagtggttttcctttatatggaataggcaaagctacccaagcataaatttatgacaagacttgcttgttggaaccgattttacactagagatcgactagttgaggtgaatcccttattatgtaattgaaattagaaacacacaatatattttctcgtacagtgcacaagttcaaatggagctctgtaattggtatgggatgaatactcataatcatcattgttagaatgtgagaataagatgaatgaggttctatctctcaaaatcaattgacaatgggaggagtagcacattcatattatatatcacaatttatttccacatattagcaatgtgggtctaactcttaataatcatcttttgaacaatttgaaaatgatgaaaaagtgtagaagaactaagaataggcaagaagtttatgtggctgttttgaatgctctagtttacaatataattaggagcctcgtaataatgttctttggaaagcttacgtgtatactgtaaaatttcttgtaaataaaattaagagtgatttattttagcttatctcattttaaaagggagaaaattagtgtaaaagatactaagtggtacaatttgagtattacttaacaatatactcatttagttgtaaaaaattgattgtttgcaataaaattct

SEQ ID NO: 230061 - DNA, 929 bp, Cannabis indica
tttttttttttctttttatcttgagatatttttttaatttataatttctttatgcagatatttttatagaaatttcaaaatggtttattgtagtaaacttcttagatagaaatattacttttctaactttttaataactttgataagcaaggaattttttacttttaaaagtgttttcgtaacaaacacaaagaagagcttattaagcacccatggtgtcctttaacatttctcttaaaaaaaaattaatgtataaacttatttataaaatttataagacttgggatcccaaaactaaagtttaaaagttaatttatcaccataaactcaaaagttgacctatacgacaaaattaagacttttgataaaagtcttccaagaagcccaatcacataggtgaagttggctgaatatgtacatcatctgtcaaagttctccaacttattcttgctaacttttggtgtttcctttactagcaccatagatcatttttaattgaagactgaggaagaaaaacataattaacaacttattaatctttacttgtaatacatgagccaacagacactttcatcctctatgttatagcccaatataatcaggtattcatgatccgaacattcataaccattgatatgtttaacgattatgtgtaacgccatgaccttagggacgcaatgtgccatgttattactgtgttaatcctgctaatcgaggcctaatattttgggccacgacactttaagtcatcttagggatgaacttttgccctgttttccaactttccccataatattttggtacctaaatagtttatgcatggtgatttctaaatcctagaaatgtttcaaaatgcaataccatatatcatcaaattataaaaattgttaaagtttatcacatcaataaaacttaatttcaatataata

SEQ ID NO: 230062 - DNA, 783 bp, Cannabis indica
tcttaaaccatatattatctattacttctttgaaataaattaacatataatttgcactaagtaataatcaaaatgtcactcaagctacgtgaatactctcgtttcacatcaaaatatatttattctattagagtattcgtaatattaagattatgaatcatatttcaggtggccaatctaaaatatgtataaatataaataagaacaaattacaatgattcagaaagaagattaaaaaaattatattaactaaattggaataacatcaattaacattcattatatccctaaattagtttataagttctaaacttatattttttttcacggcatgactcatattttttaaaaatatatataaatatgagccagatcaatatgatacacacaaatttgaagcactaactggaatctctcataagcggaaaataatctatttattatttagggagaaaatcattaattttctataatttgttagtcatattttaagtgtgtgcaatcttctaagaaaaaattttcattggttcaattcatgtgttcttgagagagatgttactagctaggcaggtattggtttatgacaaaagcctaaaatagagcttggaattctacggtaaagctgtatacttttcctaagatgtcatgtttataatttcttacttttgtggtatttttgagaatgttaattcttatacagacaaaaataagctcttgcaaatgattttaaatggataaaatatccgagttattcaaaaatagctgtcatatgttccataaaat

SEQ ID NO: 230063 - DNA, 1183 bp, Cannabis indica
ttttgcacatattttgtaattaattaaaataatgtatacaaaattgtaaaatgccctatatttaaatcattgaacgtgagagtttatttgatgctggcttatctcaattattattttttttaagtagtacttttttatatacaattaatcaaggttttattgagtgatttggatatggaaatatcaaaatctacaatgaagaataatgaggaagataatgatgaaattcttgcaaagcttgaaaaggctaaagatccactacgtggtaactcttactattgtcttatatcaaggattttggacctatgacattttcttaaaaggtataatatcttttcaaactcaatttgtagtgagaaatgatgatattgtgttagcctcttgccctaaatcaggtactacttggttaaaatctcttgtttttttattgtcaaacgtaataataatgaaattaataataacaataaccctaatttatttacatccaattcacacgatcttatcccgttgcttgagtctgagtctacgttacatgtggttgaaaccctaataaagcctagaattttaaacacacacattccttaattacccttctttaccactttctatcaacttctctaattgtaaaattatatatatttccattagatgtatttgtttctaattggcattttaatcataaatttttggaggataatgttggactaagtcatttagaagagacttttgatttgttctgtaatggaattcatatagctggaccattttgggatcatattttaggattttggaaagcaagtttagaattccttaaaaaatattatttttaaatacgaaaaccttaagaaggatataatgtgttttttttattaaaaagatgcggagtttttgggatttccgttttcagctgaagtagaaaataatcgagtcgttccacaagaaatacaagaattatgtagctttgataatttaaaaaatttggagtaaataagagaggaaggcattatggtgggttgcatgagttgtcgaatattcattctttaggaagggtgaagttggagatattggatcaactatttaacacctcaaatggagcgtggaaagaaactcattcaagaaaagtttggacaatatgatttaactaggtaacgtaaccgcgcgttgcgcggtcctttcaataatt

SEQ ID NO: 230064 - DNA, 987 bp, Cannabis indica
tttacactaggatagctatttttgtttctatctatctgcacttgcatttatattttattttatgcaatagagatatcatatagcgcaacgctgtacattatataaaatatatttttaccaacttttgatatttttgaataaattacaatactaaaagcacaattagaaaatggcatcacataagtttactcacaatttttaaaaattagtgaaaattccaccatttgcataatgataaacatcatcatatgaaaaaaaaatagttataatttatccatatctaaaaaataactcgattttttttatataactttgtacattaataactaataaagtattttttttatttcgttagttagctgttaaaagttactttggttgctggtttaaccatttttcctctctttctataagtttgttattttgttcaaagttgttacaacaaccaaacagtacttgttagcttttatatttctttgagacttcaagaaattattctggataggaattatatagatgagatactcttttatagtatcaagaagcctttgactcatgctgcacatggatcctagaaactcaaaacgcactacatctactctagcaccaccaaatactccaattgtgtcgattgctcagatgcaacattggaatcctttttagaattcattgaattcttctctaaaagttttgttagcccaagatatgtttctaagaggggagctgaactgaaaatttaagttaatttcggtaaattaaaacttttaacacaaaactatgcaattaacactcaatcaagtaaatgcaagtaatatggcaagcaataatgatattaaataatgaaacttgtaaagtaaagagtttaagggtaagaaattacaaactctcgatttttacaaggttcagtagagctaagccaccaaagtccttggtcttcaaagttatggacctagcttttatttctaatatcgagctaagttaacgggc

SEQ ID NO: 230065 - DNA, 1100 bp, Cannabis indica
ttattttctcgaataacttccaacatgaagaggttatgaacattcaaaggattctcaagtaccctttagccagaggagatgaacttttcttggggaaccctttgatgttaaggggtaaccaaaaaaaaagatttccagtttgtggtagataaagtggtgaagagactaggaggggtggaagacaaagatgctatcccaggcagggagaactgtcctcaataaagaatgttgtccagtcaattcctttatatataatggccaccttcaagcttccagtggggatttgtgatgagttggaaaaagtcaccagacgcttttcgtggacgcggggggaatggaggataagaaattcctggctttgaagtcgtgggacgctatttgcaagccaacatgttgtggggggctggggaatagaaggtttcaggatatcaatttatgtctccttgctaaactggcttgggccttggcttcgaataagagctccttgtagatcaaaatttttgaggtgaaataatgtaaccttaaatcgtactggtcatcttctatcccttcaaatggatccaaaatggccaaggatttatggagctaccgcgatttctttaggggaaattacaaatggtttgagttaaatttatcacacttaaagataaaaataacacaagatgaataatacataattttatttaatcagagatgttatggctactctctaattaattaaaattatttatacatcatatatattctttatctcaaaataataatttgagatgtgatttataatatattgtttatatatataataaatattactcctactgatcttctggtatataattaattccataatgctcttttcaaacttagagaaaaatatgacataatgaaaaacctatttgtaagatgtttgttttaatctatatgtatatttcttaagcttgcatatgttcacaactattagaagaaaatctttatagtcgtctttataccttatcctctagttcactgtttagaattgattagtgaatataaatgagaacaatgccattgttactataatagaatcttttataaagacaagtgagaatgtaaatctcctt

SEQ ID NO: 230066 - DNA, 885 bp, Cannabis indica
gggcacaaaacccaacactaacctccccttatctcttctatgcaagtgatatcgagtaacagttaggggaggtgacaaccgcgtcgacaaagatttagttggttttccctttgtggactagtatccagtccattcctccagcagcttctcgagtgatcttaaggcttgtagtggtccattatggaaaggataaaatagacttgttgcaaggcaccaccttttgaccttcacattgctaggctagaaactaggggtagattcggtgtagttgaagaggctacacaacctttggatggcagagagccagaggttggccaagcgaggtgcctgtgggcgaccaggatgtgaagagcttggaaaagtttaaggttgaggaggttgtacctattaggaggaaacaatacaggacatgttatattttcctcaatagccctctaggctcatacgatgaggctgggcagcccttgaataggctatgtcagccttcagtggtcagtgtagaccatattctaaggaaggccgagcctcaggttcttgattagggggagcaatgggactaataggtctctcctccatccattatcaacaccaagacacttgataggattagggagaatggagtggtaggagatgtctagtgtgagcagatgtcgagggaccaacgagcacatcggttggccctcaactagatggcatggtcagagcaccacattaagtaaggagcaatattgccccttgtgagataaggtacttctttgacttgaattttggctataagtggtttggtgataccaacagcacacccttttcgaaggtgggaggatatgccaagaactatttgttggaaatatattttaccaggaacttagatctactcacaagtat

SEQ ID NO: 230067 - DNA, 2299 bp, Cannabis indica
gacttagacaatgaccattttcttttcctgaaaatgtaactaatgcttccatttttgagacacaggataaaagaaagttcattttttgatactggatagtcaagaatattaatgcaagaactactccgttcaaaaagaggacgtttgatggggcttcctcctccctttgcccacggccatggaagcttcttcggccccatccttgggctattcgggactttccttgggacacgaagaaaagtgatgatgctacaaatgtcatcgaggacgagccctcagaggatatctctttatccaatagcgaatcaatcggcctggacaattggcgtactaaaggaaagaatgtgatcacatctagaccaatggagggcactttcgtggtggaggactctggttcttttgggtcggcccagtctcattcccctgtggaggaggtttctaatcctccacaggagccatgagagacattgcttggaactgtagagggttagggcaaacctctacagttcgtgagttgaagtccctgattcggtcgcgctcccctgatttcatctttctgaccgagcttaaggtcactgctactgctttggtacgtactcttcactctctccatttttattttcatattattgtaccggcagtgggtactacgggtggtattatttttgcctggaaattcggttttgagtttgagtgtattgcttgctcccaaaaccacataactggtattgtgtactcggatccccttcgcacccctggcttctctcttgtgtctatggtccaccgtacttccatgctaagaaaactttctgggaaaccttaatggcaactggggatagatttggaggcccgtggcttatcttaggtgacacaaactttgtgctaagtgactcagaacgtgaagggtctaaaagcagagatcaatttgtcccggttatctcaagtttggttaatgccaggggtctcattaatatgcctatccagggggagaggttgacttgtgacaaccatcgttctgggtccaaccatgttaaatctgccctcgacaagggtctaattaatggtgattggatgcgtctttttccgaaggctgttctctgctccttctaaactcctaactgagatcactgaccgttatgtctgttctctgatggtctgggggagaagacccgaagaagctttaagtttgaggaagcctggactagggatgagcgtagcaaattggtggttgattctgcgtggaaatcggttgagttcccttgggcccctgctaggatcttcaagaaaattggggcgactcgggtcgcccttatgcattggaataggtcccagttcggtaaactagataccctcattcgggacctggaacgaaggcttgaccttattcagagtttgcccgtgggatctaggcagtgggagattgaaaggaatttgcgcgctacccttaacgaagcccgtgtgaggaaagaggtgtattggaaacaacgagccagggtctcatggctaaaggaaggggacaagtgttcaaaattttcttcctatctgcttccataaaaggtaggaggaatgccattgagagcatcctaaacaaagacaatgtgtggatttccaaaaggagcttgttggggctgaattttcgtagttcttccaaggcatcttctctggattggacactggcatggcgcctaattgcaacgatttagttcgagaatttttgtcttcggaagaccaagccgatcttattagaataccctctcttgaggaagttcgaactacattgtttgctatgagtagtaacaaagccccgggtccggatgggatgtctgttcttttctttaaacactactgggattctgttggggctgacttctgcgaagcggttgtggacttcttccaaacaggtcgtatgtataaaggtgttaatactactaatattgtcctgatcccaaggttcaaaatccgaagagacctaaccactttcgccctatatctctccgtaatgtggtgtataaggttatctccaagataattgccaatcggatcaaaccacttttacctaagtttatctgccccacccaagctgctttcgttcctggaaggaatattcaggataataacgtgatagctcaggaaatcatccattcgttcaataggaagaaaggcagagagggattgttcgccataaagattgaccaaatgaaggcttatgataggttgagttggggcttcatagatcatgtcttgtcctgttttaaagttccccatgagtttcggaattgggtctcccagtgcattacta

SEQ ID NO: 230068 - DNA, 1426 bp, Cannabis indica
taaaaataagagaatgtgaaaaatcgtcgccgtcaaagggcgaagaagagattttggagtaagcaaaatgggtcgtggagagatttggacctttggattttaaaattccagggacgtgggctccacttgagagagagagagaggaaagaaagaagtctaggattcgcaatcgcaagcaaccccatactagaggagtttagtttagtggggctgcggccacaagcggatttattaacctcgacgtgaaacccttagaattacttttaccactatgcgccgctctctatttctatatataaagctaaaatataaaagggtaaaatgacatttttaaaatgtttaaaagtattttttatatatattgttgaaactaaaagtggtcaacactcacttgttagattaggagataaaattaaaggataaatttcttttggactttatgtcttggaaaactttctgttttgttaaatgataaaatggatattgtatttttcaacttagtacaaataagaccataaattaattttttcttaaaataaaatttaataataatctaatctaaaagtgttatgacaaaactgtttacaatgtctgtatttgttcgtattaagaattgccttcaaattggttatattaaaaaaagttatcaaaaattaagttcatggtcttatttttactattttgaaaaatacaaggtctattttatcatttaacaaaagagggttcaattagtaatgtttgccagacacagggtccaaaatagtatttaccctaaaataaaatatgagtagagtaaatagagagatacacaacagaatttatagtatttatttcccgtgtcgcaatggttttggagttacatctacttcgaatttttatttctcacgagcattataagaaaattgactaagtgtgaaagctctaatttttagaaagagaaattagagagaggtgctctcaccttattacttttataaatgtgtcaaataagctagaggagctctttgaaggagatcctattataataataataaaatattcaaaaacatgtgaaagaatacagttaagttatttttgacataacggtgaaattgactctagaggttggtcgtcgatttctgggaacttgaatcatgtctgcgggacctttttcgcataagttatagttgaaatttgtaaatcctagagaatgaaattcggacctaatatctttagaattgcgattagagtgtgagacatgacttgatagattattgaaatttatttaaaacacaagttgaatctcgtcaatcgaatcaatattgagtgagctgtcgttttattgaaggttgcccttataccaacacccaggttgacatatgatgtcaacctcaacattgggtcaaggaaaaacgagttgattgtgtattttttgatgcttaagttt

SEQ ID NO: 230069 - DNA, 1164 bp, Cannabis indica
tgattggatgtgtttttctttaccgaactaaatttcgtgtaactgcaacttcaatagaattgctattgaatgtggctgttagaaaattgatacacattgtcaaaaaatttgttattattatttttttttctattctaattgatttgtttagaaatattatgattaaaaaaacaaacaatagggtccaccaacttatctagaaggtagttagcgttgaatttgctcccacaaattttcaatatgtcattctgtacgcagtgatggggatgaccacagatggagtgggcgggtctcgcttcgcgatcgcgaccatgggagctgtccagttcgaaaaaggagatgaccatgccagcttctccaactggtactttgttgtattgttcatcggcaacgctttcagcttcatgcactacaagaatttcagcatttaattacatttacggataacatttttaaaaaaacgttatcatcttatattaattaaatcaataaccctgttgagtttctttagacataaatatattttaaagtataaaatttctaaacattggggagttaaatttcaaaaagaaaaaagactaagtacggaatagtgctccgctagggttttggagatttttcaaattacttctgttgctatggtgggaagactcaaaggtcgaaaaaatggaacgaatgcagcgattcaaaaacagaggggaccgtcgtcgaagactggtgagaaagacgatatctatggcagtgatctttgagatcgacacagtagaattttctaattctgaggaagagaagattgatgaggatgcggtgaagaatgacgatggaaccatactctcgcaaagatcgatgagactctctcggaatggcttggcgtaatgaagaaggcagaggcgactacgaaatgaggtgaactttctatttcaactccttttctaattttgaatgtggattatgaagttgtgatatctgaacagattggggattccaataagactaaaatcagaagtagtgctgctaggaaattagggaatgttagaattgatgatgatgatatagaagaggaggtatcatacttgaatctgctatggtctttaatgtctttcattaagcatactagtatttttttttttaaaagaaaaagtaaatattggttgacataaatta

SEQ ID NO: 230070 - DNA, 1921 bp, Cannabis indica
tactgacacatattttatttttataaaacaaatcgttcaaataattatactattttaattattaattaaaataaaaaactaaaatattaaataaaactaacactacgtggcttggcacgtaacaatcacctagttacaacttaaaatgctgtaaaattcaggaattacaacttaaaaagattgtaatctattaactacaaaggtgaacaatttcaatataatatatttaaacttgcaaattaacgctaaaactttcataacttctaatttaaaacgagtcacgcaaaataatttcaaattcagtcttttattttatagtggcatttgtgttgagtttcagtctacctgaaaatggattcatttactgtaaagtaatatcaatcatattgtaaaagctgaataatttggagtagaccaacattttgtattcttcaaaatcaatgaaaataccttttcttttaagaaaaattacttcaacaacactataatttacttgataataaaaaatttataatataatatgacattaaaatgacataacagttcgtctcctatgccttctcagaatttatataccaacaatcaaccatgctacctccacctgctggtacgttaaaacttaatgtgaatactactttggataatgatggtcaaatgataggcattggaggtattgttcgcaattctaacagtcataggtattgttcgcaattctaacaatcatattattgctgcgatttccaaaccaatttagaagttctgttaaaaaaattaaggccaaggcaatctctcaccatttacaatgactgagtaatattaattgtgtggtttattatatactatataatggcaaatttcatgatttatttgagattttatttatcaaatattctcttttgtgcctctctaagttatgttcatcgagtgctaattcacatgattttactagattcattttacggatggatactgatattatttagaagactgtttgtcgaaaccctatcgaaactatcagtctaaacgaacttgttcattaatatatatctttatatattaaaagtgcctatgtaacgacaattattggtttaacagaatatgctttacaaataaaagaatattctgttaaatttaaccccaaaagaatgtccacgttttctcactctcaattaatcgttttctcaaaggtttctctcacgcagatggagtacaccattctcacctcctactccctcgagaaatttcgtctatacgaaaccagagcggtacgctattcttatagtctatttttcagcatacacactaatctccttctttaagaaaagagaaaacccatccaattccatatttttgagttgcttccgggttctgaagattgatcgttcggagccgtccgatctcaatctcagtgaagacccagttgtgtactcctcgcaggagattaagaacctccttcagcggattgccgaaggcaatcgtgccaccggtggttgatttttttttttaatttttattcaaaaataataatttccttggctgaggttaaattttaaaaaatacgactattcaccttctcttcttcctctttcattatttgcaattaccctacatctgattgacaagaaaactcaagaattgatacaacggagagaggtttctctctctctcttctctttcttgcataaacccacaaaccatacaacagaaagaggtttctctctcctctctcttagcgatttcattctttctggtttagaattctaagaatttgggggcgcatcgaaaccctagatttgctcccattgttgaccggtgacttttttcagattcgttttcttttatttttatttttgtttcgatttttttttggcatttttagaaactatgttatgagcgcagatccgttcgagctttcatgttt

SEQ ID NO: 230071 - DNA, 2565 bp, Cannabis indica
ttcaagacaaattcgtgagcgataagttcgtctctaaggtcgaaggggttcctattaaggaccacgatctatagaattggcctcacaatttatgaccatgttctcgcgggcttttgtcgcaggttctgaggagcttgacctcttgaggaagcaaacacgcttcttcaaaatgacagaaagaagctgaagctggatgtgacctcgtaggacaaagacatcaaggatcttgggaaagccaaggagcaggcggagcaaaaggttaaacttttggaatcgtgagttggcgaactcattcgtgaccttgaaaatgaaaaagagattgggaagaaacagtatgatcaggccgtctctgattatatttatacgaccttgtctaagctgcctgactttgactttacaattcttgaagcggaggcggttgaaatagcagatgcatttcgtgctacgtcgcctactgagacctaaggacttgggggaaatctttccctgaggatgctgagaacgtaaatgcggaggaagtcgcaaacggtgctgcaagcaaggtcgtagacgatcccagcactccagcctcctaatttttctaagtttctttttgctattgtcgaacctttagattttttgtttagcggtacaagggtactcgcgctttgtactatgaacaaattatctaacttttgttatcgaacaacatatcactttgaggatatttccttttccatacttatttagtggtacacgagtactcgcattatttaagctgcacttttagtcattgcttaagttttttctcgcaaaactctttatgaatctattcatagcttggtgtgataacttagaatataaaaacttgcaaaaaagttacaaaatttcagaaactttgaatgtttcattaataaaatcaatagtacaatgttaatggttatacccctatacttagtacatttattgaaataaattgactatgtataaatacatgtgagtactattgatagtaatactttaaactttctccatcccaagctcttttgatggttgtattgtcgagatcggataatcggtatgtcgcattaccaatttttttcagcgattagatacgatccttcccagttatcgccgaatacaccgtgtgttgagttacgcgtgttatgcataactttgcgtagcactaaatctcctactcgtaggttttgttctttaacctttgagttgaaatagcgagttgttcactgttgataggctgcattttcaaatgagcctgatcgcgtttttcctccagaaaatcgagttgcagcaactgactttctatatttctgttgatattgaagacatctcttctcaaagatcctgctccaacctcgactggtaccatggcttcacactcataagaaagcgagaagtggatttcaccagtcgttgagcgaggagttgtattatatgaccatagaacttgttgaagttcttttggccatgtacctttcttttacttaagcttaccttttatggtatgtttaatgattttgtttgttgcctccgtttgtccattactttgaggatgtgcgaacgcaaaaaaggctttctgaatccccaagtcatcacatagttgtcgcatctccttacaatcaaattacttaccatcgtcagaaattagcttgtaaggaatgccaaacctgcggatgatagcactatagacaaactcgtgtaatttggaggttgttatggttgcaagaggcttggcttcgacccattttgtgaagtaatccacagcgactacaatatattttactcctcattttccttttggcagttcaccaattaaatctataccccagaccgcaaatggccaaggactagtgatagaattcaattggctagctggcctagcacataggtcgctattcgctgacacttgtcgcatttcttaacgaagctagttgcatctgcccgtaacgttggccagtaatatcattacctcataatttttaaagtaagggaattaccaccggcatggttgccgtaaatcccaccatgtacttctcggagtatgtagtcgcattcattcatgttgatgcatttaagcaacgactgactaaaacttttgtgatagagtttgtcatcacaaattacatatcaagcggctcgatattgcagttttttagcttcggtcttgtcgccaaggagtactcctatttttaagtagtttatgattgtggtcatccaggtgaccttttttatcgtaccgacctccatcatttcatcttgatgaatagtcggatgggttaagacatcaacaggaattacgtcgagtaattctgcttctctcgtcgaggccagtcaggccaagacatctgcatgagaattgtaagcacgaggtattctactaacaattatctttttaaatttatttaataactcacaagtgtaagaaagatatttggccaaatgccctcctttggcccgatattctccattgacttggcaaactacgatttgcgagtcgttgaatgcttgaaggtattcgactttcatttcaagagcgaacttttaccctgcgattaaagcctcata

SEQ ID NO: 230072 - DNA, 944 bp, Cannabis indica
ccattggaataaacaactcagaaattctccttcactttctctttctctctacatcttctttttctttcttctcatctactttatattatattatattattttataacaaacggtgatttgttctccaattatactttgaataattaaaaagactatgagcccttattttatatatatagttcttcatacgtactgactcatatagcaacaaagtacgaacacaattaaatcacattaaagaaaattctgtatattataacacactatatctatgtacttcgttataaaagggaaaaaaaatgaaatattaaaaatttatatgcatttagtcttaccaattaaaaggttatataaatctagtatagatgtatatatcatatatgacttcggaatcaaaatacatgttgctagtatcacgagaggcgttcaccataacaaaaatgagctataatgtgaccatataaatagtatataatacatacggaaagaagtcatgaaaagtgaatgaacaatagtaagtagacaaatcataattattatgctgtgcccgtgacatataaaaacgacaaattaagaaaattagtaattcatcatcactatcccaaatattttctctcttttttctttgtcgatcaggaaaatattattaccagcaattaaaataattaattagagccacacaagaagcttgtctatataaaacagaaacaaaatactcttgactcagattataagtgatgaatcagatactcgttgtagtaggtagtgtagtttaaaaagtaaaacgtacgttaaaaataagagattttatctagaaaaagtaattagtaatatgaagtttccacatgagactcttaactacaatggctatgtaatatatacataaatttatatacagttttcaaaataagttgagggccgtatacattttattaactctatac

SEQ ID NO: 230073 - DNA, 1074 bp, Cannabis indica
aatagcgactctagcgcttttagccataccatccgccacagagtttaatatacgattaatataaaagaacttacataaagaaagttttttagaagcattaataattgaaaagaaaatactagcacatttccaatcaggaggccctgctcctgcatttagagctgaaactgctaccaacgagtctgaaagaacatgaatatcttgccatccagtgtcaacagcccagtttagtgccaaaagaatagcttggagttcagcttcgagagccgaggctgctttggatttttgagcattgacaaaccagcaggcagttaaacgatcgacaccaacagcagctgaacctgctaggccatctacccaggaagcgtccgtgagcatgacacgagccacctgggtcataggctgatgactctgatcatcaaacacttgctgagtagtatctggaacaggatcttcagcaagagtaaacttttcctttgctttgtttccacacaccatatttaattccaaaacagaattaagaattctttgtaaagcaaagaggggatctacaacagaactcctcatgtgaagagcatttcgttggttccaaatttcagagaacacacaccctgcaaaatttaaaagctctgatctctgaataggcagggaggagaggagagattccaaaaagttgatcatattatcccctggaatgctatcaatgatcaatggatagtaacctcccagccaaatagctttagcaaagctacaatcctgaaataaatgaatcgcattttctcttccaccgccacacaaactacaatctttgtctctaacgaaaggaagtctattcttagtaggaatagcttcattaaggattcgccaaagaaacaccgaaatttttgggtgaatatctctatcccaaatccatttccaaatctgcctttccggggcaaacctccaagattgatcaatacagtaagcagatttaaccgaaaacctgcccttttgattgtgtttccaaaaaatctgatctgagaaaggattgggaattctaggaatttgtaggataagatttcccatatcctgacc

SEQ ID NO: 230074 - DNA, 1478 bp, Cannabis indica
gctttctcccacaaacatggcagtagaagtagcatggttctgatttcggcaacgttttaagaactgtctcatagtgagagagtcactttgtctcttaatggtaggcatgggtggtaagttttccttgtttatgacagtagcaactatagggggagaaatagtggaggttgcagggaacacgtgtggggcattagtgtttgattgggtgatagaaagtggagacaaatttggggggtaagttgccacgaggtaaataggtgaagcagtagaactaatatctggagtaaagatgctagatagatgaataagaggctgactagtaggatcatgcagattggagtgtgaggtagagacaaaagaagtgcggttgactatcacagaaggtaatggtttagatattgatggttgatgtagtggaggctgattatgggttttgaaaatgttatggctatttgttgactggtgcgaaatagatggctgtgtgagttcttgaggaaagtttgtaataacactaaagggagtgtgttttacagaagcatcatggtgtgttggtggaaaaagagttggtgaaaaagtagcagtagtaacacatggagcaggtcgagagaagggtaaggttgagacattttcagcatctgtcaatagacttggttatggagtggctgcagtgtttatgcgagggatggctgaagtaagagtggtacgggcaagacgggttaacagcggccatgcattccctttagaaaagtcagttctatacttatcataacccgttgtaggaagccgtacccctttcatccatggtccataaggaagatcgtcattatttccattgtccatacggtccatgaacttgacacatttctcaaaagggtgtccgatcaaaccacactcaaagcaaaactccggtagacgctcataacgaaaatcaatccaaaactcatctcgtactttaggcaggctaatcatttgtccacgatttggacccaaaatggtgtggaagtcaagttattcattgagacattctgcagagcacttggagtgtacatcacaatgagatgattttgaaagtgccaaggttccttattcataacccgaaatttatcacctgcacaatggaaagaaaccttgaacatatcatccccaaaatcagaaatcacaaccggaaaacggcccttccagtgtcccgacatctggttaatgaaggtcggcttgtggacgtatgaatcagtgagaactcgagcaataaacatatggacggaatgcacatctgcaggggcagttacttcatctgataaagcaaagatagttccttcttcatcagtcaaggagagtgttgtattaagggcgttctcgataggttccatgataaaagcaaaaggaaaagggctgaggaggaatgaagacagtagtgagatcagaagaagaaagacatgggcagatgaaggagaaggcaaactagaaaaaaactgaaaaca

SEQ ID NO: 230075 - DNA, 982 bp, Cannabis indica
gtattacacaagagacaacaatcctgtattctaccaaaacagagcagcctgtctcttgttagaagtcttccaagcaaggccaatcacaaaatgaatctgtttttaggcaaaacgaatctaacccaaatcaaatgatacctccatttccccttgatcggctgctgcaacttcttacactaagcaaaaatggaaaaaattaaattactaaaattcaatctgagagaagttaacctttattttatctttcatttgcactatctctcttaataccaacttgaatcttatggaacctcacagttccaccaagcaccgccccacctccaaccccttaagaagaacctgtaattctccataaacagaaagaaaggagcatttggtagcaaacatagcttgaatctccgcatgaaaatctcaaataaccactccaatagcaccaatgtcgtccctgtttgcaaagttaacatatacccaagttcttccaggtcttggaaggattcatttgttgaaatcctcatagattttcttcttcatctcttcaaatctccaatgaccactataatgaaagttagaattattgaaaaagccaaagatcatggtaaagcacaacagtaaaagtttcaaattcagctttgtcaagtagagaaatatttccaagaaaagtcaaaggattaaatatccacttaacaacctttgcacctgaatacagaaggaaatcttcaatttgaataccccatttgctggagaaccaaaggccaatagtgatagggaattgacagcaacagtatcactgtcaaaattgccacaaagaaaatagtgtccaaccttattcccaaaaattcttcccaacctcgagccaaacgagaggcaatcttttattaattttcacaggaaaagcttcattctttcatgaataccctattagaatattttatttatgaaaattattttcgaattaaggaaatgattttctatttaaggaaat

SEQ ID NO: 230076 - DNA, 810 bp, Cannabis indica
ttttggtgaaaaatagtagaagttggtgagcttgatttgataaaactacacataagtaagattttttttatgaatttaagtgcataactggaccttgagctcaggataaaagttgtagatctcatttctagctcttaggaacatcttgaaacgtctatttttgagttatattgaaaaagttatagccaaaatattgatttgagcacgcgacgcaatttcacaggatccactgccccgacaacacttaagtattgtaagggcggccagaggcataaatgcgtccgtagtttgcgaaaaatcaaaattaagctaaatttaaatgggattttaggattatataaataagacttttagagtttgtttttaacacgtttagactgcggttttgaaggagagaactcaagagaagaggagaatccacacccacatctagtttttcttcttaaactcttctaattttcaattatgattatgcttacgattatagataaataacattgtatctatattatgtgtataaaacattccatgtaatcaggagtacaattctaaatctatagtagagtcatgatgaattcataagttaagaaattaatttgttaaattttaaatctacttattgggagcctaaatttcgtggactcatggtccccgcaatatctaggataaataccaaatagtaaatctcaatatttaatttattttaattaattagattcacataattgacttagtcaattatgaatttttttacatttaagtgccagcataactgttattgaatatccacattattctaagggagtacta

SEQ ID NO: 230077 - DNA, 1191 bp, Cannabis indica
agcaactcaggtttttatttgccttcctgtgatattatcgatcgtatgattaagcaatggaagtccctttgatatttgagctgtgttgctaggtgctttagagaatgtgctggctctagacctgtcatttttgatatgttggttgataggtatatgaaattgggtttgtttgatgaagctgtggatgtgtttttgggtctgaaaagtgttgagttcttgcctagtttgctttcatgcaatttattgctgaaagagttattgaggactaccaatatgggattgttttggaaggtccatgatgggatgttgaagatgaagatatcctctgatgtgtttacttattctaatgttattgaggctcattttagggctggtgatgttgatggggctaaaggggccttgttggaaatggatgaaaagggttgcagcccaaatgtggttacatacaacgtgatgattagcggtttatgcagagctgggcttgttggtgaagcaattgagatgaagaagtcaatggctgaaaagggtttagttcctgacaagtatacttatgtaacccttattaatggatattgcaggaaaaggaaactggcagatgcaagtaagttgttaagtgaaatggttaatgcaggattgaagcctgatgaaattgcctacaatcctctaattgatgggtttatgaaaagtggtaatgtggaagaggcttttaggattaaagatgaaatggttaagcatggtataaggttaggtcttgtcaattataacactattctgaatggagtttgtaaggccggcttgatgtccaaggctagagatattgttgatgagatgattagaatgggtagcagaccagattctagaacttatacctcgttgattgagggctatctccgggaacgtgatactgtcaatgctttcaaaatatttgatgagatgaagaagagaaacttggcacctacaattgtaacatacggaatattaattaatgggttatgtcgtggtcgaaatcttgatcaagctaatgattttctcaaggaaatggtttcatttgggttgaaaccaaattccgttatctataatactcttatttcagcccaagcaaaggcaggtaaatttgaagaagcaagagagattttagataagatgaaggaacaagggatttcaccgaatgtattttgctacaattcttta

SEQ ID NO: 230078 - DNA, 833 bp, Cannabis indica
aaatagtgactttgggcaaaatgccaaggttgcccatcaaggattctacgtttatccccctcacagagaaacgtaattagaaaaagaccatcaaagtgctcagagatggtaactagaaaacgacactgagaggtccaaactggagacaaagttttaataaagggaaactcgattaaaatgcttaacaatgcatagtttaagaagcagactgatatcagtaggaggttcctcctgaacttcagccatggtgtaaaccatggtctcatcaagagttagaatcaaaggagaagcagaactagaccttaaagcattcatagtgaggctaaagaaaattttccacagagaaaaagaacaacaacagacaacacaaatgcataaactcaaatgaaaacgcgttttatagataaaaaataccatacatttcaggaagactcttggcttatccctggcagtagcttcctgagtagctcctctagacatcccactctcccagacttcatcatcaccattataccttctcgccacctcctctattagaagaagcatatcttcattaagattactgatttgatggtgaaagtaaattattagatacaatttagggtttgacaaataaggctttaaaattgtgggaaagataaaatgcatttaatgcattgaaaattttcagctgagaggatcttttgaggataataagcatcaaagatattaagatggtaattaatgcactgaacagaagaatgatgagaaaagaaaagaagaaccaagacccaattgccaccacaccaccatagagggtggaccagaaacccaacataggtaccaaacggaga

SEQ ID NO: 230079 - DNA, 1449 bp, Cannabis indica
aatttaattattggagatgctctcataaaaaatgagctatattagctagaagctaaaaaaaaatagctaaaagcttaaacatgcttctgcctcttggtaaacatgctattggttcccgttgggtgtataatatcaagaccaattctaatgggtctattggacggtacaaggctcgattagtgactaagagcttttcacaaaagtatgatatggactttgagaaaacttttgctcctattgcaaaaatgattattgttcatactcttatagcagtgacattagttcgtcaatagattatatctcaaatggatgttaagaatgtttttttgaatggtgacttacatgaggaagtctacactctacatggttcctcctcctggtgttcctcataagcaaggcaaggtttgtaagctaaaaagggccttgtatggtcttaaacaagctccccgagcatagtttcagaagttctctactgttattttatctcttgattttgtttcaagtgatcatgattcaacattatttgtcaagtgcacatctacatgtcgtattcagcttttcttatatgttgatgatatgattattacaggggatgatttacagggaattgaaatgttaaagtcagaattagcttctcaatttgaaatgaaggatttgggttctctgccttattttatgggtattgaagttacctttttgccaaaaggttatcttctttctaagtcaaagtacactactgacattattaagcgtgctcgccttactgatactagagttgttgacactccttctgagttgaatgttcaatattctccttctgatggctctcctttggaagattctactttgtatcgcactattcttggcagtctagtttatctcattgttactcatccgaacattgcatatgctattcatattgttagttagtttgttgcttctccaactacgattcactgggctgttgttctttgcattctacatctttcagagcctactgctgccttctacctcctctttggaattatgagcttactgtgatgcagatcatagtcgtgatcccgcagaccaaaaatttgtcatttgtttctatattttttttgggagattcccttatttcttggaagagcaagaaacagtatgttgtttctcaatcttctacggaagttaagtatcgtgccatggcgtctactactgaagagattgtttggttaagatggttactcgtagatatgggtgttactcgctcttgtcatactcctatgtattgtgacaatcaaagtgttatttagattgttcacaatttagtttttcatgaacgcaccaagcatattgagattgattgccattttactcttcactatttgaaattggacaccattactttattttttattcctcgctgcagcttgctgacttttttaccaagtcacatacgatttctcgttt

SEQ ID NO: 230080 - DNA, 2004 bp, Cannabis indica
tcttttgacaattgttgcttcaacaatttgatatcggccatatatggacctgctactaacatatcatcaatataaagtaccaaaacgatatagctggacctatatcatttgaaatagaacaagtggtcaatattgcacttatggaagccttctttgtgcataaactgtcaaactttttgtaccatttccttggggcttattttaagccatacaaattttcttaagtttacgtaccatattcttcttccctttctttgaaaaaccttcttgttgatgcatgtttatctcctcatccaagtctccatgaagaactgtagtcttaacgtctaacagttcaagatgaagatcttcaatggcaataaaactcaacactgatctaatattattgagcttgacaataggagcaaaaatctcagtatggtcaactccttccttctgctgaaatcctttgactactaatcgagctttatatctcttagaggcatcatgctctttctttacccggtacacccatttattttgaagtgacttcttatgcatgggtagctcaactagctcccatgtctggttcgaaatcaaagactacatctcatctttcatcgcaagctctcacttgcttgcatcactagttttacatgcttcacatagcatttaggctctccttcatcaattaacaacaaatagttcatgtatctcctgttaggcacatgaggccaaaaagaccttctcaatataggagtcggggtaggaggtaatgttgcgttagattattgcatacaactttgtccaacaagttcctcttgctgaggacttgtctcaatcaactctatcataaaactatctaggtcataatctccatttataaatatttgcccactacattctaagtttttagcatcaatttcgtgtttgtccttgtacatcactttttcgttgaaaatcacatctctactacgaatgaccattttgttttcatcatcccaaatacgatagccaaactcatccccaccatagccaatgaaagtgcatttcttagatttaggatcatgcttattcctgccttgatcactaatatgcacataggctacacaaccaaaaacttttagatgtgataggtttatctctttagcactccatacctcctctggtattttgtactctagtagacttgaagagcctcgattaatcaagtaagctgctatattgactacttcggcccagaattgctttggtacacctgactgtatacgcatgcttctggctctttttgtcaacgttcggttcatacgttccgcaacaccatttgtgttgaggtgtgccagacacggttctctcgattctgattccgtgctcatagcaaaacttcttgaatgtgttctctttatattctccaccattgttagttctgaacttttaaatcttcaaacttgtctcattttcgaccatagctttccatctcttgaaagcctcaaacacttcagatttatgcttcagaaagtaaacccataccttccgagaatgatcatcgataaaagtcacgaagtattgtttcccaccaatggatgaagtagtcattggtccccaaacatcagagtgaacgagctctaatctctccttttttggggttttactacttgtatgaaagcttaccttctttttctttccaagtatgcattcttcgcacatgtctatctcaattgatcgtagatctgggagttttccctttgaatgcacaagtttcatccctttctcactcatgtgcctaactccccagtgccgcataatggaattttcattccctattgcaactgcaattgaacagcacacacctactatcatgtaaagagtgccgctctttttttcgtgagcaaccgtcattgcaccctttgaaatcttccaattttcaccttgaaagtttgtagtgtagcctttgctagccaactgccctactgagatcaagttcttatttaggtcgggaatatgcctgacatccttcagctccca

SEQ ID NO: 230081 - DNA, 1626 bp, Cannabis indica
taagccaatgtgattttggttgaatgcgacttactacaatagaatatgttcttctttttctgcttttattgtctttagagaatttttttttttatttttctaattgattaaatcggtctggtctgctctgtttcggggatactattaatcggcgctcattttctatagttcctcgggaaagtcttaaagctttgttattgttttttattttcaacgaagttttcaaaacacaagtagcattttattagtattttttaaaaataatattaacttaaagtgaatgagtttttaaaacatataacaacattttgttgttttctaaattattagcctttttctcttttctaagtctcaaaatgtaatgtttcaaattcgaatcgacgacaccgaagatggctcggaaagctagtgccgtcgatgatttgagagagatcgcgatggtgcggttcgatttcgcttgtggataatctcgcccaatgtttaggagtatcagagattttggattcgatgaaaacgatgattttctctagatctgaaacggctctggattatgcgaagaaattcattttcaatgaattgagaataaaatggaagaaaactaaaacgctaaacgacaccgtaaaagcttctcaacagagaggcgattctgctctgttacgaaactcatcaagctacgccaaattgaaatggagcatttcagagtttgaatacggaaaataaagccttgtcgtttggcatttagatcgatgaatagagattgcataaataaggtcttggatgaaagcaatgttgctgccaagaaattgaaaggagcaccggagagagaaagatcgcgatggtgcggttcaatgatggtggtggttctatccaatccaattttattatcactattcaatctaatctaatccacacgtataaaaaaatatataaattaaataaataaaaaaaataataatttaaaaatctaatacatataatacaattatattttaaaatttaataaataaaatgcatattcttttcttatatataatttttttttaacatataatttaaaataatttttttttgaataaatcaagaaatttattaattaataaactcgttcaaaacaataaaacacatttcagaggaacaatcctctaactgaagcacacaacctgtagagaaacaagagtctcttactaagcaatgagtcaacttgtttgcagatcgtttaacaaaacataactcaacaaaagataaagccaaaagtaaatttctaacatcttgaacaataaaaccaaactgtgaggacataaaaacattactttggattgcttagacacacaccaaactatcaatttctaacactacattgtcttagggatgagtcgcaatccaactcaaagcttctttgatgcccatgatatcagcaatttcaagttggacatacccaacctttccctttataaaagcttctaccacggttccatgatgatctcgagctacacagcccactccaaactgcccctcttgttcaaataaagccccatcaacattaactttagaataaaattaatattttttttatgtatacaacttttttctttgtttgaatttgttatattattttatttattttaa

SEQ ID NO: 230082 - DNA, 1216 bp, Cannabis indica
tgcaacataaaatattatttctgatctttattaattactaaatctgattatattgaaatgtattttatttagggcacaaaacccaacaaaaatatctagtgttgtctgatcatttattacttatatatatttttgtagtgaatttattacgaaaaagctattttattttagttaatgaaaatctgcattaacaaaaagtacattctcaagtatttttggtgaacaagaaattatatgcttgtttattcacgaggtgaattaaaccctactaaatatactaatctttatttttaattagacaaaaacagtcgtaaatttacatttaagccaatatttgttaggatttatgccataaatacaagtaattaatggataatatattattgaatatatgaaatacaaatatattataaatgaatacgttaattattgtttaaattattaataaatatcaaaaaatttcctattcatataagagtgtatgatcttgtaagtgtacacgagaattaagatcataacatacgaatgaaattagttggtagtatattaaagtttgaaatctttaatatgaaattcaagtataatttactaagcactaactggtatactatatatattattagactgcaacatataaaaagttaaaattttaaaaaataaaggaaaaattctatcaaaaatcctaaattagcattacattactttttatgagtgattaaaaaatttacccttacacaatatatttaatacatatatatatattttaaaaaaaaaaaatgcaatatatattagttttttttttttcattaatacatcatactaagaagtatttgactaattattcttttctttttctttttttttctcacatttattttattaatattattaaattttttgatatgattattctgaataatatatatatatatatcatatgatttaaaagtagttacactgtaaactatatccatatatgttctatatatttatgcaaagaaaaacataaatcaaatgatgagagattctattattattgtaccatttatctattttattggagttttaattagttttattttcttttataattatgtatttgttaaattatggtcatttttttatggtataagtctcacattgattacagtgagagttatatttattatgaaaaatcgtgtttttgcaaacgtcaattatatataagaaaatataa

SEQ ID NO: 230083 - DNA, 750 bp, Cannabis indica
tagcttcccgtacaagctaattttccaaaattggtgttggccaattttgcaaaaaactgaatatttttcttaaattcttgaaaaaatttaattttataattttaccaaacacattttgaatgataactttttaaaaaagtacttctaacttttttaaaagatatcccaaacgcactcttaaaatcgttggttgtcaatagtacaacctgggtccaaaatattaatattggtttagagaaatacattagggccccgtgatttgttcacgtggatcaagatttattttgttttttctttaaaagaaaatataaaataaattatttaagcccaaaacaccatgccctgtaaaagtaagacaattaagacagaaatcatgatgggtggggtctatgtaaatgctcaaatttacatcctgaatgagttactagctggagaaattgtctccaagaaattctcttaagtagcctttaatttggaagaatgaaaatataagaataaaaataaaaatgagaatagaaataaaaataagaataaaatttaaaatgtataaaaaaaacttgataaaaaatcattaaatttctttttttgatacactgaaatggtcttttcatcttttataaaatagaatagtcattccactaaaatggtggatagagcatactatttggtattctaatattttaaaatgcaaccaaacaaaataataaaatgaaaattattttctttttattctattatattttattacct

SEQ ID NO: 230084 - DNA, 2506 bp, Cannabis indica
ctagtcccgaaccaaccaggactcgtacctgcaccttaccgaacttgaactcggaccgtagaccagatccgaaccacgacatggagctgaacccggaacgggattcggcccctagaccttagaccatggacccgaaccaggactcaggcctagacctagaacccaggtcccggcctaggactcatgggcagacccagaaccccaatcccagactcgaaccctggccctggacccgcaccttgaacccgaactcgaactttgacccatcccccgacccagaccgtgactcggcctcaaaccctaaatcccgaaccccgaacccaaacgccggacctggactcggacccggataggggtcagagttggggtcgattttatagtagatataatataattttacacaagctattaatacaagtcaataataaacatagtatagtattaaatactattagaacaatataatacaatctaatacaatattatacaactcaatacaatacagtacaacacaagaagccaagcaccacaaaacgttttatacaactattggtgcattttaatatcgagttcacacgtttttatataacaaatacaatgggaaaaaattaagcaattatatggccttacatcagcgagttattagcaatgtcaaatagcaatgttctattgttaaacaacacatttttgcagttccgtaccgtaggctcacaactaattaattaaaaagcttcacacgacatgtattcttcttcgtgaatcggaacgagtaataatagtactattcaattcgattggtaactaataaaatggaatggtactaacaaatcaaaattcaatgcaaaaaacgtaaattattctaatatatttctattgactttgtcgttacccaaaataacaactccatttattcattgctattaggtagaagaaaaatatatcgtgaagggagtgataactagcacaccaagtaagaacgagcaagaataaaaaatcacaagaagaagaagatagcagcggcaatgggattcgaaaagcagaatctggatattgtgttagtcccaagcggattactagtcatgtttggctaccatctttaccttctctatagatgcctatatcgtcctcacaccacagtcattggtttcgaaaacaacgaccgaaaagcttgggtggaacgaatcatgaaggtcaaaaacacaaagacccatctcctattttctttctcacaatcactataactaagctcctccacatatataacgtattttctaatctgccttctttttttcagatcgacaaaaaggatgtgggaacagctcttgcagtgattcagtcaaacaccacggctgcaacattcttatgctccgtttcgttgactatgagctctttaattggagcatggctcggtagctcatcggagagaatcttcaggagcgaattgatatatggagacacaaggccttcaaccatgtcaatcaaatacatatgccttttgacttgttttcttctagcttttgcttccttcgttcagtcagctcggcattttgttcatgccaattttttgattagtacaccagagactgacatcccatttgagtatgtggagattgctgtgattagaggaagcaatttctggtctttgggtctaagatctctttattttgctcttaatatgttgctttggttctttggtccgattcctatgtttgtttcttctctacttatggtcatacttttgcatgtattggatacgaactccaggccattgcataagcataaggagcttcaaagggctcgtgagagaaggtcagaagtcgctcttacagatcaagtagttaatggtagaaaaccactggttgaggtctgaaatttgtttgccatttttctggattaaacggaccaagagaacattcggtttacattttgtagactttacagtgttccaaatggatgacatttctttgagacactttttttttcatgtgttattatcattttgatctaaaattttgtccaaagtaaccgtgtttgcatgatcatgtgtaaattatatcctttattattaatgcactcatttttttctaatcggaaataaatatagtttaaagtgctattatagataaaaatcattgctgtttcacacatgattttgatatataatatattatgattattgcatttttcattggaaactagttatttgttcttttaataattgtgttggggttaggtacattattcttgtcattcacataaagttaggttgtagaagacgaactgcatattgcattactctcccatcgacggtttctataagaataatattggtttaggtagaaagtgttggattaaaattttttttattgtggagatatatgtataatgtatatgttattataaagtgtgatataaagttaagtaatcaatttttgttatgtgtatcaaaaaggtattacattgttatgaaaataatgtgtagatactataagttaatttataattt

SEQ ID NO: 230085 - DNA, 1157 bp, Cannabis indica
cttctctcacgcacggttctctttctgacggacgttggtggtaacccccgtgcatatctcttctttagctctcgatgaaagtaccaaaatatttaccgagtttttttggcaattacatatttctttagagctttggaaagtaaagattaaataaatagcaagataacaaataagagatttttacatggttcaagcgttaactatccttagtccacgagtctattttattaggctcatcagtcggtaactgtttatacaagtagagatatgatagactaaaactcccttccaccgtgttgttcttgaagaagaggaagcttagtaggaatattcttgaattgatagtagggttacaaaaaatatgttttcttaggatgaggaagaataagtcttttctccaaaaaccccaggtccccctgtcttctgcttttttagggtatttataggctaacttcttttcttatgctgccttggatggattagcgttggggtgaaatctgaccgttggatcgataggtggcatatttctcatatggtatttaagggcgtcagatcgtacgagctaggccacggatgcatgtcgcctcagggctcctcctttttgaattcccttatccatagtcgttgatcatttggttaggtacacaaggacacacatgctctgtacgataacgcgtcgtggaagataacctctgacgtcgtacctgaaaaagcctagtcactaggtccatggtttgacatgcataggtgaggcttctgcgggctaaatgtgtagcccgatttagcatgtctcgaaatgccttggcccttctagaaagtccatattcttctcggaaattgatggctttagttcttggaacggggagagaccttggctcattgacacctttcgtgtggctagcagtcggggaactccccttcatggagactcttcttacgaagttggtgcctttgtcttcttagagcatcaattggggaagttgggtagctaatgactccttgacctttcctaattaagatccacgtgtcatgctgatgaaaatacgaataacaaataataataataatttaaatgtgtttacaaataaataatgaaatttatttattgtttactttttattttttaagaagtattcaacaatataaatttttttttt

SEQ ID NO: 230086 - DNA, 1624 bp, Cannabis indica
ctctctctctctctctctctctctctctctctctcgttacaatctaggtcctagtttgtatataattcatcttttatttggataaagtttaaatccttgtgactgatcatttatctatatatgcttccattttttaaatttttgacatttaggattactaatctatatttgtatttatgtaaagttttgggctttctgtttttgttgagaagtgacaaagaaaaagtatccagttttacgtgcccaatatctcgattacaagagtactgaaccaaaattaatcgattcgatggagtcgggaaaggaagattcaggtttgaaaagagagctttactcagttatagagccttacagttcggggtttttgaaggtttcggatcttcacacaatttattgggaacaatctgggaatccagatgggcatgtgagtagctttgaatgtggagaattcttgttaatttatgtcatgtgtagataatatagtcagattggattggagtgcattgaaaaatagatgagaaagataaatgatttgatcatttagtaaataaaataaattagaatcagagttagatgcttttttttttcatactaatgttaaagatggaggttaaatatgataaaattatcctaatattatcaatgggatcaagttattctgtggcaggggattaattaggttgttagattaatttgttttagaatattctttttaattttataagagatcacgagaaaattatttctactctccaatcattacttaatacattgtatatttttgttgttgttgaattagctaacgggtttatgttaccactctatgtgttatccttttcttatctttgttagttgtttgcttgaagatttttgtttaaggttgatgattatatttatatgaaccttaccctgcagcctgttgtgtttcttcatgggggtccaggaggaggaacttcaccaaccaataggagattttttgaccccgagttttatcgaatcattttgtttgatcaagtgagtatctgatggatcattgtatttgtaataaccaagatgattataaacattattgtatgaaatttcttttttttttctctttcttcagcgtggtgcaggaaagagtacaccccatgcttgtttgaaggaaaacaccacatgggatctcattgatgatattgaaaagctgagggaacacttgaaaatcccagaatggcaggtgataacttgatgtttggtgtggacaaagtcattacttttttataaatgttttttctttttgtaagagaaggtcttgtctgtgcttatgcaggtttttgggggttcatggggaagtacacttgcccttgcttatagtcaatcacatccggataaggtgcataacatatttcagcttatagtcccttggagaaggttttttattgtattttatttcccccttctttcgtagttttgcatacccttgtttttgacggcattgcatggtccgattttaaggttactggattggtccttagagggatctttcttctgagaaagaaagagattgattggttttatgagggtggtgctgctgctatttatcctgatggtgagtgtgaatgctttgctgtaatgtgactgaatc

SEQ ID NO: 230087 - DNA, 1695 bp, Cannabis indica
tcctgctttggtttctctacactcatagtttatacttcatagttatagagacatgaaaaaaaaaaaattaaaggaaaaagaaaaagttatatgttaaaaaaaaagtcttttattatataacgtggaaaatatgttttcctttttactttttcatttgttgttttcctcataatttttttacttggaattcaaggtccaaaaatttaaaagttagaagttaataaaaagagaagaggacatgtaaggaaataaaattaaaggtggtacccaaagttgttgggcaataattccttgatataaaagcatttcagaatttgaaccattagatttatataggagtacttttgcataaaataatactcaatatatagtaaatatccaatatagtatgattaatggtaaagaacaagacattaaatattgttaagacaacaattcaaccactaacaaatattgttatactattcaaatataattaaatataattccattatttaaattatatataataaaatattactgagatcattcgtactaaacactaattataatacttgtatctgtatgaatgagagatatgataattactctcaaagttatgaatgaacgaactaatcttaattaaaaaaaaatagtaataataattactcaattaagtaattgttttaatatatattagagagtaatgtcctcaatcttatattacaatctctaagtcaatctccgttcttgaaaatagatgtcaaaattattttttaattttttttttttttgatggcagtgttcgttattacagtaatattattcctgtaaatttttgaaaaacttcgaatagtttatagtgtcgaaaatactttaaaaaatgttaatttaaaaacatgtggtaaactgaaatattaggaactcgattttcggtattgtaaaccatttgaaatttttaaaaaatttacaggaatgatattataattataacaaatactactatgaaaaagttttaaagaaaatatcccaacaacatgtgattttcaacataaaaattaactaaaaattataattaacactcctcttcatattatgatccctcttttcagttttcattattcaatacaataaaaacttcatattcacatctcaaacatctcgaaaaaacatatggaataatgaacatataataatggacttaattatattttatttatttatttattaaaagagagagaagacatgtccatatgacatgctttttaaataaagtaccatacaacttaataattcatcaatagacttccacacgccattggttgttgctcttcaatgtttctaatatttcatcccaattttttccattattatttgcagtaatattcaaaccattctcaattggtgtcaccatttttttattaccactcaaatatatgtaggctcccttaagcaacaactccaacacttcactagcatactctacaactatgtcttgaacatatttttcgccactagtcaaagctatgtcatagcgaaagttttcggggtaatcctttagatattgattgaattcgtcttcatagagtacactatcagcatttgacaccccatggaaaagccacacaaatcctgagaatttgtatgttggaatttcttctttgaaaaaacgacggagatgggctctgaatggagctatacccgtcccagtagcca

SEQ ID NO: 230088 - DNA, 1190 bp, Cannabis indica
aaaataatttccaacacttaacaccagtaaggttactagtattaagatagattgccctcgattgtgaaccgatttagggagttttagtcccatccctttaaaaatcttttccactaaatctctagttagtggcttcgtaaacggatcctccaagttttcacttgatcacacataagatatttagatgactcatctttgaatcaactcacttacatatccatatcttagactaatatgtttagacttctcattgtatactccattatatgctctagccaatgttgcttggctatcacaatgtatagatattgtagagacatcctctttgataattagaatctcaatcatgagatctcttaaccattgagcctctttcccagtggcagctagagcaataaactctgcttccattgtggaatgagaaatgcaagtttgttttttagacccccgagaaactgcccgtccacgtagagtaaatacccaacccattgtcgacagattatccccaaggttggctatccaacttgcatcagtatatccttccaaaattgaaggaaatttggagtagtgaaggcataggtttttggttttctttagataacccaaaactctccctattgccttccaatgatccacacttggattactagtaaacctactaagtttactcactgcaaatgatatatcgggccttgtacattgggcagcgtacataaagctccctatagcacttgcatactccaattaagccactgctctaccactatttttaactagtggtttactatgatcgaatggtgtgttggcctctttagcctttagatggctaaacttattcaacactttctcaatatagtgtgcttgccctaaagcaaaacccccactatgccttataactttgatacccaaaatagtatccacttctccaaggtctttcattttaaaggttgaagaaagaaacctcttagtttcttctattcctttcatgttatcactaaggattaacatgtcatccacatataggcaaacaattatcacataatttttacaagtttttgaatacaaacacttgtctccattgttatgcctaaagccatttgaaagaatagcattgtcaaacttgacatgccattgtttcggagcttgctttaatccatataaggatttcttcaacttacacactttatgtt

SEQ ID NO: 230089 - DNA, 949 bp, Cannabis indica
tgataaattttgatttggagacttgttgatgttaattttcattagattatgtccattagatgtttaagctgttctggagctttgtgttaggtttgtgtgagaaatgagattttataaaaatctgcagtagaaaacggcgaactgtttttttagaaacagtctactgtttttaccaggtagggaccagaaaaaaagtttgtcatttttagaatggcttgccatttttgggtgtttttaccgaagtgttatttttctttgttctctcaatatttagggtatttatatactaatcgatagaaaaatttctagttttaagtttaagtccccgaaaagagattaacgtatcacttaccaatttatgtatgttgtaacttaggggtctttaaattgtcaagcaccaatttttactcaggttgactggtacaccaaaatttagaattgatgtaagattaggataataattatatatgtgaatacatatttagcgtgcatgtcagttgcgattagaataacttatatatcagagtccaagtgaagtgtacatagagttacactgagataccaacatatgtatgttaggaaaatcagtagccattagattagcataccaggatattagtgaagtgtacatagagttagggtgtgcataaaacgatccaatccaattacaactaatcgccaaacattggatgtccaattgtgatcgaatggcgattcgatgttatttttaaatatccaattggatcggataggatgttggatgaggtgtctaaaaatccaatacatccaacatctaatcgagttaattagggttttcatttagtttttatgagtaattaaaatattatattattatacgtaaaatatatatatgtatatataaaaattaatattaaaattttactttttttttcttagattggatggatccaatctaatccaatacata

SEQ ID NO: 230090 - DNA, 1208 bp, Cannabis indica
ctatgcatgtaccaatataaatataaattgatgattaaaagttgggagaggatcagcacaaattttccaaatgagaaatttggtatggactaaagtagttgtacccctctagtgaagcttctttcaagtgatttagggatcttatgatgcagccataaaataattaagttgatggtattagtaatgattagttgaatgccaagtaaaaagtactgaacttgattagtaatgattagtagtattaattctccattttcaattcaaatttcaaatcctatgttttgtctaccttaaatgagattttttggtctaagccaagcaattactaaatattctcaaataaacaaaaccaatgaccagaaaaggagggagggtacacctacatcaaaaatacaagatgaacttaaaattctttttcactaacatgttaagcaaaaaaaagttgttaaaaaaaaaaataacataaccaaggttaccttttgacaaaggctcaagtaaagattgttatatgagaaaaagagcaagtaaaaaaagtgttaatagtataatatagatcacacttctatcaaaatcactgtgatttatattaattatttgctaaacttaaattatgtaatccaacaaaaataataaatggtaaatattttggatatttacatatgaaataaaataggaaagacaaaatagggagcatgtgtaagattttcatcttataaacaagttcttgcttctaagttagtgtcaaataaaactaaaaccaacataaaagatgtcttttccccagcaaaattttattataactttatattaaatgtaaattgttacatataaaagttataaattgtcaagaaattgaacttgtatattgaaaaaagttgttaaagatcacttgaaagagaaactaatgacttctaatttcgccaacagttggcctttgcatagcaaaaatgcactcaatccttttgatcttacctgggtccggcttagtaaccgcgcttctgctttgcgtttccaagttcaataatctttggttctcgtcggtctcacatgtatggttctcgcaatgcagtgggtagctcaagttcagactcaacttcaggaagtggtgagaaatgacggtccaccatgtcttctgacacatcttttaaacttggatgctcccactggattttttcgaaatcgatcagtcagatgattgttctgagctc

SEQ ID NO: 230091 - DNA, 2004 bp, Cannabis indica
aatgggcctttggcgggttctggattccaggcccgcccagagatatgagttgcttgagctggaattgtcgtgggcttgggaacccgcgggccaaacaattcttatcggaccttgtgttccaaaagaatcacaatttgctttttctttgtgaaactttatgtaataagttatgtatggaaagtattagaacccatttgggttatgaaggttgttttgtagtagaagcccgtgggcatagtggtggtttggcattgttgtggaaagaagaaagtgatgtggccatacagggtttctctgcaaaccatatcgatgctacgatacagaaggtgggggtctcctctatggcggttcactgggatttacttagaaccaagaagagagatgcggtttcagacatggaatctttttcgttctactaaaagaagatagtaaccttccttggtatcttatgggagacatgaacaacctgggttcacaaatggagaagaaaggtggaagaaactacccagaccgactgattgttggcttcaacaatgccttgagggattgtaacttgatcgatgtggctctggtgggctacccgttcacctgggaaaaaggaagaaataccaccaattggattgaagaacgtttggacaaagcattggtgacaaacgaatggctgtcgttatttcctcaatctattttgtacaatctagagttttcttcttctgatcactgcccattacttctaatccttaaaggtaactttccaacaactactcatcattctttccgttttgaaaatgcctggatccgtgaacctctatgcaagcagattatagaaagtggttggatgggttcgggttgcactaacattcaagagaaaatttctaaatgtggggagatgcttgggaagtggagaagagatatcacgggcaactttcgacaacgaattacccaatgcaaaagccaaatccaaaactcaaaatgggggcgtgatcctatatcagtacaacaacataaggaaggaaaggagaaattagatgaagtgctggcccaacgagaaaatttttggaagcaaagatcaaaacagttttggcttaattcgggcgacagaaatagtaagtatttccattcagtcgcaagctcaagaaagaggagtaatagtcttagccatctcatggataataatggtgtttgggttgattgggatacgggtcttcaaaatgttatcactgggtattttcatgacttgtttcaatcctccaatatcaacctgggttcgattttgaatggtgttcgtcctactatttcttgtgatcagaacaatgaattgctggtggctatttcggaggatgaagttaggaaggctctctcttccaaatgcatccggataagtctccggggccagacggtatgaccccggcctttaaccagaagcattggagtattgttagggcggatgtagtccaatttgttcgagatttctttgactcgggcaagttcccggactctattgacgatactcatattgttctaattcccaagaaaaagaacccatcacatatgagtgacatgaggccgatttcactttgcaacgttctttacaagattgcctcaaaggtggtggcaaatagaatgaaaggtgtgttgaaccaaactatctctgaaacccagagtgcgtttgtggccggaagactaatatcagataatgttatggtggcgtttgaagcaatgcactacctgaaaagaaagactaatggcaaaaaaaggctaatatggacactcaagctcgacatgagcaaagcttacgatcgtgttgaatggaggttcctagaatctattcttcgagtaatggggttcagcgatcggtggatagacttaactctaagttgtgtgaactctattcgttaccatggcatcaatagcggtcaaaagatgggaccgattgttcctacgtcgaggcatccgccaaggttgtccgctatcaccttacctgttcattgtttgtgcggagggatt

SEQ ID NO: 230092 - DNA, 697 bp, Cannabis indica
ggtaataaataaaagatttggacatccacataattattaatatttataacaaatactgaattttaatattaacgatgaaataataatatgaagataaataaattaataatttcactctttttatttttgatttttttatatactaaaattttatattataatattgacaattctcccgtttacaaattttttacttttatttctaagtactttggcatgttggattataggtctttatttctagataatttccaagcacatatacaactaaataaatacagaaatacatcagaaaaagaaataaatagatcaatatgatcttaaatgaagttttttttttttgctaaaatattattatggaatatggttaatttaaatttgtacagagaaaaaaaatattattaatatacatatgtataaaatattataatttagaattataccaagcatacaattgtaaattataaattatttgatagtaatttattaatatttattgtctaaaaaagttgttatatattttttttcaaacattctcaaaatatattgttttttaaaaaaattattatggaatataattactaatcttagaaaattttattataaaatttgtaaattaattaattaataatttgaatatatatatctgttgcccctgaattcgcccaaaatacgtggaccagtcgaaatgggacac

SEQ ID NO: 230093 - DNA, 1558 bp, Cannabis indica
aaaaaaaaaaaaacagaaaacattacacagtataagaaaatacagtaaaaaagtaatattttccttacaacagtaaaactaaaagaaaatgagaacaaacagtatggggtgtaaattcctcttattaataatgattttaaagttatttataaatttattttttatttagttaataaaaaatacaaatataattcacattttaaaaaaaatgccaataacttaaacatatatgatattctacatgacaacttattaatttcaaaaatagatttgaaagttactcaaatgtattttaaataattagatactataatatgacctaaaaatagctaacagattattaagatgtatacaaataaattttgaaagaaactaaaatatatctcaaattatataatataaaaatgaagcattttataaaaggtaactcattgatatcttatcggtgtcataagaaactaattgttatattaagttgtctataaattttactaataaattatgtggtaagttcgtttagctctaaactaatagtttctaaaataggttttaagatattaaaaaattacaaaaaataataacataaaagcatattaaataaaagataaatttataattgcttttaatatatttaagtaaaatttaagtgaaagaattaaaaaaagtgattattgtatgctaaaattagaagtaaattttaagattttttcttttataaaattactctttagtttaccaaaaaaattaacttgtttaaaaaattaacttctagatcccttgcgagcattgccaacatatctgccaagcgagggacatgtttgacaagtaaatctcttgaaattttgaagtagctctcgagatttggatacgtaaactactattttctcaccttttgtttaatactctctggatatatgatttaccaccaattgagaattactataaagttcaatattttgagctccaactttcttggctaattttaggcctacaaccattgcttcatgttcttctttgttattggagacagtaaattcaaaccgaagggcactttggagttgatgtccttgcaaagagattaaaatgattctggctctagaatctttttcgtttgatgctccgtcaacataattctagtcttcaagttccagaattggctcttctagatgtctgttaattcctgtacactctaaaatgaaatctgctagggcttggactttgattgaaaccctaaatcgataataaatgtcaaattggctgtgctccatggccaatttcactaatcttccagaggactccaatttttgtaacactttgcaaagagggttgttcgtaagtaccttgatggcatggacttaaaagtatggtcttaatttccgtgagacaattagtaagcagtagaaagatttttcatcagtggatatctagactttgtgcccaacaatatcttacttacgtaatacactaaaagttttacctttccttcatcttacactagggcagagctgataggttttatgccctaaataaaattccatttcaatgtaatctattttat

SEQ ID NO: 230094 - DNA, 897 bp, Cannabis indica
cagtaccaccatctcagagaccagaatcaaccaccacgcaggttgtacaaaccagaaacaacccccacgcattgccactccctaactccttcttcttcctcggcttctcactctcctctcgcaacttttctcaggcgaaccgtttgctctcctcttcggttcgttttcaccgtcgtcagtctctgtcttgtccgaagaagtagaccgaaacctaagagtaagcaaaagaaaatcaaaggcagaaaaatcaccactaccattcccatttctaaaaatatatttattattcctaactgtgttttaggatctggggtttaatcggttcttgcacattcgtcgaaaatctgttcttacccgcgtagccaatatggttttcataaatatcctatgcaatttcagagatacgccatctctatcaagatctagattagggttttctgtttactctcatgggattgatctaggctactttgggtttgattgaattcctggttcagtcgtcttcgtcatcatgttgaagcaatttctgagtaaacttcccaggaagtcggcgaaatctgaatcggctgctaagcaggagtcgcctcgatcatgctcactgcgtttgcagtccaactccagggctggctcttcggggtctgggctcgacacttcgaaacccaatggcgatggtggtactgggttccgatggtggtgagttgccatgggtggtggtggtggtcaggtctgcaaatgaagatagaggaagaagaagaagaagaagaaggagggtggaagagaaagaggaaattagggaatttaggttttttttttaattttaaattttttaaaattgtttttttaattttttttaaaaagtattttttttttattttttatttttaaataattaatttt

SEQ ID NO: 230095 - DNA, 2724 bp, Cannabis indica
atattattaataatactgtatatattaaattgaattttaatttttttttattttatgaacaaaataaataaattaattaaaaaaagaaaaaaagaagatagcaagaatgtcattgttagacattaatacttgttggtaattaagtttttaattaaaaaatgtcaaaaaatatattcatgtcactagcataccattttttatagcgttccccattaattagccttctataaatgcaagagcttcacataacatttaattatcatatttttctttgtatcctcgtaatatggccaactagagttagatcaaagctgatcagtaactagagagctacagagagagaatattaatggaaggtgaaataaacaacttggtgatggtgtgcatcacggtggtggcatcactctgttactgtcacacaatcggtaacattatcacgccaggcacaaccaggctcataccaatcctccctgtcatacttgtcttcttggttttgcctctaaatctaaggaccatctttctgggaggaccaatttcattcttcgtggcttggctagccaacttcaaacttctactctttgcctacggtaaaggccctctttcctctaataatccactactaccactccctttgtctcgtttcatcaccttagcttccttcccaatcaaaattcaagatgacccaataaataaacaaaagaaatctctcacaaactacgccatcaaggcactcatattctctaccatcataccagttcagcaaaacaaatcttatataatttacccaaaagttttcttatctctccacttcatttacatctacacctttctagagatcatgctagccacggtggcagctttggtccgagccacgctcggggttgagctggagccacattttgaagagccgtacctttccacatcgctacaagacttctgggggaggagatggaatctcatggccagtgacagcctacgttccacggtgtacattccagttcggaccatgatgagccgttggatcgggaggaagtgggccccagtccccgcggtgatcccgacttttatggtgtctgggatcatacacgagtttattttctacaatttgggaagatcaaagcctacgtgggaagtaacgttgtttttcgttgtgcatggaatctgtttggctgctgagattgccgttaagaaggccattaacaggaagtggcggctgcctccgttggtgacggggtccatggcgctggcgtttgtcatgagcactgtcttgtggctcttcatgccggatcttatgagattagaagtcgatgtaaaggcccatagagagatgatagagtttcttgaatcaatcaaaatgactcgatatcaaataggatcaatataacagtgtatcattgtgcttgacagcgacttagcattcctcaaattaagaattcctctataaagaactatataatctttaagtgttgaagaaaaacaaatgttataattatatctacgtatgatatgtaatttaacttaagaatcattgtttgttcttccaacatgcatcttataagtacttattgtcatttaaaatatttaaattattttttatttaaatgttgagatttatatgtattatatgtagttaaaaatatagaagagatgtacgtacatataacaaataaaagttttttaaaaaataatataaaatgtagaaagtagaatttaattactacattttgttggaatttaattgacctactcttaattaaaaacataacattaatgtctccaggtcaagttaatgtctaaactaagtcaaccttggcctccatgtcccattcaaaacaaagcaataaaaacaaaaaacttgacctttcctacttttttctcctaatgagaagagtagtccattctcttatatattaccgtttatttttacatattagtaatgtgagattaactactctaatagattttaatcaaaatattactgttttgttgtgtaaatgttttagagtgtgtatcaattgattcaatcttattataactgactattgaacaataagtatattcaattgtgattggtttagattaatttatatcaggttgattttttttatttaagtatatatttatttattaagggcccgaaactcttatgctctcatttctttagggttggcttgcaacttgatgtgcattaaaatagtctcgaagatcatcccatttcgaaataaaattctcatttcaaaactaataagatatatttcaataataataatactaataataaaagaaatatatagatatactttgagtttttgatcctatagagttaataaaataggtatatataggataatttttaggtgagagcattatttttgctctcactcatgagagtattttttaaatctttaatttttgattatcatgagatatcacacatacatttttattatttatttttaattctcctataatacaggcatgatctaaattttttttttttacctttctaaaaatgaatacggtagtttttttttttgaaaaaaaaaatcctatattctaggcatgatctaatttttttaaaaaaattatttctacccaactctctatttaaattgtttccaacaaaattatttcaatttcactctctatgcaaattatttccaataaaaattattcaaattattcaaaaaaaaaaaagaagaaattagtatttctaaaaataaa

SEQ ID NO: 230096 - DNA, 1135 bp, Cannabis indica
ttttttttagtttttaactaattttttttttatttttttaataaaaggataaaatgggaagttcatgtaatcaatggaattaatttgtacaaattagtggagggtctaaattttgatattgtagattttattaagggacaaaaaaaaaatgaaatttcccattctaaatcattggtgttgatgaaaacgtgtagtattagctcctaaccaaacactaccaatttccttggccaccacttgcattgcaagcttagtgtactggttataatattctaaaaatatatatataacaaagcttatggtgcaccaccactgcatacacactgaattcaattctagaccaccatttccactgaacctacaggaaaggggatcagttggcaatccaatcaaccatatccagctcattttaaatatcaaaagcatcaacacacaggttccacttccaattgcttttattgctgcttctatgcactttagctacccaattttgttgtatttcttcattttgaatcttattgttaaatagaataattatacaaaaatacaataatatatgcttggtccaaaagatgtataatctcaaactaatacctctctccataataaaaacatgggcttaccagaattttttaccccataaattattgagtattaaccgctccgaatttttacagacatcccgagccacgtgtcaccataagaatggttggagcgtagtaagcctacaaaaagattgctgctgaaacagcatgattcttttctaaattaatatcatcatcttgattgaattgaaattctacactgtaaatggttgctcatgtatactacaaattacaatagctatggatgctaatgctacaatcattataacaggacatttattatctttaaaaacaatgtgacctcataattccattcatttctcaaacaaaaataacagaatgatctatgatatgcattgtctcaaaacagtcttaccaaacaaaaaatagcagatacaatttatgttattagttaaccaaaaaaacaactatttctcataaaaaaaaaaaacactttttttttacttcctttctgaattactttactcccatctcatttggcagagatcaatggcttaaaattgtcccac

SEQ ID NO: 230097 - DNA, 1100 bp, Cannabis indica
aaaatctaataattttataaaaactccaacaataaataacaaatatttttcaaaacaaaagataaacataacattataacatacatttcattcattattaattatcatcatttgtatcttccattccctatctcaaaagcaactctcaatttccctttctcacctcacctctctcaccccaccaaaacaaaatttccacctaaaacaaacaaaacatattcatatattgattttgatttatatatatatatgtatagtgtgtgtgagtgggtgtgtatatagagtgtatatagatagatattggatatgggtttttgtgggaaacaagatggaagaagattatagaagaaaaaactgatcttgtatatttattattgttgggtgtgggtttttctttctagagacaaaagtttgaattgaagaagaaaaaaatgccgataaagagtataatacatgatatgaggatgtcaaggtcgcagagggtagtgcaggacgtgtcgtcagctgcggcggcggtggtggatgggttgagccagagttgttgggcgaatatgcctcaggagctacttagagaggtgcttatcagaattgaagcgtctgagaccgcctggccgccaagaaagaacgtcgtcgcctgtgccggagtttgccggagctggagactgattactaaggagatcgttaagactcctgaactttctggaaccttgacctttcccatctctgttaaacaggtttgttttctgtttttctttttctttttacacaataaaaggaaaaaatgatcttgacttagtgagtagttattgttgtttttctcttatcaatttgttattaattttatgtgcatttggatttggatttggatttggattgagtctgttttgagttgctaagtatttggagaaagaggaaaaaaaactcttaatttaggtgctggatttgaatttggttttggattatcatgctagtaatgggtataattactaagatatcttatttaggggaaaattgattgaattgtttttccatcagctgaatttttctattttatcatatgtataatcattttttgtaattcaaaactataaaataggatc

SEQ ID NO: 230098 - DNA, 3383 bp, Cannabis indica
ataaacaaacaaacattcaagataaccaagattttaaatatactcgttgttcaatcctaaatcagccctaacacaagtatgagtaagtttgtaaaattctcttgttacaaatgggattgagagagtatgactaaacgacaacaggtttctaatacatgagagcaaatcactaattaccgaattgttacaaaactgactataaattttgtccaccaagctcttacaatccgactctatgacatgaacaggtaagttgattgcttgaatccactctaaagccacaagaagagctttagcctcagctacattccctgttgcaggagcaatgacacctgccataacattaccctaatcatcacgagctaccacaccaaaattgtgcttgagaagcattaatattgacaagccttaacatgagaaacattaacaactctacagaaaaaatactaagtatagtgcttgtttgtgcttgcttcttttctaatcaagtcttatatttgtaacaattcattttttaatatctaaaattttcacataaaaaatattttacattaattagtgtattttaacatacaaattcttctgtttatttttattctccttctgattgttattctgtttagaagcataattttttttattctttaattttccttagctttaatttattggacttattgtaagaaacataatgagcagattcattgttctccttttttagcttgcttttctcaactacacactaataagttaagttattgacgctccatgttttattataagtgttgtaagctgtcaggggtggagtaaggattaaatattaggggaccaataacaacacacctacaaaaataggacttcatgtttatgaattttggtgactgatatttttatttttagatagtgttgattatatttattggtgatccaatattattctcctacatttaatttaaaacttttataaatattataaattaaaataaatatatatgaatcaattaattaaaaaaatcatacatattttttaaatatctttaattcattatgttattaatcgatataagacaacacttatacatatttatttaactaatattatatatactatttgtttaaatgtaaataacattttatttgttagaaagaaaaattatattttattatttatactaaaatattattttttattcttttgaaatgaatagttaccaattcactgatttagtaaccaatttacctaatttattcctattgattttactatatttacattgacttttcaacttatttttctttattttcttttggctatagacataatattgattgctagttattattatatatcacttatctttgatttgtagaaagctaggggccaaggccactgtaagctttaatgtacatccgttctctataggctgttttgataacgctaaaagaagtaagaagtacataaagaactcgataaataaagttagagttcagaaaaggaatgttatgatccatcaatttgaattggacattcactaatttcagagtaaaatctcccaattcatcatacttaatgattatcattttatccataagatatcaaattttagcgcttttaccagtgtcatagaatattttacaatattgtaaaactctttggcatttgtagtctggcaaaccactcaatagatatttaagaatagatcttttcatagcaaggaggctaagacaacttaacttttcccactgtgcatgaagagttctcttgatggttatactagtgtcagtaaaatcaccaagtttttttttttctcacatgcacaagtccaaatccattataatctccccttaatttgaggtgagaatataacacatgatctactttcataaatttaacaatacagaaaatacatattaattaagaatttattacctttaggtaaataaatttcttaaacaatatatattaattcaagcacaaaaaaataataataaatatatatatttaaattattacttttgggtaaataattgaaatattcacatataatattaactcacttcatggaatgtgaactaacatatgttattactagctttgggcaagtaattacttatatagtcagccaaaaaaaataattttttttacaacatataaaatttggtgataaaacaattattgaaaattcttgtaatatattgataatcaaaaataaaatgtctaccataatatattattttgcatcaaacaatcaagttttacaaatttaaagcaaaacctaatagaaagatgtgaaagtaagaatattggtagagactatataacaaaaaaaatcaaattaagtgagtgattatgtcaaacagaaggagaaaaaacccaatttttttcatgatttatagatttcaaaaaaatttcaaaaattatttttagtaatgtttttaacttccttattattattaaattaataataattattaaacggagttaaaaaattaatgaaaaatcataaatgaaattctaagtatgttggaaaaaaaattgtacgaaaaatgatgttgggaggagctgcacgtgccctcacgcgccacgactgcaagtgggcttcactaggaaaggttgtcttcaaccttgatctgggtcgataggcaagtcacgtgacttgatatcaggtcgatcaggtctgatgaaaaatttatactaaaaaaattgacacaaaaaaccttggcaaattaaggggtgtttctcggaaattagagttctaatcaatctattgtattaaattttgggtaaaaaacttctaaaaattttgttaaatctgactatgctattgttattccaaattttttcacttgacgttgcatgtccacataagccaagactgaggacacgtggaatgcagccttgtcaatagtaggacaaatttcatgcaaggcatggcaaaacaatcaagcgacaagcgagaggagttaagcaagtagtcaaagagctacacaacaaccaacaaaaggttgtacataggttggccaggaggagcttgtatggtcggccagggtttgagcacaagctggccggccaaaagggtgattgtccaaccaaagagggcccattcaactaaggtaacatgaccttttcaaggaaagttgttcaaatgcttgacaacacctactaaggctggccaacacatacaaaggctggccaacatttgggaaagctgcgaggaacatgacctcccaaaccttggtaggaacttggctagccaaaccctcgaatgaaaatatccggtaaaaccatggtaggaacatggccggtaagaccctggcgggacatggccagccagacctagtaggcacctggcctgccagacctcagcctgtagacattgtgt

SEQ ID NO: 230099 - DNA, 713 bp, Cannabis indica
aaaataaaaatgcatcttgtgattgtcggttttgagttgtttatcctgttcatcatccttatttcttatcatcattgatcgatttgaatttcaacacagaagaatataatcatcccaatgtaacttgtaccaaagtgtcatatctaatcttaagatatcgttatcctaagttgtatatggtatcgtaccctacttgtttgttcgttaatttgttgtgggccggtttttatgaaacaatataatcttcacacttaattcatatgataaaaacattcctaacatgctaatcttcttaatcaactaaaacataccaaatggtattccatattatttgatgacacgtgtatgtattaacttagaggggtgtgattaggaaggagaaattggcatatggaaaatgggtttttatgattcaccaacagtcttgttaagtgacaataaataaaaatgtaaatacatatgaataaatataatagtagtggttagctagaagaaaacccaccagccatgacaaattcatttgaatgttgactagcttcgttgagaataatatatccaatctctctctattcattatgtaaagtcaagatcttggtccctattgaatccatttattaattgcctgtgatgagtgcagtagtattagtaatacactactactgctactgtatatatgcattatgtatatatatgtgactattgtataaccatta

SEQ ID NO: 230100 - DNA, 1189 bp, Cannabis indica
atcgtgttctcaacactataaatgtttactgagattttaaaaaactaatcaaattaaagctttagcaattaaataacggttaaataaatgagacgaaggattttacttggtttgggcgtaattatccctagtccacgagtcagtacatattggccttgtaggtgtaaaaatatattacaagtggtgtttacaatgaaacccttactctggttctcttagttcctcttgaagaaaatgaaagcttagagagtattttagcagagcttcgactatgtaatttttgatccccttttttgaataaataaaggagtttatatagactaaagtacgggtataggcatacccataactcacttagggttttttgcaaaaaactcacactctattggggtaagatacataagaatacgcattattgggcccctaagaaggctcttcttgtgaggtgaagggtccgtatagctgggaccactgttggtgcaggacgtgtgtcgggcggaggttgcacctagtagacaaaaccctctgaggagtcgtcagactaaaaggcgtattcataggtggtacgcgaactaccatggtctgacacaggggacaagatctgatcatatgtgtcataaaagtataaccatcacaagagtcatacgactatcgcttcatgataagcttctgattttccttgtgcaattgacatcctccttatacccttcttatgaatcccatgtgtctccctattagcttagttgatttggtctacttcgggtcctgaatggatgacagggcttccaggtcccagacggtaatttcccttgtggtaaatttttgggcctttctaggatttagacctctccaaaatttgtttagtctttccgcgactttctccaattaaggggacttaattggtagttacttaggccattgccttctaccttttgtcacgtgtccttcatcctgaaacgtggataatatttatccccaagcttttcggactcttgagtggtggaagcttgcagtctccttcaagattaccagggtacacttgggatacgtgggcaaatcttgagaatgtaggagcatctctttcatcctgcacttagtagttgagagatcaaaaacttttatagtaaacaactggtagtgcacacttgtcatacatccttcggatctgtgaatagtacgtgcatgcagg

SEQ ID NO: 230101 - DNA, 1768 bp, Cannabis indica
caataaacaagaacataaatgtgatcagggtttggatgaatttataaatcaaataaacatataaatgataacatgaaccaaatgacacattaaataagtgatgaaaatacttcggtcactttattgatatttagatgatagagattacattgaaatagggttttaatttagggcatgaagcccaacattggagacccttgatccgtccatcaattttaggcaaaaagtaccttgtcccactttctcgagtatctcgtaagggccttcccaattttggccaagcacccccactcccaattcctgggaagccgggaatactctttgcaggacaacctcactgatattgaaggaacaacttttcacctttgacttgaagtgacgggcgatctttccttggtacattttgagctagacttgcggttgttcccgtagctcttctgtcatgtctagtgagtcctagtttagagagtggttgcgagaagggtcgtaaggatctcactgatgggataggaccatggtctctactgggattacttccttgcacccataggccattttgtacgacatatgccccgttaaaattctttctttcattctataagcctagctaacttgagggacttcctctggccattgagctttacaagcttgcatcttcttctacaacgtggtcttgaggattttgttgacagcctatacttgtccattggcctgtggtcgggctactacaaagaaacttttcacgattctgtgttgtacctagaagtttgtgaaatgttgactgtcgaaatgcttctcgttgtctgacacaatattataggggagtccatattggcaaacaatgtttttgacaacaaaatctagtgccttctttgaggtaatcgtattaataggttcaacctcgacccattttgtgatgtagtcaacaacgataatggcataattcactatgccattacttacagggagagaacctactaaaatgatgccccaaactgaaaaaggccaaggacttctcacttgtgtgattttagtgtgtggtgcacacaggactttagcgaatctctgacatatggccgcacttctttagatattccatgtaatccttcttcatggtggtctagaaatacccttaccgttggattttcttggaaacgcttggtctaaaagtatgatcttcatagaaaccttcatggagctcatggattacctcgctaatctccatcccagtaatgcacctcaaatatggcatagacaaccccttacgatatagcttcccatccatgatcacataacgaagagcttgatattggctttttctgcaggtagcccgatcagtagggacttcccccgtgctcaagaactggtaaataggtgctatccaagagtgtgaattatccattatggcattcaccccgtggacgtcaatgctaaatttttacagatgaccagcaaggagtattgcgtgttctacgatctctatatctatggccagcttagctagcatgtcggcaaatgaattttgttcccttggcatgtgtcatatgtcgtaactcttaaatattggaaacaattctcgcgacattaggaaataggcagccgttagctcgccttttgtctgatactcactggatatctgattcaccaccagttgggaatcactgtaaatattcacctattgggctcctacttcttttgttaacttcaaacctgccaactgttgggttttatgccctaaataaaactctttacaatctgattagttatc

SEQ ID NO: 230102 - DNA, 1125 bp, Cannabis indica
ggcatacttgcctacttttgacaaggccttgtagttggtgtcacctagccattggcgaccaagctggctgaaatagagatacctggttctactctgcttcagccaaactttaacttaaaaaagtacccaatatcataaggggtaggcggaggccaaccaagctccctatacaaaatgaacatcgtcgacagatatttaatgctcttcggcatgagctgtgttgggcacatctcgaagtaggctgcgacatccaagaagtaatgatgaagtggaaacactgccccatgctctatgtggcaccctgaccatgccagctagcccacagggggcctgtgtgccctacagttcttgcgaggaatctcacaatgaacacccccaataaggccactagtaatgaccttgtcaaaggcctcattagaaagagcaaaagctggcaaaacccaccttgtcttaggtggcttcaaatccaatatgtccggcatgggagattcttttaggacatgatctagtcctactactgaaggcgcgccaagaccattcatcgaattgcctcgcatgtcataatgacctaaaagatggttagggaggataaaacatgtcatttatctccttcccctcactggagcggccttctctaactcgaactctgtatcggagcttccagtcttcgagttcgcttctaactcaacttggataggagcccaaggaggctcctcctccactctaatccaaccccttgtggccaccatggccacatggggatcatacgggggtgccttacgcaaagtctattttattcttgccataaatacgagacgaacagaagacctacacagttgtcacctccccagctcaacactgagcactacctgcatggaagaaacaaggggaggtgaacaatctgacaaagctacaagtatatccaagtcaacgacactcaacggcatcttttaggaaaaataaaggatacaaggtcgaccaacgaccaagtattgtcttaggtgcaattaccaagacacacagtaagtcctaagttgcacaattaactataatggactcattatctagccttatacagagttcccaatggaaaccacgcattaggccacaattgtatatgcctcc

SEQ ID NO: 230103 - DNA, 815 bp, Cannabis indica
caacttataattttcatggctgcaggcggggctgctggtgcgcaacctccgctgaaatcgcactcttattttcagctgaatcctgtgaagaacgagaaacaggctgaataattatctcctccgtatcaatgatttcctttttattacctcggcatcttttaagaacactgcgtaggttttcagtatcaatttgtctcttaaagcttttaccataatcacccaactcaatagactcatcacttgtcataatagctttgcctttgtttatcaaaacggggctgctgtcagcaggttttggtagaataggatgggcaggatagtttgcaatggactcagtattcagggagtttttttgtggcaaatgaattggtgtagtaggaacaggtgtgggaatgggatttttggaaccactagccgaatggaaagttgttggtatatatgaaggaaatggtaatggcatttcaggactttggttgttgttggggacattcgattgatctggtatattagattctgcaatagtaagaggcttaggttgtgggattgcacctatggctatgttggggtttgtataaagtgcaggaagagtagaggcaatagttttcttggccaaacgggtgaggaaaggataggcattagcttttgaaaaatcattacgatacctgtcataaccagccttaggaagtttatccccgatcatttgaggaccatatggcaaatcaggatcctcaccgttgtcaaccaattccagaaatgccttgcacttatcaaaagggtgacccagaatgccacaatggaagcagaaagtagggaga

SEQ ID NO: 230104 - DNA, 982 bp, Cannabis indica
tatgaggcacgctgaaaaagatgagatgcggttgaactacaaactctctatgcataggaaatgttagacttctttcattttcagtagttgttaaaagtcatgctgtttatgggtaatgtaattaatgtgacttgtttagaccagaaccgtgaaattgagtgatggcacaattttcaaaaaaagaaattattagataattccatgtaattattatcctaggtttagatttcatgcgtactgccgagactactttctgttggctaccttatccgccttgacttttcaattccaattgtggcttttctctacaggtgtttcagatgcaaaatcctacgtcataatgagtaaattaccgggtgatgcttataaaaaatatgttgaggatgcaaatacggctcacttgtctggtttcacttttgttgtaattagtattgtacatcttgctggtggaaaagttgctgaaggtatggaaacttgctgatttttcattattcataaatacaaattatgtaattttcggaagcatgaggaactctgggttagaagctcttttccgcctagaaaccacatttcttttccttttctctttttttggaccttcatcttaaaatgccctgataatctggttggtggactctaccacctcattgtatagtaaggtattaacttactgtaacatattagacttcgatgcccaataaaaagcgtttcagtcttactaggaaactattctctatgttattaacttgtatttttctattataatagaatgcaacttgtatttctctaatattagagaattttgtttttgtgatgttcgaactgcagaggccctttggcatcaattaaggcggttgggattggatgaacgtagtgaaagccatcctgtccttggaaatgctaagcaggcattagaaacacttgtccagcaaaggttagaattttctgctgcgaagaattgtttgctagaatgctttcagct

SEQ ID NO: 230105 - DNA, 913 bp, Cannabis indica
tgaaataaccatgaagtataagcgcaaaaacaaaatacattcaaaatcacatcaaagttatctcttatatattctttgtaaaacaaaacttatacatctttttggcaaaacaaaaaattatatctttagtttgtggcagtaggagataattactatttataagaataagctattcactaaaaattatttttagtcctttaccaatttctttctccttacaaaaaaaaaaaaacctttaatttctttctttatttaaataatgataaacctcatattagtcattggatgacaaagaaagaggaaattattttcattttattgattttaatttagaagataaagtgtggagtttggatttattctgatccactatttattttcctccaaaaatatataattttgaatttattggaataagattctgataaagttgagtgggttagaagtaggtagagatgatgacaggggagagtgagtgagtgatatatccactagagaagaagtgatgatatgatgatattaatatatgcccaaaaggaaaagcctttattggtaaggaaaggtaaagagtaagggtgtcttttttttttctcacttatataaataaatatatataaggttgagtattcaatggttacaataaaaatgtaatcacgatggttatacttttttataacttactataacagataaactttctatttttagacttaactaaattaatttttcaattaaaatatttaataaactttttagtaaattaatataatttttatttaaaaaactaaaatcaaatcaggttagtatcaggttacctgtaatttattaattattttagtaaatttttaaattaatcgtaaccgtcaaataatgattcaccaactaaatataaatgtaactattatagttacat

SEQ ID NO: 230106 - DNA, 917 bp, Cannabis indica
atattattataactcataaattaaatttcacactaaaaaatataatcataatttatgtaatactctctttattttattaattaaatagtaataatgtattaaacaataataataatatttaaaaataattacaaaacataatacacatgactaatcattaattatacactaaacataagtattaataaatataacatttaattagcatatgcaagaggtatattgtgttaaacataacatttgtttattctccatgccaaatttagtacaatatttacatcttggagattgtcttatattttagtgtaatatttgcaattatacttcaatgcacaataacatttttaagacaaattgatctaaaagtaaaataacaaaaaaaatatttaaaaaattattaataaaaatattgtaaataaaatatagaaaaatttatataattgacaaaaatttataaataaaaattacaaaaatgcttcaacacggaaaatatttcattttttacattttgaattttttttatttataaaaatacatctttagtaaaaataataaactatttgtttcagttgttttatagtttatttatagttgtattatagttgtcatgagattattttttggtcattttatagtttatttatagttattgtaaggttgagttatcgttattttttactttttgttgagcaaaatgtatttttgtttaaaatgtctttacaagtgtatttttgtaaataaaaattttttatcgtaaaattgtacatgctctccttacatgtccttttgctatgtcatgctggcatactcttggtatcacttatgacacgcttcatcccttatcttttggcggttggtttgagaaagtactgacggctcttgatgaggagattgtctcacgggcagctatgctttgt

SEQ ID NO: 230107 - DNA, 1276 bp, Cannabis indica
tagtgttctatattataagcctttcttgttccaaatatacatatagtatgaaccattatgaaaaaaaaaaaaaaaagctaagttatataggtagacgtacacaatattattttaagtgagagtattacttttttccttacaagtaaggacacttttgtagctattaattctgaatctaattttaataattaatttaattataattgataccttatattagattaataatttttttattattatttaaataaattatatacacacccacctaatgtagtttatttaaaaataaaatcgtataacgaatacaactaatgtaaaaactcttatttacttaatttcgaagattgataacctaattactgttgtggaattttgtcttattagtccttgtaatgtgttttacaagattattaccaaggctatgactaaccacatgtgtgatcttttgggtcatattatttctgaagagcaaagtatctttctcccttagcgtcttatcacagacaatgctctcattgattttgaatgtattaatgctcttaagaaaaaaaatgggagggtttttgtgccctcaaattggacatgtctaaaacctatgatcgtgttgagtggtgtaatctcaaacaagttatgttgaagcatggcttccatggtaattgggtaaggaatattatggattgcagatcttctgtggaatactcggtgttattaaatggtgagtgggctctattattccacaataggggcttcgacaggggatcccatgtcatcttatcttttttttactttgtgtcgaagttctttggagtttagttaaaattagaaattgtgagaataaattattgtttggccttccctatggtctcagtggtcctattattacgtggatgatagtatgttcttttttaaggcttctgatgtgtgttgtgttagattcaagcaactcttgagctggtatggttcagcctcaggccaattggataattttgacaagtctgttgtttgctttagccccaatatttcgaattttgagaaagctaaactagtggagttgttaggcgttaagggagtttatttccataaaagttacttgggcctcccttatttcgcgggccatagcaagaggtgtttgtttcacacaatttgcgatagaatttggacaaaacttaatggtattggatgtcgaaactgttctccatggctcgtcgtgaggatcttatcaaggcatgaagttatttaatccattctagcttatcttatgaaccttattaag

SEQ ID NO: 230108 - DNA, 1574 bp, Cannabis indica
gaaggagaatcgggctcaagaagaagagaaagagatccaggttcagatcttgataatgctctgctacagaaaggaataaagggctagagatctgaacggaaggagtcattatattcagcttcacccaatgtaaggttttcttaaacccttatgtgtttatttcattgttttagaaattcatattaggattttaatgaaacatacttgttagtaaatctagatcccggtaacatatttccaacatatgcgacatacaacctcacctgattaggctatatgatatactgaattcagattgtgcaatgggttttcctgttcggcaatgtaatatataagtacacctaattaggtgatatgatgccaaactatggcataggcttgtttgataaggtgattggttatacgaatgccaaatttttatatagcttgcctgattaggcaatgcgatatatatgataaatgccaggctatggcataaacttgtttgaataggttatgtgatatatggatactgacattcaggttgcacctaaggggcaaccattataacatcatgattacatatcaaaccgttgttaggtttccaacagcaccataccttattagatacgggcgacaataatatgaaaattcctacttctggtttagattgaaattattgttaggcttccaactcgcgacgtaccttattagatacgggcaacagtgatatgaaaaagcctggttgtggcatagatcaaaaccactgttaggtttccaactggtagcataccttattagatacggggacagtaatatgaaaatgcctagttatgacatttatcaaaacttctgttaggtttccaactgtcagcgtaccttattagatacgggcggcaataatatgaaattgccaggttattgcatagaatgaaaccgttgtagggtttcctcctagtgacatattgggcataggtacggacgtcagtgacatatgatcgtaggtatgtgctcatctgattaggcgatgtgatatattggtgccaggtcgtggtacgagctcatttgattaggtggtgcaatggtattatatatcatattgcattatagtacacaggcttgcctgattaggcaatgcaaatgtatgagcatatatatttctatgtgtatggacggttatattaccttctatttaatgttatggtgtaattattttataataatgaaatgtatgattagttattgaatgcatcttttcttatcacttttcttgcttagtctatgtgactcacgggtgctctatggtgcaggtaagggtaaggaatagttagaataacaatgagatgacaatcttctccagcaatgtacatattgacctcactggcctgcgtgccatgctgccatgagttgttttgggctgtatctattgtatgttttggttttaagtttttgaggtgttgatgtatacagtccttttgtaaaactttttataacagggtttcttagaacacctttttactatccttataatgtctgtttttagtgttttatttttgtgaagtttttaatattctcatagtttttaataattaatt

SEQ ID NO: 230109 - DNA, 1329 bp, Cannabis indica
taattagaaagttactgtagcgtgcctaagcaatatggtgatatagatttgttaacatcagcattattaaatggacgaaccaacttaacttgctgaagtaaattcagcttacagccattctccaaacattcaatcttaatcctcctagttgttgtactttctttcccataaagtttctaaaatggaggagaaaatgctcaacaactttaggatgatcatcaactattacatcattcacatagtaggaaacaatcctattctcaatctttcttttcttcataacagcatggaagtagctagtattttcatctccaaatctcaaccacgtaatcttagaattctgatggagatagctagcatactaattttgggctgaaaaatacctctattgaagactttttttaatttgaatcaacactgaacaagaagggttggtagcaagattatcttgagctataatataggtttccttaaattctctatacatggttgtaacatcacctttctctttagcaaagaaaccttttcaagacatgtttaactctaaaaagattttgagaaattcctttaagatcaacatgccttgaaattccatgccaacctttaagaatagcctctttgtagccatctttctgcatccagtaattacaaaatataaaaggtcaagtaccataattacccacctcaaaattcttaatgaggcagtagctataattcgagatagctccccatctaaagctggaatcaatattaggggaattatctgaccaactctcattggtaaaaactctatcaagctcagagtaattctcactcccccatcatgcttattagaccaagtataatgagcacccgaacaattgagctcatcaacttaacccatagcaatcttgagcatcttgaatttctttagccgtgacttgcctaccaacacatatgtccttataattgaacatagcattgaagtccccaaggatgatccaaggtttattccagtgacctaaaccagccagcttggtccagagatcttttccctcattcaaacaattactctcataaatagttgttaagaaaaagtctttcttatacccaaccatgtttatcttacaggataaatttcacatcttctaataaaatctccaccttgaccaacttgtctagccaaatcaacattattttataagaaacgacctgactagaataaaaattatagttaagaaaattattcataatcacactatgagttttatcatggttaattttggtctcaaaaagagcacaaaatccaacttttttatccttgcaaatttttagcaactctaattgctt

SEQ ID NO: 230110 - DNA, 1034 bp, Cannabis indica
atagttaatgggcttagcatctgagtgtaaagtctaattgaagcaaaagtatgtgcttttctagttaactgaagcttttgatgagcagatcaatccagctagggttatgtagttaagtcccttctctaactctataaatacatattcttttatcacaattgaatacttttgatagtcagataaataaatttgattttggtttagagacctaggaagaaaattttagttgatagtattaaattatcaaattgtgataattgttatggatcaatcagacatgtatacctaataattatctaattattattatattatatacaaatttgtatcttagttttagttaattttctaacaattgacacacgagctgtgccactctcctagtggtaaaactctcccaaatacatcatgggcaatgccactacctatggtccttcgctcgcccaaatccttatcctccaaaagaagaagctcatagatacatattagacttatcttgaagatatgcttttataagaaatttattacttactaagaataaatgaatatttttagaaaatcacattgaatgaaatttattacctttattcaatgagagaatcaaggtacgaagtaaatgctcaagttgtaaatggaaattctagtcctaggtcgaaaaaggactctaaaatctcttctctcacacatttctttgagccgcacaaagaaacctaagtctccatgttggaaaattattatgctcccatagaagtatcaaaccaacaaaattacaactcaatgacaaataatacaaaggacaaaattatgtattaaataatgttacaacactaaacaaaatatacaaataaaatagagaatagagatgaagagagtgattacaactcaaagcaataagctacacatgaaacacaatatataaatagcatatatataaaagagatgtgagagcaatctcaacaccacatacaccacaagtgtataataggagaatcacaaaacatgaacaagatcttacacctttgtccaaaagctta

SEQ ID NO: 230111 - DNA, 904 bp, Cannabis indica
gtatatttctaaacctttacttgatttaaaatgggtttttgatcttaaatgctagattgttaggaatgaattagatcatgttttttggtttgggttgagtttgcatgtttacgatttaaaatctgcaagtttgcttgttatcaacatttggcgactatgttcgtgacgtttattgatttctttttccagatacaacaaaatgtagtagttgtttgtttttgtgatgtcaatctgtgacatgtttagtcttgatgctgtctaacatcataaatattgtcacgagatatcgcaaaaaaatttgttgtgtttggtatttttttgttaggtattttttattgggtgtttggtataggctgctatagttcacgacatgtgacgacttgtttgttgacatttcatgacagcttagggaatattttctacagattatgtgtatttttttcgcgattactatcgatatatgacgacttagtttccgatatgttacgatttattttacaacatttatcgacatgtttttcatgtgtttaataatagttggtctttttttttcataaaatttgtagatggcttctgaactaagttgtctgtgtccgagcatttcataggtcgtcttacctatcggggctgagataggtttaaggatattaaagccaagtttgaagcaatgaatttaactgaaaaggtttttgccagcccttttggaccattctgggaagctaaagaattgactttctcgggcacattggtccacagtctaccagaagatgaaagttgaaacggagaaggaagatgagattgttggaaatattttaccaagatctagatttaacaagtatgttgaattaacatcctaaatatgaatatctccaaaaataattaaagtaaacacataagagtttag

SEQ ID NO: 230112 - DNA, 1354 bp, Cannabis indica
gaatttgtgtgtttatttatgtacatattattactcctaaatgattttagacatataacttctctttttctcattttcttttttctaaaaaatgacctcattaaatatgaatagagtaattagttttaccaacaatattattaacaatcttatgataatacatgaaagaaaaaacaaaaaaagtgattataataaacaaaaatatctctaacaatacactatataaaaataattaattgtataattaagaacagaatggataacagtattacataaactcattttgggtgattattaactaatgaatattgaaccctttattggtttatgtatgtgacatctaacaagagaggcctcaaacacataaaagcaatattaaatgcaatttcatgtcaaattttgagtacttcttttgcatgaaaaatgcaaatgtgatgtacacaacaatagttaataatgtcattgagcttaaacctttttttgtttgtggtcccttatgggtgttagtgatgagttgttaattttatcttgcgtgtagtctttatagacttagaatataggggattgttatcggacatcagtggtatctagcatttttaaatttgtcgccttgcgattagttggcgatactccttaaaatttattatattaaattatatggaacttgatacttaattggaccaatagcgataatgacacatagaagggtactaggcaccattagtgccttttaatatttttgtataatataatattcttgaaccaatacgataaaagtaagagaattgttaaaaagtattattggtactcttctcgatgtcatatttttattggtataattaaatattaagtttcatataatttaaaaaataatttttagaaaaatataattaaccaatcgtaaaattaatgttaactataaaaagtattgaatattaccaatgccaaataagaatgttgtaaaagtaattgttcttattactctatttcactacccttttacttggaagttgtgtttgggacttttctaaaataaatgtatcaccttaatattttatattttaattttttatattagaaaagaggaaaaatctttcaaatataggtttagtttttttttgttgtttttctttttttctctaaaaaaaaagaacaaaaagacaatggtaataatttgtaattaatttggtacccatataatatatgctgacacggctgccttgtacatgttccaacaaagttcgtaaagtatcctttcttaataagtattgatattggatattaataatatctagcaactttatatatatcgttagtcttgtaattggttaatgatatttttttaaaaattatt

SEQ ID NO: 230113 - DNA, 1059 bp, Cannabis indica
tatattagcaggtttatgactgaggctacaaaagaaggggctgactgaagaaggaagactggctgtaatactggggggtatcgagcctctcggagaattgtggaaggatatcaaaaggctaactatgggatcaatgactgaattcctagatcgagtagatgggttcattaaggtcgaagaagctattcggcgtgtggatactgacgggcaaaagaaaaatcaaccacgtgccactttggtgaggatgtccgtccagaatctacaatatcctagcagtttgaatttaattgggaagaggtctaacaacagcaacatgcagggtaatagaaagaaaggtaaattcactggcaatgccgagcagcaccccagggagaaggcctctaaatttactagcttctcaatcctaacagatgacatagagacaatctatgcaaaattcaatctatgatgcaatacaaaaaactttctcccatgaaaaaggatgcaactaagagacacatctaagttttgtcgcattcatgcagactacggccacaacacaaacgaatgtaataatctgaagcgagaaattgagtttttgataagaaataataacccgcacttacaaaagtacgtcaaggccaatctagatcaaaagaacttcgtggtgaaaaatatctcatgtcggtttgaactttcgcacaagattgttttggataatgcaaatagtttgatagcaagatgtttacagatttttgtgcgacacatggaatcataaaaagtttctctacagtggcacaccctcaaacaaatggtcaggtcgaggaattcaacaagacactctaaaacaccataaaaaatgacttaaagaagccaaagggaattggctgaaaaactacctgaagtattgtggtcatatcgaacaacggagaaaatagcaaccgagcagacaccattcactatggcttacgactacgaagcaatgttactcgtagagttagaacctctgtcccacaagatactaacctacaatcaagaacctccgtccttttccctttgtagggtcacgaggtggtctag

SEQ ID NO: 230114 - DNA, 1380 bp, Cannabis indica
acacatgagacaaaactgccctaaaaagtttagacaataaagctatgatatcctctaacagcacacccatctcatttgcgaacaccttcctgttattgatagtcataactacgaagagagaatcagatttaaccgcttctaggggaatcccacacgaatgagcccaatttagcccagtcagtagggcaaaagtttcagcttgaaaaacaataatactacctgtaaagaaccaaacaacagacaaacaaaaccccattattacagtctggtgaacatcctattcacaaaactagagaaaagcaataaagatactaaataatcgaacgaaactcctctaacaccaaattaaaattaaagtaaagcaataaaagaaaaacaactttaaacaccccatactaaccaaagtccaacactttgataagtaactgataaaattataatttgtgtacaaactgagcaatgagacagaacataaactatactactctactttgaatcctttggttagtcgtagttttttagtgcgatgtaattgaattgtcaaactcctcaacattttagagatactattgttcactatatgaaaataataaacactaaaattaatctacaatactaatctcgtaatggtttgcttaacgcagccattactgtaagatttgttggcataataatggctcccacaccaaataacttagattcctttaagacagctgcatccacgaacaaagtggaaccagtgattgtgtaaggatccctttgagcaggagagtagttagaaacccccacctcactcatagtcaaattttctttattagctccttcgttaaatcaacagagtcatagaaacttgtgatccaaccaattatttgtttcgggtgtttttaaagatcatcgtgcgtcatcttatttctttccgtccatattgcccatgaaataataatcaatctttcaaaagaatttttctccactatctcagaagcatagattattacttgcttaaaagataaatcttcttttgcctcgtggaggaaagggtaatctaataaagtccaaattccttgagcccatggacaccaaaaattgcatgtgaatttgaatcactctcataaccacaaatagtatagttgttatgaggaacaaccttacgccgaaataagccaccattcgagggtagaatctcatggaaatctcgccatgcaaaataaagaattttccgcgaaatttttaaaccccaaaattttctccaccatattgagaacacctcactagaagaccttacttgccaaccaacttgagcaagatatttaattctactcaatgataagtttgagaaagggatataactctattcaacgctcaaaacttaagcaagagatt

SEQ ID NO: 230115 - DNA, 765 bp, Cannabis indica
cccgaagagatgttcctcattagctctctctctttaaatcttgaattttcccatttaatttcaatgtatttattctgcatattactttattttttttaactagtttatgttaatttttattttggcaaagtgggtaatatatattaatatatatattgtatatataaggattagtcttgattatggaccctaatagagtctgtaccgtacaaacttaaatgtctcatcatgatattaatctgcttgtccaattaggttttttgtatttccaatcattataccatgattttaataacgtcttcaccatttagaagaaaagaaagaaagaaacatcatcttcaccgcatttcaattaggattttttttaattctctctcattgtgatattaaataaattacaaaaataaaggattttcactaccccatggttgaaccctatagagagccaagctcttcatgagcttttccaatttaagtctaattgacttaagttggaccctttaattttttacttttatataacttacataactatgccatcactactaaaaaaattggcctatctcggcagttctttgtgtaactatcgatattgattccaatctcgatggttgcacacggaaccgccgagattggttatgttttctttttagaaaaaaggaaaaaattgattttaggacccaatgttggtggttcccgtttacaaatcagtgtcctatctcggcggtgggttcataagggaacgacggagattggatccccatg

SEQ ID NO: 230116 - DNA, 1091 bp, Cannabis indica
gtaaaataaatttccaacatttaccccccaacacttttctggtcaggctattaattttccatcttttctgaatctcaatgccaatttcactagaccttttgctcctcaaccatctgatgctttgtcatgatgcctaccccattaaatcccaatctttcaaatgttagcccaccctatactagacccacctttaacatttcattgaggccctctgcttttacttcatactcgactgactctaatattgtggctgctagccaaactatccctgtgaccgctctgcctgctggtttctcttcccatgaggttgttagccatgttagtcaaatggatgttttgtcttttgcccctgctgatagtactagcatggacgttaacctctcccagggtcaacctggtcctgatgttcgtgggaaaggtttggcctctgcttctggtgtaaagcggccttcattccagcctcaccttgctgtggttggaagctctatgaggtctcaactcaagcgtgctcgctctagtgatagggaggatgagtcttctgttggtactgctcatgtggaacaggcaggtgatgctttgcacacccgctcagaaaaatgagtctattaagctggaatgcacgtggattggggagtacgcgtgcattcaggagactctccctgttggtgaaagagcaatgtcctaaggtggtttttttgatggaaactcggttgcgtgccagggctatagattgagttagagttgctttggcttttgacaatggtgtggaggtccctcggaagaatttatgtaaatattttatccttttctagtagccatattgactgtaatataagttttaaggataatgatatgtttcattttactggtttttatggttgtccttcttcttcctctcgatctgttacttagaatttattggataaacttttttatacctcccttaatctaccttggcttattatgggagattttaacagttttttgggttttgatgataaaactggtagtaattattataaccttactgatatgtatcaatttgctcaatttcttcataaatttagtctttctcctcttaattttgaagg

SEQ ID NO: 230117 - DNA, 1105 bp, Cannabis indica
gaatataatttgcttggtcccaaatgtattcttggatagaggttttattgtattatttgatacaaaactatgtttgttattgacatatatagtgttaataggttgtataaaattataatatatttaccataatacttgaccacaaccctgaccatagacccagatcccatctctggcacaaggcctcaaacatcgagtcgaacccagaccccatccctaaaccctaagtctggggctaaggtttcggagtcaaggttagagtctgggtttaggtcaaggtctaggtccaagtgcgagtccgggcccaaggcttgggttcgagtctgatattgggtccggatttgggttaggttcgatgccgggatgtaggtttaggttcgagtctacgtccggctcttgatctaggtctaggtttgggttagggtcggggtctgaggtttaaggtctggagtctaaggtccaggtctggattgaggtctgggtcatgtccggtccgggactagggctgggtctgggtctgagttgaggtcaggggtcggatccggtccaggactagggctgcgtttgggtctgggtttgggtttacgtctggatttggggtccaaggttaggggtccagggaccggtgtttggagttgggtccggggatatgttgaggctgggtttgggttttgatccaggtaatgtcaagttaggttcgatgctggatacgagtttagggtcggggatcgaggtccatgttcgagtctaggtccgagtcttggtctcggtccgggtctgggttggggtttggggtccggggtccaaggtctaggtccgggttgagattcagggtcaggtttgggtccggggctggggcggggaccgtctgggtctgggttcgagtttagtttcgagtcagagcttgaggctggtttgaggtctaggtgggggtcaagggtctagggtctggggtctggtttgggtccgggtacgggttcgggttcgggtcggagtttgggtccggttcagggtatagcttagggtcaggggttaggagtccaaggtctggggtctaggattcaggtccgggctgaggcccaggatctggggccgggtgtggggc

SEQ ID NO: 230118 - DNA, 1102 bp, Cannabis indica
caacacttgcttaatgtggctagagctttactttttcagtcatatattcctttatgttattggaatcattgtgttggtgcagctgcctatctcattaataggacaccctcacccaaccttcaacataaaaccccttatgagattttaaatggtcagccccccaactatgaacacttgaaagcttttggttgtttagcatatgtgtccactcttagttcctctagaactaaattttctccaagggctgttccttgtgtttttcttggatatcctcatggtatgaaggcatacaagtttttggatctcaacactaatcgtattttttgtagcagggatgcaatatttcatgaacatttatttccttttgttcaatctgctggtatacccgattctcaccataactttctttctgatttttcacatgctgacatgtcttctgatatcacacatagcagcactaatatcatgccatctgatattaccaacaccagcagtgatgttccatctaattctgttcccagcaccactaccattcatgatcctgctagatcaaaatctgtttccagaaccagacctacccgaaaccatcataagccttcatatctcactgactatcattgttttcttactaaattttctgctggtatgttttctcaggatcaggatttggtcacagagcatcctttgtctgctgtccttgattattctaagctgtctcccagatttcgagcttttattttggcatttccactttgcaagaaccagaaaattttttccaagctcgtgggaatcctgtgtgggattcagcaatggataatgaaattgtggctcttgaagccaacaatacttggactattgttagtcttcccttgcatcatcatgtgattggttgcaaatgggtttacaagattaagttcaatgctgatggatcggttgagaggtttaaagcacggttagttgcaaaggggtatgatcaacaagaaggagtggattattttgaaacctttgctcctgttgctaaattggttactgtcaagttgattcttgctcttgctgctgtcaatgggtggattttacatcaacttgatgttaataatgcttt

SEQ ID NO: 230119 - DNA, 1531 bp, Cannabis indica
atgtatatggagaatgccactacaatttggacaaatcttgaagaacgattcaatcagaagaatgctcctcgtgtttttgaagctaccagatctaagaaatccctggctcagggaactaatactgttactagttactttactcgtctcaaaactctatgagatctcattcaagaatatcgacctcccccagcctgcacttgtggagctatgaaaacatatcaagatcatcaagaggaggatcgcgttcttgagtttctggttggtctgaatgagtcgtacagtgctgctcgatctcagattttaatgcaggagccacttccaaacatcaataaagcttatgcatctatcattcaggaggaaagacaaagatctctgagtaacatttctcaatcccttcctaattcttctgatcatgataagtccacatctgaatctaattctggtcagtttgctggtagtgtccaaccttttaagcctaagacgattcatcatcattggggtgtggttggccacattatgtcaaaatgttacaggttgcacggctatccccctggacacaagctgtatggtaaatttcctaatagaaatgctgaatctgttgggaatggaaatgttaaaccatctgttgcaaacattgagactaattctgaaggaaacgagaacaatggtggtgatgttgttaaaggagatcaagacctggtttcaagtctaagtgctatgcagtgtcaaaggttaatggcattattgtctcaaagagcagcagattagtctcccactccctcaaaggaagcacctctggtttctcatttttctggtgagaatctatttctttctaagtctaagtggattattgatactggtgctacgcaccatgtttgctttgacaaaaatttgtttcatgatattcacattgacaattcagtcactcatgttaaataaccacatggtggtaatgctagagttgaaggtattggaactgtgaatgtttttccaaatcttcctctgtataatgtactgtatgttcccacttttcagcacaatttactatctgtatctactctaacagataatgatgcttactcttttctatttcatgacaaaatttttgacattcaggacagtaccaagaggcaaatgattgggatgggtgaaaagattggaaagctttattacttgcattctgattctaaaaacagtgtaccatttgctttctctttgtctgattctagaataagtgagcaaactatttggcactatagaatgggccaccctgcttgtatcaaaaatcattccatgaataaaactttaagattctacagtgatttgtctcataattttcactgctctgtgtgccataatgctaagcaaaaaaggcttccctttgtttctcaccataacattgttgctcacatttttgatctaatccatatagatatatgggggcctttcaatacacctactcttgctggttgtaggtattttatcaacattgttgatgacaattctatgtatacttgggttagcttcatca

SEQ ID NO: 230120 - DNA, 1159 bp, Cannabis indica
ccccccttaaacccaagttttcttttggggggagaagaacaaacacccatattaagggggcatctcaacagtcatgacttggctccttcttcattaatttagtcccagtatttttgtgccacgtggtattattcttgacacgtcatcgtcgtcaaaatttggtaaacaatgactaatttttattgtttttattttcatcatatatctctctttctattaatttcttttttttttttctctctttattctactctttcttataaacttgattttcataaatataaattttctattttgatcttctattttgattttttttttgttttatatatatagatatatatatagatatatatatatatatatatataaaccatagcatctttaatttggataactattaaaagttgtattacaaattctatttaattagcttttgaggaaaactttcaattcttcaaaaaatgtaagtgtttgaaattattagtaaattaatgaatttttttaatttagtttgcagatacactttgaaagctaatggaagctagttatgaccaaagatttttgaagatattgaggatattagagactaatttgtttggtggaggagttcaattaattaattggataggataaattactatccttcatgttttgaactagctagatttggttggaaattttttatgatgagttgataaattatttgttttactttattttatatcctcattacaaaagtgttttgttttattctatatcttcattacaaaataagttttcatgaaatatgtgaattattctttttccaattcaattttgacattatcctatattttaaaaagttatagttaacgatgtagatttttttttaagccatgcattatattgtattctatttaaatatatatttgttatgtataatccaacatttttatcttacctcttttttataaatttattgatcgaaaacacacttcttttttaggatgaatcgaagatatgctcttcaaagggtaatatttgcatatttattgcatcaatttgtgttctatatttttaattttcttattattgaatttattagtttttttttttaagaaaaaaaaagcgaaaagaaataacaataaattattatataactcttagttatatttca

SEQ ID NO: 230121 - DNA, 1384 bp, Cannabis indica
aatataatttgttatatagaagagcatgttggactttagaatctggaagactaaacagtcagtggaatttaggaaaggtgtggataagttcactcactactatagaaataatatttagtgatccaccttaatcttgttggtaaaagggccccttaatcctgttggaaaaagtacccctataggaaatggcttaacaacagacttcaaactcaagaagcaattaagatgcatttgttcataaatggcattcaacaatattgtgtgatcatattattatggggagactttcagtaaaagcagttgaagacaacgacaatgaggagatggcaaatatgttgctagatatattgatagaatggaatctttcaatgacctatcgactaatcgactaatgatagtactccaattgataagtacgatgatttgtttaaggagatattgacagcgttgtgcccatgatacttgaaattgacccttaatactttggtgaagttgatgcaagactaatcattcatttggcatgttattactcaccatattggttgagctgtttggataaaactatacccaagttacattacgaggtaaccatgaaattacgtaatcttaggttaggttatgacactatgtaaacataattgtgcaattttttggaaagagaatgaaaagtttaaatcatgtcctatttttggagaatctaaaaaaaatagtgccatataaaaaatgtgccacataaagtcttgtggtactttccagccactctaagattgaaaaggctttacaattctaggcatttagcagaagacatgcgataacattactttaaaagaccacaagaagggctgcttatgcatcctacaaatggtgaaaattggaaggagtttgacgcgctttatctgtcattcattgctgatactagaaatgtgagattagaatttactacggtcaaattcaatacgtttggtaatatgagaaactcatatagcatgttgctttattttagtctcatataacctaccttcatggaggtaggtgcatgaaatcagagtcataaaaatatagatatttttatgagactatcaatagatgattaatttgaaagacttgtgggagacaaggaaggaattgaaacatatatacatagaatcacaaatactaaaaactcaaataaagtaaaatttgaaatgagaaggaaagaaaaaattggttaacctaattctaatactagattaaaataattttaacacaaataacattaaccattagttacctttgccgagagaagctttgtggcaaaacttaaaataacaaaggcggatcgtatcatcactataaaaaactgctatttttagtgacaactttttagtcacaatgtaattttttt

SEQ ID NO: 230122 - DNA, 1300 bp, Cannabis indica
gattttgtgtatatattaaatatgtatattaaaccataaacatataacatatatgtaaacatagatcacttcaaaattctatattgataactaatcatattgtaatggattttatttagggcacaaaacccaacaataatgttcttacaaatgattcacatttttttttatgaatcagatgattttcattactccaaacacaatttgtacaagctataagcatcctcagcctagaggacttgtaaaaactctaatatttacaaagtgtcaaaccatactttatcactattataaacttttttttggccaaatacatgatattcgaattttagtaacaattttaacctttgttattactgtgtcactattttcatttttgttctcctaaaattttgcattttgggtacaccagattgtatacacgagggctgccaccagagtatatcttctaaacctgttcacttttgttttgcctagccacctgacaactctggacaatgatctagaactcatgttccatttcagccaatatttcacttagttgaagcaaccctggacaaaagagcaagcaaagaataaatggtccactgattcctcttcaatgttgcagaacaaacagtgagtgtcaatagcagtattgtatcttgcaatcctatccttagtcttgagtctattgagcatagccatccacaaaataaaactatgcttaggatagttgaaccgaatccacacaatactaggccaatattccttaacctctgcagggattagcctttgatacccttgagtgatttggtacttgctgcataaattctccctctcagaaatgtcatacatctccttcaccttctcctttaatgtaactatctttctccaataccaactattattagctttggccttgtaatcctaccaggtctgttcttaaatgtacacacaatgtacccatttcactcacatgttatcctcttttttagcaatagcccacacgtacttaaacatagcactaatgttccattcagttacctgttttagccctagtaccccttctgatttagcctgtaagactttactccatgctacagcagcaacacctttgagatgttgagtgccactccaaagaatgcctctacaaatagcatctatatctctaataatactttttggcagcaccattatttggctcaaataagagtgtatgaccagtgataactctatgaaaatagagttacttacatctttctaggcattaaattagcttttttctcaagtatttctagtttattttagtaacttttat

SEQ ID NO: 230123 - DNA, 1873 bp, Cannabis indica
agagaaaatttcgaaatccttgtgagatgagtagtgcccacacacacttttaatgtgtccatgacttcagaaatatttctttttcgagtaaggctcaccaaataatgcacgtgcaaggctattattttccacgtactcataaaccaacatcaactgatctgcttcaatacaacatccatggagtttaacaagatttggatgctgcagacaagagatcatgcctatctcatttaagaattcacgatttccctgccttgatccagaagaaagctgcttaactgcaatagctgttccatctggaaattgtccctgttttccaactccaaatcagaatagtatctgaaattaatagataaagtgaaatgatatatattagcaaacataccttgtatacaggtccaaaaccaccctctccaatcttattggcataatcaaagtcattggtggcagcttttatttgtttcaaggtaaaagttcccgtctgcatttccagtcctttaaaatctgcaaggtggtacaactaaacaataagctaagggtcctgttaaaattttatattaatttctagattttggatcaaatacagtaagtgaagcaaaacgatatctgcattaaatctcatcaacaaccttatacgttcaatactagagcctcactgatcatataattccgcttacacattgcagactaatgaatgacattttttgctttccttttctcacgaaaggaaatttaaaagaaccaacaactgatcatattctactaacaagtaacaaccaatgacggcactatacataacaaactagtaccctgataggaattattctatcaaagtgatattaacagtaagaattaaagaataagggaagagttggagcaaaaatgaagtagtattgtattaaccgggaaattcgagagcctggactctccttacaatacgaaaacaatcataattctcataccctccaacagaaacacaattcttagttatacttagtcctaaggacttactgtgcaccgcacctcacccgaacatttccctcataacagaatttagagggttgtatcccctacatcactccccacattaagtttcttgtttctcctagcatatacgtatgtcaatggaggtctatcaataccgccagcctaaagtttcaccttgtcctcaaggttgaattgaggaaattgctcacggatagtgtcaaagtcttccaaagtggcttcaaattctggtaagtgtttccatttgatgagagcttggggactgatcttgtgagtgccagggcggatggccagcaatgcttctggttccacgagccattctaagtcagcagtgaggccaaggggaagaggagacgcttgctggtgtggtcccaaggcagctcgcagcaaggacacatgaaaaacaggatgaatggaggcgtcgggtgacagttgaaggcgaatgctgctgtacccacacgggccagcattggaaatggcccgaagaatcgaggggacatcttttcattaggccgtcaagccacagtgcgctgccggtaaggcgaagtttgacataaaccatgtcacccacctgaaactgaacatctcggcgcttacgatcagcttgagttttcattttctgctaagcacggagcaagttttgcttcagcagttgaaggatggcgtctcgctcttggagttcttggtcgactgcagaaactttagcactagcaggttcgaaacagagcagtggggtggatctcggtggtagacaactcgaaaaggagtcattccggtggatgtataattggaggtgttataccaatatttagaccaagggagccacttcaaccattggttgggtttggcgcttacaaagcaacgtaaa

SEQ ID NO: 230124 - DNA, 1352 bp, Cannabis indica
ggatctggttaaattgtaaagtgtcaagggttcattatagatagagcccttgatatcattgtaaagggaggtattttctttgaatgaaaaaaatagtaacttctcataatagaaaagcttttaaaatttttactctaaacattcttctactaaattttttttttaaagatagttctaaatcctaattaaatcattgacgagttctaattgtaaacataaacacttaaatctttatagaattaatatttttaattgaatcaagtcttcttgaaaaaatattatatttaaaaaaataaaattatttaattatataaaagttatattttaaggtaggactttatatgataagacttacttttttaataataatatatgatttactttaaaggcactaatcttattcatatgactttataagatgtgttttaccttatttaaggttagtagttcacttaataaggcttgttatttactttattttaagctaatagtttacatgttgtttaccttattaagtgtaccttaattaacacacgaaatttacctaaaaatcatgttgtttacttaattttaaagtagttatttatcacgatgtttgcctaataaggcgtgttgtttaacttatttaaaggtaatttgtttacatttttattgataaattatgttttgttttaccttatttaaggtacagagtttacctaaataaggcatgtcgtttaccttatttaagacacgaagtttgtctaataaagtgtgtcgtttacctttttttaaggtagctattgaccttttcaatgataaattatatttagtttaccttatttgagccacgtactttatataaataaggcatgtcatttaccttatttaaggcacggaatttacctgataagatatgtttacctaataaggcatgttgtttaccttatttagggtaagggttcacctaataaggtgtgtcgtttactttattttaggaacatagtttaattaacaaggtatatcgtttacctttatttagggtaatatgtttacttaataaggtgtgtcgtttatcttattttaagtatatagtttacctaataaagcatgtcgtttaccttatttagggtaaggagtttacctaataaagtgtgttgtttaccttattttagttacgagattctcttaataaggtctgtcatttaccttattttaatgataaattattttttagttgaccttatctaaggataatgctttacctaataaggtgcgtcatttactttagttagggtaaggagtttacctaataagacgtggcgtttaccttattttaagcatgtagtctacctaataaggcatgttgttta

SEQ ID NO: 230125 - DNA, 1574 bp, Cannabis indica
atcgaaaagctttggacaaaatcgttcagaatgatcgataatgccacaaataaaacaaaatgttaggacattgtcatatttgaattttatccatatccaatctgagtccgacttggtaagcttcatttgtctcttcaatggtttattcaagtcaatcctaacccggaccctcatatactccctccactaacccatgaagttttttggataggattcaataaactcaccaatgtaattagctgctgccatattgatctgttcagacctatacccactttgaagctcatgcaattgtatccataaatctatcttattcagaggcacatttttaggattttctccatgtcagagccgatgaacaatcaatgcctttctattgaaataccaaggactcccatccatcaccctcttgatataaatttcgtgataaaactggaaagatacaaaattcacacccaattctttgatgtagacacctttccctggtttccagagggctgacattgtttgttacatagagaagaaatcaactaatcctcctgagagaaaacttcccactaagcaccatcgggagtcatattccacttcaacacttcctccattatcccctatcaaaactcctcccgtctcttcttcatctagtataacctcttccaaaccattccttacgcttcctgaatctgccattgataaccttttacaaaagaaccaaaagaagaaaaaaaaaacagagcactgaaacttgaaaacaagggctagcagatcactcaaaagcaatactttgcatgtcaaaagacaagacatcatgacttacaatttatactttaggtcatttagtcacaataggaatatgattttggaattggaattggattttggaattggaattgaattttggaattggaataggattttggattttggaattggaattggaattggattttagattttggaattgtttcattttttttcccaaataccttcgcttgaactgtcaattaccgctgcaaattaaatttcagatccattcccaattgattcaataaacccgacgaacagggttgcgtgtcggagttcatgagtttcgtgactggggaggccttggagaagtgccgacatgagaggcggaagacggtaaacgaagacaacgtgtgctgggctctagccgccttggaattcgatgaggggtggacctctgttcctcttcttctatcgtaattaaattaactaatcgaagtaatctcatcttatatgacaattacgtaaattttggccgtcactttcgcttcagtagcgaaaatcgaaaccaaaaggcctccgactagcaattttgcagaagtgattctacctatatattctcctacttaattaatcttctgttgttttaaattatgtcttagttatgtaagtgtgtgaggattatttgggtacaatactcataaaaagatgtatgtttgaattaaattttatttggaggtaaatttgattaatgtataaaaaaaggagtattcttcaacttctcccattaaatttccctttacttaactcattttatattttttatgtattta

SEQ ID NO: 230126 - DNA, 2529 bp, Cannabis indica
gagctgctcttattaatattatgaggtttattttttttaattattcataaagagtacttattttgagtatcaatactttctatttctaacaatttttattacttaataattatttatttatttatcacactgcaaccaatttctagtctagtggctgtggttccgctattattgatggttatgtggtctttaatttaataattaaaataaaagagaaatgtgaaagggcaccactggtatttagcaccctcctacgtgtcaatatcgctattggtgcaattaagtatcgggtcccatatagtttaatataataatttttatggagtatcgctaaccaattacaaggcgacacatctagaaggtgctaggcaccactggtgcccatctttcaaaaaaaaaaaaatctaaaaataagataaaaataaataaataaaatacatcataataaatggctgaagactttgccccattgaattggaaaggtcatttagaatggatgaaccgaattaaataacatataaactaaagactttgtttttgcctctttgtgaataattaaacattagaccattttggctttataaaaaaataaaaaaattagaccatttccaatgtaaaattaaaatacaatataaaatttgaatattgatatagccataggtggacttaggggtgttgagggaccctgagatttaaaaatatattaatatacaattgttattttcatatatacatagtagttaaatggaacagttggttaggatactctaaatttacatgggagactattttttgaataatcttgcccatttttttttttctacgcgcatctacattttatttattagaaaaaataaatgaagtataaagttcaaagaccactagaatagtgggatgctgctaaaccatcattccacttaaatttagctagttatttattgttttggattatattaaatgtataactaagcccaccataaaattcaatcctgtgtccgccaaggtggcaccctttaatctttattaaagtaaagtatatgggactcaatattagattgtactaataatagtattacacattacaagcatgtgagactcgatattgaattgctatagcaccactatgaggtggcatcctataatctttattaaagtaaagtatgagtgagactcgatattgaattgcaccaataacagtattacacatcacaaggatgctagacaccatgagtgtcttttagcatttctcatcaaattttacaaaaaataaacaaatattaaaaaatttgtcccgtaaattttccaggtagttaaaaattcatcttgaacaaatgtgattgttggattcaaaaaatttcatctaattttactaacaaaagtttaatatggatgaaagtttaggtggtacgatttggtacatatcaaactttgaaaggcataatttggtacttataaaagttcgagaagtacaatttggttaacctttgatctatatcaaagtttgggagcaaaaaatccttatacttattagagtaatttacaacgtaaatacctaaatttaactaactctcatttgtagataaatacctaagtttaatttttgatggtaataatacacaattatatttctaggacttttagaagtacctaaccgttaagggccaagtcataatccacttgttattttcttattgctatatttaaatgaatttttaaataaaaaataaaattttaatgacttggaccaatcaaagactgtcatatggtcattgacttgacacataacggttaggtatttacaaaagttcaaataatataacttaagtattattaccgtcaaaaattaaacatgagtatttatttgtgactaggagttaaacttagttatttatgccgcaaattactttatttattacaatatttattattttactataatgcacaataatattttaaaatataaattaactaaaaaaaaataatagcaatactttaacccaaaaatgtgaattaatgtttattataaataattaatgataaaactgttattgttttataaatttggcaaaaatattataccttgtaccaaataactagcaaatttggcactaaacttagtttgataactattttcggagctatctttgaggcagaaggatggtatgggactggtttggtggctcgtaattgtcatggccaccttcttgaagctctttcaagtagtaaaccgggatatttagaggctgctgtggtggaagcgataggcatcaaggaagcgcttagctggatcaaagacaagcagtggcatgatgtacagctggaaaccgattgtcttgtggttgtccaagctgtacactcttcagttcttctacgttccccctttggcgtggtgattcaagagtgcaaagagttgcttgattctttaaaatctgttcagattcaatttgttaaacgttctgctaacaaggctgcccattatatggctcgcagctcttgttttcactcagttcgtatgtttaccgagagtac

SEQ ID NO: 230127 - DNA, 1388 bp, Cannabis indica
cacacatgaagatggtggatatgaattggcgaaaaactgcctctgaatgtggacttgaaacctcaatagatttgtgtagattaagttttttgaagagaactgtaaacgtttttcacagctgggagaagaacttcacccaattctaaactagagccacccaatatctcgtttccaacggcgattcctctgattcgagttccaggaatgtaaggctgaacattttctttgatccacatcattgctctgtcttcagctacacttatatctttcaagaactcgttaccaagtcctacaatgatttcaattcctgaacctttgaaagccgttagaacatctttgtttgcgtcgtagattcttatgtttttgatctttgctgctttgagaagtgtcactacgctttgtggtggtggtatgttgtctgctattctcccatagtttactccatacgttcctgtaaaggcgttgacttctggtcaaccaaaaaaacaaaaacaatgtgttaaaatatatttgaaaaaaaaaaaacaataatatacaacaaaacaaaaaacttatttgaaaaagatgttacctttgagaaagagaggagagaataagagtagagagaagcagaaggaaagggagagggagattgaagagaatgccatttgtttggtgggaagaatgaatgaaatttccatttttgtagagaagaagaagaagaaggaagaagagggagatgaagtgttcaccattactattatttttttaatagaattttgattttagtacttttcctttgggattgtttaagtagattcttgccctttgtccaaagatgatgatggtttagaaagattgaaacttttgaagatgattcttgttcttggcctaaatccaaagatggggaaatatgttgggaatagattctttatcttttttctctccactaaagtataaccttttcgaaaaaaaaaaattgaacttttcaattggtatacgttttgtctcttgtttttgtataattgatttgaattggcatgcatgtttgtatatttatgcttttcgtagggaatagatttttaaagaaaattaataaacttggcaagccatctaaaaatattagaatggatataatttttattcctgaattaaaatctaactatacaaattattgtaaattttttcgttcaatagggttacttggatatattgatactaaacatacaaatattctcataatttgttatttaaacgttatgtatttgttgcctaaactattaaattatacaaaattaatgacatttagtgttacatcaacaaaactataaaaaaataacaaaaggacttttaataaacaaactattagatgaatttagcttattgtattttcaaatgaatatacaatt

SEQ ID NO: 230128 - DNA, 958 bp, Cannabis indica
atttctattaatttaattttgtattatgtcttaaataaatataatgaagacgaccatgaaaaaaattaactaatttttttttcagatgccaaaacagataaggaatgcataggtagctcccttttaaaggggtgcatagtaaatttttttaattatatatcttacttttattaattatgtttaaacaaaaatatagtatgatataggttggcttcttgaaactaaaaccatctagcatcttatttaaatgtaagtctgcttttcttttgaaatgaaatgtaagtctgcttagaaatacaataactaacaaaaattcataaaaatacaataataagacaaaagagattacaagtcaaataattatatcttaaatgatttttactatttatatatattttattttaaaagttatattaaataaaatacgtttaaccaaccaaatattatattataatgttataatttaattaatcataatcatatgtaacatttacattacctccaaccttatgtaattaaaaattatatatatgatgtcaacaatagactttcaagaaaatttaaatccaaagaaatatagagttagaggtcagaaggcaatgcctcatggaaacgatctcagaaatcacattaatgacaaagttcgtggccgtgaattcccagacaacaatactaagcgtttgaaagatcaaatagctaagttaactaaggtcacggaacatcaagcctagaaaaaaagtagagtcatgtttgatttgaaagaagaagattcaaaaccacgtgtaagaagaataatagagacgcctttgttggaacactttaaaatgcccccacatggaattatatgaagccagaatagaccctagggttcatatgtccaaatatatttgattgatgcaagtgtcgaaggcaagtgatgttgcaaagtgtctctatttacattaacttagtcaaaatc

SEQ ID NO: 230129 - DNA, 1222 bp, Cannabis indica
tcatttattttcattatctctcagtttttatagatatacttcaaaaaacatatagataaattaaatgatattttattattatattgtcatgttattatcacgtctagtaaataattacaaaaacttgttattaatttagtactacctctctgtaggatataatctatagtggcaattatctcaagaccggccgcagtgtattataattttatttaacatacttttgaccacaaataccacatttaattaggggtagctagcaatttgtgttgtgttatatttgtgttaggttgatatatttaatttgtcaaccctaattcaaccatatatatattgcgtgtcaaaaaatttaaaaatctaactcaatcaatcgtattctcgtattaacttatcgtgttcacgtgtcaattatatatttatattgatcacaaataatcaataaaataaataaaattcttataatatcaaaatattaattatttatcttatattcttgtaagtaattttttcctaatttatatatttttttatgaaaattaataatactttaactataaattaataattttaataatatattatatataaatgggtcaattcatgtcgatttcatattatatacgttaacctttaacctgacccaattaataatcgtattatccgagttcaatctaattttaacttgcgtctattttttatgattctaaccacaataattcctatcaagttcatatcatgttatagtaatcatgacatgaattaccacccctacacctaatcaaagatacgtgtagtacttactaaaacataagttaactgtttctttactaatacataaaagtcaagtgatcttaaaagaaaaaataaaaataaataaataaaaaaagtcaagagaataaatatcagctcaaaaagtctttaattggctgcctaaataaacatggataaggaacggttataagtcatgagtttcaactggttctctgcttgccctattgtaaacctaaaacaatatgaatctttctatatggaacataaaactatacatttatgtggtatttaattgaaaggaatgaaaatttaaaaataaaataaaaataagaatatgaatataaatataaattaaatttaaaatatataaaaataaattaactcagagatattgtccaaaaaaactcaattttctgtttttgtttgagaactctctgtcgtaaggacaagt

SEQ ID NO: 230130 - DNA, 2673 bp, Cannabis indica
ttaatatgcagtaaagacatgtagaacaaaaaaaatatagcagagaacttgaaattatcttcaaatgactatgtctgcgtcatttattatgtgcccaatgatttgaggggtttatgaggtatgcaccaagaaatttcacaaaaatttcgaaaacacgtgttgcaatcatatattattctctagaaatccattatgaaagcagaagagttacaagttatactattttcaaaagttcctactgctaatgaaatctttcaaagaagcaaacatatttactttacaattttactactgaaaaacctctacaatgtacacagtggaaaaaccttgcactgaagtcaattggaacaggacaccagcctaatactcgaatatcattcggaagggcacgattcagaaccctcacataatcaatttctccttctgcaaaacacgtgaaaaggagtaaatagtgaaaggtgcgtgtagattaaaatctagaaacaaataggttgaatttgatgtgagtcagaaagtaaaaacaatcacattcaaagctatattcttcttgtatcctcatcccactattcttctcatccgcagtttattaaaaactctatgcatgacgagctctcgaatttcaaaaatatgctacatcttagtttatatacttttaagccttctgtttgtcagaaaacccttccctcccttgctttctattgattttctctatttgttataacactatcgtgaaaacaatattggcgagataattaaaagatgaaacaactgagaaatatattaaattcaaatcaattatttcaactgtactggtttccagatgttttgtgcctacatttgattttctaccagtttcaatcaattttgaccaaaataacttaaggaaaaataataaatgcatacccagaacattaaacaaagagggaaatatgaagaagaaagaaaaaaaaagtgatgtttttatttttgttttttttaacctaggatccctgcctaaccctaagggatgcattttgttttaaaaagaacattttgtataaaaataaaaaattaaacaaaggagtggagcataaaactagagttttctattcaaaatattggttccatatactagaaaaacaattcaccaaattgtatgacttccagacaagaaacttcttacatcatgacaacatatcatgtaagatagtttatactaaaaagtatttctggttttaattgctatcacattttcagttacaaaaataataagtacttgtgaattaggcttataaattatgactcgatttatccatcacacatattctcaaataccaaaaaaacctgcagcagtaatagagttttgaagtagggatgaaaaaggaaaaaagctgaccatattcttctcttgaaaccatttcaatagaattttgattatctgaacaagccttcttgagctttgatcgtaagaagagagcaaccacctgcaccaaatacaggtgtagttagctttagctgactgacaacaccaacagaacactttaaattcatggttaagctgttgagaaatatggattttacttgaaacaacaataagttaaggagggataaaaagaacattattgtagaattgtagacaagtctaccaagtttttcaatctaagtgaccatcaatgatattacaacggaacggtcactttctacttacttgcccaatagaggaaacccccttatctgttctaccacatcttgaatattgtgactctttcctgtcaccaactaaaagcatagtcctttctagagctaagaaaagttcagactgtaaagagaatgaaataaaagtgaaatagtcaagtaatacaaacccacacatgtatgcatcaataatggatatgagttaagaaaactaaaataaaagaataagttgagaccatacctccacacttggctccaattgtgcttctgaagaaaacccatagaacctgagatgtgtcatatgaaacattccataaatgaaataggcttattcgagttacaaagaatgtatctcacaaaagaaaccatagaagaaaacaaatgataattcaagcactcattgataggaacatccaatttcaattgacaaaaatccccatacattcaatttgacaaagccacaaacatgccctgaaagaactatagactcccaagaatttttcgaaaacttaagctaatcaaagagataaaacaatgtcaactaaatgtacctctgcccaaaatacatgagtttgagagcaacatatcttttggaatggcgattcgcaatgctttgatcataacctgtacacaacacaaagataaatatgattaaacacacacataaacaatgttttcgaaaagaaaacaaaacccaaaatccaattagataaagaagaaccaccttttttagtcaatttctttcttctagtcttaattgaaacagagtcatcaaccttcttcttctctttctgagccagtacaaccatggaaaagtttcaaattcaatcaaatacgaaaaataacataaattttctgatcttgctcgaacattccacatttaagtacatacacactagttagtatatcgaaaaaacaaacctcagaacagtcgcaatttgagagctgagatgataacttggaattttcagcctctagttcctgattcaatttgcgaaa

SEQ ID NO: 230131 - DNA, 2191 bp, Cannabis indica
ccaagaatgttaaaccaaaaaatgccgttagatagacacttttaatatataaagatataaattagttagatatacgtcgaacaatttttttttttttgaaatcaaaaagcaaacttttattaataacaagaatctagatacaaaaatatcctgtaattcggcagaaacgtaagagacgttagagataacaatttttacgatcagttgaaacacgagattgcttagggatataatgagtaactcagttagtagacaatttaacaaaacctaaaaataacatcaggcattgaattaagtaaacaacgacaatcctgaaatttaattagtgaaataagagttaatttaaatttattaattttttagagtattattactttgttttctttttaatttattaattaattattttactgactatacaatatccttacatataaaagtgtttcttattattgaaaaatatttgaaaattataaaagggtaatctattgctatttgtacataaacttttatagatgtatataatgctccaaaataggcctttttagattaattaatcataaaaataaaataaaatatttccacattttttttttcatttaaatttctaactatttaaattttatcaaaaaagtttaaatttagagtatatataatttaaaaaatacaaaatacttaatttgtatttagataaaacacatgataccaaaaatataaaaaccctactttaaaattttaaaatgtataaacgaaaaaaaacccctaaattaagggtgagtcaatttgaagttaaatcaataatggtcaaactcaaaagtttgactttcccttattcttggcaattcatttcattcctttactgagctcgagaagtgttaataagtttctgcttttgatattataacaagctttgagcaacgttaaaaaaaaacaaacaatgatcactgatatgaccattatacccctagtgttataacttgggaattgatttgtagaggggcaaaattggcattagagataaaaataacataaataattgactagtcaaaactcatttcaaagaaaaagctagacacaatttagtagttggaattttatacaaggtttttttttgggatctttccaaaaattaagggccaaagtttctgctgtaatttagcaaattataataattttatttgtatataaataatttaatttgtgttagagaggaatgaatggttcttagactataatcatatgccagcaagatacaggttgttgctttaagtaaaatttacaactaaatttattaaattaatttcaaagactttgtttcataatcctcttcttctttctttatttaatttaataaaatatatgagtggctaatgataatatatatatatttatatatatatatacttgtatttaatgtacagccacaccatgttgggccggccctgacttttagtgggccatagaaaaaaaaattattttgggcccttatttagaaaaaaaaatggtatttttcaaaatcaataaaaaaaaaatggtataattttaaaaggtaaatatttttttttgagctcctgggataggtgggccctaggcacaggcctagcccgcctatgcccagggccgggcctgacaccatgtaacatacaaaagaaaaatatcatgtacaattgtacattatgttattacaaaataatataatatgatgtacgttatagttttattttatcgtttaaatttatagaggtagttttgtctcgtgtgacttgttttcttcaataatttataatttgataatgtatattttttggttagacaatgaactatgatagttcgagaaaattactgtactgattgcaaatatttatatcatgaatttttaagtaattttaatcattatgtcaaaaaaagatacaaataagaaaattgttggtggttattattatttattctgaaaaaaaaaagataccttaagacgtgaaccgaatagattcattcattaaaggattttgtctcgatcaaagatctaatacaagtagggcattcgaattactaaataaagcgtgtttgaaagtaattgtgtatttactacaataaaataattacactattttaaaatacaatattttaataacactaaatagaagatcataattacttttgaattcttaattttttgtttggtaaaataatt

SEQ ID NO: 230132 - DNA, 2394 bp, Cannabis indica
taatactgaaatttgttgtagtgattccaaacacacaagctttcgggcttagtattattcttgcatatagacctttgggctttgagcctaggttttatttatgaatgtctgtgattatttttgatcgcatacacggacatttctatgtgttgacaactaataacatgtgaattcttgacgagtcattgaacacattagtcattcggaccatacttatgtaaagaaacggtcttcacttgtcgcgggggaaatttacttgctcatcgcatataatcgatatgcgcggtgagtattaacttctctcgatctcgcttatcttttgaccataccaaacatagttatgttactagacccttatcacgatcgcatcctctcacaagtttgaatcatgcaaggttggctctacaagggccatatatattgtcacgtcatccttttctatcaagaattgaatccacatgttcacttctcacgagactgtactcgtatttcaagataaaaaattcgcactataacattaacaaattttattttttgtgcaatttaacaaggggtatatataaattcttagttgaataatgatgttgttttaaaattagctttagggtcagtttattacaattgtgagttgttaagatttattataatgacaatgttttaatctgttagttttgatggtataactaccctcattgtaccatttctatcctaaccacagattccaatgataacttgttaacacctttttctaatatatataacttcctttacaaatacgtgggtcatgactacctctatattagattttgaatgagtatctttttatacgtatcatatttagtgctcacgtatatattgatgagggtggtactattaaataattaaataagtaaataataattgaaaaaatctgaaaatctcacaataaatacatattataaaataatcaagtatatatatatatttgagttggtcaatttgtattttgtaacgtcatcttcatctaccataaacaaatggagtgtttcaatatctgctctctccaatttgggttgaagaagttgattttccacttttcacatttccatatgccaaagaactaagtaatattatgaaactttccttactagactaacaatatatattcttataataattacaatttgaaaaagtaagcaaattatatgaactatatagtcctttggtttatgatattccttcatttgaaagcattaaaaatagtgagaaatataaatggtcaattcttcccaattaggccaagtccatcataattctaactataaactctaaaatttgacctagttgagttaatcgttgatttggcactaaaaatgtggagctaatcacttttaggttcaaagtcacaacaactccacgtaatcaaaatcaatacaacccaataatactcctatatatcatcatttccaccactacttctaataaaaaatatgttttaattatatttatatatgtgctttaatctattgcattatataagaaaataaatacatgtatcctccctaacttccaaatgttattattatcctaaaaaaaaacttccaaatgttattcccttctattatttttggtaaaataataataaaataataagtacagggttttttttccttaaaaaataagagaaaatttcattagatggttaattcagacaagttagttattacaaataagaaaagttcaaaaattaatacaaatctcatcaatagatgatctttgatgagtaatacaaaaatgaatgtgttttgctaatttttaactatctaaacattttaatgaaaatttctcactaacaaatttttatattatagttatctaaatagaataatattacttgtatcatgttatagaatgagaatggtaattgattggtttaatttatttttagaacagtaaaaaaactaagtagtattgataaaaaatttggtataaaaatagtataatagaagtatataaaagtaaatttatttttttatgttacttacataagcatatagttataatgattattcatataattaaatagcatatgaagaattacattatgaattctttaaaatccgacaaaacataatagtaatttttgtcgttaattaagcttacaataactatttggattttcaaaaaataaattaagaccacttgtgtaagtagagatgcacattttcttcgtgggatggagcgcctgctgtttactcgtctaaatggaacatagggcgggaacgagaattactttttgtccctaaatattaaatggggcggggacggagatcacactccccgcctcgacaggacttgtttagttttttctttttttatttctaataatattttataatttataatttgtatttg

SEQ ID NO: 230133 - DNA, 1358 bp, Cannabis indica
ttcaaatccttcagagtgaaaaagtatttgaggtttttgtgatccgtgaaaatattgcatttctcgccatataaataatgatgccaaacctttaaagcaaaaaccaccgctgctaattcaatatcgtgtgtaggataccgctgttcatactccttcagttgcctacatgcataggcaataactttaccagactacatcaaaatgcaacccagcccttgttttgaagtgtcacagtaaatcacgaatttctcatcactaatcggcaaggttagcactagcgcagtaattaacctccacttcaattcctggaagctattttcacacttgtcggtccaaacaaacttaaaattttttcgagttaatttcgttaagggtgtagaaatttcggtaagcccttaaacaaaccttctatagtatcttgctaatcctaggaaacttctaatttcaattgcagacttgggtcgagctaatcctaaaccgcttaaatatttaccggatccaccaagatgccatctttgttaacaacatgccctaagaagcttacttggggcagccaaaactcacatttcttgaatttggcatagagcttatgctctcggagacattgcaataccatccgaagatttttatcatgtgcctcttttgaatcggagaagatcaaaatgtcatcaatgaagacaattgcaaaatcaactaaaaagtatttgaatacttgtttcatcaggtccataaacgcgaccggagcatttgttaatctgaaagacatcactaggaattcataatgcccataccaggtacgaaaagctgtcttgagaatatcttcctcttgaatcctcaactggtgataaccagatcgaagatcgatcttagagaagatggtctttccctgcaactgatcaaacagatcatctatccttggcaaaggatacttgttcttcactgtcagtttattcatctctcgatagtcaatacacatccttaatgtccatcctttttctttacaaacaaaatggcgcaccccaaggtgagttactcggtctagtaaatttcaagtccaacattccttataattgaatcttcaacgcttccagttctgtaagtgtcgtccgataaggagctttagatacaagttctgacctcggtatcaaatcaatttcaaagtcaatctcccactttagtggtaaccccgatagctcctctggaaagacatctagaaactctcaggatccttaaaccctttccacaaacacaaatgggtctttaccctcaggttcaaaagtcaccatctttcttttgcaatcaatggtcgcgttatactttgctagccagtttattcccagtctaacatcaaaatcttc

SEQ ID NO: 230134 - DNA, 832 bp, Cannabis indica
aagtgtggagggttgtaaaaggaaccttgtgtgttcgatcaaggttattgtgtaattggtgtttgaaacaattgatgagtgatatttgagttgtaatccaaagtgtgtaatgtactgattatcttcaataaaaaatcattcattgcatttctgaattacagttttggttcatgcctttttatgattgattttgttggttcttaattgatgttgttcatcataacagctgcatctaagtgaagtaatttcaccacagatatagatagtgtatatctgacacgtgtagatgcttagttgttaagaccgaactagagtcccacatcgactatctgaaagaaagatctattgtatttatagtccaatctctggtcttcagtgcacgaccttacttgaacaggatctgttctataggctcgtacctctgtttccttgagttctaaggagacaggaaaccaaacctggtggatgaatcatgaccgtccgatcagagcgtgattaacggccagatcttcttcggattatcacggctgtagaggatcgttctcagctggttcactagctggggtgatcgaacggttgtctgacaggttcccttttattttttcttgcattgttttggctagtctagtctggtgtatcagtattgttgtgtacatatataaaatacatatatattttttggattgtagtgtttcttaatataaggatgattttgggcattgcgaaagagttagccaaaaaatgggaacaacaagttgaagaagacaaaaaatgaacaacataatagttctactgggtaacaagtatctttagtcttctctctctctctctc

SEQ ID NO: 230135 - DNA, 1382 bp, Cannabis indica
aactgccctggactaatgccaaaataatcagccacatctttgaaaaaaaaggttatgaaacgggggggatttgctacccccataagtaatatggcaactaggatcatgtgccaactaatctgggaagggagtatcaactggcagtccttaccgttcacagtcagttccttcacactttggagttgggccttactaagactactaggaggggccaccaagggaatctggatggttttggaacaggcagtgcgaacctccttaagcactctcaaggcaaactctttgaatttaagggtgacttgtttggaaccctcagctggttctttcttggtggcgtctttgtggaaggtattcctggcttcctcttcctcccacttctcaaactctctcactatttcctccatggcttcatcgtctaatccagtcttaataactctagtaattagagttttttttttcacatttttttacattaaaattggtttagttcttaagtttttaattaatttagtgagtttttaattatttttgaatttattagccttacattaattttataagttttcatgtgtttttataattattttattataatatgttatgcgttatttatttgtaattttattgtaaatttctaattaattttattaattttaggtagaagattgggattaaattgaagaaaatattgaagaatggggacaaaagtataatttataacaaatattcagatcagttcaaagtcaagccaactctcagtcaaatatttgaccctatccaagccatccatgctctaatccaaaggcccaagggcgcaagtgtgcttcaccccggacagccgagagtgagctcctgccttttctgccgcatgctagcactgcgtgggacttgcgcatcagctgtcccctccctctagttaccacgcgagcagcttcgttcctagctcatcagccccgcaccagccagacgatgccacgtcccaacagcatcagtgtctcctccaacctacgcacaccatgtgcccctggtgagaaaaaaagagaaaaacaaagggttgttaattgtattgcacacatccgaaaatcacaccaacaaaatgccaaaatccttatttttctccaatactttacacataaaaatcaatttctttccccaacttctttttcacctaaataaacattcctattttatttttaccctatcttttccaccatttttccatccaaacaaatatttattttttctaatgctcttacacatactctatttatgtattctcttcacaacactaattaaattaattaattaattaattttattttgattactttaatctctcaattttgcctataaatattgtaggggaattatcccatatacta

SEQ ID NO: 230136 - DNA, 1340 bp, Cannabis indica
gaaaaaacttctaataagtcagctctccttctacatatatatgtatatacattagaacaaaatgaagagagaagaaagaaattaaacccgaagtcctttctcattactatcttttcgtatgacaatcgttgaaaactcacaccaagatctttatccacagtctcacaacgcaaatacaagtgtgaacttgtaatataacgtaatagaaatttttatttattagatattatcaacatattattttaaaaaaattattatttaattaataaaattaaataaattattttaatcaatacaaaactaaccagtaagttgattcattccttcttattagctaactaaaattttctaattttgaatttaatttattaaataattattttaatcatatattaaagtaattcattatttaacttgatatttaataattaaaattattgaatcaaaattttcttttgagaatattgttgtatgcgtgtaacacatagtaacatggcactatgttatacgcatatttcatatgtcaggaagagcatatgtgtcttttgattcctcaatttcttaattatttgcatatcaaatatttcaaaattaattaatttataattaattgaattagttaaataatcataattatccaataattatgtttaccacatagtaaatattttacttatcatatacatattttttgcccattgtttgtatttaccttcgtcaatttttgattgagctgtcttgaaaaccatagacttataacattaagcttcaataaattaaaactaaatgattatattagttaatttattaattttgttattcattcactataaattcaaaattgaactctttatgttacatatatacttttacataaattttttcttaagttgtcaattgatataatcattttacaatagttcaaccatccaataaattagtttataaattagaatggaagaattaccattttaccctttaacttacttcttattctttaagtaccattaattcactagtgaagtgaacaattctataatctgattatagatttgagctcaaaatcatttaggcttagaattaatccttaagagaaccaatatacaatctgttaagaagaatttgattcctttttgttaattcatgttcccagccatccatgttattaaatttctaaaacaaaagtcactagactcaagatcttaacaaatgaattaaaaaattcaattaacataaacaggtcttcatgaatactcatgatttaggttaatcgataaatgatcatctgttatgattttatgaatactaatctttattattaaatgacttttgtataaaaa

SEQ ID NO: 230137 - DNA, 1055 bp, Cannabis indica
tatatatatatataaacaacaaatcctctgtagaaattactattgcatatttcttatgcttacgtacgtagtttttaacgataattttgttagtgttaattccccacgttctgattcagcaaaaatgctagctccttagcatgagaaatacataatttctgagtccagaacaaattgttttctaatacataatttctgaataaaatagatccttgtatacctattacataataatttctgaatccagaacaaattgttttctttcttcccttccctataattacaaatcaaaaaagaaaatgacaaaggaaatagaagagagtgtatatccccactccaggccccttaattgacaaaaacctacgggaccaggccaggccaggccattggagtgatatctatgattgaatgggctaaagcccaataagtctcattcatgggcctcagcaatggatgttaaagatgggcgccatttgggagatgggccttgttcattcccataactataagccgaattagaaaagcctttggtctggcactgcaaaagaaactccagttgctccctagtaatcttgatcttgatcttctgactcttgttgttgtagctaataatttggtcgtgatcttgattatcattctcaactttagctctttttggacaagttaatatattaaacaatatgagttctgggaccagaaagtatacctctccagcttcaagcttggtttttggacttagtggagaaaagggttgggagtggtgaacaagaatgtagccaacgtaagaggtaataatcttgttcactggagttaaccctttaaaccttagtatttctccattgtagctaactactctaactatatcatcgttatttatggattgataagacgacataacttgtacgcagttccccatggtttttttatgtgtgtggtttgttttttgtacatgtaatggattgaattgataaaagctagctctgtttcctattcttagaacgtgttaagatatatatatatatatatacgttcatacacaataaatgtaggaggta

SEQ ID NO: 230138 - DNA, 2981 bp, Cannabis indica
gagtaatttgtggcataaatacctaagtttaactctcagttgcaaataaatacctaagtttaattttttgtcggtaataatacctaagttatagtttcagaactctataggtatctggccgttaaatgtcaaatcattatccacatgtcattttcttattggtatatttaaactaattttttttttaaaaaaataaaatttaatgatgtggaccaatcaaggattgccacgtggtaatttacttaacatttaacagtcaggtacagaagttctaaaaatataccttaggtattattattgctaaaaattaaacttatgtatttatttacaactgaaagttaaacttaattatttatgctgaaaattattctattttctatatgaaatttgtcttaaatttaaaacgcctcttaaaaaatgggttgagttgggttatatagagttagagtgtgcccaacctataaccaacccataattatatatctgacctatcaatgagccatgacctattcttaacataaccttttactactaaaaatcagttgggttgatcaggttgaataggttgcccatgtgcagccttacttttaatctttcatcaaatctatcctttttatttatttatttatttacaaatcttgttagaatttggaaatgtgtagttaaggtttataatgtttcatcttaaaattaattggtaatgagaagagtaactcattcatcttatacaccctcctcacgtgttggttttagaaagtgtgggtataatgaacgaactttaagagactacatgactgaacgtgatactttaaagaattccacagctaaatcaaaaaatttgtgggattctaatactagaactgacacacattgatcgaaaagtttcaaatagaggtcaaaggtggagacaacataagcttttttaattgctctgataccataataaaattgtatgatgtatgagattttatctcaaaattaattaattataaaaagaattatctataaatcttgtgcgtagtattatctttcacattactaatgtgagaaatacttctactattttattgatatacgagcttttatcaactcttcctacttggttcatatgtgaatgattataaacccacatataaaatatatataagtcttttctctcacctgagagtgttggttatccaacttgacggaatgtctcttctttaaactttctctagacaagttttagtggtgtctctggtcaagaaatttttcctttttaaaatttcctctggtcaacttggcttttctctaaaggctactgttcattagttcaggtgtggtagttatgggggataatgtggaagattcacgtgaacaaagtaatatgggaactgactctggtacaagggctcctgaagttaatacgaatagtaattattctcaaccacgtcaccctcttgtcaacaggaaggaaacaaatgatgcagtaaatggggagggagaagtgactgcccaacataaagattcggatgctgacctaaaagaggatcttgaagtattacgaaacaactttcttgagtccaggactcttgacttagaacctaattttgaacttactgccgagattgttagtacaggagttctagtcagctttcttgatggcaagagggtttctaaagctaggctaaaagccattctcggtcagatttggaaactcaaggggctctggaagttcaagataatgaagccaggagtttggggtattttcttcgataagcctgaagactgtgctgaagttcttcgcaacagatcttggatcatcaatggaaaactattaatcacacgggagtggcttgaggatggagactggtacaatgcagatatgagaaaggcgatgttctgggtcctggcttttggactgccaactccttatcttaatggagttaactctcatacggtggcaacaaaagctgggagatttattcggaatgatcaagtcgatacaaagataaatatctgaagaggttttcttaagtttcaagtagagattgatatcactcatcaactatcttcgggcttctttctggacattaagaggggaagaaaggaatggatacaatttaggtatttcaagctccctaagttgtgttacaattgtggttatcgcggacatgataaaagaaccttctttcgttcaacggcatttgcatatccacatgtgggggcaacggttccaacttatgggccgtggatgaaggcggaatcggtagtgtttagttgtttcaatactagaaatcaacttgaatatttcagagaagaagctggcaggactcttttgccggagcgaagaccaccagtgtctggcgcaaatatcaaagataaaggaaaacgaccggtcgctgcaaacagcagggagccgtccctgcaatcggcacctattgctaaacctataaggaaagaaataagggtcaatgataactccccaggtgccattttggggaaaaatttgaaaatagtggaaaaacttcctccatgcccgatggtcaatagtaagcactctaatgctggcacacttccttcaacaagtattaacaggggaagaaaagctcggtcagtttctcctaggatgcgacaattacacaatcaaggtaattcaagtactctatctgaaaatgacattttaaacaacttttcttcaaggccccctccaaaccctgttgataatgggattctcacaactattatggcccatattgggcccacttatgagcaaatgatagagaaaccccatgttgaattatgttcctctaggcagcctcacaaacaccctgagcccactcattttccctggtccatttatactgaagaaattggagggtaaaattaccaaaagacccctaggttatttttttagaatttatgtttctttggagggtaaattagtcattttgttaaatgagaattttgacttttaattttatgggctaattgtatatttt

SEQ ID NO: 230139 - DNA, 765 bp, Cannabis indica
ggttgtggaagaaccaacggttgtggattttgtggcgaaggtgtggaagaaacatgtctctgttttggccatggtggatgattcgaagacctctaatgtgttcagattcgggtttgactctgcggaggataggaactgggctctgcttaatggcccttggtgcatccgagggaatacgctagtgctccaagcttggacttcggctactgatgggccggttgtgtttcatctcatgcgtgtgtggatccaacttcataaccttccccatgaatatttttctatctctaatggcaatctgctgggaggtttggttggaaaagtggtgaatgttgatttggaggaagataaacctgttttgtgggatgatttcttgcatgtccaggttgacattgatctcaacaatcctgtagtctctggatttttctttgatttggctgctggggtaaagaaatggattcaagttaagtatgataaaataggtattttctgctatttatgtggctggctgggacatcaacggaggggatgtagtttttcgtccccggttacgcttgcgaatatcgatggcactccgtttcctatgttcggtccttggctatccacctcctctgcgtatcgtgatgttttctccgggccaaaaccgtttggctcccgtagtattttggctgtggctcaaagaaagtcgacgggggatgttcgtttgtcgccggaggccatggcagagggtgttgatgacccgagattcaaaatctccaacccggttcg

SEQ ID NO: 230140 - DNA, 1326 bp, Cannabis indica
ttgggcctaaaaaacggaaagctcttgatggtattgtgattcaaccgaaattaggatcgaatgctgaaagtacgactgaggctggaaagattactgagttgctttaccctgttaaggatacacctgttgttgcgatttctgggttaggaactgaggagaatccaagcgctggtaatactgtcattcacttctccccgggaactaaggtgcatcgttatgaaggagaaatatctcaaagggggtaacttttgggatgtccaatgtaaagcgtctgactctaggctgtggaaagaggtcctaaagtcaagaactcttctcaaggaggggatgtgccgaagaattggagatggaaggagtacttcgatctggtttgacgattgggtgcctattggcaaccatcaaccaacgccgaaattgaatgccacacagggagttaatctggtgagtttttttattagcaatgagcagacctggattgaaagcagacttcagtattgctttgggccggaggatgctaaaaacatcatgaatattggactacccacccacaaacaggaagactcctcgctttggcttggggagaagaaaggccttttctcattaaaatcggcttaccacttggttactaagcataaatcttctaattttccagaccggcaatggaaagtgatttggaactgctcaattcatgttcgactaaagctcctttggtggcaattaagaagtaacgctcttcctactcgtgagaaacttgctatggccttcaacatcccttctattctctgtccgctatgtgatggggatatggaatcctctttccatcggttatggacttgtcactttgcaaaatttgtctggtttggaagcctgtggggaattaggacagaactttgccagtgtatgaattggagggaatggatggattggtttgaatgtaacaataatagaccggttggtcttagctttaatgactttatgataggtgcgttatgcaccttcgaagtaatttggaaggcgcgtaatgaagtggttcatggtgctcaactggttcatatatcgaaagccattcatggtgtgcgtatgcggtttaaagaccatatctctcgtaacttgattcctgctgtaaaaccgaggattaatcttactcccccggttggttggatgtcctgttgcacaaatatctctattgtcactgatcattccagaggagcagcggtctttagggattccaagaaccttgtttgctgcgtctcgatcgagcgttttgctgctactgatccatcgctggctgaagcgcaaatgctagtttgtgttggaaattatttt

SEQ ID NO: 230141 - DNA, 1053 bp, Cannabis indica
agaatacaattttttcagtccatttatctatataatgcgattgaagtgataggagaatacaattttttcatacccaaaaaaataaaatatagctttctctaaaaactctatttgcgatatcatatatagagtgtattcgacgattcgcaacagtgtttccgatacagagtacgacatggattgttttattttgggaaatcactaattttcaactatttgcaaatttctaagtaatatcgtacacgtcttaaagagagcgatctagttcacgactcaaccaaaaattttcattcggtaatattgttcttctcttatttttagtagcagcagtatttacaacaacagttgacattattcagttttatcctagtgactgtcaagatatctcctatcacttacgtgcttgttccaatgattcagtttatatatatacatatatatattaataataataaaaaaaaaaaatctttaaactatagaaaaagttcaaattcgggttggatattttacttttattttagaaaaaaagtaacagagccaaaatccaaaaaccgctagtctaaagagagccacacaaatcagatatcgattccaagtggtgcatacaggaaatatttcatgtccatatgtgtagactttatattgtaaggttctcatgaggccatcatgacaaaaattaaaaatctagtaatatcagaattttaatacattaattattattcttttaatttgtatgtgaagaagttaaattgtatgtatgtgcgtgtatttcaatttcaggtattattttttttaaagtaaaaatgtacatcactaatgtatacaaatgcaatcttatcaagtacagtggaataatgatataaaagattagtaaagataggttcatttactcacttctaactttttccctataaatatacttgaaaatttcaaggccatatatcaaatgataccttctgcctaacctacaaaatggaaagggataactacgtctatctgccatggcaagacttaacaatatttctctcacttattactcttctttcttttctg

SEQ ID NO: 230142 - DNA, 830 bp, Cannabis indica
ggtgtatcagaggatatacatgaattttaatatttttcatgattttatacccgataacggtggaacttcgacagacggccattttagtcacatggataatgttgcatcaagtatttgatggagcattattattgagtgttttagaatatcggggtaatagaattggacaattttacccctagatttaaaaggtttcttagcattgaagtaagggtattaatgtctttttctacctaagttaattctagaaatttgtaattggatgattatgttagaaagtaagtgctatgttctgaagttagtagattaattaagaaattcaaggttagatacaaaaccttctctctcctcaaacattatctctttctctcaacttaacctagaaccaaagaagggaccaactttcagacctggattcttcaccaatcagcaaggaattagtaggacttaagtgaagaattactttgtaggatcaaaggtaagctctagttccttttctctttgattttgtaaagaaaagttttgtttggttatgtgacttttagaaataggtgttttccgagtttggagtgtgtaagtgttggggattattttaccagaatctagatttactaccatgtatgttatttaacatcctaaatatgaatttcgaaaacaatgaaatttaaacatatataaagttcaagaaaccttatattggttacagcagaattaaaacactccttccactcagatctctaacccttgtatcctttctgtagtagagtatcaccaagatttgagcccgattctccttcagttgattggattcttcacagtcttacacacta

SEQ ID NO: 230143 - DNA, 1234 bp, Cannabis indica
actaatggtttcgtccaaattgtcaaagtgtctttttttccatgcttgcaaggaacatcttgttttatcaaagttctgcaacaagcttctagcattactaagatcttccaactcccagaccttctttatttcttccctacaagattcttctcttgtccaggcatcataaaatctaaaaggtataaatcctttactcctgaacatgtgagtctccaaaaggattggggcatgatcagatattgattttggaaaattctagataccagcacattgcaattcagtgatccaataaatggagcatattccacggtccagtctttcacgcactaaacctttattaaaatgtttgccaagtgaaatgaaaacctttgaatctcaaatctgtaccccctgtgacttgacagaattcttctagccatctcgtatctctcgaagtaacttcattgcctcccaactcctcagctgagttaaggatagagtttaaatcccctaagactacccacggctcattgcagttgaaagccttcgaagcaagtcccctcgaaaagacttctttctctctatcatatggtggcccgtagacagcaaaaagacaccattgaaagtttagctgagaatccatgattgtggcttcgatcaagtaatttccagactctataactgagactttgatgtctcgactccaaagaagacacagcccccctgcctggccgttttctgccacacagtccataccagtaaaatccaatcttcttgctaaggcttccaattttcctttttccaccttggtttccatgagaaaaacacactccggcctatgttttctcatccaagccattaaggctaggtttgtcgggtctcttgcgaggccccgacaattccacaatagtaatctcatttaaggtttggcggcatgcatagggccgcctcctcacccatttgagtgttttgattgcttgcctgaacatcgatcaagtttaaagagtcttcaagattctttgtgacattggcctgcccgatcttttccttgttcgcctatctccttgttcttgaaccttatcttgagcctgcacctcttcttctctttgtatcccttctcgttgatgaagaagaagctcccgctcccattttaaatggagtgtcaggtccaggggagaatccaggcatttcaggaatcacttgagagaattctccagtgttctcttctgtatgttgaacgtatggtattagagta

SEQ ID NO: 230144 - DNA, 729 bp, Cannabis indica
gagaggctgggaacactcttctcaagatgagattgccaacttcaaatgtctgactcttgactttggaattaaagctcctggaaattttgtcctggtacattttttgctagacttaggactcttcaattaaatccaaagattcctgaagtagagcatgatttcgggtagggtcataagtttctattctatgagatagaatagtgatgactgctttgcatccttaaaccatcaagtaaagagtgtgccccattgaaattctctcggtggtcctgtatgcccaaagaactctaggaagttcttttggccaatgatctttacaagcttacaatttcttcttcaacgtgttctttaggattttattgatagcttccacttgttcatttgcctatggtctgacaatagctgagaaacttttgatgatcccgtacttgacacaaaagtcaatgaagtgatcgctatcaaattttttcccattgtctgctataactttgtgtggaaggctgaaacgacatactatatttttgatgacaaagttaaagccctttttggcggtgaacgtgttcatgggttctacctccacccacttggtgaagcaatccacagtaactatggcatatttaactcctcctttttcaattggaagagagcctactaagtcaattccacaaacaacaaaaggccatttattgttcataaggtgatttcagttggtggagcttgcaaaacctt

SEQ ID NO: 230145 - DNA, 1635 bp, Cannabis indica
ttcaattttagaatatgtaaaacggtctatacactaatctaaatccctaattgcaccaccattagcctctacgaattagtatagtcacaacaaatgtaggcagatttacttgtgactgtaatctaggcagatttactaaagtacttttttcttctctccatgatttcaagcatctccgccatatgtgaattcagtgttagctacaaaaagctaatttataacttgaacttagcttctcctctcgcgtaatgctttcatgacattctcagcaaagataggtattctcttctttctctttaagacatttcaatctctcctttttatttcatgccatttatatcaaacatttaagtatttgatttaagttactttctcaattgggttttagctcatttttcgttagttctaatttcgtattagtaatttggttatgtttgttgacataattatttattctattttatattttttttctttggtacttgaaatttgcattttgtgtccatttttgtagacacttttcaatgtagatgcgagaagtgaatatcaaccttcaagagggatttgcttttggctaaggattaaactaaaaaggaagcagaagtaaatgaactgtaatccagagtattatttcatagtggattagtcagagtataaggtatgcttcgtaattaaaaataaacccaaattttagtttagacttttaatattcaaattcatatctgcaaatttcatagtccgtgctctgaatttctataagatcgtgctattaacttttataagaaggtgtgcttggtatttttctttcttaatatttcaaaataaaatgagtaattttttgacttttaatttttttttttaatttggcctttggcatggagctcctcaacgtaaaggatttcccagatcacaaggtaaatactaattggtctcttttgaggaataatttttctcagggatatattttctttcaggagtgttttggtatattgattaaagacaataagtggacgtagaagattaattatgatcatcttgaatttgtaattatatgagtttttttttctatgttattatgtctcatatttacatttctaataaaccaagaaatgaattagaaagagattacatgagggatgttataagggaaatggtggagccaccatttgctcaaaggatggtgagtaatcactctaattatcttagtaatgtggacattgttgcatcttgctgcaattaatatcaggaaagtttactgcagatggaagattgtttgcttacgtgccaaagccatgtatagttagttatatttcattggagatggaagatttttaattgcaattcagttaattttttaaatttagtgtgttaattgtttgacgcagagaacacttgtacaacctatgcaatcgaatacattcccaacataaagaaaccttgttttggtcctcaccctaagaatgtcattcctttagcctgtgatacattcggtgtgctcccaccagttagcaagctcaccaggctcaaaccatgtaccatttcataagtggctacaaaattttggtgagtaatcactgaaaaaaaatgatataaatcatgtacttgtgacacattccattcatagcatatgcttga

SEQ ID NO: 230146 - DNA, 3106 bp, Cannabis indica
ttaataactttgctaaaaatagatttaaaagataatgaattgatcatttgggtttgtgttgttttgtggattggataggaaataggataagctttgataaaggttgaacttttaatcaatggttctaattggataggaacttatttttttctaagttgtaacttactctaaaaaggaaaaaagaaaatgaatcttatctaatgctttaaaaagtagaaatggtctctcatgggctttacttagttgactagtaataaggtttacattaattataggagtaatttccattacttaaatttagaagtttttgataattaatcaattattgggcaattttctagtattcatgaaaaaaaaaatatatcggtgtactctttcgtataagattatttacaaattatattttgaaatttttttgcacacaaacaattatacgtaaaagataaacgtgtaacataatgtttcaacactgtttatggtattgtatattatttagaattccttgaaaaagaaaacttgtttattataattacaatgtacacgataatataaaaaaattcgtaatataactatttgagagccaaaaacacgtagtaaggagtttactgacactatccattttaaataaaacagcgtaaaattgtggtaatttatttgtgggtgtactaagtctaaatatgggcattgtactatggataagagaatcacttctcatttactaaaacgtgctcttttcacatatctaattaattagattacattgtaactaactccttaaaacaatttttttaagtgaaattctaagaaagagtagggaaatttcttgtcaaaattttcatgaaactagttttaaaaagttgaatatataaaacgtaggttatttaattttgttgttaactattggggtagtggtcttcattaatgagctttaaatgctaagaagactaatgagtgattggttcgtgaattaaaatgttttatatattattattagagtaaagaaattaagggtggtttggtatacttatatgaagttgtatgatatatatcatatttttgtaaatacttcatggaattttatttatattgaaatatataatactatataaaaatatgatgtaatataatttaatttaatataatatacaatataatattatgtactaaacgaaccacaaaggtattgttgttgggcaatagtggtaggaagaggtggtgccttataaataattaatgatattttacaataggctaattagaatttttatctccaaattttgatatgtattaaatcatacttttggaactttttaagctgttaaaaattaccaccaaactatttagattgttggaacaaagaatttttgtccaattttgttcaattttattagcgtgacaattgttcatgtagtaaatagtatctctaaattttgatatttatcaaatcgtttccaccaaattttgatatgtaccaaattctgtcatcctaaattttcatcaatgttaggcttccgtgagtaaaattagataaaatttcatgaatctaacaatctcaatagtttgaaaaagttttaactgaaaagttcaatagacataatttaatacatgttaaaatttaggtaataaaaatttcaatgcctttataataattattaaattaaaattatgtgagatttaaattgcttaaataacaactatggatatttttagcatttgtcattgattaaatatactataaattttggcatcatatatgtatttggatttttagtttatttttctaaatttatactctttgtggagggaagatgtacacgtattaatatttagtactattgatcaaagagaatttattaaggtggtgtgtagagatattattgaattaattaattattattattattattattattattattattattatttaagaaaagtagaaaagaatgagtaattcatttgtaaaataatgcatcatgaaaataataataaaaaaataatataaaataataaaattttagttcaagtcaatactacataggaagacttaaataaaaataagaatgattctaaataagtggaatgtttggtatggactatggagtaatattagtatctagaaaaagggtctacaaaacaatacattgtttcttacaagttttagtttttttttattcttaaaaaagaaaaagaaaatatataagatttttttttaattcttaaaaaggaaaaaagaaatggaaagatgtacattttcccctccaaagggataaaaatcatataaacatgtttaattttaaaagtaaaaatgaaaagttacaacattttcatgcacaacctaacattgtcatgacacataaatctaacactactatattgttccaaataatcacattaaatcacttctaataattttttatcttaaaatatattattaaaatttattacttaataaaaatctgatgaaatttttcatttttattttaggctctaaaaaaatatggaccctaagcaccacatgcgtagtctgcctataccggtcttgttaatactttgagaggaacttttaacagtgttaaaactaagagcattgctattagacaccaatagtgtctaacatcttctcgacatgtcgcgttgcaattagctagcgatactccttaaaaaatagtatattaaattatatgggactcgatacttagttagatattgacacgtaggagggtgctaggcaccactagtgtccttcaacatttctctaaaattaatttgagcgataaaaatcttaattaactaagtaattatattataattaaagtaaagaaaagaggataaggttgaagaagaagaagaagagagatgaacagttacggcatgggatcataataatattagtgagcatcaacaacgactcccacactactcacttcacacctttatattccattccttatttgcccttttctatttatttatttttaatatttaattcaacatgcattgtcaaagacacgtgtcattattgtatttttaaaccaaaaaatgtgaacaataaaaagactataatgaacgaaccaacttaatagccagccgccatctttttttt

SEQ ID NO: 230147 - DNA, 1792 bp, Cannabis indica
gaacttgttaattctgccaagaatttgaagaaaaagctatgaaaatcccttgagtgcagctggtctcctaggctcgagcaagaggatagaagaggatgagcttatgttgacttttcttaagttttctaagtttgtatcttcatttattaacacataaaactaaattaagatataaacctattattagtaatatcacagcctagaaagggcactgaaagacaaaagcttaactttataaaaagactattctatcccttcccttaacacttaaacttcagaaaaaatctaggggtattttggtcatttcctagttaattaaccaaaccgataacttaaaaaaattctaaacttgactagtatatatctaattccaaataattcattttatatcatcgtgacatctttgaccactccgtcaaatttccacggccgccaaacccaaaaatattttattctaaaaatgatatccacgataaccccaaagttcgataaaatctccgtaattaatacattacgctttatttattcatttactcatatttccctaattaactcgtaattagtttaattaggattataatcctactctaatgcccacttaatcacatatttaataaaatatgtccaattaaaatatcattatattttctaggatattacaggctattaaaacttacattgacgagacacacacctgcctcagagtacacaactccaagaaaataattcatttattcaaagaagcgaatacagttttgcaaagcaacctcgggttacgaatagcgagacaaccacctcgctattctagagaaacttgacaaggcgaaccatctgctaacacttagcattttttcgacattatgatagacaaggataacaactcagagataagcaagatacagttgtccaaatcagtattaaccatctataaggataagattaaaaagcagttaagcagttattctatattatcccacatgcatttaaatgaaacgtgggaattgtccacgtttcatgaacggttacattttaaatcgatcccaaatgtaaataattgccaacctatattcctataaataaggacagattccaccgaaaaagggacagagaattttagagagaaaaaagatatattatcaattatatcttgtactcataaactatcataaattagatagactcgtggagtatgcagatttaactgcaaaaccacgtaaaaattctggtgtcactcattcatttattatttctcattaattctgtgatatatttattacgtaaaggcttattatttttagttaacgaaaatctacgtgaacagtttggtactttcattgagagcctaagtaataaaacttagaaaaatccctccttacaaacagaaatctatccatggctgatcacaatcaaaatgataaaaatcttcctgaggaaactacacatcgccctgggaaagagccaatgggttctcaaagaccctatactcttggaacagtacgttcaaggagaaattatggtggtgataatcaaacccagaaggaaggaacgaagaaaccaatacttctacaggatatgtacctagaagtgaggatgcttatgatccaactaggtatgtaccatttggaaaatagacaactccggcaacgcttagccgaatctaactgacaaaattctgagttagaaagagaggctacaactcctagggcgactcagggaactaatacacacaatcaacctgatcctggggtaagaagaccatgttgggttttgtgccctaaataaaacccattac

SEQ ID NO: 230148 - DNA, 1414 bp, Cannabis indica
gtccctgcttactccccgggatcctcatcggcctctacatccaaaagaagacgaggaagaccgtctgcgactaacctccctccccgtgcaacaaccccctctgagcctcatgagacatccccccctcccagaagaaggggacgtccttcaaagtcttcccttggctgcaactccaattctttcacaaaaaaaaagcaacaaaagagtgaagccaggaaaaggcagaacgccatacgagcaaattgggaaaataaggtcattgacctcaaagtcgacctcagcaaccattttgtaattgttgattgtaaaaataagccgacacaatcgtgcaccattcaggacatttcagagactaatgaagaaaaaagccaggtttttcaatttggggccgtggagacttgcccagaaatgtctccaccatccaaatgagagtcctagcttggaactgtcgtggtctcgggaatgcagcgacagttcgacaactgaaggagcttatccggaagttcgatcccgaagtcttggttctctctgaagtaagactctcaaatgaaaacctcaactctttaatgtcaaaactacatttctacaatcattcatatgtccctcccctagggtcagcaggaggccttagtgtgtgttggaaaaatggtgtcggatgttccatacatttcgcagacaaaaacaagatcattgcttgtatcacatccgacccccctgataaaccatggctcttaatagggtcctacggccctcccacttatggtgaaaaagagtcctactggaacagtattggcaacttcatcagtgaatgtaccctcccagtgctcttaataggagaccttaatggaactcttctggatagcgaatgcctgaactactcctcttctagcaacatcgggcgatattccttcgatcttagaagaactgtcaaccgcactggtcttattgacctggggttccaaggagtcaaattcacttggttcagaaaaggaccccgatccccatccggaacttgtttgaaaagagcaaggcttgacagggccttagcatctgttgattggaggcttgcctggcctaaagctattgtaaaccacctatcagcttcgaactcggaccacagccccattttactggataccgaaggggggcgtagctgttccaacgcccaattcaaatatgagctgatgtgggaaagagacccgcgagtcttttgggtagttaaaaatgcttgggcaaatgcacagcaccacaaccccatgataaacatgtatcgaaaaaatcaagatcacgaaaaagcaccttgccaagtggaacaaaaaccagttcaggaacctctctactcaaatctccaaagctcgttccaccctttctgagatcgaaaattccgtaaatgtgacttcgagtctctctcgaa

SEQ ID NO: 230149 - DNA, 1327 bp, Cannabis indica
caactcctgcaacaaatgagaccgtgacaagatgacaataccacaacatcctcagggagaaaatcaaagattttatgtttgaattgaaagtcttcttcatcaacaggaatgtatgtgacagttttgatatctttgttgagccatgggaacttgtcttggaagataaatcctgagatagagagttttgtcctttgtaattgagattgaataaaagaacgatcagatatcaagttgttccaagctttagatacacatttcaattgaaacaatgtctttgtaggtaatagggatagcacttcgaagaatacatcattattcaagcactttatttttctcattttctgaaacacaaaatcagatcttatcattaattttatatatataacatgtgttactatactaaacaagtaaaagacaagataaaattatttaacaaaaatagaatttcaattaagataatgaacaaattaaagtgatgtttggttcaatggtaatcataatagtaataaaaaggtcattacattgttcgttaaaataatattttaataaaaatattttaatcaatacacattttattcaattacattctcataccaaaccaaacattataatcaatttctattactattcttatttcattattgttactattacctttccattacaccaacctaaataatactccttaaaatttgaagctaattaacttaatttggaaagttacttttgaagtaaaatgtaatgaatacaaaatattaaaaaaaattactattagataagtagagtttatagaaaatgccatgatatgagctcttttatgaactgtatagatgaatcactatactcttattattagaccaatttataattaaataataataaaaaagacataatgtttaggactatagaacatagagggaaaaatcatatttttcatgatgttaggaatataactcatataatcaaatattgcatctcacaactcaacctcaaaaatagaatttcaattaacataaataacaaatgaaaagatactcttacaaatttaatttgagttgcaaattaatttaatttggaaagctctacttttgaagtaaataaaatggaattaatacaaacaatataaaatagcactaaaagtacaagtttatagataatgacattagatgagctcatttatgaacagtagatagatgaatcactatatccctattattaagattaacaaggaaagacatgatgattaggactataacagcacataaagagcaaaattaaaagtgtaagaattcttatagtagtggggggggggggggggggggggggt

SEQ ID NO: 230150 - DNA, 798 bp, Cannabis indica
ttttattatttgaatattcttttctattttttttaatagtcacaacgaaactcgtacaaaaattttaggaacttatttcaaaagatcagcgcacctctattttggtcacttggagttggtacgttttcggaggagattaacacctaattataaactaaaatacccaaaacatctactttctttaataataaactaaaaatccaaattaaacgaacacctaattatctctatcaagaaaaaaaaaatcttttcttgaattttcaaatcaagaaacacacaattgaattggctgcccataattcaattcaaccattaataaagaaacaaataattaaataaataaacattattgacaaggcatacttacaactgcacagcttcaacgaacttctgatgatcctgctctgaccagctctccctggacttggtaatagtatagggttttcaggtcttcttggttggagggacgtcaaacgacgtcgcattaacattagcagtgggcgatggtgtggtattgtccggtggttgcatcaaattgatgccgggcaagttatgatgcatattcgattaataggggtgataattatttgataaagaacaaaagagatacagtgaaagtgaaattagggtttttgtgactatttaatgattacattttattataatataattatattttttttattataattatagtgatatttttctttcatacaggttattaagagttaaaattttttagtattaattaattataattaattatttttttaaaataattaattaaatatttaacaa

SEQ ID NO: 230151 - DNA, 848 bp, Cannabis indica
tccaatccctccctcaccactaagctagccttagtggctttaggaaaaaaaatttaaacctaatgaagggatattttatcaaactttccaattgtaattacttttacatctatttttgagcaatagttacatgcaatcatataaaaataattataattattaaaacttaaatattattattattttaattgataaaccaatatttattactcttattattattaaattatttgacttttaaatgcgttatgttattgagttaatttatttattcttacatgtcatttttttaagtttgtcgtgtcgttaatttatttgttattacatgtcgtatttttaagtttatcgtgttatagaatttaacattttgagcgggttcgactcgaactcgagcagcccgaactcgaaccggcgaaccgacaattttttttttaaatatgcgagttttcgggcggggttcgcgggttgagattttaggggtactgggtttcgggttgaacccgagaacccgcccgccaactcgcatatttaatacattatatatattttttttatttttttttattacatattatatattatttaaaaataaaaataattaaaaattaaaagtaaaaaaccttcacctaaacttttacatttgatttcagcctttacttttttgaacttcaccagacacacacgacacagagcaccaaactagagtactagacctcaatttgaaagtccagaaaaaaaaaaataatatatatatatatatatatagggatataattttgtcccgtgatctactttcacagaatgtaccccgtggtacattagatgggtctcagggtacattaaatgag

SEQ ID NO: 230152 - DNA, 1240 bp, Cannabis indica
aaaaaaaaaaaatcagtagacttgtttactttatttatgcacaaaattgacctaataaggcatggcgtttaccaaaattaaggcacgttgtttacttaattgaaggtaagaagttacttaaaaggacatgtcgtttacctaataagtcatttagctaatttaaggcacattatttacctaataagacatgttatttatctaatttaaggcacattatttacctaatttaagacacgttgtttacctaataaagtatgttgtttatcttatttgagggtagtagtttttacttaccttttttatagaacattgtttacctgataagacatgttgtttactttattttagagtagtcatttttgtttaccttctttaagtcactataagtcatgttgtttatctaatttaaggcacttgtttacacaataaagtgtgtcatttactttattatataatagtaatttttgtttaccgtatgtaaggaacaaaatttacctaataatatatgtttttttacctattttaaagcacattctttacctaatttaaggtatgttgtttatctaataagacatattatttatttaatttaaggcacgttgtttacttatacgatcatcgtaataaacaagtgatgcttaaggtcagcgatgtttgaggcaatgattgcttgcttgcttcaatcatccccttgaaaagggaaacattaacaaactatatttattattttttttttctttgatgtataaggaaataactttctgctctattgaatagtatattactagttcatatttataactacttattcatgtttatttgttggctttaaaattatggaattattaagcaaatagaaataaaagttttttttttttgaaacaagattcatttaatcacaaaatgttaatacaatgtaatcatcaagtctagctcaacaacttgacgagcacaaggaggtacaacttctatatagctctaggcttgttaattaagacataaatggataaattatggggcactttattggcctctttacacacaaaataaacaccaacttgttctctttgcaaaagagtcttgatctgaagtagcaacccatcaatgtctcgacataccatatcagtgttgtgtatcaattcaagtgcctctagacagtcacattacacctcaaaagatggctagtctcttgccaaacctcttgctaaaatggccaacaactttgctattaatggaggag

SEQ ID NO: 230153 - DNA, 706 bp, Cannabis indica
agcaagacttcctccatggccttacccagaaaactcaaatccatttttggattcgtcatctaggctcgataaatggagcgcatggaaacgacattgcatcgctccttggtgtgaacctcttttgcctcgagcgctacattggctgcattgagttcctcttggagtttctgacatagcttggacttgtctttcacctccttctgagtagcttcaaagtcagccttattggtcctcttcacctcctcagcttccttgtttaagcgagtgatctccaccttagcatcattccattccttggacatagcctaacgctgactaatcacctactggatctcgctctccaggtacttcatctttccagaccccaacattgggcgacaaaggagatgaaagtttgctgaaaacaaataaacaaaaatgcataagtatttttggagatcgttaaaaagaaaggtaaaatgagaagggtatagaagcttaccgagaggccaaaggcgacactcctctaaagcatctctttcaggtggccattgttgattaagtcccagtcattgggaaggaaggatcagaaatgatgccaacaagctgcaacatactccacagtatactccgagccagccctcccagcctcgatgagcaatgtctcaagtgcttggctcgaagaggcaatagcctgatttgtcttgggaatgggctcttcagtatg

SEQ ID NO: 230154 - DNA, 1560 bp, Cannabis indica
gttatatgtattttttttaaaatcaaattaagatatattttgaatattacaaaactatctataatatgaaccaacaatttatctttttatcaacagcctttacacaaaatatttatgctactaaataattcatttgcacttcaagcaaatatttcttgtcatcaatgtttaagcaccccaaaaaaaattatatataaaaaattttagattctctaatttttttccctaccattagagatgatcaattcttatatatatgaaataactatatatgaaatctatttatatatgtagtataatattattttatagccaaaataattttttttctataaattaccaagtaaattactagggggagctatgaagggaacttgaggtgttgtgaagcttcgggtaggtgtatgtttgaatggttggatcacatcccaggaggtactctcaccataaccaactcattcaacattcaaatctcacaaaaatttcaatagtaattgcaaacccacgaaaagtagtaagatattaccacaagaattagacttcaaccaccttcaaaaatcacggagataattgagatacttccgcaatggtcgtgtctcttgaaacgagaagtaccgacccttcccctatacaaggggtcacccatgacttaggaagaagatctaaaaatcaacacttatagagtaaaaactaaaaactctgccatttttattccttgcatcaagagcatgttcttgactttgcaactacgattaataaaatacgaggggagtattactgacatttgaagttgaaccctctttaaattctagttttcttcatttgcatttattataatttcaatttaatttctcatttattatgattctgcatcagttggttaaaaatttagtcaaaagtattgtattactactatttaatacaataatatatttagtattgacttgtattaatagattgtgtaatgttataatatattttcaataaattagaccccaacaccgactgtgggtcgagtcctggtccaatcaagatccggagtttggggtttggggtcagtcgtttggggtctggtctgaatcttggtttgggtccagactaaaacaatatagtttcagtataaaaatgacctattatatttttaggggaattaccccatatactattttttttaattttttttcaaatttacagtttgggtttctaaagtagttgcagcgctagttgcaataggggtttctgtacgattttttgttgcaatttaagttgcagcgctagttgcaataggcgtttttatgtagaattccgtaaaaatgtaaaaaaaaactgttttgaagtgtaaaaatgaaaaagacccatatttttataaatttaatcaaattaatgtaataaggtgtaaatacttagttttttaattattttttgttagaaaaaatgtatttaattagttttcattgtttcttcataactaaattttgtcaaaaaatttataattaaattaaattatagattaaaaaatatcaatatagtaattacggatttcagatttgtttgagttta

SEQ ID NO: 230155 - DNA, 2265 bp, Cannabis indica
cacagtaagtgatacctcaatcatagtgagaaagatcgtgaagaaagacattcaacaagaaggagattcaacactaaagaaaggagagaaagagatccaggttcagatcttgataatactctgcgatagaaaggatacaagggttagagatctgaacggaaggagacatattattccgctgcgcccaatgtaaggtttctcatactttatatgtgtttaatttataatcgttttggaagttcatatttaggatgttaatcaacatacttgtgagtagatctaagatcctggtaaaataatttccaacacttatatcaatgaaaccattattaatttgattcctaaggtcaaatcgcctaccctcactagtgaattttggccaatcagcctttgtaaggtgttgtataaaattattgctaagatgattactaattgattgcgggaggttcttggggatgttatttcagaggaacaaagtgcgttcataccgcggcgtttgataactgataatgcaatgatttgttttgagtgtctctatgctattaaaaggcacaagagaggaaggaatggatttctaacatacaaggctgatatggctaaggcttatgacagggtcgactggtctttcatgcgcggtatgttgattaaacttgggtttcaccctggttgggttgggttacttatgcattgtactagttcggtgtcttatgctattcacattaacggagaaattattggccatatatcgccttctcggggcttgcgacaagaggacccactctcccctttctgtttcttgtgtgtgctgaggggttgacttctctcatcaagtgtgatattggtcgagggacaatctcaggtcttcaatgtggcagaaggggtcctgtgatttcacatcttttgtttgcagataataattttttctttctggaagcctcagtggctagttttgttcgctttagagaaactctacatcagtcgagaatgcttcgggacaacttgtgaacttgcgtaaatcagcggtatgcttctcttctagtattcctcttgattttcgtgattatttggcccacattctcggggtctcgcttgttccttgtcatgataaatatcttgggttgccttattttgcgggtaaaagtaaaagtggtctgttttagtcgattaaagataggattggaataaaatttttggctggaagtcaaagctcttctcctctggtgggcgtgaagtgttgcagaaatcggttatccaggccaatcctacttatgctatgagcttgtttcgtttaccagctggtattattaatgagattcaccatatgtgtgccactttctggtggggtggggacgatgataagaaaaagatgtattggtgtacgtggcctcatctctgttggcataaaaatgatggtggtatgggctttcgggacatgtttctgtttaaacagtctcttctagctaaacaggcttctcgattatataactcgcctaactccctggctgttagggtaatgaaagggttctactttggtaatggggtcgtgatctctggaaggatggctgtcgttggcgtgttggctccggcgagtcaattagaattcgtgaagacgtgtggatccctaaggatcatgtggggcagacgtactccttctcgggtgggtcgcacctacaaagggttagtgacctcaaaattgattctggaagatggaattctgatcttgtggaggagtgttttgacgcaggggaggctactgccattttatctatcctgtgctccttgtttgatagtcgggataggtttatttggcatttctctaataatggttctttctcggtaaagagtggatattggagcactgtgtccaggttgggtgggaccaagcttcaggcccctctggttcttctcagtggtggaaaattctttggaaactgaatctcccgcttaagataaaaaaatttgtgtggaaggcatgtctgaatttcatcccgacttatgcaaacttatctcgccatggtatgaaggttttatcaatatgtctaatttgctctcagaataatgagactactattcatactttgtggctctgcccttctcttaagtctattcgttcggattggttgttgagtggccttgactccttgaaggacacttcttgctattatgagttgttactggagtgtatggatatcttgaaaagataggaacttgagcagtttataacccttggctggagtatttggaataagagaaatacctttctgc

SEQ ID NO: 230156 - DNA, 630 bp, Cannabis indica
gcaattcatttaacattttataagattataataaagagaaccagttacaatattaacagctaattatatggatagatggagcaaaataagacaagatatatggaagcaagcaaggcatgagttggtggtggtccaattagtgccttagttgtagtcgaacccacccctgttatataaatatatatatttatatcgattcattgagtgcgtgttgtggacttgtagtatagtacttgtcattccgtacgtacaataatcttcgatcattgacacagacccctaccactcgtaccatgcataatatatgattatgacacgtaactattggattagagatatatgccatgcatgcacccatgactcatctattattatttattcatttaattaattatactacgtacataccctaccatgtactatactccacatcaaaattcactcgtccattacaataattgttcaacaaaatttataaacggcccaaccaaaatcaacttcctaaatcaaactaaataatttgacaaaaaatacaatttaaataataacctaactgttaaatcggcccgtttattactaaaatatgtgacaaacatacagaacttctattcatggaaagattaacatttt

SEQ ID NO: 230157 - DNA, 3112 bp, Cannabis indica
tgaaagcaccaaactattaacgccaatttttgttaactgtatttaagcctagacagtgatagattgcacagaaaataatacaaaaaaaaaacaaagatatgaacacaaaggtttttacgtggcttgcggttaaaattctccatagtccactagtcaatcttattagatttttgatacagctctacgactgttttctctcatgaattttttgtcccctttttaatataacttgcctctatgtataattatatcatagggcagttaattatatagctgactgatatcttgcaacagttatctcctgaaattgtggggtttgatttcatacaacgtaaaataaatgtggttaatatttgaaaatcacacagctataatgagtccgcttttaccgggtcaatataaatgtgtattaaatacgttataaatcgtaacgttctgcgatgtctcgatgggaagacaacatcaataaccttgctagcgagctggagcttttcccatgtttttccaaggttgatgatgtaagcttggacgttcctatgcttgcagacataatgctccatctaaaaatctcagttcttggtgacaaggtgaacttcaatagccaacatcatttgaatgccagcttctatccgagagaactaactagacggagctgtgaatcacattgaaagatgtttggagctgattagtgaaggtaccatgagcgtgccttcttataatgagattgacgcctcgctatcagttgtatgggtttacccgactgttatacttagattgtatactgtgtattatacgctaattatcttagcagtcattatatctcgcttatgtctctacatcgtaatgaggttgatgcctcattttactcatataatgtcttatggtttctcgttaacgtgcgagacaataatttgtatatctttatctcgcataagaccttttagtaagcaacttgtaaatatactctatcatgcctgtattaatgagttattccactttcaaatataattaccattacatggttaattcacattcttccccgttttacacgtgtccccctctaaatggtagccgattttcaggtataacattagctgttacagaatatgctgtgagtgtcgtgctaatcagagaagaaaacaacgtccaacatctagtctattatatcagtaaaagactcgttgaagctgaaggatgatacccattgatagaaaagcttacttactacctaatcttagcaacaaggaagttaaggccatattttcaggctcatcctgttagggaatacactgaccaaccattacgcatagtattgcaaaaacccgacgcttctggacggttacacaaatgggtagtggacttgggtcaatacgaaataatcttttaacccaaaacaactatcaaaggacacgccttggcagaatttgcatttgaatgcataggcaaagaagagagcagttcaaagaacaacccagagccagtacaagagtcccaggcaaacaacaatgaacatagacctacctggaaattacatgtggacgggtcaactatagatcaactgtctcgtgcagggatctcccttgtcacacctagggggcaacacctgcatggggcactcaaatttggattcaaagcttccaatagtgaagcaaagtatgatgctctcattgctggtttaaaacttgctcgagaactggacgctgaacacatcgagatctgtagtgactcccaattagtaatgaatcatgtgtcagaagagtatgaggtctgggacgagaaaatgatagcctatttaagaaaaatacacgatctactcgcacatttcaagagttatgctctcgagcaaattccaagagaagaaatcacaattgttgatgccttagcctgacttgcgagcaacaacataactgaaaaagctaatttaatcccaatttattccttgaagaacccagcatcacttgtgcagaagaaattgaaatgattgacacaattccaaactagatgacaccaatagcagcttacctcaacattggagaacttcaaaatgatagaaatgaagctcaaaagatgagaaggaaggctggacggcctatcatcgtagaaggagtcatgtatagaaggggattctccatgccactacctagatgtgttacagaagaagaagctgcacgacttttgtccgaagtacatgatggattttgtggcaaccacgcatccaggcaaagcctatcaaagaaaataccaaggcaaggatatttttggcagaccatgatggaagattcaaaggcctatgttaagaaatgtgaaaaatgccaaagatgtttaaagataccacgtgcaccgcccaatgagctaactcagatgcaaagtccttggccttttgctatttgggaaattgacctaattggaaaatttcctaaaggtaaagggggagtacaatatgaagtggtcatagtggattattttacaaagtggatagaagctgagccattggcaaaaattacatctaccaaagtattagaattcgtgatgaaaaacataatatgtcagtttgactccggtaaaaaatagtctcggataatggcacatagtttgacagccaattgttcactaatttctgcacaaatcatggaatcataaaaaatttctctaagtggcacatcctcaagcaaatggtcatgtcgaagcattcaataagacacttaaagatactttgaaaaaacgacttgaagaagctaaggggtactggccgagggacttactagaagtactatggtcatactgctcaattgcaaaacgagcaactggatagactctatttgctatggcctacggctatgaagctatgtttccagtagaaatagaacctttgtcccacagaaggttgacctatgatcaatattctaatcatgcccccctagcagaacttgacgaaattgaagaaaaacgtggctcaacaaacataaagtttgtagcccatcaacaaaaggtggctcggtacttcaacaagcaagtgaaggcacgaaaattttttggtgggagatatggtcctcataagagtatttgtaaacataaaagacagcatgactggtgtgctcagaccaaactggga

SEQ ID NO: 230158 - DNA, 1018 bp, Cannabis indica
caacctgacttgcacgagcactttaactgcaatgatctaaatctttgagaccggttgaatcaaaatgtaagtctttagcaacaagctgagcaacaactcatggatctgatttaattaagagtaatacagatagaagacaagtttaggcgataccgatatggagaatatgggaaattattaggatatgatttagatgaagagacatatccatttcatcgtgatatattaaattatcaattccctcagggattcaagaactcacatgtcgcgcagtatgatgggacaaatgatcttgtggcacacctgaacaattctaacacaataatgcaagcagacaatgtttctaacagcttgcgttgtattttatttccaacttctcttacgggagcagcgagcaattggtttgataaattcaccaaccattccattacctcctgggaataactatctaatgatttcaagaaataatttcagtttgggagggacagaaggccagaggcattctcactgactaacatgaagcaacaactgaagaatctctaaaggcttgcctgagtcgcttcagtacgacagcaccaaaagtgagaaatttgaatgatagtattcggttgacaaccctctagactggaataataactgatttatcaatcgtaggtagagaactatgggatgatctatagcgtcgcctgtcaaaaatattaatgaaattaatgaaagagcattaatctttgtgcggaaggaagaggcacgaaacgagataaaaattctcaaatctggctcaggagacaaatgctgtaacaacaaaagcaggaaattcaaaccacaatgggttgaatggaaagaggaaagacaagttaaaagattcgtcaaaggacaagagaaagcagaagaaacacgagaagtatattttgatatacttagtatatacggaactaaacaaaactcgtgatatcatttatctcgatggtaattgctagttcatttagagtgttatcgatctcaatgcttgtggagagtt

SEQ ID NO: 230159 - DNA, 1846 bp, Cannabis indica
tatttaataggagacgtaaaggggcacaaaaatactattcaccaaggcaaatagaataaattaaagccttcttgtgcttcattattctcacaatacactacaagaaaataaactaaaaactgaattagaaagaaaacttattattgcaacgaaaaattgaatggagaagcttcctccgcgcaccaagtttggtattcgtgggtttattgtggtgatcttttacgtacttataggctcgtttggtacaccgtgatattgtattgtattgcattagtattatttaatacaatactatatttggtactaacttgtaccgataggttatgtaaacccacacacagaacatgcccaagacccggacaattggagccgaaactgaagctgaagtcgaacccaaacccaaactcaaatcctggacttgaacccgaacagggactgaggtttgggtctggttctaggtccagatccgagtttggatctagggactaggatccggtttgggtttgggtctgggtccgattcgggtttgggtccgggattcgagtttgggtttgagtccgaatccggagtctagggtctagggtacaagtctggggtcgggtctggggtctaggttcgagttcgagttcggtccgatttaggttggggttcgagtttaggtttggatttgggtctagggtccacgtccgaggccaggttctggatctgggtttgagttcgagttcgagtccagggctggggtcggagccaggttgatccagaccctttataaatattataatacaagctaatacaagttatttgttatgtattaaataatacgactcacattatattaacatttaatgttgtgataattaatacaatataatattttatccaaacataatgttatttgttatttaatacaatatgacccttatgcgacatatggggtgttttaagaattttacttggtgggtttagttgagaagggttgagattaaaagaatcttaagctgaagcatttaaagagtttgagattattttaaaaataaacttaaactaagatctacttaatcacgtcttccactaaaatcatatcaaagataagtttagttttacattcttaatctcaaaaactttaaactctcgtaataaaccttgactttttgtacctaaatatcgtgcaaagcctcatagaaaaattcaatgttttaaattttatgtgagagatttattaggagataagtcgtattgggcatcttttgagtaattaataagcatcaggttttctttgtatgagatgtttgtttcccaactttaaatctttggtcattccttctaaatatgtctcctctccctgttttaatggagaacaccaactctaatactgaaatagaaaatgataaagttttgggcaatatctaggtttaggtccaagggttaccaaccccttatctttcttggtaaaatgccctggccattggtgctaaaccaggaaaacacatcaagtttgacaaaatagaacaaaaggcagtgatgagaagagggtttttgaaactcttggcagtagtttatttgctagaaaggatcctagtgaggtttcgcttgagtataaaaaaaggccaaaaggagtggattcaatttaaatattgtaagctcccttctattttctttaactgtggttacttatttcacgatgttggttcttgttcatagcccaaggcctttgcctttcatccggtgggcaatgtcctttccctttatggcttttggataaaagttattagctcccctgtttgtagctgcttggatactaggaagccaaaaatgcacagaagacaactccttttacctgctgcca

SEQ ID NO: 230160 - DNA, 17427 bp, Cannabis indica
gacaacaaagtacatttcatttaaatatatataaaaaagaaaaaactcaaaaacagagcctagttagactttgaaatacttctggtcaaataatagagaacagaaattaccaaaataccctgaagaaaagaattaacaatttttttttgggttgtgcgtggaaggtagtggggagagaagtagggtcaaaacggtgcgtcgtggaggcaatccacggcaaatcaatcatcagattgtgttattgttatttatttttatagttattttggtaatttcactctcttaaaccgcttccttccatagactcatacactccaccaaccgattctcctgtctctctattacacggaaataaataaataattttgtttttataaaaatatattaattacagaaaataaaagataaaaatcgaaaaaggaaaggaaaccataaataaacttctctctctctccagttgcgtcgtccgtcaatctcttctttcttcccaggtatcttctctctctccattcttggtttcttttttatcttctttattagctctttctttttttcctttataattactctcgctttctctgttcatctttctaccccctttcctagaaaaagtaattaaatattgattgtttccttgtgtagacattgttttgtctgtattatacgaagatgtatgtacctgcattcccttgttgattcccaagttagggtttgtacttctgcagaaggaagttgggtgaatgtggttttagggctttctatacacgtattattctgacagccgctgcaggttcgttcaatctatctatcttattttttttttactactatttgtttttaatagattgggagttgaagactaaattagggtttaaatttcatttggtggtgattgggataggcattgtattgggtctgaatctaaactgacactgagttcgttttgacgtcttttgctatgttttttcagtaatgggttgcggtagattgtgatgaaaaactggtttcaatgaaatgggtttgtgtgataattcggttatagttgaagaacccgtttgcgtgtcactttccgggcataatttgtgctcggagattctagtgcaatctgtttccgatcagcactcttgttcgaagctttcacaccagttaattacagaggtgtgtactgttaaaggagatatgttggaaggggagactgatagtacaaaagtaatgccattggaaaatttgtctaaaaataactctggagatgatagaggttgtttgaacaagactgatagcacaaaagaaatgccattggaaaatttgtctaaaaatagctctggagatgatagaggttgtttgaacaagaatgacattggcgtagatgtttgtactttggaacagggtcgggagtgctcaaaggtaaacaagccacagggtgaagatggcttgggaaatcttgtgggggactgtgagacacccattgaagtccctggtatcccgctaaaacttagcagagatcagcaggttgataccacacgggagcttattgttaatggagatacgttggcagagcataatcaaaataaagatgcttttccattggagaatacttcgaaaaatgactatggggacagtaaggcttttacaaatgagagtaacagtgatgctgatgtttgttccacggaaacgggtggggaatacttcaacgaaaacaagccacacattgaagatggcctgggaaatctaggaggggagtgtcaggtatcattggacactatatctgttagtggtttgtcaataaactgtgatcagcaggttgatactacacaggtgtgtgctgttaatggtacattggctggggatattgaaaatgcatgtgttttggcattagataattcttcagaaaatgaccctggatacagcagggtttgctcgaacgacaatctcagtgaaattggtgtttgtactaatcaaaggggtagggaatgtttgaaggaaagcagtgcacaaggtgacgatgtcttgggaaatttagtacactcgggagttatatccgttactagtttgccaataaactgtgatctgcaggttgagcagaccattgataaaaatgacaaatatctttctgtggaggtgattgaagataaaggtaatgatgtagctgaggtgaacagtgatctgtgcgagcaggaatctcaattacatggttgtgaaagtttagaatcgctaccccagaatgttgtgctgggtaacagtcacaaacaaaaggaggactttgagagtgtttctgtttcagacttggaaaatttaagcgttaaaattgtcgattctgttgggtcagaagatgacacgtgtaacatggtttcacccttacagcggggtggaatattttcagaagcatcatgttcaggtgaagaagtgagtaattgtgacttgaagaaggatcaaaataattgcgtcagttgtattttggcagatagtagtataactgaagctgttcaaatggaaagcaaccatgtgtctctttccacaagtacggacagtatatacaagaatgagtcaccaagtatttttgtccaacagtgtgagcagattagtgacgggagtgttgatactccccctactaaacaggttatggagtttgttgaagaagaaagtgatgtaactttagatacaaaagttgttgggcgaaagatggtgcctaatgaagaaattgcaggcattctcaatgaaaactcatccttcatgccgtccaagtgtgtacttgaaaaatctggttctttccaatcttctcaacccctgggtgttgttaatgatgactcttctggaaggttggatgtgccagaccaacttggcagtcacatgtatggtcccatcaactctagcagtccagtagagaggtatagtcaaacagattatccaggaaaagatgatgagaaaattgattatgtttcagaaaccaaaagttttgacgtggtatcatcaacttctcgaaggaatagcagaaaaggtggatcaatcagaaaaacttcgacaacaaagacccctagaaaaggcaaaaccaaagtaccagctccatctagatgtattaaaattgcaatccagggaaggaagaagagaagttgtctgtccaaatcagctcgttcatctgcttggggaacattgggaaacgttacgcaactctttgacaatagtaatcaagtcaagctcattaatcaaggatcactgaaagcaaatggtggaaagaaaagtggaaagcaaaaaaagaaaggggctacaataagatcacaaggttccaagagaaaatctggtgctttaaatactaatatccgtttgaaggttaaaatggggaaagatgaatgtcaaagctctatgactgccatggttcccgaggttgttgatacttcagcctcatgtactgccaatggttgtgatattggtgctgaattgtactttgaatcagcaaaagtagctaacgatgttgaggatgactggagaaaagatgagattgccacacagtttaagtgtttaagcaataatccaagtgattttttaaatgacttggagagcaatgtggtctcagaaatgtcatctaaaaaagggggagattattttggcgtttccccccatatggttgaatcatcaggaggggctgcggatgacaggtgcaaagatcctggaacttcacccgattccgaagttattaatttaacccctgatgctcgtgttgattttaaacgtcatgatgacttccatggtgcagttacttctccgaaagatcttgccactcctggagatctcaccagcaataagaatgcgaagaagaaaaataagctttctttaggtaataatattgaagaagaaaaatcacttaatccgtcaagaatggtcaaatctaaatcattaaagctatacgtgcgaaaacaaaatagtaataatggcgttagctctagtgagaatcttatttcatcagtcagagcaaatgcttcaagcaattcagcaagtgatatggatttattgcacttgtcagagactgctgctgctactgtttttgctgagacgttccaagttgaaagtggtacaaaagttgaaatacccagcaatcaagatactggtgctgatttgtcaaaattacagaatggcaaaagttctattcttgatgctaagactaaaggtcacaaaattcgcaaaggcaagttccaggactctgattcaggaattaaaagtttcaatgtaagccagaaggcccaacgaaggtctgttggtaagaagaataccaaagagaagtctgtttgtggtaacgttacttgcaaagaggaaagtcaaccagaaacaggtaatacttgtttaatttttgtgcatgggtaaataatatatactgttctgttagtgctttcttttctagatctgtgcaatgcaagcttgattctgattttatactaattgatgattaaggtgtccatgtcggagatggaaaaatgaatgccaactctggtgaaaatgtgcctggcttagaaactaaggcgaacaagttaccaggttttactggggagcagtatcttcctttacgtaatgcttgggtgagctgtgataattgtcataaatggcggcgcataccggctgaagatgcagatactatagaagaaataaagtgcacatggtacatccattattaattcttgtttacccatttcaaggattcatgttagttttacagaaactctgggacatacagaataaatgcatattgggtttgtttgttatgatttgctttgattaaaattgagagttgtcaaattttcatgagaaaatattttttgcagggatcagagaccaatgcatacggatttatttatgttttttggcttagctgcttaaccaaatttaatttctggatctcattataattttaagagaaatttgacctagttttatgtctggtaaatcagattgttctataataattatataaaacctgatggccatacgatgcaattttttttatgcagttttgttctctttggtttctgtaatagtattaaagatcaaagcctactgtttgacatgaataccacagtttagtagttaatttatatattgtcattagctttttgtcttttcttccttatacttgttcttatttggtgaattgtccttaatgtgtgccaactgtttgcttttctttaaaatggtagctcatttttttattgtcatttgctttatgtacttcattttttattttcattattttttattttttgatacattcaactaattttcttgaaggacatgtaaggacaacatggataaaacctttgctgattgctcaatccctcaagagaagtcaaatgcagatattaacgcagaattggaattatcagaggcctcaggggaagaagatgtctctggtaccctagtaaatcatgaggtcttagaatgcaagcgtccaagaggtatgctttgtcttcatttattgcaggcagagatttgcatacatgtgtatgtttttacagaaacactagcatcgtatttgttgtgacacttcctctcatttgtcgcagatccaaaaaagactgctgcatgtgtcagtattaggactaatcaatatcttcaccgtagtcggaaaacacagacagttgatgaggtctgtactgaaaaggattttatttttgcccaaatctattcagtattctatttttagctgtatttgtagcttttgttagtaatatgctgggtatccttggggtttattggagattttatatgcagatgcaaattattgtgatgaaaaccaggtgtctgacaaattgaattttaatatatagcaataggacaacttgatatatgcttttgaatttatgttttttgtttctgcatacatatgtttgtgtcttgctctgaaaaatacccgagacataaaaaaaatgatgaaataacattggtgttcaatcctctcgacaaaattgtatgaagtttatttttttctttcttgaaaagaaacttcttttgtaaactttgtatggagatcaaggtacaatctcagtaagctaaactatacttgaaacagaaaacataacatagtaaaacaataataaaagggctgagtctatcttattacagaaaagttgcccattccttactaagattaagaaaagatagaccctcaaagccttttctaagatcgaaaaaagatagaccctcaaagtctttactaagattgagaaaggtagaccctcaaagtctttactaagattgagaaaggtagaccctcaaagtctttagctttgtcaacccaggttactacccagaatttaacattctcccagagcccttatgctgaaacctcattatctttaaaaattctgctgttcctctccagccaaacaccccaaaaaatagaaagagtggtagctgtccacaatagagatcctcctagcccctttcaatttacactctttaacacatgaacacattttctaggcatgcacactggatctcaaattcagtgagcaatttggaccatacgtttgagcaaagtcacactcccaaagcagatgaccaatatccttgccttttttcttgcacctccctagagacaaaattgtatgaagttttaaatctccaagcaactgtccagcatagaagtatatgagctacatattcttggctgtctctaagaagtttgatatctgcataatgttgtattattcttgtgttgaaaacatattaactcattgtaaacctaaatgacgttactttgagaaccaacggtattgctttaccaaagaaaataacaagttttagtacttcactactgccggaagtggattattttatttttttcaaaaaatcatattttattgactgcaaaatctgtaatagagattttacacgtgctgattgttttggtgagtatgtttgttggattggaagcttttgtagaaatattttgtcatttgtgcttgtgtacattgttcatgttaatatatatatatatatagttggtggtggggacatgttgtattgtagctgttgcctctttagctttttaaatgcttcccaagtactttaatttgtgaagtcttatcttattgtcatatagaagacgctagatttgttgaagtttgacgatcttaactgttttctatcagatgatgatctgccaatgcaagccaccttcagatggccggttgggttgcggagatgattgcctgaatcgagtgctaacattgaatgtatgcaaggaacctgtccatgccgagacctttgttcaaatcagcaggtatcttggacttgcagctattgttacggtcttttctgaacctgttttttcttaatctgttggtctgctttccttgcagtttcagaaacgcaagtatgccaaactggagaagtttcgttgtgggaaaaaaggttatgggcttaagttgcttgaggatatatccaaaggacattttcttattgaatatgttggggaggtaatattaacttgtgaagtatttcaaatgtaaattggtgttaagtcatgaagtatttgtttttttggctagttcccaacatgttgtcattggtctatgttttttctaacatgagaaaataaatttgtgttcataaaaatcattattgtagaagttaaatgacgcatggtttcagggcttacaattatttttttcttttcaaactagaaggaactgttggcaggggttccatgagttactgtatggatctgataaagaagtatgcacattatacagactataagtcccaacaagttaggcatagaactatacctttttcgtgcaaatggcatgaacagcagttaatacaaaataaagtattctagaaagttttttttttttttttgataaactgggtgtatgctgtgaaattgtgtttgattttctgctggcattttgtgtcgcctttttggacagatacatgagacttgctagttaatctggtagtggtttgtgggaatgaaactgtctatttttgagtaaattggagtgcggcaatttctaattggtgcactattaaagtttaaagttacttgaacttgctatccttttttctgagtgcaagtgtttactaactatgcaaatgcacattcacaaccgcgttattgttagtttattctttcctgcctaactaattactgtatctccaatcaggtgcttgatatgcaatcttatgtgtcacggcagaaagagtatgctctgaagggtcataaacatttctactttatgacacttaattgcaatgaggttagtatataggcatctatatcttattgatgcatgatcaccttttctcatattttgtcagcaaacccttgagtgtgtgcaagctcttaatgttcccttcaaatatattttgtttgtgtgtgtgtgttaatataagtatgacacagtatatatatcacattggaaaataatcatcaaagctagggggtgagtatgacatggtttcccattatggccttgatgagcacttggaatgcaaaagatttttgggagctatcggaattatatgttatgaactcatgatctcatgggtagatttaatagcatttttggcgtttttgtttagtacatattaggaattatgattcttcatttccagttgaacctcattatatgtatcttctggaatataagctggatttacaacatgttggttttgacatcttccttggtggtttaatctttagagttattgtaagccaattgtacttgcagcctttggaatagtctttctctgaatctgtagagtaggataatttacaaaaacagacatactccaactcagtaatatttttggcccaacccaagcactagctatttgaatctcaagtactatagtatttcgcatcctaactttaaataaataaatagactgattaaaacctcttttttttttttttattattatctgtaatgatattaaattatgttcttattgattcacttctacctttcatttcaggtcatagatgcatgtgtaaaaggaaataaaggacggtttattaaccatagctgtgatccaaattgtcagacagaaaaggtgaatctgatttttttgggttttgaattttctatctattaaggtgaaaagggggagtctgtttttccaatttgaatcctttgggaaaggggagggatggggtttaggagtttggatttgaccatttggatctgaattcttcagcttacatccagttgaacattcttgaggattggcttgactgctctctcttgttatgtttacttccaactcttgattttgctatgttatggtcccttttgccatgtatcttttatttttggagaagacatttgcttttccacatttatttatttatctttgatttggagtgaacaattttatataccaaccttggagatgcatctgtgaattttgtggcctgacttgctaagtcgggctgctttaaaagttggagatgcatctatgaccttaaagagagtaacctgtatcttgaggatgtttagggcacaactctggaaggaaagcctgcaatttttctgtttgtaacttctttctgttctactctaacttttaaacttttgctgcagtggatggtgaatggagagatttgtataggactctttgccttgagagatataaagaaggtgaaattgcattttgctctattactttatttgtttagacctttttgctaaggccataattaccgttttgttgtgactgcttattttttactctcatgctttcaaagtttggatggccgagaagaatcacttgaaaaggatttattttctttcaataatttgatttaagttgaactggtgtaagcccattcctttctactaattattaggtaaaggtaaaggtgatgggaataggcttaattgatgaatttgaacttccaaaggagaagacattaaatgagctgttgttgtttactctactgtaggttgtattttttctgatttcacttatgacacgttcacgcacacacacacacacgtgtaatagaagagagattgttgacataggtcatgtaagttggtccttaccactagtttgttgcatgcattttcaactcgagccattacctgtggtttcgttattctatttcctttttctatctttatctatctgtctctttcagacaaaattgtcattgcaattttctttttgggtgtttgtgtcagggtgaagaagtgacatttgactacaactatgtcagggtatttggggctgctgccaaaaagtgttattgtggctctccccaatgccggggttatattggtggtgatcctcttaataaggaggatggtagtcaaagtggttcagatgaggactttccagaaactcttatgcttcctgaagatggcgatgccaatttaatgcacaaagccagttcctgtaatgatgtcatagcaccagtttctgagggtgatctggacaaaagagatgaatgggataaatacactactgatcctgggaaattagagatttctacaggaaaagaggactccatgaattactctgcttctgttgtttcccttgtagatgatgcattagagttggacttgaagggaaaaatgtctctttctggtgaagctttagaaatttcccaacaaagagaagatgttactcaaaaactcattccatctgctcttgaaaaatcgtcaagctcttctcatagattcaatcgaacttcacctgttgaggtgctcaacaaatctttacatgacggtgttgatgctaataggcggtccaagttttgcattgctgatgataggctgctttcttctaaagctcatcctaatatgaaagctcctcactcatccaatgtccttaagaaaggaaaggttaaaagtaattccccaaatgctagcaaagttcagatgttaacaaaaaaatctcaagtgcttcatatgaagcccaaaaaagctatagaaggctcttttgctagccgtttcgatgaaggtaagtaatgtctttttatgtgtatttagaggaagacattttattgtgtcaaataagtgtcaatgacctttaatgctctgcagttgaggagaaacttaatgatttgcttgatgattatgggggaataagtaagcggaaagtaagtatttaggacacaatgcatgtggacaaatatttctgtgtggcttagcattttaattttggtttctttgctgcattatgaaataagctgagtgcactatcacaagagtcagcatattttttttttcataagaatgttggagttcatatttgcaattcatgttgctttctgacaggatgccccaaaattctacttaaagcttttatatcatactgccaaatcaggtgatagtgtcaatggtgaacctattcagaggtcagctttgttttatcatcattctaatatcctctattgaattgaattgtcggtcatgtagaatgctgaaagtttttgaacaaaatggcttttggtggatgactttttattttttataccttctcttttcagaaatcgagatctttcaatgattcttgatgctcttttgaaaacaaaatcaaggctggtgttgactgatataatcaacaataatggtaagtatattagagaatttactatgccattcccagtttgctgcagttaatcaatgtcactttctctttaggtttgagaatgctacacaatataatgaagcagtacaaagcagactttaaaaagatacctattcttcggaagcttctcaaggtacgtgcaaatttaagccttacttgattgaatgatcctttctttctatgtaaagtatttcagccccatccacccatattttgctttaattgacaaaacaaaagaaaagacaaatttttacttggggcattaaagaacgagtcatgtttatccaaaaatgattttgacgctaatacattgtcatgaggttttggtagacaatttaccatacagtaaagcttcatgaattcaacaatgcagcagcatgctcctaacttattattcctgcaggtcctggagtatttggcagtcagggagattattaactgtagacatatcagcaaagatcctccttgccctcaaatggagaggttagaaaaaaaaattagttcttcttctcatgcttacattgtttctctgctgactttgagggatagtttgaacaattagaatttcctcatcatttagaggttcattaggaaattttggaaaaaaaaatgaggaagaaaaaagaatataattgaataccagacttaacctgtcaataataaccacttgttttacatctctattaaaaaaccaatttttcccttgttcctgcaccttaattaaaatataaaggttcatcaaaatttagcattttcttttaactcttgtaggatttgtacaatcgagtggacaaaaatagtatttttcttgtatattggttttcaggcagctggaaaatcttaaactgtgatgtcctttgtttcctaaatagttattatcttttgtttcctattttaaaataaataaatcacttgttatctagttttcaaatgtttcttgataaatatgttttttgcatgcagttttacggagtcaattctgtcactgacagagcacggtgatagacaggtatttatatctcaagccaactaccccttcgttgtcttgaaaatttattgaatttgttccccccctctttttttttttcctttcctatccctattttggacttgacagttttctagcatcttattgcttcctgacatgtaacaactcgtttatatgactccatttttttaaaaagtttaatcagttaaatctgctgtccatacaggtccatcagattgcacggaatttccgtgacaggtggcttagaaaactaggtagaaaagttactcatatagacagggacgaaaacaagaccgaacattctaggagttccagattttctgtctcacagaacgattggtccgactgcaacaggttttctgtctcacagaatgattggtctgatcatgccgggagaccttcagaagcatttgattgtgtcaagcaaccggtcgttgcttcaaccttggtgagtgcaggcattcaggagggatcatctgcatcacatacaggtgtttgccccatcagtgggacaagaactcgcaagcgtaaaagccgatgggatcaggtatcatgggagtatccagtagtgacaaatcaagattctagttctcttcagcacaaggaactgaatgtggagtccaaagggccagagtcagctcattaccccagacgagcacagaggacaaagatgtttctggctgcacaaatgatcgatatcagcttcataaagtcgatattgctcatgatgtaaaacagaataccggggatgatgttccaccagggttctcgtctcccattacgcctactatgggactgtcacttggtccctcaatggtttgtaatttgcagtgtcctcccgacactgctgttgggcatccacaggagaaatttctctctcgctcacctgtttcatacggagttcctctgtccattatacagcaatttggtccacctgaaactgtgggaagctgggttgttgctcctggcatgccttttcatccgtttccaccattgcccccacttcctcgtggtaagaaagactcttcgccttctgagaatggacactgtctgtcgattaatcaacctgcggaaaagcaacaggacggtgagcttcctccgactcacacgaacgatagcactcctagcactactggtagcctatcaggtgcggacattttgtgtacagacaatcaacatacattcaaacgaggtagagaatggtcacaagatttgggaagaagatattttaaacagcagaaatggaatagcataaaacacggatccccgggccacttgaaaaggaatgacaccgtaagctcaaaaggtgttacaaactgcgtaagtataggagacataacaagcgagcttagaagtacatattgttcagaaagtttaggctgtggtgtggagaaagctggtaataattgtcatcagcatccagagaaccacagtcaacattgatttacttgtttcctttctttcattacatgtatttccaattctttctgttttctgttttcttgtgggtttcattttgaatgaaaactgcatccgatattgaattgatatggaaaataccaacactcaaaaaaataggcttctcctcccatacggtgactctgaaatggaatattattggtccatcttgttgcctagaatgcaggctttcttatttatttaattatttaatgtatcagctgaagtaactaatgagtaatgacacatcatttttctcttttcttaatgataagctaataattggccaagttttcagttctttatctgtttgccccattttcatttttcagtgtcaagagtttccaactaatgcatgtagggttatttatgggtgttataatgagcgatgacatgtacttacagtacacctatattacagaatggttctgtgaagcttgcctgcatattttgagttcaagtatcattattctgtcatttatatctatgtactgagtagacaagaagattttattttatgttttgttgaaaaggtcattttcattgatgaagtaaaagggtcatacaacatacaaataatatactcaatgctgcaatttacacaactttaatacggatcataaaaaatcttgtaatcaacttttgttgcctgaatgagtcaataaaaacaatgttaagaactaattgtgataaagtaaaccaaacaccatattatgaaagattaacagtagaaaactccacactaaaggtggacaaacccataacaatatcattattgagaaaataaaacaaaacaaaaggagaaaaaaaccaagccaaatcaggaagagacttagataatgccaccaaccatcagcgagagacgacccgagcacccttggatccgacctgagaacaccactaccaaagagacctgaacaaccaaaacacaggaatcccatgtcaagcacaacctcaacaacggatctgagaagagccaacaacacagacactgccctcacaagggaaggacgactgcatcggcgccaacaaagtcatcccgttatgtcaccaccttcatgccaacgctgaaaggtaccaatccaaaagagaattcttgtaattcacaagtataattttgcactggtaaaagctcacacacttcagttggagagcataagcaattgtgtacaaatgctaatctttgtaatttaatttaatattgtggatcaatattcaagatatatttccactcaatgcatcttctccaagtaaaatgaagaagaaaatgcagaaagaaagaccaaaacgtacataaagttagctccttttcttttgactttattcaacctcaaagatttaaatatatgtgtgtgtagtgtgtacacttgcatcaaaatctcttcacaagagttctgagacgaacaaagccccatgttttcatcaaagtcatgtacttcttccatccattgaaatatttcccaattaccttcttgtaactaggcctttgctgaaccaaagtccaatactcagcaatgtttggcctgcttccgatgtactcttcctccaaattcaagagcactaggcgagcgagcactggaataagcatcacatccgccatggtaaattcttctcctgctaaaaatgctgtttcattcaactgtgcttcaatatcatcaagaagtctaattagatgttccttgtcctgagatgcaatgtctggttttttcattttatcatctgtctcataggcttctcttaactttgaatggtaagcacctgcaagatcaggagattcagccatgcgagcgataattactcgtctaatgaactttgaaacatattgccgatacttgtctggtatatggaccagtgtgaagaactttggcttccattcttgtatcttctgcatccattcaatgacttctctgctgctacacatgatgttatcagtgcctaaagatactaatgcgattctctctacataccttggcaaaaaagagaaaaaaaaacatcagtaataattgcacaaatcaattgaaaatgcacaaatcaagaaatcccatattagtaatttgcacacctaagagaaaatccaatgaatataattggtgttacaaaagccaagcttgaccaattttacctattgtaactaatgtttccaaacttgtaacattcatcaacaagcacattttaacttccatcattgcttattcaattcagtgagaaacataatctagttagtatttttcagactaaaaaaaatagaagattacaaaacaaaggtacatactggattatctcaatagtatcaaagatgatgtgggagccattctgaaagacagggattttagcactaggattcatcctaaagaaagaggcatccatgttcttgcctgtaataggattgacatggtgtgatgtgtaatcaatgcctttctcttccaaagctaatctcaccctttggctgttcaaagagtagggatggtgatatagctgcatggttcaattaacatccgaacttactccaacaaattcagacctgcaaaatgttaataagcaacagatatccaaacttagaaaaccatcaaaaaaaaaaaaacatttgattaaatggtaaccttcttgtacacaacaactcaatcatagtacaacactcaaaacgtaaacagaaagctatgaaagtaaccaaggaagaaaaattaaaactttattaactcgaaagaaaatagttgtgttataacattaaatcaaatcaaatacttatgtacaaaaacattagctttaaaagaaaaaaaaaattaaagaagaagaaaaaacccacattaagttcttctttttaagatcaaggtggctcaacataaatcaccatcgaacatggtttaagtcaaaagacaactaagtcaaccaacccatcagccaaaaaaattaaaagtatatgtatattttttatttatagatgtatcaaataaatgagaatagacggagaaaacccatggaaagagattgattcacttattgacttacacagaaaactggaaaaggttactcctcctcaacggtataaaacttaaacttggaaaaggttaagaaagaaagaaatcagaattgaatttagagtttttgagatttgtggggggcacatcaagaaaagaaaagaaagaaccttttgccacccaaaaaaggagtggcgaaaaaggtactcgaatggagagagagaagcaaacgacaactaaacaaacaaatgcttacaacaatttgcaacttcgaaagaaatataatatttttgaggatgaaattacactacatatttcttttaattttttttttttaaatttattatgtttatttttttttcaatcattctaccaattttatccatatcactt

SEQ ID NO: 230161 - DNA, 815 bp, Cannabis indica
caccggaccgcgaatccctccccagttctcccgttaaatggtattttctgtacttatcagttatcactctccatattattatattattataggtgtaattaaatagcaatactcgagttcttatctattttttatcatagagagttatttttgtatgattagaagaactcatttttctatttcctattttaattaaagagtatgtttaaaaaacataattaaagatactcttatatatatatataattaaaaaaaaaaaaagaaagagtaacgtagccatttctaattttctacattattatttttaatgtactcaaactttgtgctaattttggggatcatcatctttttaataaatttatacataaataaataaaagctttgtatataaaaacacaacttttgtctaaaaaaaaactaaaaataataaaaaaaaatatataaagaagtagggttgttcaaaaaaattaacaaaccgttcaacccgaataaatcgttcaaatcaaactgaataaactgataaaacatacaattcggataactttacaaaaaattcaaatcgtccaataaatatattaggcggattgaatattattctaccccaaataacccaaataaaccgatttatatatttttttactaaaattatttataacctaatatataaattacgtttaatagttaaactattttacatttaaagtttgtattttatagtgtttatcttgaaatttagaatttatagtgattgtatttgaatattgaagttgaaatttagaatttacaactgagtatatttttttttattctatttt

SEQ ID NO: 230162 - DNA, 1940 bp, Cannabis indica
tttatagttgataattttgattgtatttgaatattgaagttgtaaatttaaaatttacatatgagtatattgttttattcttattttttttaaaaaaatattatttaattctttaatgtttatttaatttatatttgttttttaacactaatttaaaccacaacccttttaatcctgaaaagcatatattatacatttatttttccaaatcaattatttaaacaccaaacaataataaaaaaaatataaaatgaaaatcggtttaaacaggttaacccagccgaaccgataaaaatcattgggcaagttacacttttttgtattttcttattgaccaagttataattaaatatttgcaatctaatatttatattgagctgataaaaatacattataacctgtacaccgatcctttgtaaaatcatgcatgattatattctgctattattaaatattataataagattgaaatgtgacaattaaataaaaagagtaactatttgtaattgtagctcttttaaatttaaagtgtgtaattaagtgagttattatacaaatttatcacgagactgaaagctatcaatattatatagttgttagaagagattacaacactcatttaagtggtaattaaaataagtggaaaaacgttgggaattgaaagaagttacaaaaatttattcatgtgtatcctggaaaagtgtcagaccacatgttgtttgaagggtttttaagagaaatattgttggagactcatttttttttaagataacaagctgcaagagaaagaaaacaagaaaagcagcagcaaagaagggaccgatcaatccccactagacatcttctctcagcctaagagcttcttttgcaagaccatgggcatccatgttgagttgacgaggaaggaaatgcaaggaagcttcagggaagttggagaagagccaccgaatccgagacaccagaccagaaagagcagagcgatcatgccaatcactgttaactttagaaaccaaaagcaagcaatcagagaaaataaactttggccgcaactgagaatccaaacaccataatagactttgcaaaagagcctgcccttcagcaaaaagaggagaagaagcccctggcatttggcgatgatgagaaacaataggatgttgccaaccagatttgaaaatgaatccagttcctgttaaagcattctgtttatcaagggctgcatccacaaaaagagcaggagaatcttcttggaagccaattgattgcagtcgctgaagatgctgagatatggaagaggctactgaattcggttgaattacacgatagctttgttgagcttcattataatcctgtaaataatgaataacaaactcttccacattgttaataaaaccagatttttgaaataaaattgagtttctagtattccaaatatgccagataatagcaataaaaatcggaaaatcctgtgtagagatatgatgtagagcctgaagataaaaatccgcaatgtcagttcgattgtaagcatggtaaaattgtttgaatcttgaagacttccaaatgttctttgctctgggacaacctagaatggcatgagtgacagattcaatgttgttaccacaaacaggataactagaatgagggataatctttttatggtacaaatttaatgcgcagggtaaaatatggtggaaagctttccaagtgaaatgcttaagcttgggagggataggaagggaccataactttttccaccaaggctgaaaggggttggggttggaggaagaaggagcatcaatagaagcaagggtagaagcaagatggtaagctgatttgactgtgataatgccagaaggatgaaatccccaaatgagagaatcatacaaagttggatccagaggaatttggaggatatgatctacctggtaagagggaaaaaa

SEQ ID NO: 230163 - DNA, 1396 bp, Cannabis indica
ttattattaaaagacgggcgttaacaaaactattggttatattgttcactattgctgacaaatttaatctgtcggtaaagttttaccgattgtttaaacggtctcctattctagccagttttgcaatagtcgaataggcgacagttatagagaccgacgacaatacattagttgactatttaaaactattagaaaaattatttttttttttaatattgaaagttctataaattaggtataactcaaaagatcacaaaaatctcacaaaaataattgttgtcatatggttttttcatttaaataacaggtaaagtctcgtatataatggtatctagacatgttttcaaattgggaaaatacgacatgtcaagggtatagaccatgctaattgttgactgagattttctacaaccaatgattagagctatatgaaaggtttaatgaaagttagaaggaaagattttttacgtggttgaggcattaatgaaccttagtccacgagtcactgtatttatgagagtatttattacagagtattttcttggttgatccccatttatgtttatcattggggtatttataagctcatgatgaaggtaatattccaccattgttgtatttaattatatcatacttggcataattttccaaacctgactttaggcataattgcctattttatgatgggtttgaggttgtttataggtatttggtgggatgtgatttattccttatctatgacttgacgactcacttatacaaccgttgattgatgcctaggggcttgtgaaatctagaagtgatgagtttaaactcttaaacacgttagtcggtgtagggcgtatgatattcttcctcatgctgcattaaatgcgcatacattgtcttggtccttgagtgacatcatctttcactattcctcccgtaccatcctctagatttatcttactcgcgtagagagttagacgagggatgctcgtggtctatctagatactctcagagatgacttatctgtcattactctacctaaaaagtaatcagggtgatgtatctcacactcgttgatcttactaccatatggcttactccttaactgccacgtattttggtagaaattctaggcaacaatattggaatttataccctaaaaataagtaattaatagataatatattaactatataatcatgattacacctaacaaattgtgggacttaactttgaaacatataatcatgattattttccactatgtagacaatactataatcatgaataactatatattttggatttaacataatttatacattaaacatataatcatgaaagtaatcatgtgagctttgcaacataaaatggtttctgatcttttattaattagtaaatctgatt

SEQ ID NO: 230164 - DNA, 2339 bp, Cannabis indica
aaaaaagttcagggggcacgatttagtacatgtcaaaattcgggaagaaaaattactaattaacctttatattattctatattattttataacaatagataaattgattttcaaaacataccctgagttctacggttaacgcattgcatattgtatcattcttgtgtattctatatatgcgcaattaataatgttttaagtgtaattattaatattaatttggttgggaggtttcttttccagtgatatatttgttgtttaatacaatcatgtttgattcttcgtgattaagttaaccaaatcaggtcaaggaccccacattttctctatcactccttttgtagaagaaaaaataaagagagaaagctagttacagacccacccatcccaattaccaaattgcacctctccgacataaaaagctgcacgtaatgcaaaagcctataatatatatatatatatattttttctaaaaaaaaagataaaagtatttattttattatagataatatagtgcaagcattcacataatactattattgttggaccaaactacccctaccttttccaaaatcttctgcttggctgggccctagggttgctccaattcaactataaatagcgacccgccacgcttcgttccttcccttttctcttcccttcttccctccggttcactttttagttacgattttagtaagcgattgagtgagtgagccctagccatttagacattagccagccataatgttcctctcagaagaagcggcccagtgccaatacggtccggtttttgaagccggtgaaatagaggagctctggtccctgcttcaaccggggaccaactccggttcagagggttcgagccgagcagtttactcggtggacgagcgaaagcttaggcgcatgatatctaaccgcgagtcggctcggcggtcacgctggcgaaagaagagacacttagaggagctgactgaacaggtgaaccagctgaaagcagagaaccgggacctcaagaaccggttgggacatatggcccaacagtgtcacgttgcatggacagaaaatgacagattaagttcagaattcttggccctgcagtctagactttcggatctatgccggattttggttgccatgcaatcataataacacttaaaattattagtttaattaataaagctaggtctaaaagcttggtcatgcactaatcttctctccttaaactatatattattattttactatactacacacgtgggctctactacgtaaactgaaaacgatgtcatgataaacgggacacacgttgccttgtaaaattgtgttttggagagtttttctttctttctttttttccttgggtcatgttgaagaggtatgccttatattttctcagcagcttcatgtacctgttttactgctgaacaagttaggggccccactggatatatatatgttcaaatgtataatttagagagagctttagctagcttttttatatgtaatgaatttggtggtaactaccatcacccagcaaaactatatatttgtgctccaacatgtacattatttttttttttccttttaatcagtacttgtgatcattaatggaaagtgtttgtttcttcttcgtaataaatgcgtttgtatattgatgcctttttctttgctgaaaaaaaaaacaacgttataattggtttgtttaaaaggcgttgaaaggtagaagctaattatatcgttggaggtccattctttttcccgtcttggtggctgtgtagcttttgcaagtgtctggcttagaagcttaattaaagtactagtactacttctattgctactcatcacagtcaatttttgtgtatatatatgatcacgttggaagcaattattgaatgcatagtgttagcatgtttttcttttattatcatgcgcatatgttatctcttggtcattaattaggacagttgataagaatattccttaataaataaaaactatgtcggcccacatcacttacaaaaaaataaacagtgaacacataaaggataaaacaccttaattaataattaatgaaaaatattggtcgcaaatgacattattatagaatttaggattataagacttgtaacaacatattacatacgctccctcaaaattaacgacagcatacgtagacgtacgtaaaaagtttatgctcgcggcaaaagctttttttattaattaatcaaaaagtttgtggcccatacctttagaacatttgtatttatatatatatatgggtgactattcaatggtttacatttttattgtaaccatatggttacatttttctttga

SEQ ID NO: 230165 - DNA, 1825 bp, Cannabis indica
ataagcatcaataaaatatcacctacatctaattttcactagcactcaactcactagaatacaaagttattaatttaccaaaattatttatgttcaaaaacaaggcccacaaacaagcccatgagatcattacaaagtctagttggatcaaaaaatttaaactttttccaagccaaataacaattcaaaaatctaacaaaccctaaactccctaacattctagacatcaatacaacgaataatgaggaacctctcatatatatatacatacataatctcctgaatctagctaatgaccaaagaacactaaacaattcagaagataggtgtataccaaatctctctctaaagatcatatctttctattcttgttggggtatatacatatatacccattaaccaaaatctacagtaagcaagtatatatatatatatctcaccaacctcctatctataagcataaaagaaacagacatcttacatatactcttacgaaaaatatagttaaacccttaactgtatgtataagggtttctctctattttatccaaacaaaatttagatccattgttcttataagaaccaaactcaaaatttttttaaagatgaagacatttaaaggtggaatctttcatacaaaattgaaataaagcaaaaaataattttctaaaattaaaatacacttgcatatatatatacacacacacactcaaagaattctaagaaggaacacataccttttcgcaaaaagttcttggagttctactgaagaggagaaaaagccaatccctcatgtctcgtttaaatgtattaccttttatacacatacataaattgtattgttattattattatttcttgcaacagtacttaaaacacacaatttccaaaaaaaaaaatagtaaaaaaagacgcagtacactctaaagtggtcaaagatgtgaccaagggcggatgtatattatacaatataagggccatggcctccctaaaatatatatgtgcttagatatatatgtaaactgagtttttttgggtaattattgtgtaagattcctttgaaaaagttaaactaaaatttataaatattaacttctttttgtccatatgtatttactttgtttattttatataaaatttttatttgtttctttctttttctttaaagcatttaattgttctttaataattaatttgcttagtaggatatactattttttatttatttctttttcaattatatatattgatttgcttagcaaatagcaagacatgtcattttttttttgaggtaccactttaaattttttaattgtgtataaagtgataactcttataactacacttttataattaccacaaaataatttttttcagctatgaatatagtaaaaattacatttcgtaataacacaaaaaataaatattctagtagcttttcactagtattgtatattaaaaaagagaaattgtcaaaaaaaaaaataatatagattcacttatcgataactttgatatgtaaatagtttggccccccttaactttacattctggcttcgcccctcgatgtgaccttagcagactataatatatacgaattattaatattattatatattattattgttattatttaaacatcattactatatttatatgatattgaattggctcttggcccacgtaaaatttctttttgactcacaaaaatgtctataaatattacttttatattaattaaaataacttgacattgtccatattgttttttttttttttttggtaagaacaacaaagttcaataaactaggaaaagaacatagga

SEQ ID NO: 230166 - DNA, 949 bp, Cannabis indica
ttaataaaagtaattttttttaaaaatatataatattaatatttatataaatccctgtataaaaagaaattaaaactccaaacaatcaataaaatttgtttagagcagtgaaatagtattctataaatatagagcatgaacagtaatttttaaagaagctttaaattaaagaaaatgtctagagcatatttttaatttagttctttaaatatattaaaattttgtattttaattcatatgatgttagcggtcgtaattattgatcaagaatttctttattctttgtttactttttgattttcattatatctttgtttggttaccttgtaacctatcattttgattacatttataaaatagaaatttttttggttatcttttgtaactatttatctactacagaaaagaaataacacaaaaatcatagatatataacattaatattatctacataaaaataaaattaaagaatatattaaacaaagctcaaatctataaacaaaatgaaagaagatgtagaagaagagaatgagggagagatagccgaccatgtacatgtaatgtacattatattgccatgaagagaagagatggaaataattgtaaagaaaggagagaatgatctaataactaaacaaattcgagggaacaaaggtagtttgcacaaaaattaggtacaacactgaaatcatgtgttaaaaaaacatactaaatatgctttcaaaaaaaaaaaaaaaaaaaaactcaataaaacttggtatacacattataatattaactttttgtaaataaaaatgtgagttagttttgtaatattttctaaatttttgtgaagatacttctttatagggaaattgacatagtacactaacttttgttatttttttataaaaatactgtgaggcggtattttttacttttttactatgtatttttataagtttcatac

SEQ ID NO: 230167 - DNA, 2580 bp, Cannabis indica
  modified_base (1666)..(1666): a, c, t, g, unknown or other
agaaacttgcaaagtgtaagtgggtgttgcaactggtgggcttggtacaggagcaactccaaaaacttccatataagcatcctccaaattgatgatcccttaggccctagacatgaaatcgaacaaggtcttagaccttttcctttacatttcactccataaaaaggagcctgcaactatagaccagactaaagggccatgatcttcatgtcatcactgactttagtttaggcttctgcctccatcatccattagatgaagttctttagtcttttgcctgactattatttgagattggtcagggatccgacctccatgtcataatccatagtagcattaaaatatttctggaaggtagagtataactccttccagacgtgaatcaatctagctgatagtctcttccaccaatcttcagccaacttggttaacgtcaatgaaaaataaaggtatttgacatcatcactaactcttgccacttacataagatggttgtattggacagatgggctctggggtccatcgtttcatcatataattccatctatgacatcttgaaattttttgttagtggagcgtcgatgatttatttgacacatggtttcaaatcttcgtcttccgaatcaaaaatggctccattcatttttcaaacttttttaaagcagaaatttgtcttccaatcaattgatatcactattcgaaagctcacatctgcaaattatatcgttgatgtggttctaaaaaatcattcccacggggtatcacttttactcctttggcttttttgggcttagcatcaaggcatctccgaaggtcattatatccaactttcctaatgaaacttttgtcccatcatccttgttaacagaatcactagggaaattttgtctacccttaacgataggccttcatacctgagtaccaagcctatcgttttgcacaattaggcgtcgcggagcagaagggcatccaagcctagaggcattagtggccttctttgtccgcaagggttggttggccatgttcatgttatttttaggaggtaatgggacaatatcaagttgaggctcgcctatctttgccacgaatcgacgaaatggattgttcgggaaacctatcccagaaccgtttaaccggttttacaagatatggcaaactggttaaccggttcgcaccaggtttatccaaataatacaaaacctactcaaaccatgtccaaagctcactaaagcttccagaacacctatattgacctcccacaacatattcaaagcaatagaattcagaaattcatacagaattaaaacatgccatggatgaactaagcttgagttttcaaactcaaacttgtgcatccatcacaccaaactcaaaaaccagttgcaagaacccatttctaacttaaattgaatataaaaatcgaactttaagtcattcaaactctaacagcccctatacttaaaattacatgccaaaaccaactaaaacaaggagttcataaattaagattttctagggcttaccttcactaattactccttaaatccttgttaaaattccagaaaagaggtgaattctagttgctcatgctagttgtgtggtggtcgggcacaagagagagaggaatggtgataagttcttgatttctttttatttctcattttcnctaaaaggataaaacccataattcatttacttggctaaaataaacattcgtggccagctgccactctcccaagcagccacctaatccccatcgccaaatgaccaaaatgcctttaaagcttaaacgtaagctaatgcaagcctaggggtaaaatggtcaaaaactattaactccggtcaaatctggtattctatctatctcaaatatttatcccactaggaaaaaagttctagacttacccatgtgactcaaatggccatccatcgcattttccgtcgtcgctgaccaaaaattataaaaatagcataattcatatctaacacaaataatgcccatagagtttaataatatccctggaatggaaaaattataactctagtgcccacttttaataatgggacccaaaattaaataaattcatgaataattatagaaaaaattaataattaacgctaattgcctttactaatccacattctaaaatgcgatcactacaatgtattagcctaaaggcttttaatgtattataatgaagtcttacaagttgaagaaccctaatatatcactatagttgtttcccttactttgtgaagaagaaattctaaagaaaatatacttagagtttccccatccccatttccttgtaggtaaaaagaggtatttataggctaggatccagatccgggcatacccgtgacctgttatggttattgtaagaactaggcccactattggggtaaatatagggaaacttacaaaaatactggaattcgagttaatttttacaaaaatactgtcacacggaaaagttttcaaaaatactgtgtttttataaaacacaaataaaacacaaaacaaaacaactcaaaacaacagtagaacaactaaaaaacactagtagaacaccagtgaaa

SEQ ID NO: 230168 - DNA, 3742 bp, Cannabis indica
tttgtcaactaacttgccaaaaaggactttacaaaaagatatacaaaaattagctccacataagcaatatattattactatttgagcatggttttagatattaataattagtgaagaaggtaaaatcagcatgaagagaagaaaggctaagagctttgtaaaagagaggctaagagtattgaaaaagaaccaagaacaggacaaaagaattgtgctaaaaaacttacccaaaacagggcagcagtgcctttatttatagtcaaagtattactatacagtaaaggaaagaattacaaaacagtaatatccacctaatcaactaattaacagaaaagccagcaattaacagaaaagcagttatgtaataataagttggttaacatcccccctcaaacgaaaaggagtgtcagacatcttgagtttggaccgaagatagagatagcgatctgttgataggggctttgttaaggcatttgcaacttggtcgatagctgggacagaccgaacggatagctgtttagagaggataagatctctaacaaaatgtaagtcaatttcgatatgttttgatcgcgcatggaataccggattggcagctatgacagcgacactttgattgtcaacccataatattggagaatgtggagaagagacatttagttcagagagtagagagactagccatttcatttcagctgccgcatttgcaagagcacggaactcactctctcactagatcgagcaaccacctgctgtttcttagcagaccatgagagaaggtttcccccataaaacattacataaccacctgtactgcgtctatcatcaacacatgatgcccaatcggcatctgaataaccttctaaagttaaggttgggacatcggcaggggtgatatggaggccgagatgtattgtgcctttgagattgcgcatgagtctcttgcaggcttcccaatggagagttgtaggagcatgaataaattgacttaatttgttgatgataaatgcaacatctggccttgtgagagtgaggtattgtaaagcacccaaagtacttctataaagagtgtgatcaccaaaaggttcaccatctgtcaaagagagctttaccgaggagcttgtaggattagaacaaggtttggctccttccatgttgagacgaacaagtaaatctgtaatatactttgtttgtgaaagatacatgccagattgatcacgatagatttcaacaccaaggaaataatgaactggtcctaaatccttcaaagggaagaatttgttgagatccgaaaccagcttagagatgagagaaacattaggaccagttattagaaaatcgtctacatagactaggagaatgatagtgttggtacccgagccataaatgaacaaggaagtgtcagatttggatgcagtaaaaccccattccagtagcttatctcgtagagtttggttccatgcacgaggagcttgctttaagccatagggagctttgtgaagttgacacacatggttaggttttgttggatcgacaaacccttcaggttgactcatatagacagtctcatgtagttctccatttaagaaagcattaaaaacatctagttgctgaacatgccaatgaagagagactgctaatgtgagaataattctcactgtggccggtttaacaactggggagaatgtctcttcataatcgatgcctggagtttgcaagtatccttttgccacaagtcttgatttgagtctatcaagagtgccatttgcattgagtttcaccttgtgtacccacttattgccaatgactgtcatatatggggaataaggaacaagagaccatgtaccggcttgtttcagagcatcaaactcttgattcatagcttgaaaccatcttggatttttgagggcaggagcagtgttctttggtgtagatggaatgagggactcgggtaaagggtattttgtggctgtatatgctttgggttttctaattccacttagagaccttgtttgcatttgatgggttattgtagtagtaggaactgtggggtcactatcattgatagtagcagtaggcttagtagcaattgaatcatgagttgtagtgggcataggtacattggtagtagccgttgggataagagggggtaatgtggagttggttgggcaatgtgtgggtccatcgggtatagaggggcaggttgtatttggtagagtagtgggtcatataataggtaataaagtggcattggaagtcgtttttaggctaagaatgggatttgtatgagaagtaagaggaattttagtggtcctgtggttattcagagaatcaataggtagtgtgtcacatggggtggggcgtgatgtgtcagcaaggggtatggtaggtggcatagttgttgtaggttgtccttggggtgcattaccatcaatatcctcaggaaccgtcacattatttgtggtagaaggacaaataaagccagagtcagtgaatgagggagtattgctagtttgaaaattaaaactaggaagaggggatagggactgtacctgttgtgatgtatcactgctggaacaagaaagagcaggaaaatgtccttcattaaatataacatttcttgaaatataaatcttgccacttggatgttcacacaaataacccttgtggtgagaggaataaccaaaaaatatgcactcctgtgatctcaattcaagtttatgagaattatatcgtcgtaaatggggaaaacagctgcaaccaaaggactttaaaatgttataatctggtttagttccaaagagacactcatatggactcacatttccaaaaactggtgtgggaagtctatttatagtgaacacagcacaagccatggcataccaccaataatccatactcaaacctgcatgagctagtaacgtgaggccagtttcggttatgtgacggtgtttgtgctcagcgcgaccattttgttcacttgtccgaggacaaggatgttgaaaatgaattccttggtcagctaggaaccgagcaaatggactatattcaccccccaatcggcttggacacttttaataggcaagttaaattgtttttcaacaagacttttaaatttgatgaacacatcaaaggcatgatttttgtgagttaatggaaagatccaacagtacctactatagtcatcaaggaaatggacataatatttgaagccatctttagacacaacatgggaaggaccccatagatctgtattaataagagctaaaggttgggtggccctactgttggataaagagaaaggaagtttatgacttttaccttgatgacaagcattacaaaattgaatgctttgatagatccagtgtgtgaaatatgtggtaaaagtctagctaaagtgttatcagctgggtgccctagtttagaatgccaacaatttacatcattgaatttagagacagaataagcttgtggagaaacatcagaaaaaccttgggtgcttttattaatttcttgagaagtacaagaatctgtttttacatcataactacaaatgcaagaacagttacagcaagattgatcgaccctaatgttggtggtaaggtgacattgaatagcagaaccggatgtttctccaagttggtataagccatctttagctcttcctttaagaagcactgtccctgttaatttgtccttaaaaaaacaacaagatttatgaaattcaagatagacatcattg

SEQ ID NO: 230169 - DNA, 1588 bp, Cannabis indica
aaaaaaatatcagtataagaaaatgaataaattaaaaaaaaaaaacagagattagtatagagaaagctagagagagattgagtttaatgggttcatatattgattaagaatcaatattttgtttggctattagaactttagatatgagaattttaaaaaaaaaaaattatggcataatatgtgactaaacttagaactgccatatttaaataaaacgtttttaaaaattcatatttcatgtaattttctctaaaagaaaagataccataattgtaagagaaacaactaaataaaatattaaaaagttagaactaaaaataacgtctgtttaagaataatatacctaaattctgcaagaaatagatattcaataactatataaattcattccgaaatacagaagcatatattcacttcacgcttagattaataactgcataaatcctaagattagcatcaattgaatgcacataaaagagacttactgggtagtttctagctgtaaatatttatatagagaatggagatgcagagaagatattcaaacgttaaggctttcgagttgataatacaaaattcatacaatttacaagcaaataaaacaaaaaaaacgtccttacttaatgaaaattcataaataagatataattcaattctagaattataattcattaactaaaatcaattaactgagtctgcaagcagtattatctcaactagtgagggaagagcttttaataagtagatctagaattcactaagtaaattctcaacttattaatttcaccttgctcctctatagatttagaattgaatacattctcaattatatagaacgctctatatgtaccacaatatagatatattatgattatccattgttacaatcctaataggcaaggatcctctacagatgatctacactgaattgggacaaatttattgttctaccattcaatgcattttgttcttaaaacacttagcaacctacaaatgatacttcagtaaactaatataatcatttatctctattcacccaagctcgaaggaaatcatcgtttctgttgcccttaattttgtccaaaatacgtggaccaatacgactgcgacacgtggatttgaggaatatggttctgagataatttgactaagtctttttatatcaagagtatcaacatgaaaatacctcccggagaagatatgaggggtccacgtactcccggaggacagagctatagcaaagcacctccgggaggcaccagaccccatttgaacggtcacctcgcatttaatgccgcatgggagaaggcgcattgaaactgccataagtattaagtctgacggcgtaacccctcttctgcagctattacaatatgattaataagcctagtgatacctactttacgagggatcacatcagtcaagaagggataaaggattatatccacctaacccctaagatacctagggtataggccatgtatttcccattttatatctgctgggaatgtgtacccctactgaaaatatacaggaagacatatagttgattctagggatcaccccataaaaacactataaatacccc

SEQ ID NO: 230170 - DNA, 1557 bp, Cannabis indica
attcttaaattttttattggccccataatttatatgacgattatttcaatgctagctaaagttttctttccttttttgtaaacaacataatttatattatcagatttgtctattaataaaatttccatttctctttaaaaagaattagatatcaaatttctaaaagcatattacaataaaataataataatagaaaaatgaaaaaaaaagtgagcttgttggtggagatatccatcaccatcaacatttttaatattagtatgattttgaaaagaaaccataacaataagaagaattagaattgctaacaccacaataaaatgacatactacaccatctattaagtactttaatatcaaatcactttatcaatacaatctcaaaacctagtcttcaaacaacaatgccaactctttattatatcaaacctaatcttcaaatcaaataacaatctaaacaattgctctaccaaatgaactccatctctaatttacaataccaatattgtattttcacatagatcccatttaacactatttttattctatgtttctccttcctgctagttgaatttgaagaaccaaatttacaagaaaatatgtaaaccccaagtggttttttcattgaacaaaagacaacttatcaacatattaataaggatgttctacattatgaatagttatttaacataaaactacatcaattggaccattttttcttaagcagaatgtgaaggggattccttttttttctttttctttttgataaaagagaagaaatggccaagtaactaactctagtttatttatgtaactagactagatagatattatatatctactcatgcttccttatcttaaagcttcctcttgggatcttgcttagaataccagcatctagcttttggtagtgattctgaaactgctctaagacctggtaaacgaagttgtcaatctgatcgtcgtacttctcatacagaactggaaatgtgtggagcacaacgaaaccttatcgaaacaaacacaagaattagtgtgccaaactcaaaacaaagaacatgtaaatatatgattcagtcatggttaggcccttggaaggtggccatgagatcaaatcccaaataacatttggaacacaacagtgaaatagcaatctgagtatgattaatttataatcattctaatctaaacctcctgaaattcataggatggctctaattaatactgtgagacttcaccctaaaaaaataaagagcattaatattggataccagaagtgtctagcactacttagagatggcgccgtacaattggttagcgatattctccaaaagttattaccttaagttatatgagactcgatacttaattgcattaatagcaatatgacatcttttactgaattgcatcaataaaattcttaaaatccttgtcctcttttagttctgaacttttttatgtttattgtctttgtatagcattccatttccattataaaatttttcattcaataattgacaacggcaaacaaataagaaatctcaccaacatatagcac

SEQ ID NO: 230171 - DNA, 1615 bp, Cannabis indica
atttacttgtgctgtgttggcaaaagggtgttggcaaatgaatgttggtattagaacttttgccagcataaaatgaaaagccctggcaaagatgacttttctcagcacgtaaatgcactggtaaaagttaaattttagccactgcaaatgtatgctggtaaaactttgatctctttgccagctcagtttgcgaaccagcgcattagcaaactgtgctggtaaaagtgacatttcttgtagtgactcctatatgaacaagactcaattaatcaggacccagacttggaaaatggactgagattggacccggacccgtacccgccccggaccctcaacccagactcgaacccgccccagacctcggacccaaactcagactaggtcccaaacccatcttgaaccatagaccacaaacccggactcgaacctaaacccgtacccgcaccccaaccccagccccaacccccaaatccctaaacctgttctaggccccagacctgaccccaaccccgaagccaaaacctggactcgttccgaacccaaacccgaatggccaaaccccaaacctactggaccttttttttaaaaaaaaaaaaaaaaaaaaaaagggacatagaaacataactttccaacaataaaaaacaacaaatagaaaaatatatatgacccatgcattattacaataatgacgtaactcaaaagatgcctaaatgcgtcactatatattgcttttcgtttggtagagagagatcaatacttttttggaataatatattagttttttcaaacattcatcaacatgacttatattatatctaaattttacgtaacagtcagtagtttcgtgattcgcatcgcctgagaaatgtcaagtgggatgattctgagactctgcatgtatgagactacacaatcgaagagaatttaaatagattgattggtactacctatatcaacaaggtgcatcttgttttgtgatagctcatcacgaaagaactccacagttaagcgtgcttgacctagagtaattttaaaatgggtgacctcctagaaagttttcccaaaaagtgtgtaagtgaggacaaagcacactgttggtctgtacgtaggatcagtcatcagtctatgaagcagctagagtggcgtacccatgtataagagtcattgttccgtgggtaagggcccaataaaagcttgaagcagggacgttacatatttatttcatgagaatttaatatttttttggtactcataatataattagttacttaaatttatagcatatgttattatagtatatatatgttgcgatattttacacacgcaagtgtacgtatcgttttaagtagtaaactaaccaggagtgaggtcgatcccacagggattgtagttaagtacgttaaagttaaacttttacttctatttggttaaataaaagaatagaaaagaatgaaaaataagaaaactagtaagaagcaataattaaagagaattgaaagttaataaaaactaggacttcgatttcaattgttcctattgaatatggcctaatatgattattttcctaatattaatttctatgcaatagcaggtttactaaggtaatttatagtct

SEQ ID NO: 230172 - DNA, 1085 bp, Cannabis indica
atataatgtcaaatttccccaaaaaaaagcggtgagagaaagagagtcagttagcggcggttaggaaggtgataaaaggttgttaaacgttattaccactggggttaaagagttttttaacttaactctggttaagttaaaaataaaaagggtatagttttaatcaaagttaggcaaatttatttaggtgaccccactgaaaacgttccatttttagctataaaaacaaagcgccattagagttttttcttgactcccattttaagcttcttccgttttttattttctttctttcttcattcaatcaattttcagaggacgaaaaaaacagagtccatttataattgaagatagtgaatcaaattaacgttaaactcataattgagtgacaacaatggcgatttctttgagatgtttttctctttgttcattcacgatctttcttcttattctaattgttagtgtgaaagcttcaacaacacagaaaaatgatgaagttgtacagtcaaggtacgtaaatgatatcatgtgaatttggatgagtcagtgagatacattaagtgtgaattttgaattttcattcattttaattaatgcaggaaattagtaacccaagagttgcagagtttgaagaattcatcaatggtggaaaggttggttttattctccatttttttaactaagatcatgctgtttttacttctgatctataccgtccacgtggccaaatgcaattctaaccgtcagattaataaacttattagttttgtctgtaatttttcacgtacaatccaggccgtcagatcggatctgaacaatcctaatcgttaatttcgttattctttccggtctgactcattgctctgttttgagtgaaaaaaaatataagtgaagatattaatttcttttgacttttttttttttgtaattaataaaattactgctattttccaacaaatttaaaagagaaaagaaaatcaagttaatattacgaggttattttggtcttttcgatgctgtaaatttaaaagcactttctctacactgacaggacggtgactgtctggactataaagtgttttttt

SEQ ID NO: 230173 - DNA, 2272 bp, Cannabis indica
actcacattatcaatgtcgactgaacctcttcaaaaaatatccctttgtctcctatcaaccatcctcatagccaccctacagagacgggtgcagcgacggcgagagagacgggtcgacggtggctgggcttgaaagataggggtcgttggtgagaaatggctgagaaagaaaagggtgtgggtttatttcggctgagaaatgaaatggcagagaaagaaaagggctgggggtttttttttaaaaaaaatgacacatggtggggccagcacgtgcgtgcccagtgtcgtgccatttaacttcaattggcatgccatgtcaaggcatggggtccgacgtggtcgtgcccacctatgcaagtgtaaaaattcccgccttcaacaacgagcatttttcaaagcggggcacgactttttcgtgtccattgggccacatgtcgtgcccatgtgcctccaaaattaaaaatatataaatatgggggcacgactgtagtggtgtcaggccaaagtataccaaaaaatgggcaccactttaggtcgtgccctagttggacgtgccaatatcccattattgttgtagtgttatggaagatgaagatgtgagctcttctggtacaacatatggacttcaaggcaccataaaaggagaatgaaaaattgagagaaaggcatggaaggagacatatgaattgctcgagaaggctcatagtgtcattattctacgtcttagggataaggttctgcgagaagtatcaaaagagaagagtgcatgcaaaaagcttatgaaagaagcttcaacaactttatatgaagaaatcattatccaatcgaatggcagaagttatatacttttgagttattccttgaaaaatccattgaatattatcttgatgactttaataggatcattcttgatcttgaaacgtagatgctaaagtgaaagatgaagatcaagcaattattctagaaagaattcattgacattggtgaggttcatagtactctaatgtcaaaggaattgaagaaaaagttagaacaaaaggaaaaaatatcaagggaaggactgcttgtttgagagaaaataaataagagatataacagggtttaagaaagtaaaaagaatggaaaatttaattcaaactacaagaagtgttacatctggcataagacaaactacctaaaaagagatagtccagaattggtaaatttttggaacaataagaaatttgggcctatactatacccgacggttttaaactgtcgggtataagggcctcctaaaaattcgcattttattaaaaaatatcgccaattttgtttactacgattttaaaccgtcgggaatactaaatttttctcgacggttttaaatagatacttaatttttttagtgacggtctccgaaaaaaattattttaaggtccatcttttgatatttttagtagtgaaagcatcaatgataaaaatgaggtgtacaacctgtaagggaatacatcaaaggatcaagcaacagtgtcatcaaaggcaatgatcaattctattatgctttggtatataagacttggacatgtgagcaagaagggactttagatcttgacaaggctagggcttcttggtgaaaatattgtggaagacatggaatcctatgaacaatgtttgttaggaaagaaaataagacttgacttgcacaacacaaagggaactcttgactacatacattcaaacctatgtgggccatcacgagtgtcatctagaggtggagtcatgtattttctaacatttgttaatgactttttaagatatgtatgggtgtacatcctcaagaataataatgatgcctttaagactttgaaatgatagaaaattttgattgaaactcaaactagtaggaagataaaaatattgaaaactaataaatgattgaagttttgtgttgatgtgtttaagatatattgcaaacaagttggtatagctaggaatttaactgtgaaaaacaaaacatagaaaaatgggttagctgaaaggatgaatagaacaatctttgaaagggtaaggtgcatgttgatttattctggttttcaataaatttttgggcagaatatgttctatttgcctgttacttgacaaatcactgtccttcctcagcaatcaattttggaactccaattgagatgtggtcagggaagccaactgttgggttttatgccctaaataaaactcatttcatataatcggatttatttattaataaagatcagaaataacattttatgtt

SEQ ID NO: 230174 - DNA, 1536 bp, Cannabis indica
ataactaataagtagttaaataatttttttttttaattttgcagtattttttaatttacattgtaggttgtgaagtcaatttgcaaggattcaacttacttggtgttgatcggtttgtagctagctcgatgtatacatttattaactttttttattagttaatcatgaatgtttagtagagtttgaatattttaaatatttatctataatgaagtaggttctttgatatattgtactgcggtcagatgggtggaataatatgcacgttagatgagtttgaatatcttatttattcatccgtagtgaaataggttctgcaaatatactacggtcggatgggtggtaaatttttgtattgataaatattgttgtgattgttttatattattttagattgtgttttgttgttattaacaactttaaattttttttgggaacattcaattatagtccttatacacaagaaacgaaggtttcaggtgcgacagtatcaggaacgataaaatttcgttcttgataatgatagcatgtggcacgatttatctaaatcgttccagataaaatttatattattttaaaaataattaaataattatttagaatgaatatactctcatctggcgcgaaatcgtcgttcctgatttttttatttatttattttattttgaagtttcactgttgggagagagtgggatttttactcgctaacatctagcgcctctttccttccaaatacttggcccatttcagactcacagccacgactacctctcttctccgacccactgcgccccccggccgagcacacaaccggcggtccctccgcctgatacttctagatgtagatctaaacctatctctatctctcacatctgtaatctatatatatcatcatatttgggtagttgtgtttgcaggcggagctacgacaacgatcgccggaggtgatgcacgaggccatttctagaattttctgaggtgtttttctcgaattcaaccttcatttcttcaccgattcctcttcatatcgtgttcttctctctaccagacggctcgatatcttctgccgcatctgcccgtcgccgcctactgcgacaccttcgggcccggcgcaaggttcttccgccagcctccgccttcgagctccagctccgctcgtcgacggcctcgaacactacaatcgcagctgccaacttaggtaaatctcccgactgtgatttttattatttgtgagtttttttaatcccaaatcagtttgtataaacatgctttttctactcttattatagccaaaatcagatttgtgaggttagaagaagatggcattttggtgcagaattgggaaatcaaagctcaaacaattctcgaaccagttcaagagctttcctcacgcttctttgctaaaccccaccatttcacataccaaatcatgtccacacctaattcctattcgatcaccattcataatacacccactgagttttgcactaacgtcagattttttgttgccccggttcaggtattagttcaatcctt

SEQ ID NO: 230175 - DNA, 1003 bp, Cannabis indica
acttcttctgtagtaacattgcctgtaataatgactttgttaagctatttatcaacgtcatatgtctcaatgtctgaaataacaagaagaagaagttgaaaaccccagtgcaaatggaagaaccttctcaatcgctattctttactttcaattattccctttattctttcttttacgtttacctttcttatcatttgggtttgggagcaaaaatatcactttcagcataacttgtaagccttgaccattgggtctctcattgaatcttccaaattttcctttaaattaattctgtttgaagcttaaacctatagtttttgacattttgttattagctacatgaactgccttgtgtcttgaccatttgagagttttcatgttacatgttaccatttgagttttgtacgtaacagagtaagtactggtaaataggaagagtttttgaaggctttttctaattcttttaattagttcttccctcattcatataaatctcttttcttgtaatggccagagtgttgcttttctctacttctttgatgctatttcatttacgctaaaatgctattaattgatcattttctgatctgcgatttctttctcagggagttgagtggctgaaattgaagataatgattctggtaaaagagcagcacaagtgaaatcaaagaaaatgtctcccttcacaccttcatgcaagaagtcatgcaggaggttattgccttgagttgatcctccttctcgtatgacaatgccgtattttgaatgtgcgtattgttatgtatataaatatatatatatatgtatatattatatctcacttttggatgtctcttatggtaatgatattatgtgtattatgtaagcttaacagactttagctttttgatggcttgtaaatattccccaaagctaagagcatgtttggcatgcataactaaaaaactagtttttgtagttttaaaacaaaaaactatttttaaaaacaaggtacatgtttggc

SEQ ID NO: 230176 - DNA, 1221 bp, Cannabis indica
cacaagcactttttagtcttctaaaaatgtctagtagttttaattttctcaccttcattaccattgggcaaaacatcaattcaggagtactctccatctttgattcttcgctgtttctaaattttgtattgctgttttttatatttttaaaatgtttgaccaaaaaaaccataaaaaatttacattatttgtgtattttaatatttttttttttgacaaagtgtattttaatattaaattctacccattttaatttttaataaataatataaaaaaaattattaaattgtaatctatctttgtttatttagttttcttattaaatgattggataattctaaaatgggacatttctcgagattctctatttattggccatacaaaaagtttattaatttaatatatatattttttttaaataatcctttgttataattatttaaatttagttgtaaatctttttagaaacatataaaacatttatttgaacctaattttctaacattttaacttattaaaagttctctaaaaatttataaataattaaaataatatcttaaataaaattagataagaaaatttgtctagatacctttttcaataaataaataaataaataaataaataatttgtctagatacccatttttattgttttactcctacatgccatggtattgacattggacgcgtacggtagattttcaatgtttcactcccacatgacatggtttggcacaagtgtgcataggtaaacatccatagtctctctactacgagtattgttattaagtattagtcacgtttaacaatttttaaagttaacgtgttaaaattagttagagatattctataaaaattattacctttagttatatgagatctgataattaattgtaccaataacgacataaacactaaaaagaatatttggcacaagtgccttttaacatttcatgagaatactaaggagagtcgtcttaaacatttttagagaccatgttctaatttttaaaattggcctttgcaaaaaagaaaatactatttatgaatgatgttttttaaaatattaccatacggttatatattttacaaaatactaaaaaattctaattattttattaaaattgttattaattacaatacaataaaaaaaaatagaaaaatagaatatgaaaactttgaaaagaataataaataaaaataattgattttttttttt

SEQ ID NO: 230177 - DNA, 1128 bp, Cannabis indica
tttatttatctgctgctcacacagttaggcgaattttgaagtttccacccgtataaggtattcatgtttatgagacattaggggaattgtattctattttgaagcatagctttatgtttttttgtaacctactagtttaatcattttcttacttaaggtgtttctttgtagtctattagttttatcattttcttatttaagtcatatttaagttatttatattattctaactgtcatttcttttccctatcattttttatggccttagctgcaacaatgtatgccttattaaaaacttgcattatatttgagctgttgttaattgttttttttttctttcttatgcagtgattgctttatgtcccaacaataatgaagtgcatatctatagactggtggacgataaatgggagaggttgcatgtccttcaaaaggtatttagtttggattagtttctcaaaagtaaaaaaaaaaatgtttgatcttctaattattgaggaaagttgttggattctgacccttttatatactgttttatttcttcgatatggactcaatgggaagaaagttaaaatttggtccacaagtttaattttctgaaatgacattttcttttccaagttatttgtaagttttttattcagctaatgttgaagagaggaagaaattgttgaagcatgtcatgtcaccactatgcaataacttggaattatttaaaaatgtttgatgttttggcttatctaaatcagttaatattatctaatactatggtaaaattatatgactaggaatgtagacctctgtagttttttattgcattataacattcatagcattttatggtaataagaaattttgaatatataccattcataactttctatctaaagaaacataatgaaatgctaatgaatctttataagaaatagattttgtttgaaaaaaagaacaataacgagaggataatgtatcctcctaacaaagaataaacaaaagaagattagctggaatcaggccttccatgtaataaccaaatgataatcttgaaactttttagccagcgaaaccttcataatattgatgataaaacttccttttttttcttctctcaaaagatagtaaaactaa

SEQ ID NO: 230178 - DNA, 860 bp, Cannabis indica
gtcttgattgtccatttgattatgtaataataattctattgttatactgcagagatgagatgtgatcgatgacatttgcttttatattataattagtactaattaatctaaatatagatggaataatcaaccaaacccaagccaaatagtaacaaatcattcctatatatattaacctataatataaaattgaaacaattttaaatatgaatatacttttgaaagtattcttttgatcgtccattggatgatatgttctgacaatattatcaaacaattgataacacgtgtgaaatgtaaatgtgagatagagaatgtcagccctaaatcgaatcaatattgctaagctatactaatgatcatgtgaagctaaagagagaataaattagagagattgattcgcctaaaaaataaacagtactaaatagaaaacaaaacaaatgaaattgagatcatacatagatagatgtatacctcttcgttggaggcgtgatcagctagggtttggaaagaggaattcaactgttttgtgaaagagaagaagtggccctacttcacttaaataataagaaatattaattaaccaaaacaaataattacttttttccatatccgaattatgtatgaattatttagggtaatttgcagtcaaactccctataatttcctatactccacgatcgttttggtcagcactcctattaattttttgctgttattacgtgccaaatagacctgctactgtgtacacaagtatacacgtgacgaaattttattgggccacctatatgcgatggttttaaacatgcccaattattttttttctatttcccacatgcccacctatttcttctcactta

SEQ ID NO: 230179 - DNA, 778 bp, Cannabis indica
ctaaatggttaagatcatatatactctacataatcacccttgaaaaatatcttaaaattaaaatttattgtataatattggcccatctagcttatgtgatgatatcacattatatgtaaggtcagcgtatgcctagctagggcttcaattttttaaaatattattattatttttcaacaagaattatttaaaaataaataacaaattttgcattgagtcttagtatgtaacccatgcagtatatgcagtaacccacttggtataaaatgataactttatatacataaaaagagagggagacatttaattttagtttgggaccctaaacagtacaacacttgcattcgataattttattaaaaaaaaataacaaaaaacattgttttataattaatatatatatatatatatatgcaatagtactgaccttgatttcaatatcagagaatgagaggttagatccattaaaagatgaatctaaaaatcttgccaagttgggtgtagaagaagttgtttggctgaaaagccttgtagttctctcaatttgggatttgagttgggaatgcaaatggttggagctcacatgtacatcctctttaacatgtttaatcattccataccaatttggtaacaataaaccctgaagtactaccactgccgttacctacatttatttattttaatttcaaataaaataaaaaaattctttagtgtaattttgcaaaataacattctcgattatcttgtaaaaaattatcaaaaaatagacaattcaaat

SEQ ID NO: 230180 - DNA, 880 bp, Cannabis indica
cgagtgtaggaaggaatggtaggtggagtacgaccatagaccgcctaaaaaggtgtcgtgccaatggtggagtaatagctcgtgttgtagtggtattccacccatgaaagaaatttactccatatttttaagtattcaacagtaaatgctctcatatattactccaaataacgattgctaactacagtttgtccatccgtttgagggtgataaaaaagagctcttttttaaattagttcccattagctcaaatagtttcttccaaaaggaatttgtgaaaatggggtcacgactagaaataattgttcgaggcatgctgtgaagtcgagtcaccatttgggaaaatagatcaggcactttggtagcagaatagtgaattggtaaggcaccaaagtgagcatatttggtgaatcaattaataaccaccaagatattagtagctccctgtgtgtttgggagaccagttatgaaattcatgcctaaatcctcccaaactcgttctggcagttctaatggttgcaacaatccaagaggtgttgttgttgagtatttgattatttggcacaccacacacgatgaaacaaacttgcggacatccttgagcataccaagctaaaataatttgcgctcagccttagaaaagttctatgacacctgcattaccacccatgggcaatgagtgaaattctaaaagtagccattgctttaaattggaatgttggctgataacaagcttatgatgatggtaaggcagaccatctgccagtgtataaggggtacctgccaactcaccatgttgtagtcgatcgtgtaaaagccgaagatcaggtcaacaaatgttttcttatcgtagttcctctgagaaatcaaagcgagccac

SEQ ID NO: 230181 - DNA, 1830 bp, Cannabis indica
tctaattatattgaaatgggttttatttagggttcaaaatccaacaagatctatgtcgagagatggttgccgtatcaaagggaaattgagaggatgatgggttcgatgaagaaactatttttctttaagagaatttcaaattgaaccacttccacccaatttcatggagcctcgcatgacaccatatgatggtacaactgatccaacataccatgtaggagtttttaatgagctaatgaagatgaaaaaggtgtcatgcaaggcaaggtgcaaatgctttgtggtcacacttaaaggagccacatataagtggttcaaaagtcttagaccaggaataattacatcctggaaattatttttggaggaattctgtcaacaacattaagcggcgagtgattacattgtacctataacaagtatcaccaatgtaaagcaaagggtgaaagaaagcttaataagatacatccagcgctttaatgtcaaagtcgccaaagtagggaggatgttcgacgatgaactcaagcttgccatggccactggagtacaccctgaaagtagatcatggggaatatgctgaaaagggaattgaatgacattgaagacttctatgagagagcggaaaagtacatccgtactaaggagggtaatagagtcttggagatggacacaagcgagtgaacttcgggaagctcgtcagacccctacagggtctataagaaaatacccccaatacttgtaagccgatacattcaagtgaagtctccattatacaactcgtaaaaattaaatatctacgatattcctctaagtaatgttctactatgcaggaaggtgtttctagcaatagcaagtttgcctttagtacgttgcacaaattaaagaaaggatttttatgtggttcgagtattataacgaaatgtattccacgagtcacttttatttatggtgggaatgttctcttaatcagagaatattcaagttatagtatgagagctcacttttgtgtgtgagtcaaaaacatctattttttcattacagttccatgtatttataggaaaaagaaggatcaaaggagggaaaaggtacatctctcttcggtctctagatgctacgtagcctccgtggtaggagtttggtgagacaagatttatcccatgtgcgggtgatgtgatagtgcatagtcgtcacttttctttgcctaggtgaatgggtcgtcaaaatagtatggcttcacaatgatgctactcctacgccggagtagtcatgtacaatgatctgctttagaatttgtgttaggcaaataatggagtcccaaaagacctgtaatctgggagcttagcacctccgggatgactaaagatttgcttgatcatttatttttatatgggagacctactcccagacgcacctttactcaaggagttcgagtgaaaagtaattctacaaaaaatgttaatctctccatgaatggcccccatgccacatggagccctctatgcttgccatgtattttgttaacaaatgggtttaacaagctcaaataacaccattttataataataattcaagaattgttcaacatattcttataacaaaatgtaattaaaatatctattaactgactttagtgtaattatttcactatgaattagaataattaaataaataaaacatatctgaatatttgaagtaaactttgaaaatttaaatgtataatcattaataatcaaagaggagtgctttgaactctcttttgtattttctctttagttttataacaaaagtcaattattaaacaatatttacttttgcttaacaattagccataat

SEQ ID NO: 230182 - DNA, 2243 bp, Cannabis indica
gtttaaaaatcacgtaataagcctatggtagttagggtgttacaattatagtattgaaatgaattttttatcatattatcactaatttattagttatctcaagaatattagaagatacgcaatctagagacctcggattacatcagcatgagcatgagaatgagaatgagtaattataaccgcatcaattgttcttagcctggctaaaaccaattataaatataattttataaatatattttccaaatttcaagtatttataacaatatttgattaaatgtatctaaaaatatttatatacataatatatataataatatatataggacaagtatttatatttatatacataatagatataggacaagaatatatcattcccaatgcaactccagtgaaagattaaataaattaaagtatttgagtaaacttatcctcgtgtaatttgtaagaatatgatgcaatgtaatgtatttaaagtaaataaataaatcgagatttataaaaagcagccaattttctgaatcctccaatgaattattgattctcattcacaatgccaatacctattaaaccaattgcagtctaacgtagttcataaactaaaaatggtcagaaaaatcccttttacccaacaaaattcccaaacgaacataactacgatatccatcgaattaaactctaatttactcaaaacctgaacaaaagataccccaccccatttagaaaaaaaaatatactgacaagaatcagaattgaatcctaggtcacaccaaagaaacccaaatcgcaaaacccatcgaatacaaatgaatgttttgagaatcgaatggcaatatattaaaattaatcaccaaaaaagataaaacaggaacgaaccgtgattgttgggctaagccttagcagtgttgggaataagagcaatgtcctgcttttgtccctgattcaattgggcttccttttctcggatcttctgcatctgaagcattctctccataacgagtttgtactcacacttctcatatgtgtgtctctcgttctcgcacttccatgggaggaagacctcagcttggcgacacttgttcagagggatcaaagtgggcgcactgcgctgtgaagagaacgaaaggggctcgagtcggatgacttcgaagaggacgaaggagaatgggtcgtaggctatgattttcttgagaccaactattttgcaggtgaagaaaggttggtttggctcacatacaaatcaaacaaaaggcatctgatactaaagaaagatcaaaggatattgggttagaaggcgtaaaacctctacattcggtctgcctggtcttttccccattccatccttcatgtcatggtcaggcggcttctctgcaggtggtggtggtgccaatgcaccccaactttatttttgccatcaatgcaatcgcacagtaaacctagacccctcttctgaaatagtctgctctgaatgcagtggtggcttccttgacgaagttgaaaaccctatgcccagtccaaattttaatccttttttctccttttcacccgatgcaccatattcaaatattaatgggatttgttttatttttattttattattttattattttattaaatataaataaaatgttacccataaatttctcataaaccaagaattcagttatataggcacactttatatagaatagatatattagcaaaaagctacctgcgaggcagtatacttagtttcatgttaggtattttataatttaatttattattatattctaattaaatttttttaataaagtaacttatttaagaaaaacttattttaagttttacatggaataattttttatgtatataaataattgaaatgatggcattgcaacctaaaagtaaataccgattggaatatgttagttctaatgatttaatataattgtttgatgcttgaagaaatcatgataaaaaaaaaaagtgttagaataataaagcaaacatcacttaaaattgtgaaaagtttaaaaaagtgaaagagtgaggcttactggaagtatttccaactgctgagatagtaatagaaaaaagatagttaaaaaaattgtgagtgatacataattaatttagtgcatagattaatttttatttgtgtaacctaattaaatttgaaattctaaaatttaaaataaactgattgaaagaaggaatataaaaaaaaaaatacactttgaaaaataaaataatattat

SEQ ID NO: 230183 - DNA, 1218 bp, Cannabis indica
atcatgattatattccactgtgctgacgacactataatcattaacaaatatatacatatatttacatatgttctgaacttaatagaatttatacattaaatataataatgaaataaatcatgtgacccatgcaacataaaatgcggtttctgatcttttttaattagtaaatctgattatattgaaatgagttttatttagggtacaaaatccaatattatcttcccgacccataaacattgttcgaactgagacattgtagcaactcctcgcgcttttctggtcaccttttactgttctaacgcacccattgtcgtagggaaacctcatagacaaattttttattgaagttgctgctccaaaatccactaagacagggcgcctagtattatgtggtatgtcgtggggcaattcactactgcaaatgtacaatgcttgaaggcgctggcattattttctccttttagggtgacaagtagttggatttttcccactggcatcaaggcatccccgttaaggccttccaactgaataggacaaggtgacaggtccgcttcagtgagcctaattgcttggaaaacaaatttaaataggatattcacggagcttctattatccaccaggactctagaaaccttcttgtttgctatttgggcttcaatgaccaatgggtcattatgggaaaaatgtacgtgccgggcgtcctcttctgtaaaagtgatggggagaatcattgtccgaggacattggcgtggtgactgtactaaagcacatgtttctcctctccatctagctcgcataagtaccttttttgagagttctgagagcttcccgtaaggtgcggtccaccagattttgttgctacatgttcgtcaactagtggtggagctagccctaggggatacgagtttccttgtcttggagccacgatagttactgtagctagagcgagaggagctgggagtgccggaagttgcattctcgggaccctcaacctacccctgtagaggatttatggtaccctacccaagaacaatcacacgtccgtgaacgaccccatgttcgagataaattatgggaatgcagacccattgccgagatggcctcctctaactagcatcttgatttcatctttcaggtgcttgtaatttttggttggagggtcctacctccccactgatactcgcacctttgagtcagatttttctttgaaatagg

SEQ ID NO: 230184 - DNA, 1348 bp, Cannabis indica
gggtgatatgttatcgtaaagtagttgagatattctttctaagtggttgagaaattctctcaattgattataaaatatttagtttaaataaaatatttgacttctaataaatttctataacagaattttttacaaatatttattaaaatatttaaatattattattttaatatttaaaataataaatatcttatttaagtgaacttttattattattttattagtttaaattattcggtatatcttaaatctatatatatatatatgtataatttaggaaactggaaaggggttaatgtaatcatttcattattcactttgagagagttcttgctcatgcgccgagaaaagacctaagaactcattattttttatcctaattagcccacactgatccttgtgtatggtggaagataaggaagatcaaggtgtaaatttatcatcaccattataggatacaacttacgaaaaagattcaaggatacccttatatgcttcaagaggtaaataatctctttcatctttgtatttcagatttaatatatgtacatatggagatcctaaggtgtacaatgataatctattaaatgcttctgttgcacacctaatttggatttttatatgtatacatatggagagaaagctagaaactatcccatgaatttagggatatatctgtgactcacaagctagagactatacgagacatatcttctaaaaattatcagctcgcatccactagtcggtgtatgcgagatgcatgcatgatggaagatggtcggatgtttcagcttctgttatgactttaagtatcaaatctccctgcacgactcattacgagtagaattgtccgtccaggttcctagattctctccacgagtcatccaaatggatggcacatcaccttgtgtagaatttagaataacaagatgcatggtataaattataaagaaggaatacatgtggtattagactgcataaaagaaaagccctagagtagtaacaatcacattatttgaaccaagtaactcttgtctcattttatcatagctttatttttttattttcattgtgtttgatctattgttctttctcttaaactctttggtgttgtttgtctttgtgtttggctgtgattgcagagattgttcccttgtagccttgttatcacagtgcaattttttcacgctcaatacggagctcctttaagatagacaacaaccatatcacttcactcagcattagctattgccctatactcagcttcaacttatgatcttgataagcttatttttatttattttttttaatttttggcctacttaattttcccaatgcatcatgtcgt

SEQ ID NO: 230185 - DNA, 1078 bp, Cannabis indica
gtacatgtggaatgttaattgagatgttaattgagttgacaaaatataactggttgggacaggaaatgggataaaaaatgaggacaggtaatttggcctcatcttatacagcaaaaacacacacaaattatttattatctcttaattaattatcagtactcttaatttaacaaaattctcaaatatatgtattgtaacagttgatgaactaatatatatcatatatatggatgttagtgaatatttattccccaaggtatttatatcgaactcataataagtgaagatatatatatatattatatttatgtaaatgtaataattagacctataattttcgaattttattttattaaaggcaaaaataattttagcatgaacatatatatacttatttgtaagaatttatatacataaatatataaacaaattatgagaaaaaaaaaaagagagggcaataacgaaggacgacggctttgacctttttttattaaaaaaaataatatataattcatactttatcttaaaaattatgtacattatttggtccctcgtaacaaagtttcttacacttttgtacctaaaatctaagctttcgtttttgtttttgactgggtattatagttatggatacttcaacaatatacactcttaaaagaggtttatgatatcatgtactttttatctgtttcagtaattgggaaaaattttagtttaattttttatagtcatctatgttgtagttatttaagacattctacaaattttgagagattcgaaaaatataacacggcaaaataagattcaaatagtctgttgcacgcgaaattcttttattttatacgtgtgaaatagactatttgaattctatttttgggcgtgttaaatttttttaaatttatcaaaattttgtggatcgatatcataaataaatacaacttaaataatcataaaaaaattaaactaaaaaattctttaaaaatattgccaaaataaataaaaatacatcggtggacagcaaaattttttctatagttattgtatatcaaatattaaatatgggatctatcggatctca

SEQ ID NO: 230186 - DNA, 1170 bp, Cannabis indica
atgatgtaagttccacctactaagcttttatttaaatggattacaatctaaatgttcttaatattacttatcttattgttattattaaaattgtttcaccaaacatagaaaaatgaattaaattatttcaccaaacttggacaatgaaacttgatgatgttgtgttgaaaatttccaatcgtttggtgtacatttttttttaattggaaaatctttgcagctgtttaagaataaagtcataacaatattaatattaaaaggagttttaacatatatataaaatgttaggattttattgtagtgttcagcacaataaattaaaaaataaaataaataatgtactgtagtggatttttttataggctgattttcaaatataatttttttttaatgataataaaataaatattttttgctgaaaattataatattttttgcttgaaaaaatataaaaaattattaatttgtagatcaaaattcagtgtgtgctaaaacttttattttaaatctggttaggaattagacgttctatccactgagaatattatatataaaatttcaattgctttcttaatataatatttcttaattaatcagatgaaagaataaattatttttattcgtatatataaatatattatttttttttgtaaatatatatatatatatatatatttactcgacgaaatttcgtctttctaaattacacagtattatcctgcaaacaaaagaaaaataaaatatttgtttgaaaattaaacgtgtattttgtttttatttttatggttcatactattttaaaacatgtattttataaaagttatgattaattaaattttctgttttgtatttttacaattaataacactaatagtaactatattaatattattaattgtaaaactaacaagaacagaacacataaatacataatatttaagtgaagaaacgttgttgaattagaaacccaattacaaagtacaattccacctataattatgattaattgaagtatactaaataaatattgcctttggttagttggaaccccactcggtcaaaatttcaatttccccatgcatcgagtcatgagctaaaaaaaataaaaatatatataataaaataatgagaaatactaaaaagaatagtaaaattattaaataccagtac

SEQ ID NO: 230187 - DNA, 1169 bp, Cannabis indica
acttttttcttgaattttcaaatctgtccttaactttttttcactcttttcttttaagccctagtttactcaaactttatcagttcacaccaaattaaaaaaaataataaaaacattgtaatattaaactattttttaaccacttttctattttatctattttaaaaaacaaataatttcttatattatttgaaaagtaccatatttaaaaataattaattcactttaactaaatcctattatattatatataccatcaattttggtttcaaaaaacaaaactatagacattatggacaaaagtattaaagtgtagcacaaaagatataaattaaccaagaaaattcaaactatgaaaacatactaaataatcattaaaaatctcaattaatgtaaaataataaataaaatcaaaataattattataaaaacatgaataaaaatatcatttattatatgatattaattttgcactaatttttgcatactattatataagtattttttatttttttttatgtcacctcattaatttgttatatttcattaaaataccaaaaaatatactaataaaaataatcattacccaataatattatggagtagtttaagaactctaagaatttttattttatttttaaataaataataataactctctaaatagtggatatatttttgttattttattcttaagatttcaattacctaactcctatataattcccatttttgtgcatttttttggattggaaacaactaaacaagcataacaataatgggcaagctattaaagtattagtgggcgcatattatttgtttttagtatttgaaattttttatctcatttatttaatatgatagattatattataattaatattttatagatattttaagaaatttacaacacctaaaagaaattcaaaatatttaatgacatatgaagaaaaataataagtatatgtgcaactagtgctctaaatgtggggtgaattttttgacacgatacgagaggtaagagcaggactcaatacgaaaatatgtgtttcagtacgacacaacataaaaaaaatacaggcttaggcacgatatagcaaggttttgcgaattggcacgacatgttacgaaaaatttgagtttaaacacgacatgataagacaagcctg

SEQ ID NO: 230188 - DNA, 1610 bp, Cannabis indica
taattatgtaaagttcccttttttaataggaaagtaaaactattttcaaaaaaatatgttctaagaaattgtttttattttttaattgagaattaatattaaaaactttgaaaaaaaaattacttccaaaattccttgaacattttttttttctaaatcaatgtttaggacacctactctaacttggaccttggaacttgagcctgacttagaccctagtttgggccccaaaattaacctcaaatcgggatcctaacgtagacctcactctggacttggaccctagccccaaccttggattcggactcaaacccgaccccaaacttggacttggacgtagatgcaaatctagacccgaacccaaatgcaaacctagactcggacccaaactaaataaaatcaaaaataaaaatgaaaaataaattttacaaaacacatttttgttttatgtttttaaaattaaaaaaaaaacaaaggtattataaaactcatttttgttttaaaaaaaataaaattttagaagaaaaaatgtaactttcatttttatgattaaaaaattaacaataatgatacccataaatcacatacaaatgtgacacacacatatgtcccaagtcacttttaatgtaatgatcacttagctttatttgagaactagtagataattaggccttatattcaaaaatagactttagattattatttatacaattatagagatatatttgaattctagaagtattatatataatatatgtgaaatttatgattttcatattttatatccagtgttaatctaagatttggtcaacttacagcaaaaccttatttatgatcaaaattgccacgtgtaaataataaaagaaagtaaataaatagacacgacaatttataaagcttcgacccccttggttaatgggtaatgacctactccacttttaattgtattgattcgagagataataccattcagattacaggtttctaccttgtaatttctagagtgactttctatgaatagtacaatagcgagaacaatgtaaggcaaatctttaatgagtgagatgagaaatagacttagtgtatttcacacaacaagaggcgtgagagagagagagacttagggttttgtgatgaatgcttaacacataggacttagggtttagaacttagctttttagtctagcctaatgctctttatatagatgagaggttacaaaagatctagttcaaagtaggttaatatcctttaaaatgagataacattgcctcttttttacataataaatatacaaaaaataatcaattaattgctcctaaagaatagataaaaatctgaagttgaacccctacttttgtgggttgttggagtggatttgcagctgagagtgagccattacccgtccaaggtgaaagttgcagaaacatcaattgtggctgccaatatggaagttggctggcctaccccttgtttgtggctggccggctaggggtggtccggccagactttcctggttggcgtttttgttgtatctttgtcctgcttgaatatttagactctttgtcaactggtaaattgtgcatgatgaattggtcctcctactgacagg

SEQ ID NO: 230189 - DNA, 1450 bp, Cannabis indica
atgtttctctctcttttttttttttttgaaatcaatttctctcttctcttcaaaattccaaacgatataataaataaaataatcaaacattcacacaatgtttatttatttatttttcaaattaaaatcactgatttgttagtgaaaaaatttaatagaacatttctattataattattaatattaccattttcttattcttgttaaaaaaaattaaagttatgtcacttattttcttttattatttatttatttttataaattcatagcgtatatgcttatatattttgattacaattgttaaataatatcttagactcaatagaaattacgtattagagtgttctattatggagttcactaattgtggactaaaaacattttaaatggtatcatcaatagaaaaacaataaacaataggtttctcttttttctttctttccttttgaatacaaaattaaatttaaaaatgcaacaaatatacatctacactaaatgagaatcaaatacataaatgataatagaccctaaatattaaggtaattttcagttggattttgaatagaaactctctttcacattgataaaataaaataacatataatactaagaaaatagacaaaatatagggagagataagtgagatagatacacttgaatctaattattaaaaactaaatacacttgacaaaacaaaggcatagatgagcgtgaataatggcaaaagagacaattccaatcattaatattttagagctctccgaaagagtttaaaaataggggagcgaggctaataagtggcttcatggcagtgcaaaagtgttttgcgggggcatccgtcgatcctctcacttgtattctttcatcgagatacgaaaaaatatgattgagttaggaaagttcaaacttaatattcttagataatttgtgaaagactattttgtacaaaaaaaaaataagctcgatataataatgaaatgattaattttttttttctcgacaatataaaaattaataattgatagacttcccttaatcacttatataactgtgaacgtatagtacatgtacaacaatataataatatttcaagcaaatcaatttaaaaaagaaaaaaaaactatatattaattttgagattttagtgtactttcataataacttaaaaaagaagcacacatagatctatctttaataatatcgagaatgataaaattaaatgcaatattttttttgtgcattcaaattgtgaaaagaaatgatgataagaataaaagttgaataataaagtcatatatatttattttaatttaattttataactgaaacatttatatgcatataaatatgttgggttctatgccctaaataaaactcatttcaatataattagatttacttattaatatagatcagaaataacatttagtgttgcatggttcacatgatt

SEQ ID NO: 230190 - DNA, 1283 bp, Cannabis indica
aatatacaaggtaagaaaatcggtctttacaaacaagaaggggactgagaatctagttgttgatcatctttcaagactcaaaatagaagaatgccagaatgcaaaagaagtgcagataaatgaagagtttctcgatgaacaactctttagttcactactacaaaaagcactttttgtgtcggttaactcgtctcaccgtaagggttgaccgaggcaaaaaataaggggagagtttttgcttcagtttatgcctgaagctaaaaaataccaattagcgtgggcttgtaccccgacgcaaaaagtgtaaccgaagtaaaatgtggcaatttaaaaaattatcttttacattttgctttagtggaaaattgaagctaaactcttttgcttcggttaaaagttgatgttaatatatttgccacgtttttgcactgaagcaaaaaagttaatgcatttgtaaaactcaaattttacaattggaaaagttaatctctactttcattttcacgcacatcccccaattcgaaaccctagcagaccaatagacccatccccaaaacccagccgctgcagccaccgtccgtcgccctctctccgtccaccgcccaccatcctccccacttccggttagtactctgaaactctctctctctctctcagtcacttgttctccccggttcatttatttccgttatgtgtatatatgtgggcatcgtatactaaatacaataaaacatagaaagtatacacttgaatatcaacactataagctggtagacattttatttatagtccaaaagcaccagaatgaaattatattaattagcacataataggaacgtatgtttaagcaatattaagtatgcaacttagaccagtggaaggtgtgtttattgcattgttatttttcatcaataaaactcgtagttgatctaataataacgctggagtttataaaaaaatactctggtatggggcttctatctaaaacaattaatactatatgtgctagctccataggagcagataataagaaagtgcctattttatgtatgtgcaaagcctcttttctatgtgtagtattatcaattgacagagattatgtatcaaattgatacaatgtaaaactctccaatatatactgtgtagtatttcgaaaatcttttttagattgaaaaaccaaaaaccaaaaaactacttgcctttgttaaatttttctttaattattccatctatttttctctgtgttcgttgcgattttatgatttgtggaattttgtggggct

SEQ ID NO: 230191 - DNA, 1416 bp, Cannabis indica
ttttaaaaaaaaaataattttaagtctttgacaaagattgtaaaatacaagaatatatttgctatatttttctaaaaaaaataaaaaactataattaattgggtaagactaatatctttaatcacccacaaaaagaataatgtaacactaactttgtcacaaagtaaagtagaagatatagtcatttatttataacctataatataaaaaccacattaatattcaaaccatgtgagattgtttttactaagaagtgaaattactatttttgaaaaaaaattaaaattataaaaaaattaataaaatgatataatagattaatgcattgctttctttatataaatatatagatatataggtattgataataagatttatttacataaaataattaaaattataataatttattaatgtatgatattttatatctataaacttgatttaaataatttaaattgtaataagaaaataaagtagtcttatattaataaattgttacgaagaattatatatttttttaggttaattagctattttttcccccaaattttgacatgtactaaatcatgctccctgaacttttttggctgttaaaaattctccctgaattattgagattgtcaaatttaagaatttttgtctaatttcacacaaaattctttttttttttttagtaattctagcaagtatattcattcactataccaatttacaaaatagaagacctcaaaatctcaatgctttttactatgtatgaaactatgttgtatcaattctactaactttttttggccacacaacaaatattctaccttttgtagtttccttgactctatttacaacattctctacatcatcacatttatcattccataccttgttatttctatttttccatacatggtatatcaagcttgccaatgccgccgccattactttcttcctgaatttactcaccttggaccgtgaaatccatcttgccaaattggttgctgaaacggtggtagtgtgccaaagcatccaattcttgatttcctccaaacaagcctttgaaaaaggacactcaaagaataagtgtgcatttgattcctcttgaccgtggcaaagaagacaagaagagtcatcaatgatcccatacttgtgcaatctatctcttgttctcaatctttgttggatagcaatccacattataaagctatgctttggagtattgaaacgcccccaaacctcattactccaattaactctactatttgaaggacaaagcaattgatagcctaaagagatttgatatttaccttgtgtgaattggtgcacatctatcaaactttgaatctgatttttggcagccactacttgtttccaataccagctcccttgtggtgaagcttcatagctccaccaatcctcctg

SEQ ID NO: 230192 - DNA, 898 bp, Cannabis indica
aagaccgtattttctataaataaaataaaaaaaatcgtaaaaatatttaaaattccgtaaaaccgtatttttgtaatttttttgttgtttttgtgtatttgtcaaataatcccttaatcttaagcatatcggtgattaagttggtgtgtaaataagtatttaatgaataaaattgttaatattatgcctttaaaaaaagagagagttttataaaaatattaaattttgggcaaaagtttataattttactgtcacacggaattttttacaaaaatattatctttttataaaataacctaaaataatcgtaaaataacaaaatagaacaattaaaaataatagtaaaataactaaaaacaaccgtggagtgacagtaaaaaattaacacaatacacatttgaaaaaatacaatattttttttaagaaaatttgccccacattaaaaaagagaaaaaaattaaaaatttaatatatactgtaaaaaatctaaaaaaaaaaaagtagtaaattgggcagtatgattgtatgtgaataaaatgtatttttcaataaaaagccttattaaataattttaaaatttaaaaataactaaataatatttatttattttttttttgaataaaggaaaataatatttatttaattaacaaaataataaaaaaataaaaaacactatttacaagtatatatcttttcttgtttcctcttcttattctcttagaatgtgattgtaattttctaattttattattatttagttatttttttgttttaaaaattgtttagtatttaattttattagaaatatataagagtaaaccactaataatatattgactattgtcaacataatctgcttctaataggattcagcggacgcgatgaaggtattgtaaat

SEQ ID NO: 230193 - DNA, 2203 bp, Cannabis indica
acccatgacctgcctagggtttcctacaaaaagcccacacactattagggtaaaatacataaaaatactgactattgggcctccaagaaggctctttctcgtacagcgaatgattcgtacagctggaaccattgttagtgcagagcacgtgtcaggcagaagttgcatttggtagataaaatgcacagaggagccattggacaaaaaggtgtattcagaggaagtgtgtacactaccatgatctgacacagaggataaggtctaatcctgtgtcaaaaaaggtataaatgtcacaagagtcatccagctttcacttcgaggaagacttccagtttgtcttatgcaattggcatccgtcttagactctttgatggctcccaggtatccccatgtaagcttagttgatttggtctccaccaggtcctggagggatgggaaggcatttgggtcctagacagtgattggccttgtggtaaatttcttggcctttccgacattttgacatatctgagcttaatatagactttccgcgacttcctacaattaagggcacttaatttatttttacttggattttcaccttctaccgtttgccaaatgtccttcacccagaaccaaaaataacaaaatactatttcaaaaaaatacataaacaataacatgtgagaaggctagcgaccaagacaatgtctagtcgtgcactatgcatcgtatatgaaaagagtaaaagcgagaaaataaagagaagttagcatagttggaacatgtaaaaaacattcgaagacaaagcatttctcccccatgagttgtataaagatcgtgtctttataatggcaatctgaatgactatttagtacgtgacgacctgtatgaacccatgagttctatgttgtcaatacttgaaagcctggtatgcaatcattgtaatcgtaggcattccatgaataagaacctcatgaggttcatgcactaataagaaccgtaagaggttcatgcatcaataaaaatcctgtgaggttcacatatcaataagaacccagagaggttcacacctgaaaagaagtccctaaggagttcacgcattgataaggaccatatattgttcaattattgataagaacacatgaggttcacgcatcaataagaatcctgtgagattcatgcattgataaaaacctcacgaggctcacgtatcgataagaatcccgtgagattctagcatcgacaagaatcctctgaggttcacacatcaataagaacccatgaggttcatgcatcattaagaaccccgcgagattaatgcgtcaagaagaaccccaagaggttcatgcctcaagaagaatgccaagaggttcatgcatcaatataaacactatgaggttcatgaatttataagagccccaagaggttcatgtgtctataagattctcatgagtttcacataattataattacacgatgatcttataagaaacgcgtgaggtaaaaattaaaaaatacgagcttggtttatatttcagtgctccattagagaacaagcttactaaataactacaaccatgtgttaatgggttaaatttctcctccccgatgagtagagatcttgtggtactaaataagggacctcacatatttcaaaaaaatgcggtatcaatagaaaatatatgaacacacagcaaacaaaaaacatgaccacattgaagcactaacaccatagacgttacattttctttaaaattggtgtaaataaatatgcgaattatagttgtaacagtctcattctaaccacattgttgtaatcgtcacctactatcctataagttggtgaatccacctccttttaaaggggactgatttggataaaaatacagaacaagagaattacttttactaggcaagttgagcttttgttgaaccattatatttttgtgtcaattttattttatttataatactcgcatataattttatattatattctttgaagacttactattttaagtaattatttgtaatttgtaatattgcttttaaattccttccaaaacacaaatttctctataataaaattacaaaggtcgaactactaaaaaatacgttaaattttacaattcatatcttgttcaaaattttcggagtcaatatatataatctgtttttcattactagatacgaaacacaaaaaaaaaatcatatggaaatt

SEQ ID NO: 230194 - DNA, 1310 bp, Cannabis indica
gttccatttttacccctcattaattttttcacttgtacataacgttaatattttagacagaatcggacggaaggaggacttctcattgtttatcatagattgggggaatttccccaaaaaaaaaaagttgaggggtatgagtctacacacgtaatagttgaggaggcaaaaaagcattttttcctatattttaatatagtaagttactcaatcctaatcctaatagaattcacacaagtcaatttaaactaaccttttatatctctatataaataattcatattcattattctttagttcctttcctaagctatagttgaacacatttgattaattaaccctaattatgagttttctagaaaccattgttggtaataccatttaccaaatattaccatatcattttgaatcaaatccaacaggataagaatcatataatgcttgtttctttaccattaagttaaatgtcaagttcattcttgctatagatgatgaagaatctcatttacttgatgatatagaaaactcatatgtttttatacaaagtgttgggcgaatttcatatgatacattgatgaagaacaacgatactcaagcccaagtcaccattcaagacatgcttattgcggtcttacttcctcctctctcttttcttgctgatgaagtcattgattgcagtagaaagatgatgaacaacaaagattattataattcaaataaagaagtcggtgttaatgtttttattaaagttaatgttgatgaactacctcaacttaattcagattataatgatgacaacgacgatgacgaatatgatatgaatgatgttcttatttgttttgtggcggcgagtgaagagtcaattaaaaactaataactttaaaaataattaaaaacctactaaatactcgaaggagagaagatttcgatggtagcccatcttatctttttggagtttttttgtttggtgtaccttttaaaaaaagataataagatctttatatctcatttagtaatggtcaaaattcattcacagtccatgtggaactaagcaagcttaaggtggacatggtggcctaatctcaattctcatttctctttgaaaaaaaagagaatgaaccgaagctggatctttgagtttgtgtgttgttatgagaattgagaattgttgctgccaacccaaatcgatatgaaacgcatcatagacagttgttgcaattatgtaataatgtgtttatactgcagccttagaattagagatggaaattgggcggttaatgtacggggaatgcaatccccgctcccatccc

SEQ ID NO: 230195 - DNA, 1885 bp, Cannabis indica
tattacatttcatccatttagggagccacatcatgaaacttttcggattttgtgtaggggtgcccatggataaccgttagacgggatgaccttaggctttttccttttgccacgtgtcataatcccaattaatgagggataatggtatttaagccccctaataggaacccatttcatatttttcctctcatttccattttcctcttcccctctttctctgaaatttcaaagattcaaaacttcctccagatttctatcttcctctctccagaaactcgaatcttctaactttcagaggcagttcagaagtgtgcaaatatttaggatgttcctcacgaacctcgcaagtattcataatactcaacaagaaatgtgcgaacactcgaggtgttcttcctaaaacccgtgattattcaagtttcgagtctatatttcctaaagaaatgcatagtttgtcaaaaagccaattaagtctcatacatatatcttattgtctcattcattttctacctcttaaaacacagaatacatattgattttcaaaataaaaggaaacagttgcaataagtttcccctaaccttgaaaattctgatcttcttcaaacgattctgtaaaagtcaaacactttttatttattttctggtaaaagaaaagtgaagaagaatgtaaaggaaaatttttaagggttcaaaaatcagagagggagaaggaaaatgaaaatgggagggaaaagaaatgagagatcattttgtatcaggaggttcaaatacaattatccctcattaattgggatggagacacgtggcaagataatgcataaggtcccacaatccagcggttatccataacaacgcctacatggactccgaagagttttggtgacatggcaccaaaaatgggttaagtatactgattatagctatcttttcgagaccctcaattagacatacaaaagtcaccatctcgtgataacctctcgcatgcctctcgcttatagtttccctcatgagatagctgtcagtcgcgaaactaggggcacatgttacaacaagaatttctcacctagaaactcgagaccaggctcccataaaaggacacatggactcactctcctcgaggaggtctaagatgtcagcaggacacctcttgagtgtaaacctcgcctgaactagactcagcgggataatgtgatcttgacagagtctagtcgcattcgtatagctctcacgaagcaagaccgaagatcaggtataagatttgtatatgcgagcactataaaggtcttcctgcgaagtagtgttgtgaaaattatatacgcaagtatacgtagtcaactaagtaatagagtgataaataagatcgtctccacagggattgcaaacaaaaatatcttgtaaaaccaactaattacaacttaaaataaaaagaaataacatgaaaatgagtgagcatggattcaaaattaaagtgacagtagttaaacgtgctaaaattaatgttattgttgctagaaaaatgctttcaaaaagggaagaaaatataatatgataaaagtggcttgagtaactatttactcctatgctggtttttttccagttgctacagcattacctcagcattcctgccagagataacaagattccctatgtgtttgtgagaattttccaaaacttacaagttaagttctcacacctagtttcatatattcctatatcaaaccagattagagaacactaattatgcatcaattcttaagctatgcaaggtaaatgaatattcctattccacttacaaagaaaatctaaatctaggatttctcttgctccattcaagttgaacaactagacctaacccttctggaacaagatctagcttagtaaattg

SEQ ID NO: 230196 - DNA, 1657 bp, Cannabis indica
ttcccacttaagcgcattgatgactatcctcgagtcgctcttcacgataatgaacttggacttgaggtccttcgcaatcataagcgccaaacagcacgccctagcctcccccacaaagagcatctaaaaaactcaatcgatccgtatgaacccactccaccctaccaagatggtttctggccacaactgcaatacacatactatcaagtcccactctaacatcgtaattcagcttaatcgaatcctgtggaggtggattccaagcttccttaacgcacgagtaagggaagggaaaaaagaagtatgaagatctaccaaaaaaagtacaaatagagtcaatatacttcttcacatctaatgaaaatataataaaataagaatgtaatgaaaattgattcaatatttgatttgtagtttgaatgaacactgtaattaaaattattgtgtttggtttattatgagatagtaatggaataaaatgtgtatcgacaaaaataactctattgtttttattttataattgttaaaatagaaaaataaacaataatacaatataatggacctattcattaatattatggtaaactaaacgttaacttaatttttttttttattggtacaaccaatatatataacagtttaaactttaatcttgctaagattatctccgacctaatcactaaatttggtgttaaaaactctttctactccaccacctgcaacactaaaaattacactaaaaatattcttattatattaattttttaataaaataaaatattttttttaatattatattaatttactaaaattatcacagttgttatatctaattaatgatttaaataaaactactaattaatttaaagacaataatactacaaaatcaataaaattcaataaattaaaatatgtctgaatttaatttaatttttcaatatatgtttaaatttgtaatgttttaaaaaatatatacaaaatttaataattttttatttaaattataataaaaaaataatttaagatatttatattttaatttatacataatctcttaaattcttaattttataaatacaaagaataatataaatatataaatataaattaattaatgaaaagagaaaagaaaagaaaaaaaaaaagaatgtaatagctacaatacagtgatgatcctaggcatatgtgtgctaggacctacttatcttaagagcccaaataaaaaaatatttttttaaaaaaatataaatatttttttaataatttttaaaaatactatttatttttatagtaagagtccaaaaaaatttttttgcttacaatacatttcatttcagggccagccctgtgatggtgtcacgacatatatgtcgttcacgtactctaactacatatatatactaggtaaaagttacgtgccgagccacgtaaatgttagttttatttaaggtgttaggtaaaacatagttgtgtctataaatatatgtgggtgactattaaatggttacatttttattgtaaccatatggttacatttttctttgacccgtaatagtagattactaataggtagacattccttttttagaatttaattaattataattaactattttcttaaaaaaattaattaaaaatttaacaagacctcttttag

SEQ ID NO: 230197 - DNA, 680 bp, Cannabis indica
gggcataaaacccaacaccatcgtaccatatacaaaaaaaatcacaaagaacccaaaaaacacacatttcacaaaaatttgattttccaccaaaaaataagaaaataacacaaaaaaatcatagatcgaacatctaaacaacaatagcaaaaagggtgttggtggtttctttggtttatgggtcttgatctcggtggctatttctttggtggatgacgatggtgctacgagaatgggagggtacgtaagtttgggcagagacaagattgagggaaagagagaagatagagaaatagggtttaaagtttgaacaaaatctaaaaattacattatctatggtgttaaacttgggtttaaagttcaaaattagccgtttagaatatagtgttcaaaataatttgattataaagaatattatgaagaagaatatgattgtatgaaaaatgtgtaaactctgtttagttttgttgggtaatatataatcacattcccgttaattgaattacactgtttaatttagtacaagaatcttacatattatttaaaagattaaaataaaaatatttttttattatatttagttaatgttaattacacataaaaataaaataattattaactagtaaatattaaattttattgtattttttattaattaaaataattatttctatatattt

SEQ ID NO: 230198 - DNA, 2318 bp, Cannabis indica
cctggtgaaatcctaggtgcttaggtttgctttcgggttgcagtttcgtataatttcaagtcctcatggtaaagaatactgaatgatagtgagttggattcatgttattgaagtctgaacttccatcccagagatcacaaagtcaacttgggtgctggactagggtcccatcccaggtcggctgctatgacttgggtatactcaactctgtgatgtcattcttcttgcgacatgtcaaacattgatgcccacgtcattggagaaagtttcaagttaacaagggttttttttagtctggatttgtttctgttgttcgaacattttttttcaattatttttttggttatcgtcggttggtagatctcaaataaatctcagatctataattatatatatatgtcagtttaaaaccgacagctaagtctaagtgactatttggaatagacgtctattcattccctctcttttaccgtcgattataaacagttgagtatgctcaattctgatgtttataatcgacgaatataccctattattttgcatcggtggtttgagtaacaaacaagaatgttatatctgactattttgaatatatagttgcctattgccgactttttagtagtgataatagagatctcattttttttttgtgtgtttcaattcttctttctcaactcaaccctctctcactcttttgctcctcgcaagtacaccatggaagaacaccgttgacgggatggtcttgggctctatctttccattggtgcctctcatttttttgggacgtctctctctatttaggatatttcgacgattgtagtggtggagcttcaccaaagttgagtggtctccgtcgctcgttcctatctctcgctctaggtaaaagttctctcactctttctatccatccgtctcaatcttgatctctcaattactcccatttattttttttcgcagacgatgaacaacgacattgacagcagttcgcggtagcttagccattaggcagcaacgttggccaacttcggcatcttgtcaaaaattgtattgtcattagggtgtttagggattttgttactgattagatttttcatttttctctaaacttttttactcattttgtgtaccttgtaaaagatttttgtatttgttactgattaagttttatactgtaattgttactaattttttttgtatgggggttctcagggtggaatctcatcgaggttggggtttctcgaggtggcatctcgttcgggttagtatttctcaatgtgaggtctcctccaggtttggatttcttggagtggagcctcactagttttgggattttgtattatgttttttattatttattattttttaaaataaaataaaagttaaacatgaaatataataatatcaaattatgcattttatagaattggatgtgaaatgaacatttttgtaggtccttattatcagatccaacatgagatgcctattgattaatagttagtagtaaagtataattattagtaaaaggctaattaggatttttgtctcctgaactttgatatgtatcaaatcatgctccctgaacttttaagattgttgaaaatgccccctgaactattgagattgttggatttaaggacttttgtctaatttcattcaattctactatttcagtgattgtttatgtactaaaccatgctcttcggattttgatatctaccaaactatgccctttgaactttgatatgtactaaattatggtccctgaacttttatccatgttagacttttttattaaaattagaaaaaaaatccttaaatccaacaatcttaatagttcaggggtatttttaacgaccttaaaagttcatggagcataatttgatacatgtcaaagttcaaggagaaaaatcttaattaacctttgtaaaataaatgtgatttcatattaaattgtaacaaaaaaaaaaaaaataataaagtgaaagttaaataactaacccttcaattcaaataattgtcaaattctcttcctacgcacgcaacatacaaaattcgaccatgcattagcttcctcttcttctttttcttctttcaaaaaaggtcttcttcttctttgaattatctcatgttaatatattattatggtcaagattttctctacgctcatatatgttttaagtttttccaacccaaaaaaaaaaaaaaaaaagtttaaattctaccacatatataataatatacacctattttttttatatatatatattaaccttgtttttgttgaataataaaaaataatgccctagccgaatttaata

SEQ ID NO: 230199 - DNA, 1611 bp, Cannabis indica
ccaatctcaaaactcttcgtattgttcgcagcgactattttgaaactgtctcagcgtccgatgggaaatctcttgaggaactaacatctttttctatcgagagttgtggtaattttgtatctttcccaaatggtggacttattgctcccaagttgagtaacttaaggattagtggatgccctcaattgaagtggttgccagagaagatgacttccctctcatctttagagaccttgataatcgatgattgtcctttgatagagcctctccctgaaggtgaaggtggtcagctggttagtttgtctacactttggatatcctatgatgcagttttgaggatgaaatggaattcgcaaacattaccccatcttacctttcttggtattattggtaatgaagaagatatggaatcatttccagaagaagggctactccctaccaccattacccatctcaaaatatggagattttcaaaacttagtggattagacaaaaatgggcttacacaactaacctcattgcaaagacttcaagtctggggctgccttgagttggagacattgtcagaagaaggatttccaacctccctcacctctttggagatctccaattgtcctttggtttcagaaaagtactctcagaaggagagtgggaatgaggagtactggaacaagattagtcacataccaaatgttagatttgtatgacgagcttgcatttacgacatataatctcagattgttttgattaacttattgttcttccattttcttttttatttatgtatgtataatactggaacaagattagtcacatacccaatttaatattatccttgcaaagtctgtcatgatatcttggccaatacttactgcttctgaaattgtttggctcttatctgtcctcaaagagttgaaagttgagcaacttggtgatatcctgacaaggccattgtttgcagctcagttgaaggtgtttaaagagaagaaatgagcatatataatagtaatattaagactggtttagctgatgtatttgtattagttacttaactcagaattagcaagttaggtcctatatgtgttctagttagttactttctgttacttcttttactaactcattagtaacatgtagcattttcctcattttaacaaataatcactgcattttttaatgaggggacatggttttcctcattatttcgaaattgtttcgtaaagaaatatacatacatatatatatatatatcagaacatgggaactaagcttctgtaattatgtaccatatggatccaagcttttgtataaatataaattatggttatgaaaaatatgtaccatatagcataatgcatgtgtgtttgattatacagtactcccatggtgttgatcaccattgttgcggaattgggacttaaatctcgaattgtatagtgctgactcaaatcaataagtttgattctcatgattgttgttagtgacataacaactgcattagggtgaagtaatttcactacaataaaaacatgtaactgattagtcagtgtttataatgagggagacataagatgaagtagctcatctgagtgtgtttattttattttattt

SEQ ID NO: 230200 - DNA, 3155 bp, Cannabis indica
acattatttatctgtgtccatatgaaactgatgaacagccggagaatcactgctaaataaccaattacagttaaattttggaaaatggcaatttagcattgaaatgtatatagaaaggcattacactaaatcattctgtaataacagacgttaattttttcaacagttatcaatgtactaaaataataaaaaaccccaatttggtatcacttttttattggtcagtgtttataaaacgtacgaaattaattgaattcgatgatgcaaattttgtacaggaaaaaaaaaacattttattgaatatgaaaagaagaccaacttagaatgaaaaactgtatacaagaccaaaattgcaagtggaaatatgcactccttttatttctagtacggactccaatgtgaataagaatcaactaggcccgggatgagataaatcagcacatcaaccagacccattatttgaaaaatcaacaagaactgggcaggtatatgtgggaaagccatggatgttggagtgcctcttttgctgttggacgcctctctggattaatttctagtaagcttctgatgaagtccattagcccagaatcggttactcgaaggtgatgctccaaggaggactcctcaggaattatgtactctaattggtctgtctcctgaagataaaacataacaatacaccatggtaagttcatgaaggaaaaacttagtctacttcatatagtctccatcttttttattcgaaaagagtttaacaagaactttatgttttcttttttctgatctttattatagttaacaaatagtttgtttgttattgattagacagaagggatgtgggatttcaacctcgtttatataatagagatcaaattcttctgagaagtacttgttcgattctcgccccatctccaacatttctagatcgataggaccaagcatcccaatcatgcgtgcaaggatcatgacaactccatcatttggaaacagtacctgcttgtcataatcagaattcagaggttactgataaatcattttcaatttcatgaattgacaaataaaaaaggttttaaagtgataagaaaaacaaagacatacttccccagaacatagctcagccaagatacagccgagggaccacaagtcaatcttgttattgtaaggaaggcccaggattacttcaggagctctgtaggaacgagattgtacgtacaggcacaaattgtctgtctggaagcaactacttccaagatcaatgacctttatttcacatctcttgtaactcttgataagaatattctcgggttttagatcacagtgaattattcccaaatcatgcaagaaatctaaagcctctaaacattgccgggttatggcctgaagaaaaatacatcataaagtttcatgttagctgtattagttctaacaaattgttctaacagatagtgtactactcttgaaagcactatgtgtaagtggtaaataccatatattacaaaaattacaagtactaaatgtaataaagcaaacctgcaatcttcgtgatgtaaagtaagcctcttcaccagattcttgattgaatttctgaaactcatacaagtttgctcgaagaagttcacaaacgatgaagagatgctcctatgaattgtttttcaggcagaaagcattaacatggtgattgattttgtaacttatacaggtatatatagatgtcattatctcctaatgaaaagagataaccaaatttaggtgttaatttatctaagagacctacttgatggtagaagtagtcataaagtcgtaagatatggcgttcatcagcagggtcattcttgttgacaaacttcagaagtttaatttcatctaaactctgatcaaaaaaatctttgtcgtttttaatgatcttcaagcaaacatcaacacctgtatgaaggtcatgtgcttggacaactctgctgaaagcagccgaaccaaggtattcagttacataatatctgccagcaataacggcatttagcacaataggcagttccttgttttcttcaaatccggtcctgtagatggcacaacacgtaagcacaactgaaaacacaccaacgtgtaaatacacaagttacaaacctaggataccagaacatataaaattggcaatagcttccaataattctgaaagtatcttcgcatcttcaccagtaattcaaaacccaaacttcaacaagaagagaatcaacaaacctgttctttctgtgtatgattctaaggtcaaatacttcatattcatcctcattggtgttgcacatcaaaatctcatcagcagcaacatcctcacagctcgttgcagctttaagctcattatcctccacatccatttcaaaattccccacttcgtacttgttaattccattgaacatgaaatctttatttgcaactttgacatgtaaatcaggatcaccatcaaaatcttcagccgaaaaatttgtggattccattttagcagcgtagtcaatactcatttcggttgccttacatcgagcatagtcaatatccggttgagtaatattctcaaaaaccttcacatcaaaactatcctcagcagcttgttctgtacttagatacacattctttgtaggaatttcaccataaaactctctgccttctatatcgctattgcaaaagagtacgtcacaatcatgattttcacaaacattagtatctccctcgatgcctgcttcgtgcttgttactttcgtttaaatgataacaatgtataaaaacttcttcactttcatttttagttgtagcaatactagaatggcataaacttatatctgatagaaattctttagaatgattattcagatccaatgggttctcccactgcctatccacgtctgaagtcattatgaacttatcctcactaggacaaccaaagaagtccgggccttcaaaagagggagtcatgaagttgccatcatctttctcgttataccaaaacagatcattttgcatatcaaaatcatggtaatctcgtgctgtgccaaattgagataattcatcatcagatgaggatttcgaattctccgggctcgctgatcggatcccatacggattagtgaattctgcaaaagtggaaaggaataacttgctcgaatgtgc

SEQ ID NO: 230201 - DNA, 1718 bp, Cannabis indica
atcttttctagatattttatctatatttttcttttttaaaaaataaataaaaaaattattaatattctcccaagataggtttgttagagagatatgtggctaagatgatttttttaatttaaaaagagattattaatatttaaaagattgtttatttaaaagattgtttaattttttgggtttaattattgggtttattttttaacgggagatcaaacctaatcgttaaatttaacagaatattcttttatttttaagtatattctgttaaaccaagaatgttaaaccaagaaatgccgttagataggcacttttaatatataaagatatatattatatatcatataaatggttattaaaaggtattttgttgttctttaatcaacagattgttgtgtatttgaacaaaattttcaaatttaaaagttaagtttaactaaattatacatcaatatatatggaaagcacaaaagggaggtaggtgtcatcttatagttttttattattttgtatttgtttgaaaatcaaagtacacgtaatctcacattatataaaaacttcatataggttataaataatattcttactacattaattatttttctttgtttaaaaagtattatcttttatggataattgattaatatcttacttaataaattttttttattttttatttttcatctaataaatatttatatattttttaagtagttatttatcgtgtactaattttttttttaataataatattttttatatatttataaaaataattttatttaaggaactttatttttactattctatatttttatatttttttattttcatctaataaatatttatatatttttacaattatttatttatcttttaataattacctgttttaataattttatcctaaattttatccacctgacgtgacatgtccacgtaagcaaagatagagtacatgtgccatgtggaatacaaccttgcttgtagcaagacaaggtcttcgtacaagatatggcaaaactttcaagcaacaaccgaaaggagtgaagcgagccatcaaggagttgaacaaacatgtcttgtcggccaaactcagcttgtatggcaagccaagatctggacacaagctggccggccaaaaggtgacttttagactaagggagctttcgttcaaccaagaaaacctgacctctataaggaaacagtgtacaaagttgtcctccacttgccaaaggctggcctccatatctaaaagctggcctcctcttggtagagttacagtgacatgcaagatctttgtaggcacgtgacctgctaggtcctggcaggagcatgactgaccagacctcgacctacacaacttgcatggtcggtcagaccatatcctgcagtgcatggctgaccagacctcccctgtagatgtatgggcagccaggattgacctggcacgactctatgtacagactgatacatggacaacaactaccgttgaattgggcccttaacagcccagccaattgcctactttctaggggcaatttagtcttttatatttaatcaatttaatacgtaaatatctattgattttagttgtaaattagggtttaggctttcatatataaaggccttaacactaacctaaaaaaggctaagtctaattctagcctccaaatcactcaaactctgaaaccctaatctctcttctctctctctct

SEQ ID NO: 230202 - DNA, 2743 bp, Cannabis indica
atagaataagaatgacattctattatttaataaccaaaaagaataaaataaaaattgttccatattttctttctattctatttcattccctccaattaaacgccacgtaagagttaagagttcataaatttacatgtatgtcaatatgatttgtatggttgaaaatggttgaaaactatagtatatatatatatatatattcttgtgataattaaacaatgtaatattattatatcttctcttcttaaatatatttcttattaattaagttattctcgagtcaaaattcacaccaactagtttatttgtatatgtggtaattggttacaagttacactttataaaagtcttattagttagttgccgactaggacaacttgtttagctcggactagggttagctccactaacatctcgaaataaatttctaccaaaaatttgaaagcacttccccttaattacttcacatttcaagtatcaaccaaaattttgattttgagttttgcaccaaattgcagaacctgcacaaaggatctttgagcttgaatgaatatttgctcaaagttaagcaaactctaaatcttcttgcatctttagtaaagtcttaagcaaaagtgatctctaattcctagtgagtatgacacatttgtcatctcttccaataccaaagaaccacatagacaaacaatttcacataagtcttactctactaattagttacactcaaccttccaactaattttagcaactaattgtataatcaactacacaatactaatataacaatacaaaatatattatttttagccataataaaatttataactaaaagtgaaaaagttgcgactaattttaaattatcatttctatgttgtgactaaaaagtttatgactaaaggtattagtcacaaaaatcacaatttgttgtgactaaattaatttttagtcacaataattgttgtgactaaaatcaaattagtgataatttatatctaaataatatgttttagtcataagtaacttttttgttgtaactaaatgttacatttagacacaaaatttaaattaggataaataccattttaaattcttttttttttttttgtaaaagttaccaactggaccctttgttttgttaaatgataaaatagatcttgtattttttaaaattgtacaaataggaccatgaactgattttttatcaaaataaaatttaataataattttatctagagatgttatgacaaaactagttacattttctgtatctgttgatgttagaaattgtcttaaagttagttatattaaaaaataaaattgttgaaaattgaacttactgtcctatttttatcattttagaaaatataaagatagtctttatagtaatttttacaaaacacatgacttaaaataatatttaccttttatattatttgtcactaaaaataattttttttttactataattatgtatctacacatatgacaatcacaatcactatatctttcttgatatcatcaaacaagatatgttacttgaaaaaatggaaatcctacactaatataaaaaatatgaaagaaatattttaacaaaaataaaatataaatatttaattatttggtttaaatgtagttgtccatatcccttttttttttaaaaaaaaaaaactctaaaaaccttgtctatatactactcttttcaaacttaggaaccaattgtaagtatgaaaatcaatgcctatagctactacctatccatatatttaatatgggtatctttgtagtaacttccatcaaaaagaaaaaataattgaatattttaattgagttttgtcatttattcattttaaagtttttttttttttggaaaaaaaaaactacgtgaagcaataatttaaatcgcaattaaaatttatattagagctcacatcaaaacgatcggatcaactattaaaataaaaataacatgtacctattttcagggacggacccaagtgtattagtttaggggctatagcccccactaataaaaatattgtcttttaaaaaattaaattaattattttaaatttgataattatagaccaaaataataaaaaaaaaccccacaaaattaaataaatttaataagagtaattataatatatgtataaatattttttaataataaataagcccccacaaagtaaaatttctaggtccgtcactagtcggaggtaataaaatggaatagaataaaaaaaaaattttcatttaattcttttattttgttgcattttaaaatattagaatatcattctaatggaatgctctttctaccattttggtaaaatgactattccattttaaaatgaaggagaaatcattctaatataacatgagaaattttttaatgattttattatcatttttcatgcattttaaattttatttcattctattcatattctcattcccattcctattcctatgtgttgattatagttacaagttttgtcatccaaaagggaagttgtaaatctagagagtatatacaagaagcttggttagaatttggaaagtcttgtgcggatgactttgtagaaaccggaagatatttctaaataagcttgtaacgcgtatgttttgtcactccggatagcttgtcattagtttggagatgcacttttggatagctactgtcactcttggttgttcattcgggaaggagcgcttgtatgtatcctgatagcttgtccatatt

SEQ ID NO: 230203 - DNA, 1115 bp, Cannabis indica
ttagatagagctcggtttgtaggccttgaagcccaagagcgttaccttgatttgaaaaatagggcattcattaaagatcgcaatatttagtgtagtaattttgccatgcccaatcacccattgtttgaaaccatgaggctccaaattcagagatgagattgggcacaatttgtagatgtcaaagaaagggcgaatcaaactttagtccttgagttctttgctaattggctcgggaggtaaaatgaaatggtgaaagtgataggaaaagatgttctagtcatgacacaagctattcatgcattttattcgctcccaaccttcttacgtgaggagcaacatctccgaattattgaggaggatgaagagattgactatgttgatgtggctaagacaattgggtacccggtcctgaaatttcatgagtatgatggagaaccttatcaattgtattgttgtgagttaaaacaggtaactcgtgcatggttgaactttttgaatggtcagttggtgcctagtaaacactttttctgatgcttagattgataggctgaaatatgtaggttttaatttgaatgtgggtgatattattcggaggagctttgacacaatggcggaaggagcgtccagtggaggacttagttagctgacgtcattactgatttatgtaaagcttatggagttcttgagtattcttatgattcaaagatccctcgacaatgcaagattgatgtggggatggttactagactgaaagctccacatccatatggacaacctctccctcgtcagaagcaagtgccaccacaacaacaaggagccccaatcaatcctcttgggtgcgaagaagcagttcatgatgaagagctgccacaacacagtgccagccctcttgacccagccatgcagtacacacatgatcagttcaactatcttatccagcagaccatgcacatgcaaagttacatggcacggaggagaatttttgatgaggagcaagttcaacagatgaactcccttatcacgtgaatgaatatcgggattaggacccaaatccaccccaattccagccttatgaccagccaccgccaccaaaccccttctgatgggggttcagg

SEQ ID NO: 230204 - DNA, 1730 bp, Cannabis indica
ttgatgtacatttgtttcttctacagttattgaaaaacatgttgatgtgaaatgtaatactatagtattatataagacttagtttatctgatttcttatggtgtattctcttgcagatgcatactgttttgataccatactttttgatcgtacttgcaacacccccaactcacagcctcgagggaacgttactggtgcgatttttgtttcttcatatttttattattatcataactacactctcaaacaaaaactggtgttttcggactctattcaaaacttaaaaatctaaaatctaattatttttacaggccggtcgagatctaaaatttatcagtatgacaatgagcggctgctttatcgtgggagcaattttactaaaggtagaattattatttcctactcttctgttctgttatccatgctatcatttttaacactttctttatttatgtttcttcttaaaaaaccagcttgtaagtgtcaaaggatttggtttagcaggcatttggtttgtactagctggttttcaatgggtaagaactccaacttctttctttcgttaataattttatatacttttattttcttcagctacaatcgatccccgaaaaccaatttgaataagttttttgttggctttaatcttttaggctcgattatttatcgcgcttcaacgtcttctatcctcggatggcatactatactcgaaagagaaagaatcatctgtaatagttaggtctaaattatgaagctgtttcttgcaagttgtaatgttgtttataattatatgcctagctaggccaaaaataagatgggtgtcatatatatatatattttttcttcataatgtcatcatatttattaattattttatcatttatatcccattcaatagcaaaatttgcagccagtgcactggcctccctcgctttatgttatgccatttcataaaaaataagtacaagcctaatttcaatttgaattttgtaaaattataagtcatggttttaatttcctaaaatgataatttaaacactatacttggtaaaataaaaatagtatataataatatctcgagtctaattttagtcagtttttttctttaatatcattaaaatgtaatcaacttcaagttagtctctagtacaaatatgtgtaaaaaaaatatgtaaccaacatcgaacctttagattatatttagttttaaaattgtaaagtttgaattgtcttataatatagattatatttagtttgaaatgcctttagattatatttagttattcttctttttttagtagttgtatattcagtgatattagtagaatttgtaattttgttgtccgactaagtgagctttctctcatcagaggtttggggttattccagttgactccattccttttgactgtgtaatgaccgtgaggtctaatagtttttatttagtaatataatcatgctttctttaaaaaaaaataaaattatcttttaatataattaaaaggtagaatcagatcaataaacaaatatgtatgtatatatttgttgaataaatctcctccaaaaattcatggctagaaacattagtctgtctcaatttaccaaactactgtcaatattttgcatcaaccttggctacctcacaccacgaacccgtatgtcacttcctcccatgtgagtcttgttggtcaccctgtcagctcccttctctctgttgatgctagatcctg

SEQ ID NO: 230205 - DNA, 1403 bp, Cannabis indica
aaattcaaataacctacacccaagggttgttaccatttcttaatggggtgtaaatgagattaaatgggtaatttggaggttatgagagttgttaaaaaccatccttataggcaaaaaacgttcaacaattaaaactgaaaaaaacagtaactagttactagttaccaaatttttcagcttttgcaaacaactcttcaaaccattccaaaccattgccactttattttatatcacttatacactttataaatgaaaaatttaatctccaacaactatatttgaattatggttttgaatttcaaaacaattaagttgtgtaaccactctttacacacttaattagtgatcatgtggaagttacaaaatatgagtaactccacctctaatgttacaatttatgtgaatattattatatgtatgtaactctcaatcatattatatacattaatctcatattaatatataatatgtctcattttaatattttaatctatcttatattataacaatataatataacaatctatatatcaagaaaattacagtaattgagaaaaaaagaaaaagtagaggaattaatgaaacagagccaccaataagagccagccctatataatcaatatataaataaaaaaaaaaaacattatcatcaaaaatcaaaagggttttcataaaaaattcttaatgagaaaagggtataaagaaaaagtgggatttataagatagaaagtatagagaatagagaaaaggtagaagtacctttattatcactttcacaaagttttcttaagaaagaaaggaacacaattaggagaccaacaccagctattaatccaattaatattgccagtgtcttctcaatctcatcgtcattgttattattattgttgttatctacaacaaaaagaaagaagaaagagataattaacacaaaaatgaataattaatttaattaataaaccaaaactatcacatgtcactagaataatagtaattatgatttcaaagcttcaagtggggtaaacaaaagaagaagaagttcactactaaatcactcacacacagaacaatgtaaaacagaacacacataatttttttttttctagataaatttagtaatataaataaactatttatacaattactaaaattttatccgactaattacttacacatgagcaatatgtaacagaaatctaaaatacataatctaaacactataaaatactacacttagaattttacatttttttcctaattaagtgaagaggcattagtaaatttttatttagtaatagactaaaatgaaaaataataattttcaaatatttcgcggtctatgcttccttacttacacttccaattagtttagtgtttttttgtttaaatgtgacaactaaact

SEQ ID NO: 230206 - DNA, 1190 bp, Cannabis indica
ggtactgtataatgtgtattggtccacaagtcaaatgattttgtttttggtttcttaaacacggtaaactttgcctacttgatatacaagatttctacacattctccttcgacatttctacttatctagaatgttaggctacaagtatttatggctcatgaaatgtcttatatttaatctttgtcacagttacatgcttctcatggggtcatcactctactactagttttcactgttttaatgatacttataattgtatttttcagaaaaaataaagccttctgatgtaggtctagaacaggaggcacaattggtacgtaactggccaggtactttgcctgagcgtaatggccgtcatcaatcactgccaccaatcaaatacttgcatttgcatgaggatgacagcttctctgtaagcattgactttaagtgaattgtgactttcaaccaaaaaaaaggaaccactgattgctggttacaaatatatattggttggtttttaaaagcaatccaggaaaaatattaagtcaggttttgatactagtagaacatccaacttatatagttcaagtagaattaaagatgatcattgacataaagttaaagtttcaccgaacttctttgatgtttctgatattttctcagataggaattttctgcatgccaccttcttcgatcatacctctccataatcatcctggaatgactgtgttgagcaagcttatttatggttcattatatgttaattcctatgactggctcgatttaccaagaccagatgacccttttgaaggtgcgttttccctctctgcgactcatcactcaattactttcatctttagattcatgcacttcgtacaagaagaaaatttgttaggggtagtagacattaaattgcatggatcagatggtttgtgtgtatttataaacacccatacccgggcacctctttgtaagcttgaagctggaactgtatatggctgcttattatgcttaataccttctcttcctctctctcctttttgaggaaggaggattttttgttcatcaaaagcaagggtaggatactaacacaatgttcattacagtagtaaacaaaatgtatgttacttaatagctgatttctcctctatgtgttattattttcccatttgggtggtttaagtcgtttactttagttttcatgagtg

SEQ ID NO: 230207 - DNA, 1240 bp, Cannabis indica
gatagcctccccttcagactgttatggctggcccgcccctcacagcaacatctacgactgaccagcaacatgcaacaagccttatggccggccagcctgcacagtgctaaaaaggtgaacagagctaaaagaacaacttactggagaaaggtctcaaagatcggtagagtagggcatgtttggctcactgtcaccaagctccttaagatcctcatccctaaaggggagagctctctctatgtttctactgactacttcagtagccctctacccaacaacttacctagctcctctactaagccttggagtatcctgacttataggccgtatcacatgctgcccaactggcacatgcctaaggagaggggaaggtagtgacaacccggcatcatctccaccacaagaagtcctggccaccttggccatcactcgtcctgtgggctcatttgaatttcaccccataagacctctcagcctgcaagacatatctacgaaaagaaagtagcaaatcataaacattcaatacaaattaaaagtatggtgttataaattatcaaataccattgtcatcagaagaggaactatcagagtcctcgaccaccgcattgccttggcctctaggcacggggcgagtagatccctctgaaacctgtcctctaggcctgatctagagagaaacatcaccaattggacccctgccagccaagcaccgactgagggccctatccttcctctccaaagataaaggcacctcatcttctatgtctccctttaccactaagacttttgcaactctgggagcaggttcatataagccatactctcggaaattggccacactattaaactagattatatttctatactctgtcaagagagaaaggatgtggtttgcctatcccttatttgcaagtagggatagagcgtttgaagaatggaaccagccaaaatttttagtgccctatcctacggcggccataggcaaaaaagtacttcttggcatacccatcgacctttgacatggttgtgatattagtgtagcccaaccattggtgactgatctaactaaaataaaaatacccagtcctgttctgcttcggggcagactttagatcaaagtagtatccgatctcgtaaggggtaggctgaggccagcctagctccatatatacgacgaacatcgtccaaaggtacttgatacttttcagcgtaagctgtgtcagacacatcccaaagtaag

SEQ ID NO: 230208 - DNA, 819 bp, Cannabis indica
gtaacttaaagtatttaatccgtaaaaaaaaaacatgtagtatttaagtgtacgaaactgtcaggccgggtacgtttactctcgtactaagaccttagttgctcaagccattggggacaaagccgagttgaagaaagtttaggacgaggtcaagaacaaagagactgccctgggtgaaatcaacaaccagctttattaatccaagaaaaaggctaaggacttggaaaaaaagctgtctgagacaccttccacgaaaaaactgcaagaggacttggagactgaaacaaaatgagccaacgagttgattgaggaaaggatcaacctccgtacacttctttagaatctcgagcaaaagaataaagacctcgagcagaaagttaaagatctgactggcgaagcggccaaggaaatacataatgaacagattacttcaaccattctgaaggtgccacgctcccggattagaggtcctccaggattcaactatttgcctaacacggattttgaatcaaatcactatatatgactaatgtagcacatgattaacatcattacgaaaccatactgttttgatgacccattcacctaagtaggggtggcaaaacgggtttcgacacggcacacgaacacaaacacgataaaaattttacgggttagggttgagaaaattagatgcgggtcaaaaacgggtcgacacgacttgacacgaaataaaaacgggtcaaacacgacacggcccgcttaatacaaatgtgacacgtttgacacgattttttaaaatgtaataaaataaaaaattaataataataatataattat

SEQ ID NO: 230209 - DNA, 1793 bp, Cannabis indica
atgtattaaaatggggtgatttgggaaagtaaaatattaaaatacacttaacatactaaatgtgtagtttttcaaatgagagtcaattgatcattatattcaatagagggtagctatgtatttaataaaacagaaagtatcaaatgagtacttatcataaaacaattcaacaaaataaataaaagtttttgagtatgattattgctgatcaaaatagattataagtttttctttactctaatagcaatgctttactctattatcatctggaacatagtagagagtaggaatgcatatttcttcaatgagaatgcggccctatagggatctgcccttaatagggtggggattctctgtctaaatgaggaacgaggtggagacaaggattatttcccgaatgtttaatggggcagggatggggattacattctccgtccgacggagacccgtttaatattttattttatatttctaataataatttgtaatttgtaatttatgtttgtattttagtagtatattatagtatcctttttatgacttttaagttgtatttttgataataattagtttattaaataataattaatgtgtaatatttaaattttatgtagtctaatgtttttatatatttaaatttttattataaattttatttttattagggaatttcctgctgcgtctcctctcctattagagaattctgcgcttcatccccgatagaaaataagcagggatggagtttataatctttaacggagatgggacgggaagagcattccccgctaattccccgccctatgtgtatccctagtagagagtctcagatggcacaccacattcaccagaatcagtagtattccaaaaagatcttgaatttggcccatcactttcatgattatcactgcacaattacaaattttatacgtacaaatttcatcaccaaccaaccatagatggaataactaaaaaaaaaaaaccaataaatagaaattatgaacatgtaattgaacctatatatgtatgtatataaccttgcaaccatatatggcacagaaaaagaaatgggtgaaacttgtgctataaatcggtcccactatgagaggtatccatcagcatatgccatatcactaatacggaaaagtctatcataatttttgaggtctacaatgaattgatttgtagtattgagtgaaactggttggcttttaataaaaataaacatcattcataagaccaaaaatgttgatctttcaataattgaattattattttctcagaaattttgtgctagaaagtagaaacaaatgacaacggcacactttttaaattgattacctttccttagtcacctattataataacctgttgtaaagagtccttgtctaggatatggtggggtttgaaagaatgagatctcctccatacctgtggaatattggataaaagatgacccattttataagtatagtatctggtgcataaatatataatcaatataaagcaatttaatatagagtatattatattaatagagtacatctctgtattttaatagagccaaatttcggtaaacaattagagcatcaaagtacatttctgtattttaatttagagcattattattagattactattagagtaaagaaaataattgagatatcaataaatatataattaatatacactcactaaaactacaaccaaatagaaaaacaaaaaaaaaaaaatcacccagcttgtggaggacaaaactgagagaaattgaaagctagagagagcacccaagaact

SEQ ID NO: 230210 - DNA, 3246 bp, Cannabis indica
tattattcagatttctactgcttcacttttttcttttttcccccacttttagtttttgtcatcggatttcaattaaagagattcagtttactgatttttgcagtttttgtattcagatgccgatttgcgaagtttcctacttttcaaagttcctacctttattccttatgctctccttttgtatttcttacaggtaagaacacatatgaacctatgccaatgtttcgttttatttgtgtaagatctataaataaacttccagtgcttacattgtttcagctaataattggtattttgtgtattgactttcctgaaacctttacattaacttattgggtactatgttctaatgcttagagtgtgaattttgtaagatacttgtgtgtgtatgtatatatacatgtattctccagtacttttttccattttatttaaagagttacacttgtacattaatatgtatcttttgggggaagattgtcttaatgatttagttttataaaccttccaagaaatatagggcttcagcaagcaatgcaaatacagggaaagagaaaacgttagctatgataaaaccagatggtttgcttggtaactacactgatgaggtaaagaatgtcatcatcaattccggtttcattattttcaaggaaatgattcttcaacttgacgaggacagggctgcaagcttttatgccgagcattctttgaagagcttctttcccaatcttatcaaatatatgacaaggtatttcagagtgttagagagtcttaacacacagctttttatatttgatttgactttccatttttagcagttacttgtgtttagtttggagaaaggtaaacatagtcattgtaaacttgttagctgggtttttaaatttctggtggcccatcttgttgaagtttgaatagatcaacctgccttggttttcataaactgtggtatttagtaataatcatatgctcttaagctgtggactgcgcactgctctctctcttgaaactaccttttttactttctttcagtggtccggtgttggttatgattctcgagaaggaaaatgctgtggctgattggcgtgctctcattggtccaactgattcaaagaaggctaagattactcaccctcacaggttttcttctgctaccaccattattatttttcagtgataaagacaattgtgattttgcttacttcattctgttaagtttatttatggccctgcatctccttttaatacttataacagtgacttgaactttttcattgatgaactaaccaatattcagttcacttgtattttcagcataagggcactgtgtggcatagattccggaaaaaactgcgttcatggttcagattctcctcaatcagctcaaagagagatctcctttttctttcaagaggagtctgctggtaacattttttatcatgatgattaataaaagagttgcaatagaatctttactttgatgagatcttaacttgtaatgttcacagaatgtactgttgtctgttacatttgttcaaggtgaacttctgttgtggaaactttagtagtatgaattcatgtgctgtcatatgtgatcaggaacatgcaataattgattgagatattccaatgcatcaatttatttaagttcgttgtgttgattgaaactgtgtagtgtttcttcttaacatcagtgtttctatttttctgtttacaggccaagcagttattcaacatgatgaactatagctggtttctcaaagcagagcttattcggtttggcgcaccaccatcctcactgctttacttaccaaattacttataatgagaactcagtggcaattaggtggtctgctccagtctcttctctttattttcttctttagggggttttgcttagacccttagttaactctgatctttggttatataaactaaagagtgtgtttaaccgaagagttgctatacacaccttccatatactgtaacagactaaatttgattatatttatgcttgtatgccttatttttttcccccttaatctgtttcattcaggaaagaatataataaacagccaaatctctttttgatgaaaggcttgaccaaaaataaattaaaataaaccgataaaaaagcaggttgaaagatctggcatagttaaaagacattctcattctgcatattaagctatgtaaggttgcaacaaaaataaggctgagctgaacatacataaccatatctaaaaaaataacaattaagcaactcaataaactctaatttaatatatcaatctgattattgcaaagtttgactataatattagtaagggatgagtttcctgttaccaaaacattgttagaataggaacaaggtcctaattagcggccaaggatggagggtttctcattcattttgagagacagagagcatagtttttattactttgatgttgaaatgaatggatattattatactattaattggtttattatgggggtgttaataagctacttacagggtgaaacatttgcttaatcttaaatgcaagagggcagtatataacatatataatagtaataataatagaagatgatgatgatttgatttgaagtgaagatccaatgaaagaagaggtagtcaaaacaaatgatggcaccacctttctagaggatactggaaaccgcaaaacattccaaaattagaaagcctaggtcctgcttaccatattaagctcgaattcctaaattctagaccatctatatataattatatttagatacaattactcctcctacacatctctcacatggcttcttttctttttcactaaaaagctgtatcttggtggcggtgataatcctttaaacgccccccattggcctacatctcgaggaccactctctctaccctcttcacttcctttcttaattcagacctttttatttttaatttcaccaaacttgatgacgagctgagtgacgctacctgcccccacccacaccccccataaccatatactatattgatcgttaattataataataacctttaattaatttgtgatgtgatttactgacacgtaccttcttgaagatatattattctcacatgttggttttgattaattaagccatgcattgtggtgactaattaagtataacttaactttgctttttaattaggataatgcctgtaatatctttagagtgacagagaacacaacactcagcttctaaccatatatt

SEQ ID NO: 230211 - DNA, 1100 bp, Cannabis indica
aataataaaataacaaaaaaaaagtacaacataaaaatacatcaaaagtgcatattttttgtaaataaaattttgaaaacagtaaaatattgaaaattccgtacaaccatatttttgtaatttatttgttatttttgtatattttttaaataatccataaaaaaaaactcttccactttatcaagcccaaatgttggctctagagttagaagcctaaaccaaacagaaatgaaaagaaaacctcccatttccaatccatcaagcccaaaatgttgcccaggaattaaaaggcctaaaatgaaaatatacaatgattgtaaggatagtagatttctctatacaaattaatttacaacaaatcaagaacaactacaaattaagtaggcaaaccagctacaacaacaactacgcctaggagttttcagagggccaaacggcccaaacctctcactgtatatctcctttaaaaaaaaatttaaaaaagcactgtatatcttttctatttcatttttttagggcaaactcactctacaatctacatcttagtttacaaggaggaggaaagttatgatgaaatcacgaaatagcagtaaaactaaaactaataatatgtaaaaatggcacaaatcatgagatccaacaagtactgtcacaaaaattaaaaacacgaagactatatcgttatcatctaaacaatagttttctaaattctaaacctattgatcttttaggttttgtttgaactttgaattttagaaaaaaatattatgatggatttttatgaaaatatatatttttttaatcaagaaaataatttcatgaaaatatttgagtgaaaaaacaggtacggcaaaaaattatacttttagtcacaagaaaatttacgattaaaaataaaaaaaattgtaactaattataaatcatcaatctcatattgtgactaaaaagtctatagcaaaagttacaatattaatgtgtttttagtcacaatattattgtgactaaaactaagttagtgataatttatatttaaatattatattttagtcacaagtaaatttttgttacatttaatcctaaaaatttatattgtaattaaa

SEQ ID NO: 230212 - DNA, 1372 bp, Cannabis indica
ttggacatccacataattattaatatttatagcaataactagatattaagtataaatcaacattgtttaaaaaatgacaagagattgtaaattaagttgtgattagcactcctcgaggtttctattcctaatagcaaaatttctagaacttttgcagatttatattggatttcagtggagtttcatcataagttgaccatgtcctcaaatccccttaaaaaagaaaaaaggtcctgaggccataacatagcttgtctttatatatatgtgggactaggttgggtcaagtatctattcttggtcagttgagcttgtctcaacttgtctgccacaaacgaactagactttttcagattttaacctaagagggttggtttggtaagtattagattggattgggttatctttaatccctacttgcaaactccaacataattattctaatgtagctagttcttataggtacttgaatattttgcaacaattctgatccatttataactattacttcagtgaacatagtagctaaaaatctcaacaagttacatggggaagatattgtataattgtttgagtttccacaatgcttttccattccttggtgtaagcctaatattggttcatagtcaataacatcttcacaatcgagaataacgatgagccaaaaaatgtcgatcattgatgagtattgagggccataattactatcatgaagtctttttttaggtggtatattcatagggcttttctaaaatcattctttcactcaaatttaatatctaataaatcaatcaataaaaatctccatataaacaaataaaattgatcatggaacattattatccatcgtaagttcaaattttgtttaaacatgtgactatctcaattaccaaacatgccccatagtgtgctacaaaacaacccaagtccatcttagtttttgtttatttgtcacccagatttgtggcttcttattaccaatttagattagttttgtccataaagcattatccagagaaatcaagagtgttataaattatttattaatagaatttctctatcaaccaagtagttgtactggaagacatttaatcaaaatttctctactgctgcctctttcagcagttctaacactgtcacaacattgaaatcaagtaattagtttcttacaattgtacacttttgaaaatcatacacaactattaacagtttaaaatatacagttctttgttgctcctaagtcctgatccatcacaggcatggtatgggaatttcaagcttcttttcacttgataaatgagcagagacaagaaggtgttgcatattgatatctacaaatgtaaacaaattacaattggaagtcaagtcaagt

SEQ ID NO: 230213 - DNA, 934 bp, Cannabis indica
aaaaaagagacacatgggtagtagaagatcctttgttgatagcatttgcaacaataagagaatctgtctctataaagtgtatgtgcaaaccgttattcctagcccaatgcaaactgtgaataatccccatagcttccatttccttcaccgaatagcacccgtgcaaaggtttggagaaggccccaacaacattgccaaaataatctcggatcactgccccaagaccaataactgccccagcagcatcatatgcgacatccacatttaatttaaaaaaaccagcaggcggaggaaatcatttgactgtgacagtaggacaagtgttcccattattttgctccatactgcttgaacaagactgagcagaagagcttgactctaatgaggtttgctgcaaagaggaattaatgtattgttgaacataattgtcagcaaaagtgcaaataagggaggccagtttcggtttagtgccatgagtctccatatttctttcagtccatatactccacatacgacacaaaattctctccaagtcagagttcgaagtggcagcagcaagggaagaaaaaatttcaaatccattcagttgggaaatattcggaacagccgtgaaagaaggtaacagagaccaaacctgttgagctcgagtacacagaaaaagagcatgaaccaaagtctctcttgagcaattgcataatgaacaagcactagattgaatgactttcctgtgcaaaagattaacagcagtaggcaaatcatcattaatcactctccaaacaaaaattttgacttttttagggagcttgagagcccaaagtcgcttccaccagttgctattggaagagaatgtagatgaatcgttattcttgtcaatggtctcggccaaatgatatcctaacttcaccatataggtaccagtttcagagtgatgcca

SEQ ID NO: 230214 - DNA, 808 bp, Cannabis indica
atatgtactataatgatatatgcacataaattatatacataactataacacacattgatgtgatgtgataagtgaatttaactatttttattaaaaatattatttactcatgtgtgcgtcatttccttattatgggattatactgcatgagcaaggtagcaatctgtgaattgaagtctatatgcataaatttatatttatttgtatgattgtataaaagtttcttttaggcatgtgagtttaatctctctgtttgcggcttctgcggctaaagtgtaatatatatgtatacaatataatatagtgatgatatatagtccattacaaaagaaaagtagtcacatgaaataatgatgaaagggttagacttagcagtacaattgaaacaagttctaggctttttggttttcccaatgcttaagaggataagaaagagaagagatccaagagcaatttaatctatataactatatatccagtcccagttgactagttaagacttgagagagagagagatagagagagtgaagcaagtggaatattattttactactacaaaaccatgcatatctattttaagccaattggatgctatacatgttatatattatttaattatgacattaaaagtgagagacatgtctaattccaaaaaatactactactcatctgacacaatattaccaaatgtgattatatatattatatgtgtgtttgtgagttactacaaggcatctttcattttcgttcaacacccacaaaatatattttaattaaattttatatatatgaaatatgatattaaatt

SEQ ID NO: 230215 - DNA, 2419 bp, Cannabis indica
tcaacattcatttgaactacaggagtgttgaccattatcaatcttgcttttgaagtggaaggttctgaaggatctttctcatgacctaagtcctttgattgatcactcccaccgatcaaggcattctcaagaaattttgcattccttgattccatgttatggacaggtgtgaaatttaaaaagggggtgacctttcgacttctttactttttagttgtggatagctatgagctttctagttctaccgagtagatcacacttggcgttagcttcctggtccatgaattttaagcatattgataaagcgtgcaacacctagattagcataacgactgctgaatcatgttagcgtgcatactaaggagaatatattatcattgaaaccacctcgatccaatgctcaacatttaatgctgaccattatgttcccagactgttggatttgatttgtggtttcttggatgtaatatgagccatcaattcaagggcatgctcagaaaggcactctgtgtttcagagattacaagaggcagcacatgtttgaatcttgaaacgagcacttttgtaataagcttgaagatcacattacaaagattgattggtctgtaatcacccatagattgtggtttctttagttttgaaatcaaggtaataatggttttgttgatagaagtcgggtctgaacacttatcgaggacactaagtactgttgaccaaatcaccaacaaatattttaattattatgataaacattgctgacattccatcaataccaggacttttatctgatctcatagcctttaaagctatttcaacttcagctgtagtgaaaggcttcagaagttcaagattcaagtcaggtttgactgtggaagggataaaatcaagtgtctcctgcagagcttgatcatcaatgatggaagatcaaaaaatattctcaaactagtcttgaataacagttgtgatttctcttgttgaagtgacccttacaccaattttgttgattaaaaactttatttattgtttactttgcgtgctgaagctttagcatgaaaaaccttcgaattttgatctcctaaattcaaccaatatactctgaatcattattgccaatataccacctcttactttaaagatcatcaagtatagcttcagaatttttgagtctgagaggtcaatggagtattgtgagacattattcagatcttccactcgagattgcacctttgagactcttcgttgcatctgtccatacttgctaatatgccattgttgtagttcataacacaagattctatattttgaaccacaacaccaatatgatcattagaagttatagggagccaactttgagctatgatacccttgctttaagggtgagacaaccaaagcttttcaaatttgaatcttgtacgtcttcaattttgttgaaaaggtactgctattggcttgatggtggctgcaatggcatggtgatcagactgagagtactctatgtgttgaacatcaggggcatcaaaagtattagtgcaatattgattgacaaaacaccaatttggccttaattatggctacccccatttctaatccatgtaaaatcatcaccctcatatggcagatcatgcaataagtaatggtccaagacttttcgaaaggcttccatctgtgatttagctcgaagaaagccacctgaattatgatcatttgacaatatctcatttgaaatcaccaataataagccatggctccattggtgtagcatcaacaagacaataaaaaagaattcaagtgtttgcattattctgtgctacaagaactccataaaatgcagtaaaataaaaagaaatgccattttcaaaagcgtgtaacaatcaaagtattttgtattgtatgattaaagagtgacttcgacattgtccttctataagagcatcaaaccaccctaaagactaacccaggggactttaagctcgttattaaaatgtaaagattgtctaaagcgagaaataaaattgctacgaaatttagtttcttgtcatttaagggttagtaacaacagatacaactaaatataattttttttacattattattggtaaaaaaaaatgaattggtgctagtgtaactattggcaaagaaaacataatactaataaataaatatttttattataatattttaaattaataaataaatttaaatagcattaatattataatttattgtaagaaaagaaaaatgagatattatttagtctgcgatttttctttagttgtgttatttttatgttattaacgatagtatgtatatgcgttatacaaaaattttatgcgaattgtgtacataattagcataataaaaataaatgacatagtgataaaatataggaaaaaaaacaggaatattctaaaaagggaaa

SEQ ID NO: 230216 - DNA, 1160 bp, Cannabis indica
ctggtaaaataatttccatcatggactagttgtgagatcgacgctggtcggacgataccatttatcttgtcctaatgctctagcttaatctacaaataaactatttccaagggataactcactctagacgacatatcgaggatggtaccacccgtctaggttttaaaatattcacgtgtcactcagatggatgccatgtcaccatgtgcagaatttgagatatcagattccaagatagaaatgttcaccactagtactcttcttatcatctgcattacctgcctaatcagcatcactaaaacaaaccagattaaaatagtgtattttgaaaactaaatcccaaaatcaacaatgctatttacataacgtatgattcttttcacagtagaaacatgtgattccatgggatttccctaataatgagcacaaacaccaacactgtaacaaatatcagacaaatatcaggacgactagcagtaagatacagtcaactaccaatcatactttgttataaattaggatctacctatactccttgttcatgtttggataatttcaaggttgtgttcatacgagtattggaatgtttagcattttcaagtctaaactttttccccaagttttttgcttacttactttgagagacaaaagtgccttggagacccaaaaatatgtgagttcacctacaatgcttatttcaaactcttgttacatttaaattacaaaaacttgcactttagagttagaagtaaatctaaacacaatgtcattaacatatatttaagtaacaataacttcagcattaatatttttgataaaaagtattttatcaatatttcctcttctgtaatcatgagaaagcaaaaactctgttagacgctcataccaagcatgaggtacttgtttcaaaccatacaaagccttgtctaacctataaacatgatcaggaaagtggggatcctcaaccactccattttgttaagaaattttaggagcagaaaattcatgagaaataccattagatttacaaaattcatcatacgcagtatttttaaattcttttatatgattactcctaatgcgaactattttactaatattacaatctttttaacttttaatttcaagcagaatgacttaaaagcatcaaaagtatcaga

SEQ ID NO: 230217 - DNA, 1146 bp, Cannabis indica
tctagtttagtggtaatcaattttaattcctgatgtgggttcgacctaacctgtgtaagtactacttgatacgtgcacttgcgtagtttagtaattttcataacaagtttttagcaccatttttggggaattgcttaaattgatattacaataattagatttaattttactttcgtttctttttttgctttttgttaatttgttagtgtcaaattcttcttatcgcatctcaggtacctttggtttatgcgacatcaaggaccaagttcaagagtgtctgttgatcctaagattgagaagacctgcatacaaaaatagaaaaaacaagaggttagaaagagttgttgaaagggttgaccaagaagaggttatgaccaataacgacaataataaaggtgatgtagaagaccaggctaatagtcgtaatccacctaaccgctgcctaaggaagtatgtcttaccaacaatgacgggggttcagttttgtataagaccacctgccatggaagccaacaattttgaaatcaagtcggccatacttcaaatagttcaatccacattctagtttgagggactaccctcggaagatcccaacatacatttgtcaaacttcatggagttatgtgagacattcaaaatgaatagagtaagtgacgataccattcgtataaggttttttccatttttattgagggagcgagccaagatttggttggtgtctttgccacccaattctattgtcacatggaacgacttaataatgattttttgtccaagttctttcctccagcaaaagctgccaagttgcgaagggagattaacttttatcacctcgacagtgagtctctctatgaatcttgggagagattcaaggatcttatcaaaaagtatccccatcatgggattgagaagtggatgcgtgttcattggatcacatccaatgtttttaggcctatccaaatccgatctaatcatatactggatgtcagattttaccatccgattcgatccaattaattttagtcatccaatcgatccaacatccactggatgttggattagatcggttctatcaattggatgtatttcatatatattaattgtttaattttggtttatcctagtattttagacctagtatttttt

SEQ ID NO: 230218 - DNA, 1541 bp, Cannabis indica
ttgcaaacaatggaaataaattgtacagatttgtaataaagaaatctaggctaaccttgtgggaactaggccggatagtgaattaggcttagtatagaatagccactccttatcggcttgagtaaagtgaataaagtgtgtgattgcaatctctatcaagaaaaaccatgtttgaatgtgtgatcaagtttcttagaaaattaaattaagtatacttctaaaatgcaaccctataaccttatctattttaatatttgagggaattttttaatctattttgtttttcatgattatgtatgttgtagttatttaaaatattctatgaaattttcaagaatctcgaaaaatttaacacgtccgaaaatagggttcaaacaatctattgcaagtaagactcttttattttatactcatgtgtaatagactgtttagatcttattttttggtgttttaaatttttttaaatttctcaaaattttacaggatgttctcaataattacaacaaccatctttaccgaaaaaaaaaaatctacaacaaccatgagaaaaattagactaaaaaagttaattattgaaagctttagcactttttagtacttttttttttttaaaaaaaaagaaagctttagcactaatttttatagggtgtatgataattattatagggtgattctacagtgcccctatttaaaatgagtgtattgatgcactcttacttctttcgacatctagaaaatatattattaaaaatatatcttacaaaacattgagaaattcgaaataatttacaatataaaaagtagtgttcaaacaatctatttcacacgcgtataaaataaaataatcacgcgtacaacacgctttttgcatcctatttttggcgtgttaaattttttcaaatttcttaaaattttgcaagatgtcttaattagttataacatacatgactatgagaaaaaaattgactaaaaaattatttcagatgctaaaacagataggggtacatcaatacatccatttaaatggggtgcattgtagaattttccattattatatgttatttgaatagtaagctttatcattaatttttagcgggttataattaattttttattattcatgtaaaattttaaaaagtttaaaataatttaagagcactcgttggctctgaattaaaatgggtcataggcaaaaaaaaaatttgtaaaaaaattattaggagtgctctaatattttaaaaataaggttcaaaaaatttattggagccacatctcttttatttataagtataaaatagactatctgaaatttaatttttgcattataaattatttaaaatttatcaaaattttacaatatacttcagaggtgtgctaccgtcaacatcttgttacaaccacctctgtgcccgaaaatacatacaggaatattttttttaattttattttcatagcggtgtttgttataattataacatcatttttgtaaaatttttttaaaaaaattcgaatagttacaaggtcaataatatgtttgtaat

SEQ ID NO: 230219 - DNA, 2125 bp, Cannabis indica
gatacttccactaattattgtatgttacatctctgcaggcaataaatatttgcacatttttagagtcatttaccatgaatcttgctaaacataccctatatataactataattaaattcatatatattggcttacatggtgagaagagatgcacttttcctttgaggcaaggtaccatttaggttattgtttccaagaaacctgagtaaaacatacaaaattactatacatatgatagtttccatatgattttatactataaattataggcagtaattaatatcttacaaagcattaagtgaactcaagttgaaaagagaatttggaatctgtccatttaacttgttgaagctcaaatccctgtaatgaaaaaatgcaactaattcataaatagaatacagtacaagttgggtaattttgagtcccctaatgaacttacaactgtgtcaagtctttatgttcaccgatattcgaaggaatcgagccagtgatgctgatattccttaatactctgcaggttgtatcaaagattatactccacaataaaacatgagtactaataaagctattgtatgtatgattgtgttgaaaacatgttacttacaagaccgatagagatttcatattggcgataaatgcaagagaagaactgccattagatatttcactcaatagcctacatataattcacacttaagattattattaacttaaaaaatgtgtagatgaatatgaaattctatattaagattactttacaactctgttagagaagttagattcgccaaagttgatggtataggtcctttaaaagagtttccttgaaaattcctacatacacattatagccaactaactatatatatatataactaccattttaatatatagttatagattttgcaacttgcaatgttatctaaaaaaaacacacacacacaaattggttaaacttgtcttacaaggaagtaagatttgaccaatttcctatgaattcaggtatctcgcctgtgagttcaatatctgatccctttctagaaaaaggggaaaaatatacttagttattttttcttctaatataataatgttgaaggaattgaatgatgagttagaagaaataatttacactgttttcaagctttggagatttgcaaatgttgaaggaattgttccattaattccacaactatcaatgtaactgtcaaataaacaaattgaatgaatagagtttatgttatggattcttaactaaatgcagccaagaaaaagtatcaaatctttaatagattttacaaacttacagttgttctagtttgcttaagttccctagttcttggggcagaggaccagagaagttgtttgatgaaaaagacctatatatatacataatataatataagagaattaagggcaataatatgatggaattggataaggttgcaataaatttgtaagaaggcattcaaacttacaaagatattagctcagtaagttgtcccaattcctttggtacctctcctgacagtgcatttatgcctaagctcctagtattacatagccaaaacaaagaagacattataccaaatcatgttgagcatttatgttaaatttatgcttaaattttaggtatggacttacaagtattgcatgttagtgaggtttccaattgatggagatagagaacctgacaacaaattttgggccaagttcctacaaatgaattcatggaataaaccaagtattatatgcatagaaaaaaaatcattcttattgagcatcagtaagtaacacgttagcgatattctttaaaaattatttaactgatttatattgaacctaagtatgctaagtaccattagcattaatcataaaaaaatttagagttatgctaaaggtacccgtagtacatagtatcactacgaggtgtcattctgttattagtccaattaaatattatgtttcatatattttaattattataaaaaatcgtaatcgtaaggtgtcacttcgcagtggtactgttaattaatagcaatgttctaaaaaataatgatataagtaagagaatatgaaagatttcatacagatcgaaaaggaaggtcagagtccatagctcttctggaat

SEQ ID NO: 230220 - DNA, 2267 bp, Cannabis indica
atgttttttactacaaaatccaacactttcttaatgttatcgttgccaagggctcgacctctgtccacttcatgaaataatccactgtgctaactgcatattgtactctgcccttgccttttggtaactatccgatcagatctattgtactcttcccttggatttgtattagctcgttgggggatgcacggggatcttcaaaaatctctagcatttatcacatttcattacatagaccttttaattttccatcatggtcgaccagagatatccttcccttagtattttcttcgataaactttatctcaccacatggttaccacagaatccttcatgtacctcagacaagagtcgtgcagcctcttcttttgtacacgtctacgtaatggcatggagaaacctctcctatacatcacaccttcaactatgatatattgtgtagcctttctcatcattttttgagctttgttcctgttgtttggaagttctccattgttgagataggctgctatgcgtatcattcaatttggtgttgtatctattgtttctatttcttccgcgcagttgatgcttggctcttctgagaattgaattgggactaagttggccttatctgttaatgtcctgctcgtaagctgtgccaaggcatcagaagttgtattttctttccttggaatctgcttgagggtgtaactcttaaattgtgcgagcaagttttgaatcttgcttagatgggccatcatttttcctccagccatgtactctcctgagacttaatttactaccaattttaaatcactatagcctcaatgtattttgcgtgtacctctagagcaagttctagcccaactatgagtactttatactctgcttcattcttggaggccttgaacccaaatttgattgctccgtgtaggtgctgcccccaagtgtgatgagggccattctcgcaccagaaagctggtcagtagttgattcttccacaagtaacttccaaataggtctgtctccattcttttctggtaagaattcttatacaggctccatgttgtcccttatgttgccctattccttgcctatacattcaactacaaagtccgccaaggcctgccctttaactgttgtacagggttagaagattatttcatactatcctaactctattgcccactttagtaatcacccaggggcatcaggcttttgcaacacttggcgtaaaggtttgtcggtatatacttgaacaagataaccttggaaataaggccttaacttccttgtggttaagattagacagtaagtgagtttttcgattagaggataccgacctttggcttcaatgcgtcgtttgctgatataatagattggatattagacaattttttcttctcttaccagcacagggcttacagcatattcggtgacaaccaaatatattcccaattcttctccatccagaggtttagagagtaaaagaggctttgcgagttatccttttaattcttagaaaccattatcgcattcctccacatattcgaacgttttattacctcggaggatgttgaagaagggaacacacttgtctattgattttgaaatgaatcagctaagtgcgtatccgaccaattaagctctgaactttattttggtttttgagttcatatctaggagggtttgtattttttctggattgccttattttcctcgagcattaacaataagtccaagaaacttacccgagctgaccctaaaagaataccttaagggattgagtttcatgtagtactttttgaggattttgaagcattcatcaaaatcttctatttgccccccccagccttcctagatttgacgagcacgtcttccacatatacttccatatctcgtccgatctaatttttaaacattttgtttactagcctctggtaagtagctccaacattcttcagactgaacgatgttactttaaaatagtatagacccatatctgttcagaaatagtcgagtagatgcattttgatttggttataccctgaataggggtccataaagctcaagatttcatgtccggctgttgcatccatgagttgatcaaatcttggaagtggaaaatagtccttgggacatgccttgttgaggtcgctaaaatcaatacatactcgccattttttgttcggcttgggcactagtacggggttagccacccaaggcgagtagaaagcttcaatgatgaacttatttatgcatagtctttctacatcttctttcag

SEQ ID NO: 230221 - DNA, 1307 bp, Cannabis indica
tagcaaaatttgagcaaactttgttcacacacaacaacaagcatccaattcagcttaaattcactaaattaatccaacataaaccttagaaaactcaaacaatccaaaacagttcatacaactctaacctcaaaattaatcataaaatcccaaccttcaagcttgaaattcaagaaactaagaggggggaagcttagctggattaaaaacacttaattcttgctaaaatccccttcaatttgaagaaaaacacctgctcacccctggttacctagctgacccaaagcatggagatggaaaaagcccaaactcaattttttttttagaatttcctcttttcttctaatgacttagcttataactattttttttaaaaataactattccactaaaagtataatgcccagctgccataaggagaaaacaccacctaaccaaaaatccaaaaagaccacaatgcccccatcaaagttaaaacaaatggcaaattggcttagaggtaaaatagtccaaaaccataatcctgccaaacctcgacattctaaatgtctaactaacttgcctcgctatttctaaaattactaaatcataaaaaaaaagtgactctactagccaaacgtcgcgttcaactattaccgtgcataaaatacgaaaaatataaaatttcatatatatcataaataacacacccaaaattcaaatatctctccataatttcataaatcataattaaaagtctaattctgaattaaaccctaattatctgctaattctcatactaaaattaagcagccattacaattatatatgcccgcgctaaaaggattttgtcctcgaaatctaacttgaacagctctgaatattgagccctcatgtcagactctaagtctcaggtggcttcctcgaccttactgttcctccagagtaccttgaccaaagctatggtcttgtttcgaatgacttgatcttttctgtccagaatctgaactggtgctctttgttagataaatctgactggagttttaggtttttataactcatacatgagtgggatccaaaatttatttctaaagtagaaacatgaaatacgttatggactgctgaaagtgttggaggcaaggctagacggtaagctactaatccaaccttttcaaggatctcaaaatgccttgtgaacctaggacataacttgtcctttttcctgaaacgtttaattccttaatttcatcgaagacactcgtaggaatacatgatctcctacaggaattccaacttttttgcattttagatctgcataactcttttgc

SEQ ID NO: 230222 - DNA, 2797 bp, Cannabis indica
aagatcctggtaaaataaaatcctacaataacaatcatcatgagaaaattttataaataagtcttgctcacaaagttgagttacactatttaaattagccataagttcattaataaaaggaatatttttcagcattggtagtccctcataatttagagtaccactaccaagtacctcaccaaaatgcaatctctaaatttgacttcaccattttttaaaggtttgaagtctatgagtatgtgatcatcatctatcatgtgtctagaatacccactatcaaaagaccaattattagaaatacgagtgttatgataagtaaaattagcaagtcattagattcatttttcttaatccaaatcttcgtgaatttcgatatatttttcctatcaaatattgttttccataatgattgaaatttttattttttaagacatttatcatggtaaatatttaggttgaatgtgacctttaactccacaaaagtgacaaattagtatgaatttttgagtcttactaaaagattgagaactcttacctaaagctggagagtctgttccaccaagaaccttttttgtacctacagaaacttacaatgcagggtaaaaattgataacggatgaactttcaactttctaaaaatgaatttttcataaatggttgggattcaacaagtcccatcgtagcatgacatccttgtccaaaattttggacatcgccaaaaattgaagaaccttgatcgtgcattctcacattcctctttaaaccatcaagatattttaaaaggctaatattttcttatttttttttttcaaaatcaagattgtttactcaaaaactgatcctggtgatgtggacataaatatttgacacgtggcaagaagaaaaatatttacggagttgagtagtcccgagtcatagtagtcaacctgtgagggaactttagccctacgcccaagatgactccaagaactctaaaatgggtgtttggatcctgccaagttactttcaactaaccatactttagtattttgaaccaagaagacaagaagaatccaatttttaggcttgataatcaaaaagagattaaatagcacccccagaagtcaacctaagcatctagggttttcacccagcccccaagttaacattcttagctagggttcagtttttggttctttcttagtgcgaatttatcaaacttcttagttaaacatgaataaggcatgtcacaaacatgttagaggcatcaaaatcagaatcaaaacacttcccgttctgagcatccagtgcctgggccacctggtgattcacctagcgcccacattaacatactgtcaattcggaaagcttccaaccactatatttcataagtatccaaagaattttatttgtctccatccaaaatgaggaatcaagtgcttttagaaaagaaatggatcaacctggaggccaaaactgggacctggcgcccagggtgaactggtgctaggtctcagcgcccaagttgacatattatcaacttgggccatttccaatagcagtttagacaaagtcttatggtcatattctcccttttcgtcaacaattaagatatgggtgctttcaggaaataaacagagccatctaagagtgggaactaggacccagtgcctaggttgatctagtgctaggtctcaatgcctaacttgacatattgtaaacctgggccatttccaaacatttcttttgagcagtttcgggcatattctccatttccataaataattacaatacgactattactcggaatcaaatggaaacatttggtgggaaaactgggacccagcgcccagattgacctagtgcatgggcccagtgcctaggttgacattttttcaacctgttccagttccatgtgttttctccaaaaagtgcatcgaacatcttttccatttacaaaaataaagaagatacaagtgatctcagggagcaaatgagatcctttatgcaccaaaatagggctccaacgccaagtttacatgggtgttaggccatgcgcccaggttgacatgggtgctgagccctacgcccaggttgaaattcaacctggttcacatgcttttgctcttcaaacagaaattcttctttgaacgttcttcttattttggttaataacgggctaggagacaatgttttcaatcttgaatgccttaaaagtaccaacacaagccccaaaaagttccccgaggagcacctagtgtccagattgacatatagcctggtgcgttgggttttgcttatctaatttaggttttgtcttgaccatctaactatttttcatagtaaatgagagctaaagtttgtgacaagtcaaattcacacttttattttttaactttttttgcaaagtgaaatattgacatattaaccataaattgagaagttttaagtctacccaatttgttggaaaagcgacatctttgagaattggtgataacttcaccaaaaataacaaattgaccaagtgatgtgaacatatcacttaggcatcaaaaaatgcaagtctgggatattttttcactcacacatcgtccgggttaacgtcagtatgtcaacttgggtgttgggtgctcaacaaccttcagtaaaatggtcattgctccctcaatattgatctgattgacatgattcaacttgaattttaaagccctctcaaatttattaaaagtcatggctcacacctatatcgaaattttgatgatttcaagtccaaaattgatcccaagacaagtgccattttttcaaatctatttcaagt

SEQ ID NO: 230223 - DNA, 1315 bp, Cannabis indica
taccatagtctttccctatatattatatatgagggtaactttattaagggctccgtggctgccgctgccccgcttttttctatgtttatctttcttctcctaaataccctgtgttttgaattggacacgatcgtttgaaaattttggtggaatgaagcatgtttagtattgttttctgttttttgttttcagaaaattgttttaaaaaatgagaataagaaatagtttttgaaattttaaaacacaagtcacgtttggttagtgttttttaaaaataatattgaccaaaagtgaattggtttttaaaacaaaaaataacattttgttgttttcaaaatacttattttttgtaactttattttctgaaaactgttttcaagaaatcaggccaaacaagccaaattgttttcaaaaaataattttctatttttaaaaacaaaaaatagtttttagttatgatgccaaacatgcacttggttgctttaagaagaatcagtacttagccttaaccaattaggattctatttgcatgccgaaggagtttggtggtttagggatcaagaagttttttgatctaaatatggcattgatctcaaaactcgcctggtttcttgaaaaaaggtgatgaccgtttgtggtgtcatgtttttcgagctaaatattacaaacgtggtgattccttttggagttcgtctcttccagatttggcctttaaatttgctcgaggcattatggcttctaggaattttattcgggcaaagacttgctagctctttgttgatggaaaaagtatttgatatatgacattcttcttagatccatagctcagttaggatgagtatacaactgccttcaatccaagaattcaacaaccaaaaatagttatgcttaacaatcttagtatcaagggggcgggcgatctcgatgtgagccttctcggtgattggttcacgccttttgttagtttgaaaggtcataaactcgaggctatcattagtggggtcaagataagcttatttggtgagattcaacgtaacagatggttcattctctcttaggaaagctttatttttttgttgattaagtcaagacttggtggtttggatagcttgtggaaaagaatttgcattgcccctatccagaagcgtgtaaattttttctttggaaggtgagaagaacgttctcccgtgtggtgatgggcttcgtgttgtatttgggaacaaatctcattgcatttgtgtaaaggtaatgttgattctttggtccatctatttctcactgcccttttgctagagcttgttggttttccagtccc

SEQ ID NO: 230224 - DNA, 1167 bp, Cannabis indica
tttttcgaatgaaggagcctgaatatccatttttagatctttgctcctatcactatcctacaggttgaatggttttgcaaatccttcaaagagacattgaattctcactttgctagaatggaccgcaagtattatcgatagcttaatgatctgcaaagtggttcagatgtttaggagatcggcagcagtggaaaacagtgtcaaagtatggaagagcattaaaaggagctttgatgactgaagaaatctgctgattgctagtcattcagaactgaaaaagtctcccgaattcagctgtaagacagtcaccagttactgtcagtgaagatggtgtttggaacttgtttttctatttgtatcaatctctatatacacttagaaatgttgaggaaaactgccttgtatgaattgtgaaatgctgtaagtataggccaccatggcagtggaagacagtttgccttggaatttcgtagtgtatacactattcttgtaaagcaaaataatggtgtgatcataattatactattctactattatataatatgtttcacctgcaaataaatccaagtatgtgtttcatttaaaggataggttcaacttattaactagcttacactcatttgaagaaaaagaaaaagaaaataattgagataaatatttgctcttcattccaaggacttgttttttcaatggttgtattagtaggaaaattagattcttattgtttttcttcttaaatgtataagttgtacattagaatcttgtcatttgtctttttaaaagtttgtttgattcatgtgttacacaatggtaatacctctattcatgttaaggaatgagatgaaattggaaatattctgctcactactgaaagctctatggcccctgagatttctatttgctggatcatcaacgatcaactactcatgggatggctttacagctcaatgtcagaagcaatagccaccgaagttatgggctcaacctcagctacagatctatggaaagcactagaaaacttatatggagctcactcaaaggcaaaaatggatgatacatgaactctcattcgaacttctaggaaaagagcaatgacaatggtggaatatctttgtcggaagaagaactaggcaaatatcctcactctagttggagatccatatccta

SEQ ID NO: 230225 - DNA, 982 bp, Cannabis indica
tattttttatttaaaaagtcatttaaatatacttttaagaaaataatatatatagatattgacttggcgcaaattacgtcccaatacatattaaagttctagaaatataacttttatattagagttaaaaattaaacttaaataattatttgtaaccgaaattaaatttaaatatttacgatacaaattactttttatttttataaaaagatttctgttttataaaaattaaatttatgtgttgtttatttactattatttatatatactttttaattagtaattaaaagcgaaatatccaacatgtaatagatatcaattattcttcaaaaaataattttggggtcaaacttattttttttttttttttttgaaagcaggtcaaactaaaattctattatataataacactcttaataaaaaaaaatatatacaatataattgacaatatatatatttaacgaaaacgtactgaattatttttttttgtccatatattagagagtagctagagaagtaagtttgaatatatacacaatattaaacattatttaataaatttgcaattaatggaaagtgtcattactatatacgtacgtctttcaaaagcaattaaatagtaaacctagctaaacaaaacctggccattgttttacaacatagaatatagtcacctatatatgtatacatatttatatatatatatatatgtatatacaaaaaataactaactaatcaaaataaagatttttgtgaactaaaagtaatttttattgtagaagaattatatcaaaggtaaatatttactccatgaaccctcatagtccataacacaagctctgtgtaacaacaatcttctagaatctaaattatcctcttggattgacgttgtctaagggtgaaaatttgtactgaatttcagctttgtaccaatgtctctctgaagaattttccaaaacatagatgtgaatttcgaatccct

SEQ ID NO: 230226 - DNA, 913 bp, Cannabis indica
ttattaaatgtgttttcttaggaaaatgaagaatcagtcttttatcccccccaaacttcgatctctccccccttttgtgctttttttaagggtattcataggctaactctcttgcatgtgctgccgtcattagatcattgtgggcaaaaatagaccgttggattggtaggtggcatattcgccatatggaatttactggtgtcagattttactggatgcataggctaggcctcgtacgcgtgtcatcacagggtatctcctttttgaatttctcttatccctaactgttggatcatttggtcgagtacacaaggacacacatgttctttgcaatagtgtgtcatgggaggcaacctctgatgtcgtacctggaaaagcttgatcattaggtccatacttgacacgtatgggtgaggcttctgcgggctaaaggcatagcttggtttagcgtatctcagaatgccttggcccttttggacaatccacatttctcgtgggagtagagggcttcagcttctagaacaaagagagacttttgctcactgataccctttgtgtggcttgcagttagggaactcccctttacaaaaactcttcccgcgaagttgatgcctttatattcccagagcatcaatggaggaaattggtcagctattgactccttaacctttcttgattaaaatccatgtatcatgattgcaaaaatgtggataacatttaccccccaagcttttagagtgtatcctggttgggagcttgcagtatcttctcttgagagattttgagcacgtgggattttatgacaagctctttatttcattacatcatcagctgccaacctgaaggagatcaagatgttgggttatatgccctaaataaaactccaattcaatgtaatccattttattcaaca

SEQ ID NO: 230227 - DNA, 1087 bp, Cannabis indica
tgtcaatatgaaaaattacatcattttgcctttaaaactattagtaataagactactgcaccttttcagttagtgcattctgatgtatgggatccctcctttcatatttctcttgatggatacaaatactaaattagttttcttgatgattttacaagatatgtatggatttttcatatgcaaaccaaatctaaggcaactactatctttgaacaattcaatggttatgttgaacgtatgtttaaaactaaaatcaaaagtatacaactcgacttaggcaaagaatttcaacatttgtacaagttatttcaagatctaggcatcaccaaaagaaattgatgccctcacacacatccacaacaaggttatgtcgaaagaaaacacatgcatgttgtggatattggcctcatacttttggcttaggccaatatgccattaaagttctagcgagaagctttcacatcagatgcatacctcataaacaggctcctgacttctatcttaaactttgtgtctccatatgagaaactgtttcatcaaaaaccagactacaatctctttaaaatctttggttgttcctatttttcgcttctcagaccatacaattatcacaaagtttcctctaggtcagccaaatgcgttttcgtaggctacaacatatcccaaaaagggtacagatgccttcatccaactggcagaatctatgttgcaagaagtttcacttttaatgaaagtgaattccctttttctcaattattttcaaactcatcctccaaagctcaaaactgcccttccatgcctatagactctgctgcatattgtgtgcctagatcatctgtcatttcttgttgggttgtctgccctaaataaaactcatttcaatataatcaagtttactaattaataaaagatcaaaaattcattttatgttgcatggttcacatgatttacttcatgattatgtttaaatgtataaattctattaagtccaaaacatatataaatatatatttattcacgattatagtttcgtcaccacagtagaatataatcatgattatatgttcaaaagtttaattctcatgat

SEQ ID NO: 230228 - DNA, 2578 bp, Cannabis indica
ttactttttatgcctcacatcttcctttcgagtatatatgtttgtttatttcgtttcaattcacaatttaaacatttctctcttgatttagcttaacatactttgagtttatgtattttgaaagtcatttttttagttatacgaggaattaatgatctaccatgtttttgcgagcagtttacaacatgccatgttatagccaagcagtttattatctgctatgttctacgcgagtagtttataatctattatgttctacgagagtagtttataatctgttctgttctacgagagtagtttataatcttctatgtttttagagcaaatttcaaatattttgaataattcactttaggaactattttgaatatctttcgattactgatacaaatagttaatcctctattcatatttttagtttaagtattatttttcaaggaacatttgtgtctcgtttataatacatgctaagataatatgagccgttattcactcagttcgcgtatagctttctgttgttttatgagaagaaatctcatttacacctgctattttaattctttcttctaaagaaaaggtttttcaattcttgactttatactgtccaaaaacaatttcaatcaattatcttttccttttatgaaattttttttaggtttttgcaatacaatatatatttctaggtggactctagttattatacacatatatatgcctccaagtaattttaaaggaaagaaactttgtaattgcttgaacaaatttaattttatttataacaatttttaatcattacagagataaagataacatttacccattaaattactcgtaataaggttgtaaatgttcactgttccagtgattctttattagcaagtcgttaagccaagctaatttgtaaaccccgattcttacgacagcttcaataacatatggaccttcccagtttggattcaacactcctacagtgggatcttgcttgtttgcaaaaacacgtcttaacaccaaatcttctactttaaaccaccttttttgaactctcttattaaagtatcttgcggtgttggtaagctgcatttgttatttgcgactcattgctcatttcttcaagtagatccaaggacacattataaagttcgtggttttcctcttgattataaaattcacgcctctgagtagccaaatgccaatgagaacagagtgtctcccgtcgctgttttctctgtagttctatgggtctagagcacttgtggtagctagtcaacccatcttactttagcagcatctcacttctttttaatggtatcttttaaggttttgttaacgacttctacctatccattttcctgatgccttgatactgatgagaggctcttaataattttcttcatttcatagaattcagtgaataattcaccatcaaactgagttccattgtcagatactattttaattggaatgccaaactgacaaatgatgttcttgataacaaaattgagaacttttttaaaatttatgtaaacaaactagaggttctagcctttgtccattttgtgtaaagaagtcgacttgcaccactacatattttagctacctcctcaccttgtaggtaatggcccaaatcagatcaatcccccatattgcaaatgggtatggcaaggtattcattctcaactcagttggtggtatgggaggcattttgtgaaaaatctttgacatttatcacatctcttaacgaactcatgtgtgtctttattgatcgttggccagtattatcctcgacagatgatcttcttgggacagggctctaccaacttggatgatctccacagatgccttcatttcatggatttcgtttgattatttcatttgcttctattggtaacacacatcataagagaggcatggaataacccctcctgtataacttcccctcgaccatcatatagggagttatcgagtatgagagtttgcgtgccttggttttgtctgtaggaagttctccacttactagatacttgaccattggagtcatccatgttggtgaagtatctaccatctcgatttcttcctcttcacatatgcttgggtcgtctaagacttccaccaataccaaatttaacttatcgagatcaaattgggatgctagctttgctagtgcatctgcgttagagtttagttctctgggaatttgtttaattctacaataatcaaactttttcaagttcttctgaaatttttctaaatatttttcatctttaaggcttttgcttggtattctcccaagacttggcctgcttccttcttgtgtttgccttcttgatcgactttgccctcgagacctcgagtgtcccgagctagaacttgcctcgtcttgcatagaccttctccttcgaaaaaagctagatacctgccctctattaaagtatgtgtatacactgtaacactctcaataattaggcacgctacccaaattgcttatgaaaccctaatcccctaatcgggattactaattaaaatagcgcagaatttaaacttttatattaatcagactgaaaataaacttgtaatatat

SEQ ID NO: 230229 - DNA, 1459 bp, Cannabis indica
gtaactaatcaatttattatttgtatcataagcaaccgaatagttgctttgactacaacaaattttcagaatatttgattatgtgaatctggatgcttggttggataaatggtgatttgtttcaatctattagcaaatgaatgttaaggcattacttgtaaattttttgcaattcaatatgtatgcattgttaaatatggtttgtggtacggtcatgcatgaattctttaggagcttgcttgcttatcatttatgatgaaattctagatgatacgtttagaaaagtgatttaaacaacttttaaaacgatggaaccttttaagctaaccttaaattatttatccattcttatcttttttgagtttaaaattaagttatctatatgttgtctgacaccattcttcagtttaattggaacactttattatttttcttcccttgaaatttacaatgagcataaatataaataattgggaaataatttgtaatgtggtgtattgtgagtattgtaaaaagattgggaattgttccccccccaaaaaaaagagtattgttttgaaaaaatatatatatgtggtcatatcaagtaaacttttctcaatcttgaaaagaaaaaaaaaaaaaaaagcagaaatgagtattgcttggatgcattatttggtgattgtgagtttgtaaagtttatacacttatggtgattgtgagtttaaatgatatttcatctactcgggccttagcttatcgttataaattttaaaaatccttttgattcttgagcatatttgtttacattactttgaaaatgataagtatggcaagtgtgagattaagagagtagaaccaagaacgaaagagagaaagatactgagtattgaacagagaaagagtaatctgttattattgattgattaggatttacaagtatttatacagatggagaatacaactggtaacagctaaaccagtaactaatcctaactaaccaactaactgtcaagcctaacagtgctgaacagtcataacagaattaactaactcttctcccttaacagcccccttcaaactcagagaggttagagaaaccacactgagtttggatctaaaatcactgaacttgctgctactaatgggcttggtaaaaaaatcagcaatctgagcagatgcagggacatgtttgacctgtatttgttgttgcaagaccttgtcacgaacaaaatacaaatcgatttcgatgtgttttgtactggcgtgcaaaacagggttggcagcaagcaaaaccgtgctttgattgtcacaccatgtaacgtccccacttcaagtctccactgggtccttacacccacggaatgaatggctcttatacacgagtacgccactttggctgcatcatggactgatgactgatcctacaaaccaacacgagtgtttccagcgtgctttgtcctcactcacacgcttc

SEQ ID NO: 230230 - DNA, 1419 bp, Cannabis indica
gatgacaactgttgaagggtttgacaactttgtaaccatggtctatgcttctaataactgagctacaagaaaaattttatggaaagatttatgtgacttgagaacaggtggaaattgggtgttaatgggggacttcgatgacattttggctaaagaagaaaggataggacttagggcgaagacttatcctgacactgaattccttcaatgtgttaactactgtcagttggaagatatcaaatcaagtgtgaattttttcacttggacaaataagcagcatggggatgacaaaattttttcgaagatagatcgaatcttggccaatgaagcatggattcacaaatatgaatttgctgaagctgtctttctcaataaaggtctttttgatcatactccgggtattttatcaatctatcctaaattggtgagtggaaagaaacctttcaaatacttcacttagcccaatccaataaaatttcaaagtttgatggagtacaataaaaaatgtcaaatattggtaaagctagcattatttattgttttcttttttaccaaatttaatatgaagagataatatataagcataattaccgagatccattttcatgttattaggaagaaaatttttagtaaaatataatatgtttccctttatctttttaattgcttagtataattttttttttttttgcttagatgattagtattcgttattatttataaactacatatcaatttttttttaatatattatatttaccctttttttatttaagtccctatactcacataacttacatatataataaatttatatttaaaattttaattaaaatatggctaagcattttaaaaaatatccctaacactttttgagccatataattctaactaattattttagtttaaaattaattctagaccactttttaagttgattttttctttcaaaaagaaatagggtatatgtctaggaactctttttattaaaatttatatcataattgtatcatatatagaagaaaagactaaattttttgtgtaaggatgaactaccataagcataacaatttttgagactttagatgacaattgccatttctaaggtatatataaatttagaagtttctttttgtttttactgttgttgttttgtttagggtagaaagctttcattatatgttttttctctatatgtatctcatgagattatatatactgcaaattttatatttattcatatagtattattccacaaagtgaacatatttttgttctatttttaaaagtaacactaagattataaaaaacatctatctaacactaagattataaaaaacatctatcaataagtctcatataaattatcactttaaaatacatacataccattatttgattgtttaaaatatttataat

SEQ ID NO: 230231 - DNA, 1129 bp, Cannabis indica
acgtagaaaagcatgaagctgacttagattgacaccccattatatatttcgaccacacaaatagttacacttctttaatttttccactacaacgaaggttctcgatcggagcttaattaatataagtcgataaccttttcgttatttattttagatcaattatcaaaacattttcttaattttttaataagttatttttagtttgtagtataaaggagcattattattgttatgagccaggcatcaatattgcttcttaaaaataattagccatattctataaaaattattataattaactatatgggattcaatatacttaattgtattaatggggatggtgttaatatttctctattctttttatatacacaaacacatctttattctctccctccatcttttaactatatgtatatgtttgtataaattatgcttatttaaatatggctatttaagatttttatcccctgaactatccacagtagtgtcataaaatagttcttcggttaaatttcgtcacacgtgggaattaaatattgacgtggttgtttggtcacttatatcgcattgccaagtaagtgccatgcatgtaatttcaaataaataataatttaaaatttaaatatattttttttttattaaaattaataaattaattaaaaataaaatgaaattaatatatttttttaatagaaatacaattttattagctcaaattattcaaaaaaacatcacgtaaaatactcagaatcgtagaatttgaataggtacaactagcatttaaccacaaagctctagccaaatggtaagcaacactattagcagatcacttgataaaaatcaaaaagatattattcaaactagaaaaaatttgtctacactctgaaatccagaacccaaaaaaagaagtcatagctaacgaatttcgaatagcttggattgtgaccaaactgtctgaatccgtacatgtcgccctgtttctttcaaccaactcaacacctccttaatcttgctagctttagcaagaacatgatcaaccacccccatccagcttattgtctgagccataataatttgactagaagagttttgcgccacccaaccatacccatacttattctgattg

SEQ ID NO: 230232 - DNA, 1329 bp, Cannabis indica
cactatgaaaccaatgcttcttaaggaatcatgaaaccacagtctcttaagaaatcatgaaactattgtctcttcagaaatcacgaagtcatcttgagattgatgcatctcacatacaacaaccataaatttagttgtttgtaaatttttttgaaatatacatggagagcttcttataatgtaactcttcaatgaataaaaataagtatgcttgttcttgatttgtttaaaattgtaattatgatttggcactaaagctggaattttatttccacaagaaaacattttgtatatgggaggatgaatcatgaagtataatataatttaacatgagaggttatatttaagaatgcacagttcgtgatccaagtagtatttttcataatattttttttagtaactcttatgtatatatgtcatcatattgttaatattattttttacattctcatgcatgcaatttaaagaaaacaaagatatgtcgttagtagatggagcaaattaaggaagaactatgaaagtttgtcggaatttttttactctgttgagagtataacttcattggaagctcaccaaagccctcttgcgttctgcagtaggcttcggatttactggtttgtaaagttcaccactctgcagtccactactttcgtgcattgctatggcggataacagcctcagccatctttttgaagattccgttcagattactacagaagacttgacatgtcgtcttgacccaaggaaatgtgctactgggaaaacttatatgcaaaggcaaacttggtcgtaaagcgattgctggaactttaaaaaagcttgggcatcttttaaagggtggagctggaaagaggatgatgaagggatcatactcttcacttttgcaactaatgaagacgcctggaatgtccttaatagacgcccttggattatctgcggggcgttattggtcattatgccttggccatcttggcttgccccatcagaagtcaaatttgataagtccccattctgggtacgactgagcggaatccctccattttattggaacaaaactaacctggaagagcttgctgcaaaagcttcaacagtttacaaactgcccagatacatagattttgaaagaggttcattcggcatgggaacactacgcttcaaggctaccatcgagattgacaaaccccttttctcgggtttcttcatgaagagggaatccatcaaagacctgtgggtgcaatacaaatacgaaaagcttcccaacttttgtttaaaatgcggcatcatctctcacgaacagaagttttgtttcaagcctcctactgttataaa

SEQ ID NO: 230233 - DNA, 3074 bp, Cannabis indica
tgcaaatcttgggctaaagagacagaatcagcgcaacaaattcaagagaaatcaaaacagttttggtcaaaattgcaagcgaaggctagttatgagggttcaaaactccactacactcctccaccttcgacaagggtcaggtaattgctcaatttggtctccacgaagttgaattagaaacagattactggaagtcgatgaaggcttatatggtgatgggtgcgaatccaccactttttgtgtttgagggatttgcaaaatgggtttggggaacttaggtcttgagaaggtggtttgtatgagtaatggcctttcattggttaaattcaatgattaagcaactagagatttagtccaaggaggagtgttaaattttgataataaactggttattatgcgtccttggtctccttatttatctaccttcaagttagttcgatatgttccaatttgggtaaggctttatgaccttggtcttcaatattggggagcattggtgagcacaatttggaaaccaattgtggtagatagagtaaccaatgaacggtccctcataaaatatgcctgagttttggttgaaatagaaattcatgataatttgcctattcgattcagtttgtgaatgagtggaaacaattcacttctattcaaattgagtttgaatgtccgactaagtgttcgaactgtggtggttttggccatcagattgatcaatgtagaaaagaaaagaagtggaccaaagaagattcacttctgactaaattagatactcaggtagaaagtgagatgaaggaattgttgctttgcctgaggaaattaatgtaaaagggaagagtttaatggtagaggaagctattgatcatcctgaagtgggatttgcgaaagactctgcttgaagcagggatagtttcagctgcagtgacttgtacagaaaaggctaagtctgataattgggagattcccaaaaggaaaaatggaagaatacatcagagaattgctactcaaagaggtaatacctttcgagttttgcaagattaggtcaatgatgaagttactcaatttgctaatggatagttgtaataaatatggctttaatcgccaaaataaacatgaggctgatcagtcttttaaaaatgaataaagttggattagctgctattttagaaactaaagtgagaggtactaaagtcgctgaaataatggataatattttccatggctggaaatattactcgagtattatagtataaggtagagttttattgatttggttagaagtattagttttggtataaaaaattgaagagaatacacaatactagcattgcaaagtgagaatgatatgggtagataatgatttttgtcttacagtggtgtatggttcaactctcaagctaaaaagataggaactatggtataggctggggaacttgagtatgcctgttaaaccgtggttagttgggggttatttcattgcaatttttacaagcaatgacaaaattgggggaaaggatattagtgccaatgaaatgatagatgctaatcaatggctagatttggagttagtagatgagatgagatgtagatgttcacacttggaataacaattatggcaagagaatttattccaagattgatatagtgtttaagaatgaggattggattgatctctatccaaattatgtggcattctttcaatgggagccataatcggaggctgaatattacagtggcccagaaagctactaaaaaattattcatatttaggaaagttctatgcaaactttcacgttattcaagacatggataaactactagtgttacttcgtgataacacaaatatagtttcaaaacagtaaagaatccataaccctaagaggagtaaatatatagatagaaatttcacaaaagcatggattttgtgactaaggaggatgtaatgatggagaaggatatatattacacttgatctagacataaagaacatgagattaattaaaatgcacttatagttttatattagtgcaagtgagaactttttggggttttatgccctaaataaaactcatttcaatataatcttatttactaattaataaaagatcaaaaatcatttaatttgcttggttcacatgattacattcatgatcatatgtttaatatataaatcctattaaatccctaacatatagtcactcaaaattatagtgttgtctacacagtagaaaataatcatgattatatacttcaaactatttagtaccatgatttattagtgcactgaatttacactgacatgataatcaatgatgtgatttacttacacttggacaagtagaatatcttttctaaggcattaggaaagcaaacttttatcaaatgtattgactatacatcggactggacagatattgacagtggaaaagatatcataaacttaatgttatatcttttctaagtcaatgtcacttagttgatcttagatcaattaatcatgatccttagattgttaagctttagtttgattgtactatacaggttcttagacttgttcgttaccaacttactcgtaggactagcccatacttacatgttgggagctcggtagtgcaattgagtgggaccattaatcataaatatggaatctacaacttcaataactatttagaagtgaaatgatgatttcaatagagcttggctaaacgatataaatggaagagctcatatttcagtaattataatagtttactgaattatcatttataaggaggtaagtctttataggataaaatacatcgaagggtaaaacggtaaatttgtccttgctcgatgtaaactgtctataaaggatcgttgattatttagattgaaacaatggataattcataacgtatctatatttggtatataaagcgttttatgtaatcaagaatataatttcgaatcaatagtggagtcaggagaaattaataagctaagaaaaatctacttggtaaatttcaaatctacttattaaaagcttgattacataggctcatggtccttatattatctgagataatactaccttgtag

SEQ ID NO: 230234 - DNA, 1855 bp, Cannabis indica
ttacattttttgtatctgttcgtattaggaattgttttcaagttaattatatcaaaaaaaaaaaaagttgtcaaaaattaagctcaaggtcctatttttactattttgaaaaatacagggtccattttgtcatttaacaaaacacaggatccaatcggtaacttttgcaaaagacagggtccaaattggtatttacccttaaattaacttaggttctattcttaatcacaattaaaaatatatttgataatattagaaaattacaatttatcgcaaacacttaaaatcctagactattagattaatagtaatactaagatgacaatagactgaagtaaaacctaatttaatgatcatctaaacaagattagcaaaataatcatgacattgaatatagaagataaaaagcaatttgatataataaaaactagaatttaacattcatcataaaaattatagattcgtgtctcgagttttgaaataacccttaataaactactcgaaactagacattataatgaatgtcataataaaaagtaagagtttaaggagaagaaaaagaactatgatttagaactaacaatgtcgcaatctacgtcttcttcttgctctctttctctgagtttctctttcaatttcatagttcaataataccaaaattcgtaccctagaagtcctatttataatccttaaaaatatctcacttaaaaaaatataaaaaattaaattttgcccagaaattacatcctcgtcgcggccacgacttcctgccgaaaaatttctattacgtgattagtattttggtcataacttcttcatacaattcgggattggacgattcaagatattccgaaaaattgagaacgagatctacaactttcatgttgagctccaagtctagttatgcttccaaggttgtcaaaaatcgcatttacattcagttttgtcaaactgagtttgtcggcttccattattttccactaaaatgtgctaaattcttccaaaagactccaaatgcatgattagtctttaaaataacctaacaaattataatcacactattcaataatttaaagaatcaatttaagaatattaatacataaattggtcatatttagaagacaaatatggactcatcagtcatgctatctatcgatagaaaaacttctggttatgaatttaaggcctaaaatgggataggtaaagtgttttaccaatttaccattgttgtgacttaggatcgggatcatcgggcatttctccgttggttggtgtacatgaatatgaaattaaagataagaaaaaatacatttgtaccacgtagtagttacgattattatcgttatgacttgattatgatcgaggtaattgaacgatgattatcattaagtggattaaagtcatgacatcaagtgaaattaatagttaggtttcctacttgtcaattgtcttattagacaatgacatagatataatgaatgtcaaattagggcatcgtacttatcttattagacaatgagatatatggatgttacatcaacttgccttataggcaattgagatatatagatgctaagttagggtatcgacttgccttattagacaatgaaacatatagatgccaaattagggcatcgacttggcatttgtaaatatatataatctcttgaaaaatttacacaaagtgttaattttatttaaaaaatatatttttacgttcaaatatatatatatttacatttttacggtgttttataaaaacaacatgaaaactaccttaaaataacagaaaaacaatatcaaaacaacatcaactaaaaccaacaacaaaataacaaaaatataatataaaaat

SEQ ID NO: 230235 - DNA, 886 bp, Cannabis indica
tgggtgttggcgaaagaggagacaacgtcgtttgatgaagagctgaatgggtctagcgaacccctgtttccaaacacactaggaataattagagacattattattattattatttatatattgttttgtagtaattccagtattctatgggtgttcgggccattaaaactaggcccattttcactattttacgaaaactaaatcgaaggaacaaaaaccatatatatgcagtattttacattttttttaataatgattaattttatcaaatcaaatcatccaaaaacaaggatgcaattacaagaggtaacgaatccctactaaaatgacggtcagcctcaaaaagagaagattgcgctaaagcatgcgcaaccttattagcagaccgcttgacaaacttaaaagaaacatcaacaaaatcagaaatcaaagtcatacaatcataaagaatatggccatacagagagaccatatattttggctttttgcaaatcactaatgacttttaaacaatcatactcaactattacacttgtccatccattctctttactccatgacaaagcctctttgataccaatggcttcgactatatgaggctgcacatcgcctcccttggacaaagttttggccgccagcactatatccagcagcagttctagcaatcaatcccattccataacgcccatggctagaaaacaaagctccatccacgttgactttaacgaatggaagctctggtgcagccacaacaagattttttctagcatctaaaccatcccacgtagttctagtttagccacacttagaacctcattagagtcttgctgtttggagttccacaccaactcattgcgatgacttccaaattgaccacaagatcatt

SEQ ID NO: 230236 - DNA, 670 bp, Cannabis indica
ttggcccctcaacaaattataaattaacttatggtatctatacattatttccatgacaatttataacactctcttgatactcataacataattagtcacttaattttgtatcacactttataataacatatacattatacatatgtgtccacaataagattttaatccaatattttcaaaataattagaagaataagggtcacagaagatttgagaagagtaagaagatcctcaaagaaaaagaacacagtattaatgaattgaatgaaagcacttaatgtgcatcatagccagacaagagatgcaattaatgcaagaaataggaaagaaaatgggatcaacactataagggtgagtgaaactggaaaatgtaccagaagataaactgatgagattcacactcacaccaaggttctaaagcttcaaagaaagatagttttttactgtttatttttcgtatgttgtattttatttgttgtttaaagtttagagttgtaacattattatgatttatttgtattttgtccatgtattattcttattataaatttgtatttttggttggttatttttattgaagcacacatttttctaacattctcttcattaatgataggggaatagtttataactaggtgattgttacgtgccaagccacgtagtgttagtt

SEQ ID NO: 230237 - DNA, 1128 bp, Cannabis indica
aaacgtgtttgtggctgtctctaggatctctatggtctataaataggacatagagagaagtcaaatgtttcttatctcttctagtttaattttgcatatttttatatttgtgaggagagtagttttttttttttttttttgtggaaaacttagagtgttcagttaggttttagtctatgtttattgttcttatattgttcttagaataggttaaagaacttcattgaacaagagaagggtcttcaagagaagacttatcaaaaccttactttgggaggaagtaagcactcacatcaaaagacgaagggagtatgttgtttggtggtgtttagaaatcagattggtaaagtaaattacaaaggattgcggcaaagctttaggaggagtctaaacttgtttaagtcaattatatttgtaaatatttgagacttcactaagtggttttattcttttgacgtggccccatgtacttggaatgtttgaaagaacattgatactacgtataattttcttctctcaagtttttatattctgcactatttttttattattttattgtaaatttgtgttctacagcaacaaacatctattttgttactgttgatcgtaacagttgtgtttttaattactagaattttataaatatattgacatttataaaaatacgatttttcaaaattttctcaaattggttgagatattttctcaagtgaatgagatattccttcaaacagttattagatatttattttaaattaaatatttaaattgataataataatatatataacagaatgagttatagatatttattttaatatttaaaaattattatttgatagttaaataaataaatatcttatttaattaaatttttaatattattatattaattataattaatatactgttataaacctaaaaattgtaataaatcaaattgtatcatcatttcctttttagttagagttattgttcttgtgttgagattaaaataagaatattattatttttgtgtatcctatcaactcatactaatctttgtatatggtggtagatctgacaaatcgttatttgagtgttcatggatacaacttataaaaatatagcaatgacacttcatcaaga

SEQ ID NO: 230238 - DNA, 1916 bp, Cannabis indica
ataatttagggtcatttactataattttcccataattttcatttcctttaataataaaatgtatttgtacaattatttattaacttcagcttcttataccaatttgtcttgatattttattaattcttctagcatagatgtacttattgttaataaattgataaaagtattattctggtagataattcttctgtaaagtataatatcccaacagtttattaatagattggtcaaatataaaacaataattgcatactctaaacaaagacataatgattaaaattttaaaaagagtaaaataaatataatacttgttctgtccacatattctttctaattaaatcaattaattttctgccttataattttgtcttcttcttttttagagagaaaaataaaaaaaaaattaatcaataggtaaataaaaaaaaaaatccataaacttattcaaaaagtgtaatcaatcaaaatagataaaacatatctttacaataaaagaaaaaaaaaattatgactacaccttcaattaaaagaccaataaatatgaacatgtaactaaccacatatcttctaacaaaattaaaaaataacaatccaaattattcaaaatatatataacaatcctaaggaaggataaattcacaaaatatagaattaataaaaatatgaggatctctcaaatctaaataggacaagagtaaacatgccccttgctagaaagcacctttaatttataatttatggggcgtttagaatgaagtgttcaaaataatttgattatagagaatattatgaaggagaatatgattgtaggaaaatgtgtaaaatgtgtttagttgtgtagggtaatatgtaatcatattcatgttaattgaattatactttttggtagagtacaagaattttatatattatttaaaaaagttgaaatgaaaatattttttcattatatctgtttaatattaattatacataaaataaaataattattcattaaaataatatattcattaatatataaatattaaattttattgtatttataattaattaaaatgaacatttctataattatcactatgttatttatttttgttcgctatatcatttatgtacattatccgtataaaatttatgtatattacataatctcacacactaaatatatattgtaatatttttttttatgataaatcaaaacattaagggtatttatatttatttattaattcaaaaattctattcaaattaatataatggaatggaataattcaattctaccttttttaatgtatcaacattactttctttaagggtagttatattactaagggaaaacattacaatgttaaatcctcaaaacaaacaaagtaatgtttcacattactattcccttgttagtattaactcattcaaatgggaatgagaataggaataggaattaaatggaataaaatttaaaatgcataaaaaaatagataaaaaaattattaaaattttttctcttgttacattagaatggtattttctttctttttaaaatataatagtcattccaccaaaatggtggaaagaacattctattggaatatcattccaatactttaaaatacaaccaaataaatgaatgaaataaaaattgtttcatttccattcaattttatttcattacctccaatcaaaccccaccatctattttagttttcctttttatttataatttagagtatttagttttattaaacctttaattgagatagtttttacgagtttctttcttatatataaaacctttaattactttagatgattgtgttatttcaactattaccactttcaaattttactttcaattttttttataggttgagatgtaaaataattttaattttaaaaactaaatcacttttaatact

SEQ ID NO: 230239 - DNA, 1440 bp, Cannabis indica
tttctctattttgaggtgggtataccagtttaggggatcggaggttcacggcgatgtagagctcggcgaaacgctaagtcctaacacgaaatgtgagtcaatggtcggtgatgatggattttaagaggggattaattatttttgaacttttcttttccagtccacttgatttggtagcgaatgatgatgggttttgctctgcttcttctattatcaactctgcttcttagtccactcatatgggaaggttacgaatcccaccttctcatctacaaaggccagttaacattaaaagattgatttttttttcttcatgagttccaattttaaatcttatatctagattgtgtagtccttgtagagtatctattattgatgtattatgtatagtaattttacgtatcaaagcctttagtctttacgaaatgggagtaaaataattcaaattaagcaatatcgagtattatgtattattgatgtattgttgatgtattatttattatgatatcataatacaaaatgatgagtattgagttgaaattaacgattaaaatagagattaattctcgtacaatttggtttggtgatgactttgattttggagggcaagtgataaatgatggtgagctctgatttcgtaaatgataacaaaattgaagaagagaaattaaaaattcattaatttaaataatgtgttttctttgcagacttgccagggttcacatgcatgtagtatttataaaagagaccatgctttggtacacgtaaaggtcaggttttcagccctttacaagagtggtatgtttgactccattggcttgttagattatagaaacattgtttgtctcttttagtccaatgataataataatcagtaatgcttctacacggtaaatacattagactttagcatcctataccttattacactagccattggcattttgtgatgtaccttgcagagatgtaaaggttcgtcaattttactttttttggcatcttagccatgcatctatctgctaatatattaaatttcatttctatgtctatatataattgctttttaggtgaagagatgttgttttaatacattaatatgccaccacccactccactttataggttgcctatatagagcttcaatgtgataattgtgccactatgaaaatcaataatattactttgttatctatacttattgattttctgctatattaaattaatatgtacatcaattagtgtttgaaggaattgtatatgttctgagatgtagtctactttgtgataacccttttgatcaatccatttggtaaatgaactttctgcaagagagttacctcattattttttttaacttttttttaatatacatatatgtatgttagtgttaagaacttgtatatatctctctttgtattgattttacagattgtgattagc

SEQ ID NO: 230240 - DNA, 2898 bp, Cannabis indica
ttttactttgtagatgattatctcgtgtcacttgtgttttcataagaatcgtctgaattgttctctatctttgtgcctttgtctagaaattcaaaatcaatttaacgtgtatatccgtactttgagaagtgataatgtcataaagtactaatcttgtttatttcaatcttatattattcaaaatggcatacttcatgaaacttcttctgttgatactccatctcaaaatggcatatcatacaaaaaaaatgacatctccttgaaacaactagagctcccttattttaaatgcatgtttctaaatcgttttggcctgatgttgtttccactgcatgtttttttattgacagcattccatattttgttcttcaagatgaactcccttacaaaaaatttttttccaaataagccactatttcttattgcgccaagaatttttggtagcttttgctttgtttgtgatgttcatccacaggtaaccaatttagatcccatgtcattgaagtgtgtattccttggttagtctcgtcttcaaaaagggtatagtagttattgtcccgatcttcacaaatatcttgtttctattgatgttactttagtgaaaaatacaccttattttttgtctttacctactcctactcattagggggaggatgatgatttgttggtatattctatcacatcttctgtgcttgactcatattctgacgagtctcttattcttccacctacattggtcacagctcctgacatgtctacacctcttccacctcctccgtctcttattgaagtgtactccatgcgtccacctcttatggctcctctgcctcctgtttcatgttctgcacctgcttcttcgtcatcagatcaagaccctagcgattatctttccattgtactacgtaaaggaaaacacaaatgtacctatcctatttcttccattgtttcttataatcatttgtcctcatcttcttgcttcttcactgcttctcttgattctatttcgatacctaaaactattcgtgaagccttatctcatcttggttggcttgctgtaatgataaaagagattaatactttagatttgaatgatacttaaaacttgattaatttaccttcaggaaaacaggtcataggatgaaaatgggtattcacggttaaagtcaatccaaatagaataatttctcgattaaaggtttatcttattgctaagggttacgctcaaacctatggagtcgactattgtgatactttttgtcatgttgctaaattgacacctgtttgactttttatttctatggcagctactaatcattggtatttgcatcagcttgatattaaaaataattttcttcatggagatcttcaagaataggtgtaaatggagcaacctcttgggtttgtttcccagggggagttaaggtgggtttgtcgtctttacaaatctttatatggtttgaaacaaagtcctcgtgttcgattcagtaaatttagtcagactgttgaaaaatttagtttgttaaaagtaagttagaccattttgtgctctataaaagatttactactagtatcatcttgttagttttgtatgtggatgacatcattattaatggaaatgatactaaagggcatctcatccctcaaatctttcattcatatcatgtttcacacaaagaatttaggggtgctcaagtattttttgggagtagaagttactcagagtaaacaaggtatttctatcttagagaaaatatgtacttggtttgttaaatgagacaaaaaaattaggagtaaaaactcgtattactcaaatgaacccaattgtgcatcttaaaagtgatggggaaacatttgaagatccagagaaatatcgctgattggttagaaagttgaaattatctaactgtgactcaagcagacattgcatcagttagtgttacttgaaaggagcaccaagacgggatattgtttacaaggatcatggacacattgagtgtttctctgatgaagattgggtaagttcggaggtagatagaagatccacttccagttattatatttttattgggagtaatctaatctcttggaagagtaagaagcaaaatgttatgtcttgatccagtccaaaatcagaatatagagctatggcataatctgtgtgtgtgatagtgtggatttatcagcttctgactgaagtcaggtttaagacttcagttctagcaaaattgtggtgggataaccgagttgtccttcatattgcctcaaatcccgtgttccatgagtaactaagctattgagattgattttcattttgttcgtgagaaaattcatcaaggcttgatcttcacaaaatatgcgaaggctggaacaaaattaggggttattttcacaaaggctttgaatagggtgtgggttgattatctttataacaagctagacccaattaacatgtatgcttcagcttgagggagaatgtatatattacttctatattagttgtagaaattacgaataattacaattacttagttccttatttctttcttggtttcctttttagtctctctagttttgtatataaatatttattattctattgaataatatacatttcatttaccattttctataattgttaaagtaaacacatggatcatgatttgctctcttcgtaaaaccaattatttgcatgaactcgtcaaaaatttaggttccattgtctaggagcctatcattgtcatataaggatttatgtacaaactcatcaaaccatttttgaaatttctgtaaaaaatgtatgaactcatcaaaccatgattagatagcatgttgtattgactgcttcaccccaaaacttgctttccaaatagccccattaagcatacatcttcccctctc

SEQ ID NO: 230241 - DNA, 1051 bp, Cannabis indica
ctgtgaaacgcatactgcggtacctaagtggcactctcactcacggtttgcatctcaaaaggccacctgatcttgatgttgttgcattttgtgatgccgactgggctacagatctagacgatcgtcgatctacctctagtttcactatattctttggcaacaaccttgtagcttggcaatgtaagaagcagcacacaatttccaggtccagcactgaagctgaatttcgaagtctcgcgagcactgtggcagaactcacctggtttcattcactcttcacagaacttcgcattcaacttccaagaccacctgttgtgtggtgtgacaatctcagcaccatcttactcacagctaatcctttacttcacgcacgaacgaaacacattgaattggacctatattttgtgcgtgaaaaagtgctgcaacaactggttcatgtcaaacatgttccagctcttgaccaattagcagatggtcttaccaaagcaatctccagtgaacgctttccctcctttcataccaagctcacaattcaagacctctctactgctacagatcccttgaattgtaaccttgaggggccgtgttaagggtattgggttgttactgttagtgtctgttatttcagttgggttgttattcaacagtctgttagagtttgttacaaccactgtaactaactctctttcctctcttactttcaatcactatataatcatgtacaatcctttaccatacaaatagattgttctttggttatcaatctctcttttctgttctttcaatctttctctctctttagttctgttttactttgctctgttcttcttgttcttctcattgtgtgtttgatcatggctaagagattcaacacctaatctaattgtaataactaaagaaattggccaaagaattttctaatgatcactttttcattttttttttctttttaaataaaaccaaatgggaaaataggaatattatatctatttgagaaacaaattacttatatatatgttgttgtgccccaaattattattattattattat

SEQ ID NO: 230242 - DNA, 999 bp, Cannabis indica
gtatattgctcttacagaagctggaaaagaagtgttatggctaaagaattttctccaagaatttgatttgaggcaagaaaggtacgtgattccttgcgacagtcaaaatacaattgacctaagcaagaatgttacttaccactatagaacaaagtacattgatgatagatatcattagactcgtgacacacttgaaaagaagctattccaagtgcagaaaattcctacaaacaagaatgcaacagatgtgctaccaaaggtgattcattggcataagcttgagttgtattccaagcttgctgggaagaattctcaatgatgaaaacataagaccaattcttcctcatggattgaaaaaagggaagaattgatgagtaatgattgatttacaaccatgtaaaaatgtggttatgtttttcaaccatgtgaaaattactatggtaattttttgaactaagggatatgcatttaatgcaagattgattttttatgtattgttcatacatccaaggaggtctataaataaatttccatccctttcatttgttcatcccatcacaactatcacaagttattccacgagtgaagagtgaggctcttgagaaaaaaatagagagaatacctcttagtgagagaaatctaagaaagagagagagaaaaaagagagttcctacaaaattgtaagataaattttgtagagagaaagtgagattaccacactattaagtgtgaaagttttgagtgcattcctcaattatttgtcaaaacttgagagtgtaatattgtgtatctattattactgatatagtggaaggttgatcgtgaattttatttactacaagataattttttggcaatcatttattgctttaattattattcgtaaagtactatctatattggtttatatccaaaaaaatttaatatgctctatgattatagttgtgacagatctttcacatcaaaaaggaatttcggagtctccattatatttttcca

SEQ ID NO: 230243 - DNA, 2225 bp, Cannabis indica
  modified_base (17)..(17): a, c, t, g, unknown or other
  modified_base (76)..(76): a, c, t, g, unknown or other
agtaaaaaaaaaaaagngtttagttgagattagattgagtctattatagtaatattaattttttaaatctgaatanacttttttctctttgaaatcatcaagattggttaatgttttaatgtcaataaacattaaaatattcttcttcacccttgggagtgtctgcccctggcttccttcttttattttcctatccttcatataaattcccagtatagcttcaaaagacccaaaatacccctccttgatattttttctccatatttagactgtattaataatatatagatattattttttaatattgttattgaatttaacttgcccacaaattataattccaactggaatgtataataatattctttaccaatcaataccaacctcgtgagtgggacccacactacaattaattaatataaatctcctatacgtacattatcaatataaaacttaatattcttgtcctatacgtgtataagtacgtacatatacatgtatgtgaaatgttttaagattaatttattaataaatttttggtacatatgcatacagaatgagcaagagagaaatcatataccatctacaatagaatgttatatgaagcaatatggtgtatcagaagaagaagcatgtgatgaaatgaataggcgagtggttattgcatggaaagaaataaacgaagagtttctcaaaccaactgaagcagcttcacctatattagttcgtgctctgaatcttgctagggttatggatcttctctacaaaaatggtgataactatacacaagttggaaaagtcactaaagatagtgttgctgtcttgctcattgatccaattccataataaattaatctctcatactttatatatataacatgtactcgcaagactcctaattatataataagcatgttaaataaattaatatataaagtattttttttatggaaaaattggctctaaaaacataagtttgatacatataagtcttcaatcttcaaaattgacagtaatagcgcagtccccaagattacactttttgtttgtctgctagtccttttattaacagatccgttagatactaataaaatgccatatgtcaatttttaattggtcctaaataatcatagttttaattaaaaacaaaaaactaaaaaaactattttaaaatcataaaattattattttttcttttctttttattcttcttcgttttctttcataaagcaaacaatattaacggttagaaaaatccaaacccaccccaaccctcactccaccccatccccagccatgaccctcccccacctcctttcccaaccacggtcgctatttaccattgacttcgaagaccactagaaaaaataaaattcaaatctagatcttaacccacttattggaatcaaaatcaaaccaaacgcaaactaaaatattcgtcttcttcttggtcgaccaggtctctgttcaagagctttgaccgcaggagaaagagataaattatgggcttcaatgatatccattaacgctgttgaaaaagaaaaagaatcgagagagatagagaattggagaggtttcaatagatcggggtgttgctggtgagggccgatttctcacctaagaacaatgttagtgaggtcttgagttcagatcttaggggaaactttgatgtgctttccctttgaaaatctgatatatatatattttatatttcgtacatctttagtgatgacaaatttcgcccctcaaaacttttaggggcaataaattaagtattaggggcggcttttgtcgctccaaaaataaaaaattatatcgttgattttgggtgggatttttttcgcctgtaatattaggggtgactgaaaatatcacaagtcaaagcattagaggcagcatttaggggcaaaaatgtcgcctctaatacttatcgccatgaaattccaagctcgacccattctccttcattttattaccctaaaatttttagaaaaaagaaaaatattgctctccacttttgaaatttttagcgttcccccgtactactggtgaccccgagcgcgtcttattctctccctttctctttcatcccacaaaatcttcacccttctcttttactgctggacagttgattgtatgacatcgtcgcccgtttgatgtcgtcatccctgaccccatcgtccaagctttggtcgctaataactcttgaataaagagttatttgt

SEQ ID NO: 230244 - DNA, 1247 bp, Cannabis indica
agaatgagccacgactactaaaaatactttgttggaagtcaccaaaaagacctcctccaatataaaatagaggagatgactaaggcctcctccattctgaagctgaggagatgacaaatgtctcctccgctgtaaagccaatgagatgataaaggtctcctctactataaagttgaggatttgatgaaggcctcctctatggtgaagttgggaagatgatgaaaacctcctatggtttaaaacctaggagatgatgaaggaaccatttcagtgtattgttagcatcattttctgtaatattcctttgtgtaatcttttgtcatctatctccttattcaatggctatgatcaaacattgtaaaccttaaatagcaatgaaattactcatgttcattgagctgagatttatcatcttttctactctatatttttcaagtttttctactaagagggatttggctctcaagccaatggggtatctattacactatgaaatagtacagtgatttattagtaatagagtgaaagactataaatatataattgtgtagctattgttaaatatgggatgagaaaatagatctttagtttaattggaatttggcactgactcgaagagtgtattttaggagatttatcctttctcaaagaagactattatctatcattggtgctttcattcagttgagagctccgcaatataactgacaaagaattttatgaattcatgagatccacgttgatatccatcgagttgcatatggatcaattcttcaatgctcaactgaaggcaatacaagtgcatctcaaggaggaattagatggtagagttgagcgatattgctcatcagagacatctttggctcccttagttcaggcatttcctactttgtcagatgttgaaaaccacatcgatgaccctattgaaccaacgatcaacacgaaaccattggagatgcatctcgatctcatcactgtcgatgtttccgctagatctgatctaggtagattgcaattgactctagttcaatatacgatagtagctcgcagatcattgatgccagagaagacgcccttagcgcgcttcatcaaaagtgtgggatctaatgattttgccacctctagatcgttcagctagtgtggttccacaaccgactcatggtcctcgtcgtcaatggaagtgactcgaagaacactagtgccagacatgatgaccttagctccaatgaccgatgttagctctgata

SEQ ID NO: 230245 - DNA, 1804 bp, Cannabis indica
actggatttacaaagtataaaagcgatgttaaacaatgtagggattcgtaaaccatatgaaagtgagttattgaagatatgtaaacttggttggtgtaatttctttatttaattgcataaactaacaggtttatttaccttataatttgtggtctttggttttcatttcattttcatggtgaagaaatttcaactcattctcgagagcttaacataaaagaacctatcttgaagtggaatgattctgtttgtaagaactttgtagtaaactgttgaccatctttgatctccctcaaattatatatcattattttttattttatatatataatatatataaattatatttttattacttattgtttttccttttacacaagtgtctttcatctctcagtttcaaattttatacgattactttttagttatttatttattaatatatataatatgacaattaaaagttatcataattataaaatataatactgaattattattcattgtttttcttcccattaagtttcttctcatatggtgataaattaatttggcaccacacatttacaggcatatatacagtgaaatcggatttttatttggcaacaagtttgaacaacatcattcttcatcttcagattcaccagcttgctctttgtgtacaattgggcattctcttttctcatgtcgacacgtaaaatcagtttgaaaaaatactaacattaccatagattttcgaaaagctcaacatatgtatagtggtgattatcttattcatctttcaactttgtatttccaaactgagtttgagattattgtttgcatcatgtgggctatttaaagggagaaaaataaagtattctatggaggaaagagaactactgctaaatttactcttacataaccacgaaaagcgccacttaatttactaattgtttaaaaaaaaaaagagtagattttaattgtatacttaacaaggaatatgaccatgctcttacgataggttaataaaatacaccattcacaacttcacaagttaaaaaaaattgagttccaccttaagtaggtacgagtatttgtatgttataaaactcatttactttattttatttttgtatgccatttgattagagtagccgctaaggctacacgcagcggcggaaccacgaatacaatgcaaggggattttaataggaatatatatggcatgtgcataaaattcctattttgtgttacaatttgcttagcttttgtttttatgttaaattgaacttgtgtgttaaaaaggctacctcttttagatgtaatgagaagagctctcttaatcccatatactaataagtagtctactccttttatattaatatatcttgccaatagaggatggctacatctccgaaagaaagtgaaaattgtgactaaatacaatagaaaaagccagagtgcaatatctgaattgtcattctaatcttggaccataagagcatactttgcacacaatgatacgaagataatgactcaattaagtaaaatgggtgtcttcattgtagcaaattgtgcacttattttcaaggaaattttgtccatgtcatccatattctatttttttctaagtgttttgattcagcttatttgatcagatgttaactctcttattctcactgataggtttcgagcatctctaagcttgcattctttcaatctctattggtaaggtctaggatatttttgttctcaagtaagcatattttcatttattgatttactatgatcatattaactcatgtcaataaattttattttt

SEQ ID NO: 230246 - DNA, 1505 bp, Cannabis indica
ccatatataatttgtacataaaatttaagattatgtttctcatataataaaatgtatgataaattctaaataatattttatgcacatataatgtaattaagtactataatgtacataaaattataaattccccattaataaatataagatttcttttattttccggcatatgctctttacgagcgtctcttcatagaaagattaccaaagtttgctgctagtaactttggacaacatcatttgcttttactacttgttttgcgatggtagataacaatctcagtcacctttctgaggaaacggttcaagtcaccacagatgatttaacttatagattggatcccagagaaattgacacccaagaaccactaggaaaagtcctattgggaaaaattatctgcaaaggcaagctcggtcgagctgccatcgcgggtacactattgatggcttggtcctccttcaaagggtggagttagagggaagacgatgatggtattctacattttacgtttgcttctaaggaggatgcctggaatgttcttcatcgacgtgcgtggattatttgtggggcacttctagtgatcatgtcatggccatcctggctttctccttcgaaggtgaagttcaataagtctcccattcgggtcaggctcagtggcatacctcctttctactggaataaattcaatttggaagagcttgtagcaaaagtctcgcctaactataagctcccgagatacatcgactttgaaagtggatcttttggcatgggaactgtacagttttgggcaaccattgatattgataagcccttgtttttcaggtttctttatgaagagagaggccactaaagacatttggatgcattataaatacaaaaagctacctaagttgtgcttaaatgtggaatcatttcccataaacaaaaaatctgtttcaagccaccaacggttattaaggaccccaacggagcttttttccctatgtttggcatttggatgaaacatgaggagcctgtgaggtggcctttcgctcctaatcttcctaaatggtttgaagaatggatcatccagaagaggctgactgtggaccaaacttttaaacaacaaaggaaattaagtaactctgtaaaggttgcagactcttgggaggctaaggaattacggagtcaactccttggaaaaagatcgatggatggttgaacatgtggtggaggagttgctggccacgaatgaagagaaagttagttgtttttcgatggtttccatccctggcgtgggagaagtttgcccttttgaggatactgccacactggtgattcgaaaagcttctgtgaataactttcggagccatcatctaaccaacctgaaagggacattgcttcaggcttacaacagaatcaagagaaggaaagaggttgtgagaccagtcctcggacagtaccgggatcatcagatgttcattaggacatcgtgcagatgccacagaccaccgtgagtaagaac

SEQ ID NO: 230247 - DNA, 1483 bp, Cannabis indica
atagcaaattttgtgccaaattttacgctactttttggcaccttcgtatagatacgttaatatcaatagtgttttctcttccatttggggttctatggatctgatcatagagttctcaaagttcagcttgaagatactgctatgtcatcccataggtcctctcgtttccatatggaaattttttggcttaatgatccttctttcaatgatattgtccattcttcctggtgtactcctgttacttccatttcctctcctcttcaaaacttcctgagtaagcaatcgaattgtctcactgatattaagagttggagtaaatctcaatatcctcttaaaattcaaatctccagaacccaagttgagttgcatcggctcttaaatgactgtcaacctacttctcaatcttctcaacaggctgtgtatcttcaatctgagttagataggctgcttctaaaagatgaaatttactggcagcaaagatctcgagtggattggcatcgcgctggtgacaaaaatacaaaaaaatttcatcgtaaagccaccatccggaagaaataactttgtccgcagtcttacccttgctgatggctcgattgctcaggactctcctaccattttttcccagtttctaaatttttagactcatcttttccatacccaagttattagtgatatagccattaattccattctcagtggaatcacagccactctttcctcttctcaaattgcttatttctctgagggtttcactgaacttgaaatcaaccaggctatgttcagtctttctggtgacaaagctcccgatcctggtgggctgaactctctcttttaccagaaaaactggcatattcttgggtctgacctttgtagtgctcttctgcaaatactcaatcacaatggggacatctcattgataaatgacactgttctggttctcattcccaagaagaaaaaccccaaaacagttcgtgatttccgccccataagtctctgtaataccctttacaagtgcctatccaaagttcttgctaatagacttaagaacgttctccattccatcattagccttaatcaaagtgcttttctgaaaggcaggcaaattactgataacatccttattgccaacgagatcattcatgccattcacaccagaagaactggtaaaattggctgggcagccatcaagcttgatatggaaaaggcttttgaccgtgttgaatggaaatttcttaatcaccttcttctccatgttggcttccttgctcattatatttctctcatcatgaaatgtctttccacggttacttatcgcttatctcttaatggctccctgtccgaagcttttcattccactcatggcatacgacaaggagatcctttatctccatatctttttctccttgttgctgaaggtctttccgctgcaatttgtttgcatgaaaatatgggtacttttaatggcattaggatttgtaggggg

SEQ ID NO: 230248 - DNA, 1066 bp, Cannabis indica
aaatattttattttatttaagagtataacgtgagcaaacatcctgagaaattgagaatccaacacagcctcacataaagaataatattatattttttgattgaaaattaaaaataaaaataagaagaaataaaataaataaaatgattgaactcatcttccctcttctcctctcctctcctcaaaatacacacaaaataacaattgctttttccgttgctttctctggggaactccgctcctactaactactcacttaacactcagccattataatttgcagaaaagcccttcctttttctcaaattctcactcacagtcccttctgagtcatttcttcttcttccaagtccaaccatggggagtttcgctcttcactctctctcctcttccacttctacctactctctcacttcccgctccaccttgcttcgtaatcatcgttctcctcgacccgccatctccaaatcccaactctccatttcctcttctccttcgatcttgaccctccgatcatccactctcttctccccaaccaaacccatcgtcttctctcccctccgcaaaactcatcttcagatccaagctgctgctgctgcggctgcttcctcttcttcttcttcagccgcacagccgtcgccgccggtgcctgttcaaggtgcgaagattgttcccctgattctttccgttgccattggagtcgttgttcgattctttattcccaaacccgtcgaagtgacccctcaggcatggcagttgctcgcgatttttctctcgacggtggccggtctggttctgaaccccttgccagtcggggcttgggcgtttctaggaatgactacgtgtattgcgacaaagactctgcctttcacggcggccttcggcgccttcaccagtgaggtaatgtggctgattgtgatttcgttcttcttcgctagagggtttgtcaagaccgggttgggcgatcgagttgcgacttttttggtcaaatgttttgggaagagtacgttgggattgtcgtatggattgacgattggagaggccttgattgcgccggcaatgccgag

SEQ ID NO: 230249 - DNA, 1847 bp, Cannabis indica
ctgagtatctgcaacctaacaaaaaacacgtctcccaataaacaaagaagactgatatgcttgcaaacctatagagtaaaattactgtcaattgaagaaagcaattacacatagaggacgttggagttgtacagtggatgttggagttaccagaaaagctagacgctgaccagcacactcagtgagatcatcagcaaataaaggttcagtaccaaacatggtcttggatccaatgttttccccaccttcagggatatctttaacagatataacatcaactactccacggggctgttgatcaggcttgaatgctatattcttcactcgtgcaaaaggttctgtggtataaatgaatgccccatacaaacaatttggtggtgaaggaatgtcatctacatacactgcctcgcctacgcagattatcaacataaatgagacaaattagttgttaagaaaaaggaaggaataccttgaagcaattcaatcagcagtaaatataagaaacattagaggaacaaagacatagttatcttgacaatgtataattattaaaaaaaaaagccagcatacaggaagaaaaacaaatgatatgcaggcggaccaagagatgactgtcattcacatagaaataagcataacactaaatactaaatgaccttatgatggatgagagcccatgacagcacatgtaaggttaaatatgaattgttgaattccttaaattttcaacttcatgtttcagacatgatgagatttctccgttgacatttatgaacataaaataatagattaaaaaataactatggaagtccattgaaacatgtactggaatatgcaaaactatagagggaggtgctgtagatatcattcacataataaattaagtcaaacattagtgcaagtaatatcaagggggaaagaaaagagaaagagattcgataagtattttgtttctttctattttgaagctttccaagcaattatgcaagtcttaagcaaaaataaagtgatgttttagcccagaatacaaaccagaagcttggagggctgctccagattttgaaattggcttgccaacagggtaatattctggacttgttttaataaactgcttcccagatgatagcagagttggaatttcgtcacacttgaatgaaatttcattctctcccaacttcagatccttagccaacacagaatcattacatttccccaacaacccatcagtagattcagctgtagtatcaatacaggagctaaagaactcgaaaagaaaacctacagccaagcttgacctataagaaggacttgaagtgccatcttcaggaacaatggtagctctaaccaatttagtagcttcatacaaagcatcaacagttagtacttctccaactaaatattcttctgcctttctagctctgattgcatgtttagtaccataagcaccataagccaactgacagcgactcactaaaactccactggaagttttacaaggagaaacttcagccaataaggcagcattcagataaggcaatgcatttccgagaggtctaggtgcagctcgataggtttcaaacaataagacagaacctttctgctgagaaacttttcctgttgattcccagtttggaattttaatgcttagaagtatactcttgaaatctagaggtggcctttgaagaaactcttccaatgtcaaagtttcacatctggtaccactcatcacctctaccatggaatccgcagctagaagaatggtagcaatgtctgaaggaaaatgcttcctttgtgccatcaccaaattcccccctatactagctatatttctaataaatttgctagca

SEQ ID NO: 230250 - DNA, 4369 bp, Cannabis indica
tttaagtatattatgtaaattttctaaaattaatatatttttgatttcatctatacattagggagaattttttaagttgtatggggatgtctgtcgtacgtgttaggctagctcgacccgtattttaaattaaaagcctacgataagttaggtcgtgtcgtgtcaatattttaaagggtcagtctggcacgacatgtaagtctatattttcgtgtacgtgctcggacttgtgatgttctttattcgtgctggcttattttttataaatattgtgtcagccatttcttattaaggctcgaattcaagctctacttttttactatttttttttaaatttatcactaaattaatgtatttttttgtaatttcaacgatttttttaatactttttaatattactttacacataattatataaaaaattaattaaatttattagaattaatgattaaaatttaaatatttattaataaatacatatgctatattattaatatattataagaatttttaaagtattgtttggactagtctattcgcggttacgtgcatgccgtcacttaaggcttgtcgtgcttaaccgctcattttttctgtgttgtaccgtgccaattttcagcatcacgttgtgtcctatctaaatcgatccatatttttttgagttaggtcatgctcgtgtgcctcctggactcttgtcgtattaaaaagttcaccctgtatttacaccactatgaatatgtccagcatttgttataaattttatatattagggaaaaaaatcatcataatatttttaagagaattgctaaaaaatactattttagtatattaattttttttttagtgttatagtgttataccgctattaatgtaattagtaagtatcgggtttcatataagaaaataacttttaagcaatgtcactatctaatcgtggccacttataaaaagtgaaagtcactattgatactcaatgttcttgtcgtgtattaataatgtcataaatgtattaaataattcgtttattttatatataggccacgaagtagcattattaattaggggttttatatttaggttaattaaatcacctaaatgttttgattaattagtacacccgcacgccttgtttggtatccctttcatgattcactctcttcactatctttttcgagtttttgcagaaaagagaggaaattaaaaaatacttttctatgtaatttcttttcaaaaagtataatttctttcaatgaagttatctaactttctcagattgcttttgaaggttcgttgagatcgcattatattcctatacgatactatctatatatatacatataatattaattaacttctaaattattattagtagtaagatcgatatatatacagagagatatataggtgtgatgatatcacaccactgttattacgtgtatatatatagtaagtagctaaataattaatgttgcaaataaattttgatggagagtgatacagtactacagatacgtgttagtacacatgtgtataattaattatatacataattttctgtatatgataagtattttaaattttacttaattaagctatgagaatgaaactttgttttatattaaacattttacgtacgtatattttcatgaccaatagagagagagagagaggcgtgaggatattaaataaggccaataatctaattaatattaatggtacgtactggtagggtatggggcatgttattgatcaaattagaaacgatgtcaaaatttattattagatggccaagacagctacttctcaattctcattatgcgtgcactgaggtcgccggccctaatttattattagtgttagattcttattaatggttaacattattttatagttactcatgagtttatatattcagccacctaattttatttcttaattaattattaaaatattcttacaacaaaatccttactataaaatctcacttctatataaatataaaacattggtcccaagctcacaccatctattagagagcatttgctttcaataactagagatacatatttcacttttgtatttgttcaatctataaaattattccacatatgtgatatgagtactatagtttaataaaacataaataaaggtctaagccagaagaaagaaccaccgtaaagtaaacaaataaaataaaggtccattccaatcgaattgggtatgagaatctgtgattccatccacacttaaaacttgggacaatgtttatattttctaattcgagtacttcctttgtccgtacaacgaacaaaaaaaaaagattttaccttttatgaacaaaaattaattaggtgacgtatagtatgagcaaggcaacgggtcccctttatgtttaaaacataagcccatattaattatcaactaacccccaacttgattagctagtactttactttcaaggtttagtaaacctaaaagtatcgtttacccccaaaaacaaagttaaataatatgttcattattggggtatgacatatataattaaagttaaaagtgattgatgccacataatttgctataatatggacacgacgtatatgatgtaaatcatttatcataagatagggattagtcattctggcaattaagtcttaagttttgtcccttttaaaaaaacccgaagccaatcatgcttgaaaatgaatcccatgatgatgaataaaagtttaataggactatattttacttaaattcagatagtattaaattggatgtcatgaccccaaaaaggaaaaattccgggcgtcacgattgggataattggccaagcttagcttagttgaccaaaataattaatttgaatgtatctatttgtgtttttcaatactttatgtaatttgaaaatagaagaaaagtactaagagacgtcacaagcttagtatatatatgttagaaaaatagaagatttaattagagaataatataaatatatataatagcaatatatttaattgaaaatgagaatatttaaattacaaagtaagtggtaagtaattaattggggtctcaccactttgtgttcgtaaacttctttgatttgattaatgaagagtcattttctttgtaattgttcgaattgaatcaattctatttcaaataaataaataaatcaactaacaaatacaaacaaaaatgaaatactttttcatttactttgtttttttaagtgcgctcagagagaaaataagtaatatttgttttagaataaaatcagcaaacttcattaatttaaatcattcaacattagataaagaaaatatttaggtgcagtatcaaccgaaaaattgtaactggcatttacttattagggtcgtctcaagcttgaacaagactttagcacaaattaaataagatgttaatttttacaaaattatatattaattttatcatgaattttattttcatttaaagacgtacattaatcattttaattcttattattattaagatttttatgtttacattaattttatattattcttcacatgttttattaataatcaacatactataattaattcttttttttcttcatgaataaactttaattcatttataagaacctttcaaaaaaataaataaataaataaaggaacggttacaaaaatgatcacaataaaataagtataatataagaaaatattatgatattacatagaagtgatttatatataaaatttctcattaaaaaatcattaattattagtgatagtattaaaattttaaaggtgttttttaattttacacttcaaattattattattattttttttgtatttttacaaaaatttacatagaaatctatatagcaaacaacggagtaatttaaatcgcaatcaaaatccacaaagcaacccacacagaaactaccgatcgaagcaatccaaaccataatttttttttttaaaaaaaaaaagttaaaaatggcatatcagataatttttcaattttaaattaattaatataatgttgacaattgatatttaaatttattgattgaagaatatgtagggtttaaattttgtgagaccttaggcaattacttaagttttcttatatggttaaattacaagacatatatatatatatatatatatatttaatcctgaagttttatagtcaaatgatgagttagatgattaacaaattgcttaacaaaacatgatcaacatatgcaaagaagaaaatcggtttattgtaatcttgatcacaatacccaaattcagaaaagtaagaaaactattgataaaggaaaacaatttttaccaaaaaaaaaagaaataaaaagtagttaggattattctgaaag

SEQ ID NO: 230251 - DNA, 1363 bp, Cannabis indica
gaatataattgttaacttttgcaaaacatagagttcaaaataatatttattataatataatttaatatcagttcatacatattttaatatttactaactaattatcaattattcttaagactatctccaactataaatattttggccaattaactaaaatatttaatgaatacattaataatggaataaaaaaacaaataaaaaatatgatatttattatagtataaaatttgatacgtgccaaatttcacatccatttgacattaccattagagtcagagaaacacacttcgtaaatatatactaaagaatagtaatgcactacttagcatttcattagaaatgctctctaaggcatcacctcacaacactaaaagaaagatatctttaatgacaattttttaatcacaatataattttttaactaaatattgctttttttttattaataaattcaatgacaaatataatatttatccaattaccaaaatcttatcatgaagttaagatatggtagctatgtgtaatataaatcacacaacaaatcactcttacttgagcaattttggactaaacagaaatacataaggctcttttttcattttttttttattagatttaattacacaatataacataatccaactaccaaaactctatcataaggttaggacttgaattaaaatatcctttgcactcacaaaaaaagttacttatcactaagttgttactaatttagtcttaatcacaacaaataatgactatgaacttattattctcaacatcactactactttgcctatttcttgtcttcaaattctgtcataaatgaatccccatgttatttattcttctttgaactctttgaaatcatatgactgtttcacctctgctaagcaaaaaaataaacctagtcgctttatgacaacgtctcaataggccatcttgcttactaaattagtacaagattcgcaagaaaagagagttgactaccaaactagagcatgacatctaggtgtaagcatatgagaattcgtggatttagaaagccctttctatgagctagacaatgagtcaacatttgtccaactatttaggtccaagatccctcacttccagactctagatgagaggattcctttccatcgacacttgattcctttgtctcagacacccatacgatggaagaaagattttcttttgagggattgatatatgttcataattggacttcttgctagcacgctccactcttaattgcataagaaatcgaacatgaatctaaggttgtgtcagtttaatttatactgcatgtctgctagccagtaagtggttggcctcgggcattgattaagtgagagag

SEQ ID NO: 230252 - DNA, 980 bp, Cannabis indica
agagagagagagagctagggtttcaagatcaaaacttatgtttttggtcttagaataatgctctttagataggttagagcttaccaaagatctacattcaaaagagggtaatattcctcaaaaaagggagatatcttattttatcatatatttaagtatacaaaaaatagctaattaattgctcccaaataataggtagatatttggggttaaattcctatttttctgggttgatgaagtggattcgcatcaaaaaactagagtgaaaggggtagaaacatcaatcaatcaagtttctttttggcagtcattatggatgttggcttgcctaccctttgtctatggatggctggcacattccatctattgtcagtcaggggtgatctagccagactctcctgattggcccttttttggtaacatcgtttttcttgagcatttggacccttgctcaaattataagttatgcatggtgacttggcccattattgacaggctatactccacgtggcatcaatcccgcccatgtagacatgccacgtcatgtgagaaaaagtagggataacagagtgaatctctattaatactgaatttactagcaccactctacaagcataggatatgttgcgagagatccacactcaagtctttgcatctctcatggacagaaattcttttacaaaactagttttggccattattcttgagtaatattccttcccaagaacaaataaatgcttcgacatatagtcgccttgtcttagaccactcttagcttcaaagaaatcatgcaattatccattaaagaacaaactaaactttgatgtacaaatgaataccattacttgttgaatgaactcctttggaaattgaaaagcttgcatcatctctttaagaaaatcttccccaattgtataattagtctttcgtaattctagcttacgtatacaattaggtttcacattcttcctcttgtaatg

SEQ ID NO: 230253 - DNA, 954 bp, Cannabis indica
gttttccccaaaatcccaaaactacctcaaatcaaatccaaacctttccaaactttccagaacacgtaacttaagtccagtatcatatttcaacaaataaaagcatccacaaagctctgactaaaaactaccattgttgagctaagtttgagctcgaaactcaaacctagctcaaaccttgccaacaacaaacaatctacccaaaaccagctcaagcaaacataaattaatcgctagacttcaattataacaataaccaaactcaacaaaacctttagcttaaaattacataatcaaacctaacttttttctcttgaaatgaagagaaaaaaaagacaagaaacttacctcaaccttggctaagaaaacccttgaattcctatgctgaaatccctactgcttggtctaaaattggtgaggaaaatcttggttttccttggttccttggtttagccgaacaagaagagagagagtgaagaggttggatgagttttgtttgctattgactattctaccttattcctaattaaacatataccttaactaaaaataattctcacccaaaaaattaactaattgatttctatttaagtccataaggacaaaatccacctcttggaaaaatttccaaaattacccttcttcaagcttaagtcatttctaggctttaacggtccaaaaccataactttggataatcctgacatttttaatgtctagatatactatcgtgttagttccaagatattcaatcataccaagtaactctattggccaaatcatcgcattccactgttaccaggcataaaacatgaaaatcataaaatttcatatacattatatataatgcatctagaattcaaatatatctccataattgagaaaatattttcctaaggcctatttatggcaataagccttaatttctactaagagacatataatcataaaataa

SEQ ID NO: 230254 - DNA, 1159 bp, Cannabis indica
tataatggatcatattgcatgtttctttatgcacattttctcgaccatccaccaaactggagtactcggtataccttgcttcatactatttcttggcttctttgaaactttgactctgtcccgaacactttcttcctctcttgttttgagactggttcacattattctctagaatttttgcttttgaatatccaggagtggaactgcatctggtctgtgtcactccatacctagagaaatgggtttgtgtgggggctttcagtgatgctgatggtccataaatagtcagggtatactgagtgccaagagcaataactggaggagtaaatctgggagtggaggtaacgagagctggtgctagaggaccacaaaagtcttgttgataagaatcttaaaaactcataaagccttgtgccttagacataaacttggacaatgtcccgaccctccttttttgcatttctccctataacaaagaacctactgcgagttcagattgtaggaccacgattttcatgtcattggtcacttttgccttggattctgcttctatcattcattcagtgaaggattttaggctttctcccacctttttttttatgttggtgatggatgccatctccaagtcatagtcacagtgtgctataaatatctttaagaagatagaccgcaaatccttccatgaatggatcgagctaggagccaatcttttccaccaatcataagtagacttggtgagggccagggaaaaatataaacacttaggatcgtcactcacattggctacttccatcatcttgttacacctagatatgtgagttttgggatccctacacccatcatacaactcgattttaggcattttgaagttcactgtgagtggagcttccatgatcgtcctaatgcaaggctttgaatttagaatcaatgggggccccactttgcttttggaccaactttgttaaggcagctatttgctcctccaaccttttattgtcacttttcgaaacatcaattccacggaccttgtcattcaagttgttcctgtggtcattaccacgtggcctctccttctcacttttttctttctcatacttggcatctaaacatcttttaagatccacagtggaccaactgtcattagaatattgtcccccat

SEQ ID NO: 230255 - DNA, 1085 bp, Cannabis indica
ttctacaaatcctacattcagggcagtgttgatttcgtctttggaacagcaagatcactctacaaggtaccaacaaattcatcatcttaaaaaaatcccatctgggcattttcggtttctgatcattaatcaaagtgttttgcgaaaataggattgtgttctacaatcaacagcaaattatgccggagcagttgcagcacatcaccgaaactcgcctcgagaaaacacaggcttctcttttgtgaactgcatggttagaggaactggaaatatttacttgggaagagcttggggagactattcaaggattatctatgcattttgttattttgacaagatcataacttctcctggatggagtgactgggatatcccatcaaggcaaaagtatatataaacattgttatttgtatctatatcataggataattggcgcgaaacccctctggcaaaactttcttaagtatttaatggtaatatctaactgacgctataagaaaattaagtgtataaaattaaaacataaaaggggtttcgccgctaataactctatatctgttgtagagattaacagttattttgtgtgtaggactgctgagtttggggaatatcactgcagaggagcgggagcagatcgaaaaggtcgagttccatggatgaaatcctttaatgatgaacagataaagccttacataagtacaaactatatagatggacaacaatggctaagattgtagtttttactttctcttcaactcactctttttttttttgtagagaaaactgacaaatatagagatatatacaaacacttgtaaggtttttgagtttctaattcaaagaagcaaaatagagaacacaaatgatctgatatcatattatagatttcaatcttttgttgtttttttactacaaagatacaaacaagcataatgtgagtcattaaacagactatttttcctgactcaattatgagctctcctaattttgaagggtatctaagttctaatgccaattagtaaaaatcagaaaagggtcatcaaaatcaaaatcctaattccgtcactgtacacctcaaaaagccg

SEQ ID NO: 230256 - DNA, 1281 bp, Cannabis indica
gaatcatggccgggaaaggccgaaggaggagtggccgcagcccccgccgttgccggagaaggattgagcgggttgtgaattaggagtagccttcttgagtagaagtctccgacgagattttggacgagttgagctggcgaggatgtggattcagccatagatgtttgttgaaatgtctcagtggagtgttttggaagaaatagaaaggttattgcttgcttgacttaagattgaattaagtttgaactaagagagattgtatatatagtatggagaaaacactgagtttcctttattatgcttattttttaaagaataatatgccattattttatttcttttgtttcaacaaaatctttgagtgttttgtttatttattttttaatattttattcattagagataaagatttccaaccatatggatactccactcacctcctctacacagtttaatgggctttctaatcaaaatgggcccctcccaccttttgcgcagtatgaagtgacacgtggaatcaaaataataattatgtaatctctacaatgttttgccttaagatgagtaatgaacctccattttctcatttatgtacatgaaatcacatggaaactatgtatatatttgtttaaggtgattttagtgggttctctttcatacttatcaagtatagctagtgtagctagatagttttagttctatatttgttgtacccgttactaaataacaataatataataatcttgggtgtttaaaacaaactgagatacagtccaaaatacgtcgaggtagattcaacttcggttgaaaataattgagtaaaccttatcagcttacaacttttcaaatattcattgcttatatgacatgagtctatatatggaagagagtttatcttgattggtacaaaaagataatcaactttattattagcacgttctaattataaattatacggaacagtgcaaatgctaacagtcgacatggaataacgtgttttgtgtaaccctgaacacataaaaataatataaaaactaaaaaaaaaattatgtgcaaccgaagcgatctctctaaaagaactctagctatatagccatgccttttcgtgtttccttagcatcttctcgtttggagtgttaatggcactatactgtttgtgtgtcgagggcttcgactaagagacccttccccccttgaaggttggcttctttgattgtggtggctcagctccgtgctctcattgcttctttgcctacttgaaaaatgggcatagggcatcga

SEQ ID NO: 230257 - DNA, 1788 bp, Cannabis indica
agacaacttctccacaaccgattgagtgttcactttagctgtagataaaatttccttgggctctaagaaataaacattcctacgccactcaactatggaatctgagtttatagcactcgcaacaaccgacaaagtagccaagtggttgagagatctcatggctgagataccactaattgtggtagatattacaactacatcaatacactgtgataaccaagctgtcttggtgagtgcttataacaaagtgtataattgaaagtatagacacattagtctaaaatatgtgagacaattgattccaaaaggaatcatatcaatctcatatgtcaaatcatgtgagaacttaacaaatctatttacaaaacctttttcaagacgttgagtaagttctacatctaaagggatgagactataactccttacataatagattcactaatgatggcaacccaattttaacattaacaaacatatagatcacatctaaggatggttaatgttgatcgctatagactagagggttaatcgaaaggttttaataaaatttaatttttgagaaacaagtatctctaaaagtagcaaagatgttgctagactttcacctatatgaacttagtggtggtgccgcctcttatgggagtagagttttctcctaagaaagttcatgaatggactagcacaaggccataaaagtgttaagcatgtgaaaatgagatgtaactcaagagaacaaataaaggtatgtggaagactagaacacaatactaccggtcttatcaattaaggacttggaggtccaatccataggaatagcgactagcccgataagactttatagtgtttccactaaggaaatattcaacgcaaaagagatattattttatgtgatggcattgtatatttagagatgagaaaggcataagtatttaaccaagtggaggaatattagaattagttaaatacttaagattagtaaagactaatctatgagaaatgtataacctaatgatgcaacattaagagaatgtgtactttaaatttgtacttgtagaacgtgttggaacttgttctatggtcttaaaacttagttttaagtaaactaagccacctgagaaattttgggtcaatcaaaagtttcaaatgcatgttttagagaaaattgcacattataggacaacatgtcgcctagaatatttccaaaattacgagataaaaactttgtcaaggtcccatgagatatgtcaccaagtttgggtgacatatcgccatgtcgcaacatgtctcctggaacatgatggtgattcgagttttacattttttatttctcgagcatgcgacataggggtgttcattggactacattcaatatttttaggcctatccagatcctatataattatttattggatgttagattttatcatccaatttgatccaattcattttcatcatccaatcaactcaatatccattggatgttgaatttgatcagttctatccattagatgtatttcatgtatatctattgtagtaattctgttttattaaatgttgaatgtattggacttttaaacaccccatccaatatctaattagatattcaaaaataacatctaatccgatccgatcacaattggacatccaatgtttagcggtcgattgtaattagattagttggttgttattggatttgattgatttatgcacagccctacacccaatggtaggggacatgttgcctggagcgttgcataggaaatttcatggttttgtaaaatgcaagaa

SEQ ID NO: 230258 - DNA, 1511 bp, Cannabis indica
aaaccatcataatgatatgaatacagagctaataatgaggttggataggtttgatggatttaacttattagatggcaagacaaggagagatttctcttgatcacactcaagatagcctacattcttgaatttaccttggagcctttacccgctctaaacgagaaattaagatactcctgggatggtggagaagagaagaaagagagaggaagataattttctatgtagagagtcatattcctaatgtcttgtctgatagactatatgatctctacacttgatgagtgcatatttgttcactcattcttagtgaattattagatgaattagtattgattttttaaagttttgtatagatttgatgtgttttctctacttgtgtagatttgtgcttaaaagataattttgtgatggattgagacctttgaagcaattttcgacaatatttttattattttctcaaagattttatgaaatttaaaatgataaagctcgttcccagctttttaaaacatgttaaatcatctcatttggaatttaaacgcaaaaattatgcacgatttactaagcaaggtcgaagtgtgatatcgagaagtcatgcatagtgctatagcgccgtatttcatgcgctatagtgtcacacatgtatttttaaatttaaattctaattctaaatggattatttctatattttttttgcctatataaagaatgacgtaaatcgatttttggacgaataaagagatacaaacaaacaactttgagattaaaaaatacattgaagaacaagagagaagagattccaagcaatcatcaacaactatcatcattagaggtatttttttcttcttcttttttcttttgtttagttatttaattatgaacatgattattgtggttattatgtttgtgattatgaactaaatactttattaactgagttaaagtttgttaagatttattttgttaagcattctgttaataaagttgcacactgtattggtcgtggctcttgtttttatcccgttcgtgagtttagtgggagtaatgctcctactaacttattatcagttgttttggatgaagttgtttaattaataaagtatcttttcttttaaaaaaaaaaatactttttttagtattgatgaaactatttagattagtgttatcataatttttgctcacatgacgttgcatgtctatgcaggcaatattgatgtcacatggagtatagcttgttagcaaggtggtcaagtcatcatacacaacatatcggttgacgaggagtttgaatacttaagcaggacaaagagataacaaacttgccaacttaaagggtctggccggaccccctggctgttgggttttatgccctaaataaaactcatttcaatataatcaaatttacttattaatatagatcagaaataatatttaatgttgcatgggtcacatgatttagttcatgattatatatataatgtatgaattcatctgaaaccatttttcac

SEQ ID NO: 230259 - DNA, 1224 bp, Cannabis indica
tttaaatttaaattaatttctttatataaaatatttatataatttttatttttaaatatatgataaaattacaatttttttatataaaatatctacaaatttttatttttaaatatataaaattaataaagaatattttgttaagtaataatatattctattaaagttaacgtataaaactaaaaaatactattgaattaaaaattgtgttacgtagtcacattttatattgtatagattatgcaatgaaacctatggtacggaaaaagaaattttactatattagttttaaaataagtataactcaatttgagaaaataaaaaagaagtaaaactcaaacatgctacttataaatccaacaaaacataattatatctgagttgattattaaattcattaattaaattattataattggtgtgtttcaaataagtcacatattaaatgtcaagttacttaattgtagaaaacaataaaaataagcttagagtaatttgcggcataaccttcataagtgcttaggtttttgcaactaactcccaattccaaaattttattggtaaaatcacataaacctcgataccgttagcaaaaacactcccccgtctaacagaccccattttctgtttatgtggctcggcagcccaagtgctaagtagacttgcaagtgccaaggcaccaaaataccaattacgtggcattatccattgaaaacctggaaatataacttaaaattaaaattaactaataatgttacctaaattaaaataaaccctattaaaataaaattcaaatctacaaaaccagaataagaatctcaaacccaaatctcacacccattttcgttttaaatcaaaggaaatcgagagaaggggggtcaaattcaaagaagaatagtaagaatataaagtttgaagggttcgggtctccttcctgattcattctccattgtcgagggggaagaacaaagctagtgaacatgtccacgaggcctcacctctgccaatgtgatccccctggggttgtagagatgaaaacatattggacgaataagaatcctggatgaaggtttgttagatgcccattccatcaggtgagatcttattggcttgattatttgccctattttttgtgttattctttcttcttctttttttcttctggtcagaatttattttttagttgtggcagcaagtgcaaggtgtagtttttggatgtggtat

SEQ ID NO: 230260 - DNA, 2096 bp, Cannabis indica
ggttcatagagctatggtgcttgtgctacttgcgttgaactaattattacatacacagcagggagataaaccctcgagactataaagtttattcaaactcaaatatgcatgtgaaatatatttcttttttccttttcatttacgaaatgtactatttagttttgtttatatgttttacagacatgtgagtttcatactcacatttctttggacctcaagcttttaggtacttgcacaaaagccaacataaactagtttcagtcacgctcaacttaaaatatcattccctaatatttgtgcatgtttaacttgatgaatagtagtgataaaaaatattaatactcaaaatcttattatattaaaagacaaccttttgtccaaacttcaagagtgaaaagtgaaaaccctcttcaaaacaagtcgggcaaccataatcaagtcggttgggattgcccttccagtttacacgatgctaacgacaaaactttctaagagacttatctctaaaattgatggcatggtaaggaacttttggtgaggttgtgagaaaggaaaccgtggcctctatttaaaagcatgagataatctatgccttccaaaatcttgtgggggcttaggcttccgaaaacattagagatgaaccaagctatttttagctaaatggggttggcatatgctaaatgaccaccaatccctctactgcagggtcttaagtgctaagtatctcaaaggtaatttatgaagtgctcttataaaagtttttactccttattctagaagaatgttgtaaaagccaaagagattttgaagaaaagggtttgtaagatggttaatgatggaaaagacacaaatatatgggaagactcgtggataattcatggcaaagagtatgcaatattttgacctgctagctgatgttagacaatggagattgacatctcctcaagctctattccctttttgactctaaaaaaattagcaatattctgaaagggggtaagcctagcagttaaggaaataaccaatggatttggaccaaggagtctaacaaatttttctctagtaaatctttttacttggtacaagcttttgatcgtgctcctctctgtgttatggctccatccctttcgaacaatttgtggaatagcaaaatcttagagcagcataaagttctttggtggtgcattctctctaatggctttccaatttgagctctcttagctaagagaatgcagatcgaagacacatcttgcgctctttgcgaggagaccatggaacatcttttccttaattgcaacttagctttccatttatggagatcttccctattgggggtcataccaattcttaattcatgtgctagtgtctagaataagataaatttctatggggcttgaagtcaaaggggtcaatgttgatgagcttttcttttatgcttcaattgtggtgatatgatatgccaagcccgtaacgataaagtacacaataacaatatgagtagcattaaacattatattgactctattactcattgttatgcaaattatggctcatgtttgttcctttctcctctagtggtcgcctcatttttgttgggatttatgccctaaaagtaaataattaatggataatatgttagagaatatatgaaatgcaattataagataaatgatacattaattataatagtataattattaaatatctgaagattccttattcatatggagaaagtataatcttgtaaggatgtataagagaattaagattaataaaacaagtcgttagtgtattaaagtaatgagaatctttaatatagaactgctaattatgatttactatacactatacttctagagtgtgtgattttgatttagatcatatatgtggatagacatgtagtaaaggtgttgtgtataattcgattatgcatgattagatcgatatgtaataaacatctttcattaacgtgtcgtttacaatgaaagagttattcatatctagggctagcaaaagggttagatgcaatacatgactcgaaacccgcacgagatttagcgagtttagatttgtcttaaatgggttcgggtcatgtt

SEQ ID NO: 230261 - DNA, 3889 bp, Cannabis indica
gacttgatgatagatttttcagttagtatatgttgtttatggcctcattaggtgttctagacatttggtgagatttagggtagaattctaggagaaatgaggttctttttgttttgtagtaaaaacagtagaccatttttacaaaaaaggtctaccgtttttagcagtcaacgatctaaaaaaacggactaccatttttaggaaatggcctgctattttttgtggtattttctaaagaatctcatttttttggtgtttgcttgatatttagggtattgtcatgctattttatcaataggaaaacttttggttttgagtctaagtccctgaaaagtgatttggaatatcacctatcagttttacatatactgtgacttaggggcctgtaaataatcaagcaaaaaatttcactcagattgactgacacacctgaattcaaaatcaaggtaagattagtataataatatcatatgtgattccatatttagcgtgcatgtttatgaataatatataacatatcagtaatggtagtattagtgtacatagagctgcactaaataccgacaaatatatttttggcatatatagtatagattgacgctatcatatagatacgactagagtatcgagtataggctgatattatggtaaatcgtattgttgtatgaatgttctagacttagtacgcatgggctgtgggataggattataattaggtgtatgggcactggttataatcgggtttatgtttatgttatgattatgcttttcttactgagtctgttgacttacaaatattgtttatatgtgtaggtaaaggcaaagctaacgctgaacagcagtgagcacgagcgaaggaagattgtacatatcggggcggcctaactggaatatttgatctttgggtcagtaggctttattttgatagtcgctaggtgacaacttctataactaagcattttataaaataattgtaactttaaaaaggggatcccggattatgtaaagtattttcatattcaagttaaagtttaattaagaaattttttattattcacatttttctataagccttttgattagcaaaagagtgcacaatattaagaaatcacgatagcatacttaaactagtagggtgttacaatgatactcacacctcttacttgaatatcttttaaacttcccccttgaggcatccgtggggtttttttttgtagtgcaccatgttgcaagtttctttgtacacattctctcgagtatccaccagattagagtactatgtgtactttggttcatactctttccttactttctttaaagtttcactttggctttgtcttttccccctctcttgttctgggagtgactcatgttttgttctggaacttctacttttgactacccatgagtgacactatattcagtttgtgccgctccatacttagaaaaatgggtttgcataggtgcctacacggatgcagatggtccatagctgtcagagtgtactgcattttggaaacacgaacttgtgaggcaaatcccaaggcagaagcagtaggggttggtgtcggagggactttgattgcctattaataggtgcctttgagattgataaaacctttggcccttaccatgaactcaaataaggtttctgcccttttttgttgcattgctcaccatagcatggagccaaatgcaagtctagattgtagggccacaagtttcatatcatcagtcacctttatcttagctggcgcctctatcatctattgaatgaagttttttaggctttcttcggcttgctatttgacattagtgatggagcccatctccatgtcataatcatgggcaactataaactgtttctagaaggcggactgcaaatccttctaggaatgaattgatctacaagccaatcttttccaccagtcttcaacagacttggtgagggttagggagaagcacaagcacttagcatcttcacttactcttgccacttgcatcattttgctatacttggccaggtgagtctttggatctatgcgcccaccatataactcaatttaaggaattttgtagttctcagagtggagcttccatgatcctcctgatgcacgactttgggtcctcatctttagtgtcagtgagggccccgctttgcttctggaccaactttgttagagcagtgatttgctcttctagtctcttggtgtcactgtctgggagatctcgtccactaaatttgtcatttaaatggtttttgaggtcattaccacgtgttctctccttctcacttttgtctttttcatacttggcgctaagacgccttcagagatttattatggaccaactatcatttgaatattgttcactagtcccacaatcttagttatagaattactagggtggttttcccttcccctaggcttcaattctttcgtaccagtcccttttggttggtgcaacaacgcctttctaaagtagaagggcatctgagcccgaaggcgtcggtggccttctgtgcctgagaaggcctgttagcaggatttgtgttttttgaaggaggtatgggagcagtagggttctgagggtcaactaccttagcttttcccttgtcttgtacaggagtagaggtttcagtgttagtagggtgttccttgttatttccttcgacccattcccctgaggggtcctcattcgaatctccctcgctagatatctgaacttagctcagaggcgagccataattttcttgattctttgtgaaacttcacttaatgggctaaattctgtctagtctcgagcaactctttagacaattaaaggtcttgctgatagtggtagccatctttgtagtacccatctttaacgtattctccattgtcgtcttcctcctaattttcaacatctctctcttcattgatgttatcgtgctggttgatcaaattatcctctcgattgttaaggttggatgtatccccacctctcgcatcactaggttgggtgtgctctagcgagatagggtttacgtcctccatgacaatgtcgaggccacctggagtatttttgggaacttttttttgtgtaaaagtcatggtagtagcaacactatgggtttaagtatttcttcagctctcaataaaagcaccaaaatgtttaccaagattttttgaaactaaatattttagaactaaagaaatgataaaatgcagagataaatgagatagagatttttacgtgattcaggtgttaattaaccttactccatgagtcggtcttttagcctctaaaggcatgtttgatgtgattacaatattttgtaggaaacccaactctatagtcttagtttctcttgaagaagaagaaaggttggaacaatattagcatagttttaaccctttaggttgtgatcccccacttcgtatggaaatagactagtatttataggctaaggatggttatggacatgcccatgacccgcctagggtttcttcaaaaagtccactaatggggtaaaatacatgcaaaaagaaagctgactattgggacccataattgtgtttgtgtgttgcagcagttagacaattggggaccattgtacgccatggacacgtgtcgccaaaaggtttaacctttaaaagtacaagcctataataactgtctggaaaaaaagtgtctgaggtgtgcgcattactatactctggcacaggggacaagatctgcttttatgttagaaaatgcataactatcgttgggcaatctatattgcatcaaaggtagatatccatgatactcttgggcgatcagtgtgcgtgttaggccctttcagcacccattcgggtattagttagacatactttaagtttagactgctctaggtcctaaagaa

SEQ ID NO: 230262 - DNA, 1182 bp, Cannabis indica
ttacattagggaaaaaagataaaagactaacaacatcaattattaaatctgaaaaattctgagtttgaattgaagggagctttgaaagcattggctaccatgagtgcatctctctctatttgcgtaatcggtaattgctggtaattgctgttggatagcccaattgagactgtgaaagagggctttggcttccatctcatgagacttgaaattcccaatgattggcaagagcagccattacgattccagcagaatcccgaagaatcgctcccacaccagtggtgaatgtagaggcattgactgctgcatctatattaagcttaaaagctccagctggtcgtgaggaccatggaacgggggctggtggaatttggggaatcacggtctggtgcacgtttgcagaagttgcagcagcaggttgtgattttttttagctgctttgtaattctgcaggaaaatagtagcaaaaacgacaagagcattggctgatctcgctatcttaccgtggtctaccttgtttcgttcagtccaaatcgcccaaagtgtacaaaagagttgctcaagttcagctttgttgtagactaatgagagatggatcaagaaatcaccatttctcattgaagtacacgcatgccaatcgaagttgtagttgagagatctccaaattgctttagcgtacttacagttaaatagagcgtgtcccgttgtttcccaagcttgtttgcagatggagcatgtgaaatcagtgataattttccttcgaacaagtgaggtggccacgggaagagcatcatgagtgatatgccaagcaaaaatcttgaccttttgagggatttgaagtgaccggaacagtttccaccaagctaattccgatgtggagctggaaatgagatttttgtctgcaagcgatgtagcaagatgataggcactttgaaccgtgaaaatactcgaagattgatgatgtcatataaatttatcactagtgtcgaagtagctcaaaggaattgtgagaattctctccaaatcaagttggcaaaaatactgctgcaataaagggatattccattgtctctcttcggtgatgagattccccacaacaccatgtgaaggccccgagtagaagattggaaggaaagtagaatgaccttggatcaaagggtcaaggccacatcgaatagatct

SEQ ID NO: 230263 - DNA, 817 bp, Cannabis indica
gcctaaataaatggccaaaatttgaaattggacaaggttcatagggtaaaatttgtataatttatgtgtacacatataattaattttattaatgaatctaattaaatcttaatatgtgggggaaattggggtgaatatattattaagtcaattcttattttgattatcaaacttttttttagtgattagacacttaaaatgacggttcaaatttgtacaaggaggatttccactcacataaaattggtttattagaagaataaaatgtcatcaaagtttagaagttgtaataattattgataaaaccccatcaaactaattttaattatgaattataatcattttcaacccaactaaaaaaatattagtcaggtatataattatgcttaaatagtgagacttggcagcaaccaataaagtacaagtagttctaaacaataatccagaaagtaaagcaaacattattcattagaattgatattattattgatttagaagtaaattaattaaccacattaattaatgggaaattttaccaagtataattgactaatttctctttgtcttttttttttattactatttttatgcaaaacaaccattcattaaattaaaaaaaaaagctcgaaagcagttacattagcaaagattctaccccccttaaatcaagaaaatcagtaaagtttgataaaatgaactacttcatttagagtactaaaagtccaaaaaacacaaaatcaagcaaagtatcaagaataaaatggatcatgtatttttaaaattgtacaaataggactatgaattgattttttgtcaa

SEQ ID NO: 230264 - DNA, 1891 bp, Cannabis indica
cagtatttttgaaaaaatttccgtgtgacagtatttttgtaaaagttaaccaaaattctagtatttttttaagtttccctaataattaaaaaaagtctaaataaattttaaaagtaatttatattaaaactcttaattcttattttaaaatataaaaataaaattatttttataaaacatgtttttttttgttttaaaaaaaatattatattactattctaattaaaaaatatttaaataataattacataatgcacccatcttatacaaatatgtccccaataaattatcaagaaattttgaaaaaaataaatcactattattataaatcaacattcatttacaacaataataaaaataaaatagacaacttctcctaaccaacaaatgtcttgatccaactttaaaatatattttgccaaactatgtgtggcatggttagtatttctcttatcatgagaaacaacaacttcaggaaaaaagaataaaagacaacgaacatctaagattaaaacaagataaatccttagatgtagtattcaaagcaccagtgactcgtagcgaatccgtttcaatatgggtgatgtgtaattgctcttgcagcgcccaattgagactagggaaaagggctttggctttcatttcatctgaacgaaaatatctttgtactggctttgaaaaggcagcaataacacgaccatggtgatctcgaacaactgctcccacacccaaagttttaggtgccgagtcgagggctacatcaatgttcagcttcagccattcagcagtctgtggttgccatggaatttcttcagaatggttgcttgttttcttgctggtgtggacagcagcagggccactgctactcaccatgcctccatgttgtgaccgccgacgagaagaaccaaatttctccaaatagttaattgcaaatgtaacagtatgttttccttctgatatagttctaccgtgtactactttatttctattcgaccatatcgcccacatgtcacaaatgataagcacaaaatcagcttgaggatgtaaggtggaaaggtgaattagataatcaccattatacatttgttgatcttttgaataatcaatggtgaacaatgtgtgtttccaaactgatttagcatgtggacaatgaaaaagagcatgcccaattgatttcaatgcatctgtacacatggaataagcagccgagtcaataactttcctacggtgaagtgctgctgcagttgaaagagcattgttcagaactttacatgcaaatatttaagctttgatggaagatttagatcccaaaaggttttctaccaattcacgtgtaagtccgaggaagaggattgttgtcgttcttctaaactcgcaaccaaatggaaatttgacttaactgtatatatttataaggttgtgtgatgccaaattaatatatcactgaaagggaataatctcaaaggaatagtgacaattctttcaatatccagttgtccaaaaaatcgttaagtaattccacattccactatctttcagtagtgataagatgagcaatgggtaaggaatctggcccaatgtaagaataggcttaaactctgtataaccaggtgttcatttgtctaaaccacattatatatgaaaactattcccaactttgtatctaagaccttgaacaagaagctcacgacctaataaatactttgccatgtaagtgatggtgtatggcttagccttacttccaaaaaagaattgttaaaaaagtacttgcactttaataatttggctcaacaaagaatttggcatttcaaagattcttcaagcttgtttaactaagagtgcttgcttgtaatgtacgaaagattgaaatcccataccaccctcaaatttg

SEQ ID NO: 230265 - DNA, 869 bp, Cannabis indica
tcgttctcttatattaatttagcaagccaacaatatatacgtacgtactatgcgtatatatgaaagagggtcttatatatttttatgttcgtacgtttttcacatttcagtgcatgatatgatatattatgtatatatataaatttggtgttgatgatggaaattaaggaaagttcattagaacaaattaaaagatgacaacgtaggaagcatggacaagtacgtacttatatacgtacacacacaagttacaaacaaacacatgcaatgcactctcttctctttcatttcctactacagtttcttttgtaagcacatgagtataaagtaagactatagtaggacttaatcaacttttttcttttttactctgaggcaaattttttttaaaaaaaaatactgtgtaagtgttatattacatattgtgttagtttttacggttgttccacagttattttttagttattctactgttgttttaattggtctattttgttgtgtttacggtggttgtcgtataaaaaagacagtatttttataaaaaaataaattctgtaacaataaaattgtaaatttttatctaaaattcaatatttttgtaaaaatcctatatatatatgatcacctagagtgtagattgacccaaaaagaatctgttttgaacgagaagcaggtgaggcccaaatgtaagagaaacacaaataacaaaatttctaaaaatataatagggaaatttacaaaaatactaaaatttgggttaaattttacaaaaatactgtcatacgaaaatcttttcaaaaatactgtattttataaacaccagtaaaacacaaagcagaacaactcaaaacaacagtagaatactagta

SEQ ID NO: 230266 - DNA, 1388 bp, Cannabis indica
atgttttaaataactataacgtatatgaccatgagaaaaaatttgactaaaaaattatttcggatgctaaaacagatagaagtgcatcaatatatccattttaagaggatgcattctagaattttccaaagatatttactcaaaaataattttattatgatatattcatttcgagttcgttgctcaacttttctccgctggttgagaccgaagaagaaaggtattcccaggtctcaaacaaatctcgtaagtctcgcccccaactcaatgctattttttgtttacttatttctctttctccaattcgcttttatttttggcttggtaacaagatcaatgacaggtctctcttccttcttctgaatgctttgtgggattaattgaataagttttgctttgttgatatcatttgtgattttgggaatatgtcttctttaccttattaaagtttttcattttgaattactgttgtcatataattctgtattggtattcatgttttcatatatgtatatgagtattttatttaatgggttgatagtttgtatatgcttttgtgtataatttgtttcttctcattagtaattatagattctaatggttagagttataatgcataagaactgtttgataaaatgtctctaagacacagtgtgttgtggaataaaaactcacaagcataactagcctcttttgtatttttagtacaattaaaagatgtattatataaatactttgctagttgtttattgtttgttgctttcaaggcacaactacaatttttaaaactaattaatctctgtgactatttgtttatttttaatttgttttctcactttatatgctattatgtaataaaaattatatatacactaatgctatatgcatgaatattttgttttccttttctaggtgatttagatatttgaatacacgtttgtattttacattcttttttcttattctccattgacccttgttttggcattagatcaacatggttacttaattttcaagtcttgtgatgttcgatctgttgcttgcccttgcccatggagtattaattccatactggattaaagtaaattctgtttgattctaaacttaaagtaaattctttagtgatttcctctctatatttgggaaagtagagttttaatgttattttctgctattaagtgatggttctaaccttaaaatgtttgggtatttatgattttgaagccattgatattgttggtgagtgatttgtttttgtttatacttgatgttgttgattggttgctgtgctcaaactcttgttgatttctgtttatatctccaattcttgaacacattaatgatttctgcatatttctctagcttttatattcacaaattcatattgt

SEQ ID NO: 230267 - DNA, 2018 bp, Cannabis indica
ataaaatagattacattgaaatggagttttatttagggcataaaacctaacataactttccttaccattatactcactttgtatgagagaggaaattgtaggtgttaatatgaaacttaattacaaaatagctcctcctagaatcatgaatgcttataagtggattttataatccatgcagcctttccaatcaatatcaccaaaaccaactactatatgtcatgatgttggtttgtcaatgactaacacatccttggtaccataaggatgacaactcaagtagcaatccaacatgttggcaacatatatcacaatatgagtggatgtacttagtgaaccataggccttccataagcataaatatgtataggacaacttcaatattgatttcttgttattactcatatacatggattttaggacgttcataacatatcacactttagactatttaacaattctcaatgaaatcgtaacattaatcacaataatagtttgtcaatgcaaactatgaaacaattaagtctatcgttgatctcatcacaaagaatttaaatatttagaccatttaaggtttatcaagaattctttgtattacagagattatcaaataataatttaatcttctccagaatagattaggatcataaaatatgagtaacgtactatatcaagtaatagtataaacatgtcattactctcagtgatctctcatatagtgttaactaacaataatgttctgaattgactattttgagaattctaattatttacgccaaaagtagcgttgatgacatggacatcaatatttgacacgtgaaaaaaaatatgacatctcaaagttgagtagtcctgagtcatagcaagtctacctaggaagggtccctagccctgcgcccaggttgacttcggagactttgagaacttcagaatagaagtttgcacttaaataagaatacaactcactatcttttagtattatgtaccataaggataaggagcaacctaatccaaaccccgagagctaaaattacacgaacttataacccggaagccaacttgggcacctagggtttcacctaatgcccaagttgaaaatgtgttaaaaaattgcattgggacatcaactagacataccatagacatatttgaggcatcaaaatcagaaccggagcaagttcatttttgagcactagggccctagggccccgagcaccccagtgatggttgacaatttgtcaatctaggcaccttccaagtatcaaatcaacaatccaactttttcatcttctttctcttcattaaaaatggggaaatatgtcatttgggggaagaaacaacacttcttaggtgccagaaaaggctcagcgcccaggttgcaacttggggctggccaagtgcttaggttgatattttgtcaacctgggctaatttcgatgatgttttctgagaaatactctatgcatcttctcagttttcaaaaaggatggagatttaactatttacaaagaccaaacggaactttcgaagagccataactggaacctagcgcccaggttgacacttggcactgggcccagcgcccaggttgacatattgtcaacctgggctgtttacaatcaagtcaccaaaaagtgttcagagcatttttttccatcatcagaattaatgaagattcaagtgaactcagggagaaaaccacagactcgagcccctggaaataaggccatacgcctagatggacctggtgctgggcccagcgtccaggttgacaatcaacttggggcgctgctttcaattgctcaaatgccaaaactaagttgacaatgaatccagaatggtcaaaaagtaagagacctcgtcctcaagttaagaaccttggaagtatcaaaacgagatctcgggggctcgggaacgagtgcccaacacccaagttgattaatggcctggtgcgttgggttttgcttatccaattttgattccgtttcgaccgtccgtctagtttttcacaataacta

SEQ ID NO: 230268 - DNA, 1961 bp, Cannabis indica
tatattatatgaataaaaaatatataaataacaaaatttataagtatcaaaacagaactaaaaatatatagctaattggataagactaattttattaattagtacaaaaaaaaactactaaaaaaatatttatttgctataatattttctacactataacaaataataataatttgactaatgaaagtggcaaaggaaagcttatttatagtttggatatagaaaaccacaatactttttaaacaatgtgggatttttcacaaagttagtagattttttttagtagacaaaacttgaagctcccacaaaatagtaaaaatactatgaaaagaatatgagatgctacatcatcacttttaaactctcctttatataaatatattgattgattgattgatattgagattgatgatgactttattaatcacaaccacaatacaaagcaagggcaaaattcgccaaaaaaaaaaaaaccaattctcacagagagcaaatactcataaaaaactcttatcactcttcctcattttcctttgtattagactataaactctatattgtatatccctttctatcatctacaatatactttacactatgggtataagaattaaaaaacaagtatttctattgtgccaaacatgatatatctcttctacaaacacagccccagttatcttagactttattcccttcttcattccttcaatccacttgacctagtcagtgtaagactaagacaaaacactaccaagcaaggcatgaatttgtctaatgacctgccgaaaaaatatacagtcagatgacaatggtcttcctttgtagctctaaaaaccggacaaagggtgcaatcacgctacacatgtaatctttgcagatggtcacgagtaagaagtcttgcattaacaacctaccaaacaataaactggtgttttggaacacttaatctactccacataaagtgttggtacttcaccttctcatgatgtagaagacttttttacagtttcaaacactgaatttctcatggaagcttgctccatctatctctccttgagaaaaggtatcacaaatacgacacaaattgctccaataccaactaacatcaatcttaagttgatacctctaaaatttttggccctttaagtaattattatttacccacttaacccaaagagaatctagcttttaactaattgcctaaacatacttggcaatcataatattattccacttgacgccttcaccaaaacccaaccccaccataagatttggataaataaactttatcccaagaagttaaagtgattttactcctcatgccattatttccgcacaagaaccacatacatagtttatcagcctctttgacaatgatttgaggaatcataaaaatgctcatccagtaatttcgtagcccgaaaagaatagaggttatgagttgagatctatctgcataagaaagatgacgactcgcctaagaatgaagactcaacttaatcctcttgagaatgattccacagtcctcgacttttctcttggttggtcaaaaaggaacccccatatacttgagaggaaaagctctttcttcaaattggagcaccctgagaagctactctttataaaggttggacactcctccagaaatcatctcgaacttattatgattagctccaagacttgtattcgaataaaactcatcaaatattttcttcacacattgcacagaactaacattttctttacaagaaaattataagattgttcgcaaagaaagggttaatgatcttgaggctcttacacatagggtggaatttgaaggtgttatgcctagtcccagcctggaaaagtggagtgagatactccatgactaacacaaaaatcaagggggaaatagggccaccttgccttagccctttagctccatgaaaccctgtctgaattctcacattcatcataag

SEQ ID NO: 230269 - DNA, 1189 bp, Cannabis indica
agatttgtttcaaaatcaagagacaagtgtgctcttttcttcaacatcctctgaggtaataagaatttcaaatggacaaatgatgtgagaatgcttttcaagaattaaaaaagtaactttcaaaaacccatgtactctcaaaacctttggataaagaagagttagggatatacttggaatcagtgaatatgttataagtgttgctctgataagagaagagaacaatgttcagcatctagtttactacatcaacaaaagactagtcgaggaagaaggccaatagcccttgattgaaaaattaacttactatgtgatcctagccacaaggaagttaagaccctacttccaagctcatctagtttggatgtacactgactaacctttagccaagttttgtaaaagctcgatgcttctgggcggctactgaattgtgatatagagttaggttaatatgaaataacttaccaactcgacacactagttgaagggaaagccttggtagattttatgattgaatgcacaagaaaagaagcagacattttaaaagacaatctcgagccaaataaggaactagaacaagcaccctcactagaagaaattggaaatgacaaggatatttgcaagttgcatgtggatagattagcaactgattagctgtccagtgcaagaatcaccctcatcacacttaggggaaacccctgcatggagcaatcaaatttggtttcaaagccgccaacaataaggtagaatatgttgcactcattgttgggttaaaacttgctaaggaagtacatgctgagtatattgagatctgtagtgactcacaattggtgggtaaaatcatgtctcagggggaatacatggctcgtggagaaaaaatagtggcctatctcagtgagatccatgacatgattgcataatttaagggttataccctcaagcaaattccaacaaaacaaaagacaatagataatgaactaggatggcttacgagcaacacagtgacagataaagccaacctagttccaattcaatttttgaaagaacccagcatcacctaaacaaaggaagttaaaatgatagacaacacaagggaacttctaagaaataggaatgaagctcgaaaaatgatgagaaaggttgcacgatacataatggttaagttataatgtttagaagaggtttctcc

SEQ ID NO: 230270 - DNA, 1314 bp, Cannabis indica
atatatatatatcatctgaaaattgaattagaataaaaaaatttaatttcaatatatatatatatacaaatattgaaaaatattctaaatatatcaataaatcaaatccggttaaattaataattgaaagggaaaaaataagaacattgttataaacaaacttaaattaatgatgcattcctatatataacaataatagaaaatcgattacaaacataagaataaaaaagtaaaacatcaaccataaataacaaaattagaaccagaacaagttctactttcaaataaactaactacgaaaccaattttaaatgtaacaactgaaacaaataacaaacaaattagaacatgttatatcaaaaaatcgaaaatataataataattgaaaataaattcaaacaatgaaatgaaacaaatataaatacatattaaagaaatcggttccagtgatcaattcatacagaagtactaatcttaattttcttttttaaaatgcaggaatagaataaatcatgtgtgtgatcaagtatgagagccaatgtacagacaatacaagttatgatgactacaatatgactagaatactaattccaactaattcttcactagagaattggttgagctgataaaaaccgagataaaatgcaacagaaacaacattaatatatcctaccagatttcactaagaaaaatactaatgaagctactaagtggcaactccctcataatctatactgagctctgaaagacacaaacactagtaactgattctccattatgcatcacaacaatataacatacaactacacaaacaatagagaatccttcattcgaacaacaaatgtaaaaacaaaacaatactattgaagaaccagttccacaaatacacaactaaccattcaaccaacaatctgagaatgaaggagagaattcaactgagtacaatcagaaagaaagctctccagacatgttcaaaatatttagagaagttgctaattttataatagagaaaacaaatgaagcaactaaaacaaaaagggatgaagaaatggagattatcacatattattgttgagattttatgccctaaataaaatctaattttattgtaatcttatttactttcaataaagaaaagaaattattgcttgaccttgtcatatgctttgttcacatgttttatacatgattatatgtttaatatatatgttctattaaatttcgaacatatagttattcataattaaagtgatgtcatcacagtggaaatgattctatgtttaatgtatatgttctattaaatttcgaacatat

SEQ ID NO: 230271 - DNA, 1024 bp, Cannabis indica
aaaaaaattacacttatttgtacacaccaacttggtgcataatttagtgtgtcattagagtgaaatgatgttaaaattcacagcagtttggtagaatggtgcatcattaaaaatactctgagatcttactttgaagccaccccacctatttagtcccaatagtcaaatcttgtaacggagcctccaaacttacattttagtgtaatcaacttttttcggaggcttcgttacaactagatcctactttgaggccaccccacctatattttggaacttcccatcagttcgatcttagaatgggttcttcgaaaatgaccaatcacacttaataaaagtttaacatctagctaatgttgttttaatttttaaaacattacaatttacttttaaactcactacacatatttctattatcttttattttatcttgaatgtgactatataacataaaatatatttttttaacattgcaattcaaatttaaacctatgcacatatctaaaaaatatctttctattatcttttttacccaattcatatatctaaaaacatatatttttattgttgttttcttattaaacattaaaattgaaaaaaatatttatgtttcttaaaaaaaatcattattatgacgctgttatctattacagttactaaaaaaaaaatatttttattattatttaaaaaaactagaaaaactgtatgatatttttaaaaataaaagtattataaaattaaaagtattgcggttaaactaaaaataaaattaacaacaaatttaaatattattgtttttttttttttttttttattttttatataagctacttaattaatattttaataaaaatatattattatcaatgaaaataaaaaatattatacaactaagcatgtacatagtacaaaataaaactaacagtaataattaaatatatgtacatcgcatataatattaacgtagggttcaacaaagtatacgaccaacccttaaccctttatttttttttttttttttttttag

SEQ ID NO: 230272 - DNA, 1370 bp, Cannabis indica
taaaaaataaaataatataaaatgtaaattaatggtgaaataattttttaaatatacgaatctcacttattttaatttaataaatattataaaaaactactaattaattataaaataacatgtcatacaggtgctatacactttagtgcctcatagcaatactctaacatatctatgacatgacatcttataattagttagcagttctgtataattttattaaattaaaataagtaaaacttgatattgaattacactaatatcgatattgaaatctaactacagattcgtcagtttaagtctaatcaattaccagttttttaaaaaataacaactttattaattaaaaaacttcaaccattataatagataaaaaaatcagtacgaacagtacaatatgaatagaaaaaaatacgagcaacacaatatgcaatcttatttacagaacgtttaacaaaataaatcttaacaaactttaaaatttctaacataactcaacaattcatgatccaaatgactactaaaaggagaaggcataaaaatagtactatgcacaacttgaaccgccactaaatagacaaattcaagttgaacatcttgccattcttctcgtttagtccaatttaaagtctcttaataccaagcctaccaacgaaagaagcttcctcttgaccatgaaaacacaaagaaaatgcttccaataaccggctagaactatcacgagccacatcactaatactacatttctcaactgaagaaaaaattactccatcaacattaatcataatcgtattaaactttggtttagaccaatgctcaaatctattcaaaaaaaaattaataaataattaaaatgctgatttttcaaattggcttgtaggaaagaaatctgaaaaatgttaatgtgatataaaaatctacattttaggagatgttgttaattgtcgttttgtcgtttttgctgtcgttttaatggtgaagctggtcaaatcctctgctgccccactgcatcttcataatttaccactttggactttttcacagccggagaaatcaaagtccatactgcatttattattattattttcaatcacacacgaaaattattaaaaataaacataaaataaatgaatgatttagtcatatagtgagtaatgtgtttacaaaatattcactaaggttcgtttggaacgtcgtattagattgtattgtattgtataatattgaattgtattttatataatatttttatataaaaactatatgtggcattacttttatgggtcatctaaatatataatattttagttataaattaaagtttaactataatattatataaaaatatcatatataatccaattcaatat

SEQ ID NO: 230273 - DNA, 1118 bp, Cannabis indica
tctttaagttaggggtgcattgtagaattttcctatatttttaatatgaattaaaatttaccattttcaaaaatagaattgtcactaacgtattactttttgtagtctatatatacacataaaatgtatacatgcattacaagaacatttcatgctggcatactaatatgttggccactatgaaattatcaaacgtactagtgacatgcaaccttaataatttgccagtcttgagatccaagcacaagatgagcactagtgcaaggtctcaccaaatccaacctaaaaatttggcattcaatataagatccaagcaccaaaattataactctcttggtggtcacctcgagataaaattaagctaacagataaaactatgaaatggtattttcagctcttgaattcagagctgctgcatattgtatttatagccaaaatattacatgtgatgaaaatagggccgttagcccatgtacagctgtcagagaattacaaaggaaaaggggaatattctaacaataaaaggacactaatgattgctgaaatcatcctggggattgctgctgtaccagaagtttgttaggctgataacgaataggtccgtgacacctggtgcagaatttctatttctcaacagcccctctcaaacgaaagggggatggtctaaccccgagtttgcttgtaagaaattgaaatcgtgagtgggatagacctttggtaagacaatctgctatttggtcatgtgaaggaatgtagttgacctctaattccttctgcagtactttgtcacgaacataatgcacatctatctcgatgtgttttgttcgggcatgaaatattggatttgctgctaaagctcctgcaccagcattatcacaccatgctacagaggtaacacacagtgggaagttgagttctttgagtaacgattcgatccacgatatttcagcagccaggtgagcaagggcgcgatattctgattccgtgcttgatctcgacaccactgcttgtttctttgaggaccaggatacgagtgtttctccaagaaaaacgcagtaccctgctacagatcttctgtcatcagggcaacatgcccaatctgcatcagaaaaaccagt

SEQ ID NO: 230274 - DNA, 1195 bp, Cannabis indica
tcactagtctcatccaaataatgggctagaaaaatcctcccactgagataaggtaatgtgattctatatctagggacttcagtggtatcaatttactattactattgtaacatatatattagaacacatacatgatcaagaataagttctactagtttgctagtttaaattacatattatatttatgtctaatgaaaacatgtgtgatgtacgcgtaaaaaaaatgtgtgatatagagattctgtggtgttttaaatataatctatattctaatgaaaaagatgtttgaactacatatatcagtaacttcttccacccctatgtattatagagattctgtagtgttttgaatataatccagagttcaatgtaaaagatttttgaactccatatattaataacttcttccacccctattattgttaaaaggataagtgatgtctggaaattgttaaaaaatctcaattattgttaggtctgggaacactttgaaaaattttaattggtgaaaagtttgtgtgttctaatgtgcttatggtattttttagccaaaatttctttcatttattgagtatctaagccatgaatttctaacctgaaaagtccttttgatttccgaaaaatgttgtcaacattagtggagagaggtaagcatgcaagcatattagccattggattgtgcattggtttgaatgagtaaaataattataatattatttcgatactgaagttaatatgcattggtatattatttgataagatgagcatcctaattaattgttagagttgttggaattgaaattctagttaagttatttaaagcaaattttacatgagccagcagtagcttaattgtctgacagcttagttaattggattttggttttagtgttagtcttagccttattagaggatgagtaagaatctagtttgggagaattttgttaggctatttttagcctaagttttgggtcgattttagagttgttttctttgataatgttatcttttggaatggttttacacttgatttcccttgtttcaaatctgcgaggtattagagttcaaattctatcaattggtgaaaagacgggacaaattagagaaaaaatctactgaagctgacaagtttgtttcagtagtcgcgaccaccacagaccatagtcgtgataaattatgtggttgcgactatggt

SEQ ID NO: 230275 - DNA, 1144 bp, Cannabis indica
gattaggacttattgaaatgagccaaagggttatttggacatatgtttcaaacatgccttgttattaaggctagctagtatataaattaattagttaattggttagtattagtttcttcaattactctttctttattattgttttcttttctcattatttcttgtattcttatttttctctctacaaatacattctgctctggcacacatggttgctgtgcttttctttactttccattctcttgttccatgcctatatataattaacgttgcaaacaatatgcttttgtgtaatagctggataatgcagaagagtttgagttgaggatagacagcgatttgttaatattgagttactttaggtgcgctagtgatgagcttagaaattgatgagaatcatcaggttccatcttaaaatcaattggtaataagtggagtaattcatatttttatatatagtttaatacttttacatttaatccatctacgtaaagaaaatcacctatacatatcgttatgaatggggcaacataattatttgtatacttctaatttaagacaaaccatacttatgggaagccctatatacaaaataggataatctattaattaatattacaataagtttggatatagatggtttaaaagcagtcgttcccttttagcagccctttaattgtgtactctcaacgcaagctttttttttaaaaaaaaaaataaaaataaaatatataagacgttcatccaaagccggcttcgtgtttaattaatcaagtaatgcccagtgtcaacgcgttaattaaaacatacagcttcaataccaaagtaaagtaaaacatccaatcaacaaaaaaaatgttaattaaaacaactataagctttgtccaatattatgtttgtacgtatacgtatatgtacacaattcgggcaatagctatacaaacaatacacatctgatatgatatcttcttacacttttacaggatcacaattcatatgtattaatttcaatgcagaaacttaattattatccctggactggatatatttgatcagttggtatatggtcaaaatttcaaacaacttaatgtttaagattgagtcacacatatatttataagcgttattatatatatatatatat

SEQ ID NO: 230276 - DNA, 2255 bp, Cannabis indica
gctttcttttgtcgaagatagtcaatcatagatgttgttaccgtttttctgatggtctgaatggcagtacgagtatcatccatttttagcttttagagtgtgcaccatataaattctctagtgctttccaaagagcagctgatgtagtgcaccccatgacctccgttgcaatcgtttccgtcatcgaactatataaccaacccatgaggagttggtcactcacaatccagagttcataatcgggattgagttgcacaccaaaaccagtctgaccttcttgagctgcagcagggacaaactcggggggacacagtcgtgtgccttggacaaagccatcaagacgatgtcctctgattatggtcgataccatagttttccagagagagtagttgttgcggtcaagtttaagtggaaatggctggtttagggtattgaagggttgtgtgtaatttgtggtgaagctagactgagcttgcattgtatttgtggttacagcagcttggctggaccctggggcagggacatttcgagcagcattgtttgctgtcatgggagtctgagagtcgccggtcgacattggcgttggccaagcttggctctgataccaagtgtgaaaatggtatagatggaaaatatgaaatctcagctcaatcgagtctgagtgaaatgcattcaatatatagctaggtattacaagaaagggccactctaacacagacaagtggcaaaatacaattggaagtttgataacagaattaggcacaaaaagtaatgcaatcatacaatcaaagattctaacagaagaggaatattcagcaaacgatgttgacagggagaatgctctgctgaggtcaggtgtaggctagctgaagctgtgaaccatttaattcttaacagatacttatttccttttttcaaattaataattttgggaaaggtaatattgacataagcaagagatacctgcccagttttcatttcagggtatcaaaaaagaacataaaataagccaaaaaaaagacagatacctgcaaaaatgaatatccaaacatgcatttacagacatttgaattagaatccatcaacttcagctcggaaagtataattttatttaattattctttgtaagtataaaatttaaactgtgaaaatccaggtggagagtaatataagatgctcatgcctgacttgaaaaaataaagaagagaataaaagataaccagtgacaaaatacaagttggctgaaagactagtagatcttcattgacccatgctagaatacaacaattcagcttataaaccatcatttggttcattgaaacatatttacacctacgagtaataaaatacatgaacatgaaggccggaattgagcttctaaatccattctagttcagaaaacaagagcagcctccaatagaatatctatcatcagaacaggcaggtcaagtgaaaagaacaaaagatgaaggaggaaatatactaaaggggacaaatatcaacttttaaactatctttacataagagtctacaaaatggaaagcataaaatgcaagtctaatttcccactgaagttcgacagccaagaaaattttgtttggcggcaatagaagtcattattgtatttcgaaatgttaaacaagtctgccttcttcataccaattttggttctcttcctgaatttctcaaatggattcatcaactgatacaagcagcatacaagtctgccttcttcagaccaatcttgggtatccttcccaaattctcagatgaattaatttttgagatgaaaagcaactagtccctgcacgcaaaaaattcaaaatgtaatccataataacttcactaaccagataagcgactacatttttaaccgagattataaaaatgatataagaaactgaatttcataattgtaaatgtcatgttttgtattgagcacgtgttgctgaacatgcacaacaaacacatgctttgtttgaaataagactgatcttcgatcttatctgagggttttagactaatctgttaaaaaaatcccatgtatcaaatggtagaataggactaactcccaaaagcaaaactagcctaagagaggagagtggccaagtagttatatactactaaccaatcccacacttgtcaatgtttcctaacaaaatcccacaatattttagaaacataaaattagaacaattattatgttggtacccaggaggaaatgaaactttcgacctagtggaggcagaacatat

SEQ ID NO: 230277 - DNA, 1231 bp, Cannabis indica
gcaataggagtttctacgtagaattccataaaaatacaaaaaaaaaaaaaaactagttacgaagtgtaaaaatgaaaaagtccctttattgagggactaataaattaatacttaaagttaataatctatatctatgaggttatatattagtagtggtccccaagatacaagactcactctattctcatctttttccatcaaaagagaaaattagagaaccctaattaagttgctttcttggaggatcattactctaagatcatctctattaattggattaagatcatcactatctataaattaaactggatccgtgaaacatcagggttctgctttgtcaaaagtgcctacaagtttcttcaaaaactaaatgccagatggcatcaagatgagaatgagcaaactaaattctagactaagttttggaaactaaaaatccctcccaaggttaaaaatctggtttagcgtgctggtagggagtgtttgtccactttgaaacaattgcgtttaaggagagtggatgtgcaaaccctttgtccaatatgtcgagatgcatcatgtcaattgaacatgctttacttttgtgtacaagggccaaacaggtctgggagcgtgttggtattgggactgcaattgcagctactggtgcgagctactttctcgactggtgcatccagtcttttgctgcggttgatgcagaaaaaaggaagctgctgccggtcctttgctgggcgatcgggagtgcacgcaacgaattcgtctggaagaaaaaaaatgctattgttgctgatattacaatgagagcaatgtgattccttgatcagtggagtaatgctcagaaatctcttattgagacgtcttggtcaggttatacgatagatgacggagctgagcaatgggtcgttccaagtgaaaataaaatcaaggtcaatgttaatgctgctttctttaatggtggtaacaagtacgggtgtggttttgtcgccagagatcatcacggtatgctagttgaaggaaaaacacttttgttcactggtacggcatctcctgaactagctgaatctataggcgtgcgggaagcgatgagttggataaaaagtcatggatggcaacatgttacattggaaaccaattgtcttacggtggttcaagcgcttagaagctcaatggacatgtattttcccctttttggccaagttatcctggattgtaaaaagttgttatcttattt

SEQ ID NO: 230278 - DNA, 1169 bp, Cannabis indica
gttaatgggggctatagcccccatataagcactactgggtccgtccctgcatgtgtattctagattcattattcatatatgctaattttgacgtatctatctctttaagtaagggaagctaaggacttaaaaatctctttcataaaatatttaagagaattatttgatatatcatttttaatttttattttaaaatttacaatttgggttgtcctagtattttttatgtgagttattatataaattttgatggtcatctaaattgttctcttaattattatatagaattctgtagaaaatattaaaaaatttaaagtgtaaaattttttaaaaaaaaaaaaaaaaaaaaaaaaaattactctaatatttaatagaatgcccaattgattattgcgtaccaaattaatgttgatagccgtataggaaagaaccctaacccatcaatattggaggtcgtgatcgttttattcatataaccaattcttgtatacagagtcattgtggacgcattatcgttttgcactttctatatatttaattactaatatttaaatgtcccaacacttaagtttagatagctgtggttctaataatattctatgagggaacgtactcattgtaaagctaaacaaataatgggaaatcttttattcattaatgatcatcgtgtaataatatctaccgttcgatgtacgtaatacacaaaataaaaaatgatagaattaaatagcacagcacagtaaattacattatgtgtaacgggactttcttaatatattgtttgtatacatactgtctacatacgtatataattgtgtgcaacatgagatgagatgagtgcgcatttgacactaacatgcacatttcttaggccggctaacattattatgaattttttagtacgtaagtatagggtaatattatggtaggaccgagcaaaagttccctattggtagagaatttttttttaccgttaattttagatcttgtggttattatgatgtaaagtatatactcttactatagaactgcttgtatacaattaaaactttatacatattataataatatttaataatatattaatttttaaaaataaaataatattaataattaaaaattaattaatttttatttttaattattattatttttaaaattaatttaaa

SEQ ID NO: 230279 - DNA, 1597 bp, Cannabis indica
cattgctgctagttggaaatctttaacaaactctaaccccatctctgttgtccttggtaacttggatgaatgtgctgttaatttacagaaatggcattttgaaaaatatggtaacatgaagagaagaataacagatgcacaattacaagttgaaactctcaataacagtccccatcgtacaccagcagctatgacttctttgaaaaattctgaatctttgttggatgaattgttggagcaagaggagatttattggcaacagcgctcccgcgttgattggttacaagcaggagaccgaaacactaaattttttcacgctaaagcctcagcaaggaagtcgaataacacaataaaattcttgattgatgagaatggtaatcgggtttcttccaagtctgaacttgcagctgccatccacgactactttgctgaaattttttctacttctacattggatgaagttgcacttgctaccaccttaagcaccatcccttcaacagttacagcagagatgaatgacacccttcttaaaccttttgaagctactgaagtcgaggctgctctgcactcaatggcacccgataagagtccgggcatcgatggcatgtctccaatgttttaccaacataattgggctgtagttggtcacttagttacagctgctgttttaagtgttttaaatgatggagctgatcctacaagtcttaacaaaacacttattacactaattcccaagatcaagaagccacaacgattacaagacttccgtcccattagtctttgtactgttatctccaagcttgtcaccaaggtgcttgttaaccgctttaaacatgtccttccttatgttatttcagaatcacaaagtgccttcttgcccaatcgtttaattacggacaatgttctagtagcttttgagttggtcaatgctattaagaacaaaacatcgggccgcaaaggtgttgcttcgttaaaacttgacatgagtaaagcatttgaccgagttgaatggaatttcattgagaaggtcatgggtaagatgggatttgctagtgattggataaggctgattatgagctgtttgcgtactaatagcttctcctttatcttaaatggtgaggtcacgggatcactccttccatcaagagggctccgtcaaggttgtccactatcaccatacttgtttttaatctgttctgaagccttgtccagattactccaacatgaagaagaagttggtcatcttaatgggtttaagttaacaagacatgctccctcgatctctcatttgtttttcgcggacgatagccttcttttctgccaagctaatgagtcctcttgccttgcccttaaaagatcattggatatctaccacaaagcttcaggtcaagttctcaattcagacaaatctgttatgtccttctcaccaaatacaacactggcggctcaagtctttttccatcgacatcttaacatgccaatctgtgaatgccacgaacgatatcttggtttgccttcctactctgggagggataaaaagaggatgtttagtgacattaaagagaaaatctggagacttatgcatacttggagtgag

SEQ ID NO: 230280 - DNA, 1160 bp, Cannabis indica
ggagaagagggaatgacagagggtgagccacctagatacaaagctacattagtagctaaggggttcacacatgttgaggtggtagattatacaaacattttctcacctattatgaagtaaactataagaatgatgctagctattgctgcacacaatgacttggaggttgagcagttagatgtcaaaactgctttcttaaatggttttctggatgaagagattttcatggagcaaccacctggtttttaggtggaaaatggtaaaatagatttggttttcttgcttaaaagattactgtataggttgaagcaatcacctagacagtggcatctaaggttcaatctatttgttcaaggtattggattttcaagatctaaatttgactcttgtctctactacaaggaactagggacacctaaggttgtgtacctattactctatgttgatgacacgatgatcattagcaaagacaagactaaaattcaagtcattaaaaacaaactaaattttgaatttgaaatgaaagacttgggagctaccaagaaaattctggagatagaagtcattagaagtaggcaagaaggaaagatgatgctgacttggagaagttacattgagaaagtagtcaagaaattcaacttggattcatccaagaccactgttgtgccacttgctgagcattttaaactatcaaatgaatattgtcctaagactgaaactgagagagaatacatgaaggggtaccttatgatatggttgttggatgccttatgtatatcatggttagcattaggtctgatatagcacattctctaagtgtattaagcaggtttatggcaaacccacagttagaacactcgaatgtagtgaaatggctgattagatacttgaaagggacaatcaagtatggtctgatatatcaaagagacacatctaatgtgaggttagaaggttttgttgatgctgattatgcatcaaacatggataatagaagatccactactacctatgtgttcatggtcaacagagttgcatatgttgaaaatcacaacaacaaccggtggtggcactctcaactacaaaatttgaattcatggccaccactaaagctttcaaggaagctatttggttacaggaaacactacaagaattacaactgc

SEQ ID NO: 230281 - DNA, 2039 bp, Cannabis indica
ttaaaaaaaaaaattaataataagtttaatattggtttgatcacgtggtgtggtattaaacttggagttatattgtcgtggatcatgcaattcgatgagaatatatttactttaatactttaccaaacaaataataatcattaaattataaaagcctttcttaattttcttttttctctttcaaatttttattctctcactaaatgtaaatattaaatactattacttaatatatcacacgtacaattattattaaattcattcattcctctctttctcttcccaaaattacatgtgcaaagacctaattcatagagtgtcctttattagtaagtatgttactcttactgcctagattagggatgaaaattagattaaaaaaataataattagtgcctaacatcttctaacatattatatgtctttatattgatataattaaatatagaattctcatttaatttaataatttttatgaaatatccttttattataatattcatttatatatgcatatgcacaaattaattaatatagagtatatgatcatcaccaaatgtcttccatgaaattatttgggaatattgagctattaatgtataaagaatatatggctaaacaataaatttagtgatgagtataatcaccaatacaatttgtgttgtgtgtactatcttaaattaaatctctttgttttaaaattaaaaaaatattgtgaatgagaatatattttatatattttttttcttaaggctagtaatcgtcccgtgtagtaggtaggttttctcttctatgtgatttttttgtgaataatttttcacataaatttgtgtattattattattatttatttttcttgttattttaatatgatgactaggccaatttgaaagagtttagtagctacctaaaaataaaacttaaaaacaatttagttagaaagtaataaaaaacagaaataaattaaatgatgaataaaaataataagaatgaaatagaaatcgaaatcgatttaaagaagaaaaattattccaccacatgctaaaagagaaaaagaaaaggttttgttgcattaaaaatcttaaatataacaaaatattttttttatataatcattatttataaaatttcattgtttttctcaaccaaacacggcataacataacataatatataatatatagtaaattttagtgggacgaaagggacatggaaaattggggaacattggcaaagacaaacgaatgaaattcctatttttagaccaatttgtagattatatgcataaaaccaatattaatttttggggtaatatattgtaggaggtctcgctataatttctacgaaacttcttacaaattctctcacaaactattattctttttggatttttttaaatttttttataatgggacaacttgatacacatgaatgtaaaaaatagagtgactaatataaaatttaattagtataaatttaatgtttatttttaacggtataagtagtttgtaaattgtaattttttttctaattactttgttttttattttcttaaacatgacaaaattttagattattgagtttaaacagaaacatgtagtatcaattattttcaagtatttttttaatgaattcaaaacagaatttatacggatgaaactggaacaaaactataaatttataaatatatattgattatttatgttgcttacaaacttaaaaattttgttacttatatggttatttatcttataattataaaataaatattatatataaaatatttgtatgagatataaatagtaatgattttaaattaatttctcctttttctttaagggaagtcatttattaaccaaagagaaactacaacgaaattggcaagtccaacaaaacaattaggatgaacaactagggttatcccattccaaccagccaaagctttctttgacaaagcataagtatgcttttttttttcttccatatattatgttactataaaaagtatcatttcaaattattgtgcacaaatttcaaaa

SEQ ID NO: 230282 - DNA, 2739 bp, Cannabis indica
atgcatcgggtctcctatctctcaaagacgacaattgtttcttaaaatattgtgacaactgttcccatgaagtaatgaagtgcttagtgaatttatcgaatcaaatgctagctgctcccatgagggatatgggaaataatatgtagcataaattattccctacattactggctcgcattatggtattgaaattgtttcagtgagttattggttagttgtcccatcataaggcgtaacatgtggattcttaaaccctttcgagaattgagaatttatatatccaggtgaaatggttctaactccttgtctcagtcatactcgaggagctttccatactctatatcttgatatctcctgaacctgtcttctaactgaatgacccttgtctgtattaagtcatcagtgggttgattgagttgcccacacacttgtggagcatttacctattttaaatctcccctctcgagatctggtgcattcatattaactgctctagtaagtcagggtgcctttggttcagttgatctcggagatcagattggttgcacatattctggcatcgctcttgcctattaacatgagtgatcactgatcgaatgggtgaaatacttttttagtaataactttgcaagttgttgacgctttcctgttcatctcgatattcccaacaaggattcatctctcctagtggtggattttcccatgtgcgagatctggaggattgactttgcctttgggtcctccttgacccaatttggattgtgtttgattatgatcctcgagttggccttcgcctttcaaacacattggtgacccaatcttcgcttaggtaagtatacatactgtccctttcattcctcctaggtccgcgcagtggatgtgttaggcaagtagatcgattaggtggttgttcatttatatttttgccaattttgtgagatgactgctgaccttttgatcgtgtttgcctcaaagtagtggcaccatcttctcttcatgtaggaccccttccttggtttggtctgctatgagttcaacttccttggggttctttccctgggcaatgcaccgtcttctcttctcttctcttacttgcttgcctggttgagtgtttactattatgaggaagttttagttttttctggggagatgcattttcttcgagttttaatttcaatcaaagactctcaatgaaagcaccaaattattaatacaaaattttgttaacaaaaatgagactctttgaatgaaactaaatgaaatcaaagtaataacctttatataattaatagtaacaacatttaataagacaagataatttttacgtagtttgtagttaaatctacatagtccacgagtccatattatttttgagttgtaaatccttctagaatacaatatatatagtataaaatataatgaatactactgggttctctacacttattcttttggggtggttactctagaaaaatgaccctcccctatgtcataggttctatccctatttataggattttttatgaatggtcgttattccctttggccttatctagataattgctcatgaaatatggacaatctcaatgtttcatatttacatcttgtgtgataattgaattaactgtcaataactgttatttgtccttatttgaaaaagtagtttctttgccaaggtgacatactcaaaatatgatttgcattcttcaatggcaataggaatgactgggcgtatcttgtgagacataggtcgaggcgtctctcttgcttttgctgtcttagataagtcttaagatagcttttcaagattgtatcttttgtgctccttaggattaatcctcttattttatgattgtatctttcgtgcttcttaagatcaatcctatcgcattgctcctatggtattcgagatgactcgttttttctttatgtgttcttgtttttctccacaagatacttgttatgttgctcagtcctaaatggattttgatttttgttgtctcggcaattactatctttccaatttaatactttttaattatccttataaaattttaacgcacttaagtacataattaattgcagtacatttttagatgatgtaactcttacattcctctacatttatatatcaactttgtttctgaattcgtgtccacgtgtcatgttcatactgactgaaatatgggcataacactaattaataaaaaattaagaattattttgttacttagttcgcaagttactttcataattatatgtttaatacataaattttattaaatctcgaatatataattattcatgattatagtgttgttaacatagtggaacataattatgattatatacttcaaactatttagtcccatgatttatcagtttactagattaatctgacgtgataatcaacaatgtggtttgcttacacttagataagtggaatgtattttccaaaatattagtagagtaaacttgtattagatgtatcaactatacatcggactggaccaatattgacagtggaaagatataataaacttactattatatcttttataagtcaatgtcacttagttggtcttagatcaactgatctcaatcctgagatgattaagctttagcttaactatactatatggttttattgacttgttcgtcgcctgcttactcataggactagcccatacttacatcttaggaacacgctagtgtgattgagtgggagcattgatcata

SEQ ID NO: 230283 - DNA, 1913 bp, Cannabis indica
gtcgaacctctataaatctttgtgcctttacatttattatcattctacacgtgacagtcataagcgaaatccaatcctagtcagactctgcgtcggttggctaaatccacagtcaattggatccaacacatatcctgagttatgaaaccctagagctccaaccagatttatcttatgaggaacaaccagtgtagatccctgataagaaggataaagttcttcaaaacaagaccataattttggtcaaggtactctggagaattagtaaggtggaggaagtcacccgggaattagagttcaacatgagggctcagtatccagagttgtttaggttagattttgaggacgaaacccttttaacgggaggataattgtaatgaccgcttagatttattatagatattagtagataataattaggacttattgtcaaaaataggctttaaattattatttttgcaattatagagataaatttaaattctaggtgtattatatatgttatatatgaaattttttatttttcatatttttatgttcgataatagtgaaatgtaacgatttggccattagagtttcttaaatatggttgagtattttataattagtgggacaagaaagttagacatttagagtgtcgggattagtaggggttatatttttgaatcattttacctctaggtttaattttgcttcatggtgaagaaatgggcaaattagtaattttgccttaagttatctttagtggggaccttaatggtgtggaacaattcaaaacttattgacttaattaagcaaattaaaaggaattcattaatccaaaaaaaggaaaaaaaaatcaagaaaaaccatttccctctttctctctttcgttggttcggcttaagcaaacccccataaaccagacctttttccttcattttcagaccagaagttcaagggaaatttagtaggaagctaaggattttcatagctaagccaaggtaatatcttttccctttgttttctttagttaaagactaggtttttgcatgcaattgttaagttaaatttaatgtacaaattagtgatgtttggaaatattttctcaagttatttcttggataattatactgttttaagttggttttggtatgtttaagcatgagttgagctttcaagctcaaacttgaccctttagtggtggtttttgtttttgaggtgtgatgatgtaattttctgttagaatgtgttatttagcttaaataggtattttgagactttgtaaaagttttaaagtagttttgatttgagaatgacatttttagaaaatttgcagtagaaaacaatagacaatttttctagaaatggtaccgtttttaacgagtaaagacccaaaaaaacagtttgctttttttttagaattagcctaccgttttttgaggtatttttcccgaagtcccattttttgtattttctcgatatttagggtattgccactatatttattgataggaaaacttttaattttgagtctaaatccccaaaaagtaatttactagatcacttaccagttcatttatattatgactagagccttaaaatcatcgagcagcagtttccactcatgttgaccgacacacttaaattcagaagtgaggttatattagtatgatagttgcatacatgtttagcgtacatattttatgattgcctagtagataacatatcagcaagagcggtattagtgtacatagagttgcactgaatactgacgaatatatgtttggctaagtataaattgatgctaccaccttggttatattagagtaccgagtataggctgatattatgatcaatcgtactgtcgtacgaacgttcctgacctagtacgcgttgaatgcacgataagattatgattgagagtatgggcg

SEQ ID NO: 230284 - DNA, 1558 bp, Cannabis indica
aaaaaaaaaattaaaagaaaaatgaagaggataattcctagaatattatttattttggttcgtgtttgtttgttatgacttatgactagacttggtgctggatttttagtgtgaatttacggttttacaccgatcttatctttttgagctggcatgtgataaatatggtacattcttttcttttggaaaaagaaaaataaaggtagagtcatctaaaatcgtccttatcagattagggttgatctttaaataataataataataatatttatggagtggactcatgatgatgataccttatggtgaatgtttataattgactatagaacagaacaaaaccatgtgatttctctccttatcacttatcgcccatagtcttcttttattattattaattttttctaaattataactccaatagttggcgcttggcggacaagattaagttgaatagaaccaaaaagtagttagtggggtattttttttttcaaaaaaaatagaatagaagaagacaatttttttaagcaaatataaaacttttattaatttgctaagttggctaaaaaaagaaaggactctaaaccaataagagtatttttcctgttaaatatttatctcgtgaacaagatgctttaataaaactataagtattcatgttagtagatcgtttaacaaaaacaagaaaatattgtttaaagatgcaagaagtctacgataatattctataactccataaaaataaagtatatgtaatgaagtttgaatagcttggactgctaccaagtaatttgactccagctctatttttcgctatggttgagttttaatccaattttacgcttcctttatactaattgcttcagccaaattcagaacgcctataccagcaaaaatgtgtgacttagccatctctaattctccttgagagtcacgagcgactatgccaaaacaaaactcagctcgatcatggaaaatgggggcatcaacagtttaccttgattgtattctcctatggcttaaaccaagattcaatttcatcaaacagcttgaaaaactgaaaaaagaagcctctgaacctttattttggaccaacttccattgcacaagacaaatcacatatgatataagaataccatctactgtagcatacttttgattccaaaccaactcgttttgagccttccataactcccagcacaacataataacctccgcatacttgtccttactgcacctttgcaaaatttgatcaaaccaactgcaaaaatcagtagcaacaatcctaaccccaatcaaaagcctctgccaacattgagcagggaatgaacaggaaataaatgcatggaaaatagttttctcacctctttggaaaatcgaacacatgatttgaactaggactctcttaccacttaattgagtcaaggcgtaaaaataatttgaagcagtccgccataccaaattgagagcttttagtggtaccttcaaattccagagcttgcgccagaacccagaagaattagtagcaatccaatttcctttctgagcttgtatcaacttg

SEQ ID NO: 230285 - DNA, 1494 bp, Cannabis indica
tttttttgaatgggaatggatgatattattaattcaaatccgcaatcacaatcgatttgagagtactaggaagagtactctccgaaaaactacaatcataccaataacaagagccatgagccaaacaatgggcagccttgttagcagatcgcttaacatgagaaacagttacattaaataaagaggacaatagaactttgcaatcttttacaacgattccaaacatcgaaggcatatcaatttgactttgcaaagcttgaacaacagtaaggcaatccgtctcgatcacaacatttgtcaagttagaatcttttatccaactcaaggcttcttttatgctaattattttagcaaaaggtgcatttgagacgccattcgagaaagtagaagaggcgaaaatgacagccccattagaatcatgagcaatgaaacatgttccaaaagagttggtagcgtcaaatgtagctccattgacattaattttgattattccttcagctggtttggaccagaagtcgcagttgttgctgtaattggagttcagatgcaaaggttcaaaacgcaaactctgtgcagactgccattggccgagagtttagtgagttgtagaaactacatcagcagcagaacatgtgcgattattccaaatgagattgttacgtgctttccaaatggaccaactgaccatcagaatttctgctataaaatctccaccatgccgtgaccaaattgcagcaaaccagtcgaaaaaactggtgcaactcgaagggagagagacacggctgatctattctagcaggatatcgaaaaaggacaatcaataaacagatgataggtggtttcagggacatcattgcagaatacacagctagcttcaacaggtacatgtttaatccgaagttaaacccgagtagctaaacaatcagttaaagctctccaagcaaaatgaagaacttttggtgaaactttgattttccaaaactttttccaaaatagaaccttcatcacttgcccaattaccttttgattcttgaatatgtctgtaagcgctcttgacagaatagaaacctgctgcctctttacaccagtaccaaacatcatcaatagattgagtgctaagagggatttgaagaattatttgagcatctcttggactaaagatatctaagattatgtcatgatcccactctctttggttgattttcatgagctggttaaccttacaattagctaggctcggatgggaagaagtaatacacggctgagactcagttgggagccaaggagtgtgcaaaacatcagtggaaatacccgagccaattctgattcttgtaatgtgttaagttttactgttgttccactattatttttagttgttccactatatattgtttctaatttttatgttttgttattttacgattattttataaaaagacagtatttttgtaaaaatttctgtgtagcagtaaaattgtaaacttttgtcaaaaa

SEQ ID NO: 230286 - DNA, 860 bp, Cannabis indica
acattgctaatatcatttgatttagctaaaattgatgaaagtggttcttaattttattcaatttattttcaatagtcaaagactatatcaaacagcgataacttgtgtgaggtaaaggacacatttgtaaggctatcttcaatatagagatttaaggttgtttatttctaaaattttatatacatttgaaatgttttaagtagttttgcagttttaagttttaaagacaataataaaatatatgcaaaagttgtattgttagttatagttagtttttcacctcaattaagttagtggaaaattcagttaggttgggctagttagttatatttctcgacgaactcagctcatccattttattcctatttaaaggcttgtgtattcagatcaagtcaaataaatgagatacatttctttctaatctctctctctcttttcctcatatggtatcagaagaaatcttgtccacaacatccatggcgagactttccacatgctctcaagatggtgttgccccatctacaattgagcatccttcatcataaatcaatcatgatgtcacttcctactcccttctttaatattatattcaagatgggtgtaataaaactttcacccatcttgaggagagatattaggattagttatagttagctttaatctcagttaagtagtggacaattcagttaggtgtcaactggttagttatatttttcctaactagctcaagtcatctatttactgtagttgtgtattcaaatcatatcaagttaagtaaatgagatacatttacttcttatctactctctcttttactcatgagtaggtaagcaaaatgtgataaaaagaagctaaaaaag

SEQ ID NO: 230287 - DNA, 716 bp, Cannabis indica
acactttatatagaatagatatatatatatatatatatatatataaaaaagagtacatagacatttttgattataagtagtaacaaaataattttaaaaaagaaaaaaaaaacaaaacaacaaaacaatacaaataataagagtattgctttgcccaacacaaaacaacacaaataaataaatgttgtgtactaagcttattgtgaaatgacattcacagctgtcaaattttattgtgaagacaagatagtcatgattttagctattattattaatttatgtttgttttttcaaagaaaaaatttcaccacgtttgaacccctttaatggaaaatttcaatagaaaaaaagttaaagaaaaaaacaagatatacgttactataacatttgtgagttttaggagccataaatataacctttaaaagtaatcgttatatctgtatttttattttggagttttttttgtttttacattttataaatatttttttttttatttttacagaattctacacagaaacccatgtattaattaacgaagcaacttaaatcacaactaaaatctgtataacaacctacataaaaaccactgaagaaaccactggagcaattaccctaaccgtacataaatttaaaaataaaaataaaaataatatatatatcacagatctaaacatattcttaaaaatactttgtagaaaaccctaaatcataaa

SEQ ID NO: 230288 - DNA, 1259 bp, Cannabis indica
aattagtaatttttccccttgaattttagtatgtagtaaatcgtgccccctgaatttttttagccgttaaaaattcccccgaactattgagatggttgaccagtacaaggacgaattttatattatataaatctccggcccttgtaagaaaaatgtttaaaacttgaattctcaatcaaagcccactctaaagtgggtcaagttaggtatcacacgagattaatagcccgaatgtatttaagttcggcccatcataaacccagcttttgaggattatgccgacatattttgggacttggttctttattttaggatgatttaattcatttataactaaataaataagattaatttactattatgatcttttatgtaaaaacaacatatataaaatatgtcatatttttttgtgactaggtctaaaacaatatatataaatatttatatatattttttaattaagggtctaaattaaaattcttaaaaagtgaaactttcaatttcgagatttttacactacttacggattttgttttattatatggaatttcataaaagcataaacaacataatataaatataaagcaacataaaaatagcataaaatcattatattgtaatgtttttaagaaacaaccgtttgtattttggtataaattacttcaaattagtaaaaatgtagatcctcatttttgtaatttctttgacttttttagatatttataaaaaaatttccttaatcaaattaatgtgtcctcacatgagaatttgagtgagtttttcggtgactaatcacatcgcctcaacagtggtacttcaatgagtcatttgaggtttgggattgagtctcgaatttgaatttgggcatcgaggtctaggtttggatccaaggtttggggtcggggcatgggctcggctttggattcgggtctaggtcgaggtcagaggtctacaccagagtttggggtccgagtcatagtctggtttcaatgtcggggccagagttcaagttcgagttcaagtctgggtccgagtttgagccaaggtctagtgtttggactaagggtccagagtgtggggtcgggtgtggagtttgggtccagggccaagtgtatggttaagacactactacaagaaacggcattttatccggtttttaaggcttttatcccagttttcgctaaaatgaaaccgggatgtatgccagtgggataaaaagtatttaaaaaaccggagtaaataggtacgtttattaccgg

SEQ ID NO: 230289 - DNA, 3596 bp, Cannabis indica
tctcaactaagtttacatcaccacctcgctcaccctcatgacctctaccaacattaaacaaatgtgcaccattacgttggacacttctgaacctacatccttgtgttgtgctaccaaatcttcctcaaaattagtaatcgaagaggtagtgcacttgccttgtcaagacgttcagcgaaccaactttacagtgtgaaccttatgaactcaaccgtagtagttattggatatttccaaaattcagtcgtcacgttgttgaggctttcaacaacattgttaatcattatgttgtacctatcgcctggacaataaggacgagtaacccttttccaatcttatactctcaatataagcagtgatggtaggatccattcgttgaagcacctatcagattctctctttgaccatgcgtaagcggccaaccatatttgcgtgttatagcatgcacaatgacatgctttggggaaaacaacctcgataacatgttcaatgctttgatgcttatccgatataaacactaagttttgaacctccccaatcgcttcccttaacttctacaagaaatactttcaagagtcgtgattctcactgtcaacaattacaaaggcaatcagagacaattagttgtttacatcgtacgcacaacaactaacattgtgcccccataccttattttcaagaatgtagacaaaacttaaatcccctcctacaagcgtctagagaccagaaacagtacttgaacctattgtcctctatgaccatgtctgtaataatactcaaattcttatgttccaatatgtataagtaactaggtaactgacgataagcttttgctggcctacccctcacatacataagttcattctccctgcacctccaagccttctcataactcatcttgatgtcataatcctcaaacatatatctctgtatgtcttttatcttatacttagttccacctaatttgaacttgttcttaataaggtggccaacaacccatggtgctgcttgacgattatcagcatgtctagaatacaggttacatgtgtgttcgttgtggaacacagtgacctcaaacatgtcacaacatgccttcttcctccccctcactctccatttgcaatttgaatccttgcaagttgtgtacaatacatcggtgtcagacttcctcaccatgaactcaaaattcattttcaatgcaaaccttcccactacatttttcaatttacttttattttgtgtacaacttgccaacgtatatttctcttgaaagtgtaccactaagagaagttgtataaatattattttcctttatgtcttcttttgtccacacaataggtttgaagtttgtataaacttcaaaattggatggtacagtactacgagtaggacctgacctactgctactagtgcctggtgtttggtgattttcactacaggtagttcttttttcttgctctatcctctggttccttggcagtagtggaggtagttctaacctcaaagtaggtacctctacaacttcattaacttccaactccacatcaacatcctcgttcaaatctaccacaggatcattgttattaaagggagtatcaaacccatcaaactggttacatgcattgtcaaccttgtcctcatctatattagtaggggcctgctcattcaaacctaccactggatctgtttatgggacaaaactcccaacaacacttagacccaaaaaattgcatgcctcttaaccttagtcccaaacagtggtagaaagttctccacactcattttgcattcattcttaagaacaatcttacttgattatctttcactaaaaccttcggcggtatcatatatcttttcatgtacatgtaacacacctccactttcagttcatacacaagatgatctatatccaactcttcatacaaatttttttgcatcttctgtaaagtagtgttaaccttaaacattaacatctttcttttgcattattgaatatccagttgaaacctaggtttcaactgcccaagccccatcataaagtacaaccacaaatacaattaaatctgtaaaaaaaggaaaaaccttatttaacaaaaatatgttgagaaatatcacaagtgacatcataaaatatcgataaggttgtcgctacatatcgcaacatgtcgataagtatcatcaccaatatataacttgaaaaatattgacaaatatcgcgaatgatgtcgatagacatcatgaccatcgtagttagaaaacaaaaattgaatacgtcataaatatagtcgcaacttgtcgccaaaaaatactaataggtcatcccacacattcagtattctctaatgtcgctacatatcgtaaacatgtcgctaaatatcgttaaatatcatccttaacatttagtatgttctaatgtcactaaatatcatgaaaagtattgcaaaatatcgctaacatacgagaaaaaccaaaaaatgcaaaattcttgcagctcgagtttcaggaataacacaattaaaataaaagattgatatatgcaggtctattcatttcaaacttgaggggaaagaaccgttaaacttaaactacaggaaggccaaatcagcaaaaactgctgaaacggcaactggagggtaacctccatcccaaaaataaaaagccttaactactaaggcttgctttcctaagcaatgagctactctaatacaagttttaggaacaaagaagactcccctacacttagttatgatcatcgctttacgaatatcattaataagaaattctaaatcacctccaaaagacgagatcaagttaactttgttgacatcgttaaggcaatccaagcggagagtgaaattgttcatgttcaatcttctagcctaaagaaagccatccttgattgctctgagctctgctatcatccgggataccgaatgagacatgaaagaggtgaaggagtgaaccactttacccgtgtggtcccttataattccaactgaactgctgcattttccttgttcatccacgacaacatcaacgttgatcaccagattgccgtctttgggtggtttcaatcaacaaacatcaagttttatgttctcctcctcggtcctttgctggccgtttgatgcttggaactcttccaaaatatttgttgctatttcaataatatccgactcttaggggataagttgttatagagcataatattccgactatataacaactgccaagagatcatcacgaataattcaaaattagcagtggtcagattttccttaaggttccaaaggaaaataggaatgtctaggttggaccatttgttaattattaaataaattacataatacaactaaaaataactcaatctaacaataattattaaataaattatataccctttttttcaagaattatgttggtaggggggttgggatgctctacacttggttattaatggtgctccgacaaaagtgtgtgtgtacgagtttgaagagataaaaagagagtgaatagaacgagagggaaagagatgagttttaattttgttatttaaaaagtaaaattaatgataaaaaaaataaaataacatattt

SEQ ID NO: 230290 - DNA, 1394 bp, Cannabis indica
atacttgtgagtagatctaagttcctggtaaaatatatttccaacaattggaatcccgacttcttctgaaataaatgagaggaccactctttcaagaaaagaaaatttgaaacctctgcctccctctgctgtaggccgcacaaaattcaccggaagcatcctgctgtcattcgtgacttcccatgggatactaaacagatggataatgattcaagagtggtgtttgatgagccttctgaggactcgtcgaaatcattgagccgatccggaattatgaaaaatcctttagttggatcgtttgttgttgaagactctggttctagcgtctctgcttactctcatacccctgtggaggagaatgtcgcatctcctccacaggagtcatgagaggcattgcttggaattgtagagggttggggcagacctctacagttctcgaactgaagtccctgattagctctcgctctccggattttgtttttctgtccgagcttaaagtggatgctaaaccgctggtacgtactcttaaaaatctccacttttactttaatatttatgttcctccgactggtgttgcgggtggcattattttggcttggaagtcgggatttagttttgaatgtttatcttgttcgcgtaatcatatatctgggctagtgtattcgaaccccccttttcacccgtggctcctctcgtgtgtttatggccctccttatttgaacactaagaaaaagttttggtctgatttcttgagtttgggagataagtttggtggtccttggcttattttgggtgatacgaattttgttctctatgattctgaaagagaaggctcctcgggtcgggatccttttatcccggtcatctataatcttgttgcctcttgtggtctaatcaatatgcctattcaaggggataagatgacttggggtaatcaccgttctgggcggagtcatgtaaagtctgcccttgataaagggttagtcaatgtacactggctcaatttatttccaaaagcgattctctgttccattcagactagcaactctgaccataggcctccgtgcctcctatcgaggggtatggatcaaaagttccagagattctttaaatttgaagaagggtggactcgagatgagcgaagcaagctggtagttgacaacgcttcgaagtctgttagtcatccttgcccccctgcccgagtgtttaaaaaagtgggggcaacaagggtagctctcttgcattggaatcggactcaatttggtaaactagatatggtcatcaaggagcttgaaaatcaactcaacactctgcagagcctttgtgctggatcccgggactggaatcgggagtgtgatatccggcgagcgctgaatgaatctctagaaagaaag

SEQ ID NO: 230291 - DNA, 1364 bp, Cannabis indica
gagatgtatcggtgtatccccttataataccattatagaatttttacaaaaatttatacataaatagtagtgtaatgatgaatcctaaaagtatgtatctatatttttaaagaatatttatatgtttagtgtcaacaaattagataagttagtaaaataaatcttctcagcaactatacatgccacttagttataagacgtttttaaaatttagtgaaccattaaaaaaaatattttaagactcttaattaaaaaaaatggtagtttataaaggagagaaaaggttttttggacccctaaattaagtggaccttacgtacaagcctaatctgcttatgctcaaaaattgagcacggtcatatgaaaaaaaataaaaagaaaatttattaaaccaaaaagagtttcaaaaacaaagctctagaatgggaaaagaaatgtaataattgaatttgaaagaacaaattaagttgtgattattaccaatgtaccattgcttttgcaaagttggagctgtgtagatattggaaaaagattcataaaatgcagtgtcattgacaccagtcagaccatcctcataaaaattgtcacccgtggatatcacaaactcaatttccagtttctctccaattatgcccatctatacagttacaacaattacaaccaacattttatataagaatatataatgatttcttgataagacagcatatatcaacttcaggggttccaaatccaaaatccaaattaatatataatggaatatacgtggaattatgctttggatataacactattacacgtaacagtttatgaataataaaccctgttccgtaacaagtaccattattatttaattgatcatccaatacgttttgggaccattgatttttcaaatatgtatctcatctcatcgcaatttttattttctgcgtaattgttttgatgaattatatatgtacgtatataataaaagggtaggaattaagaaccaaaagaaagaagtgtctttattaattttcttatgtatatatgttacgtatcaatctactattcgtaatttatgtgaccccattaatattagtacaccactattttgacaatagatgattcaatttcaaatactataagatatatgtatatacttaattagtaaacttttttattaatgctatttattactttaaacctacacatacatatctatatataaatatagattgggaattcaatcatgactttgatgaattcatgcataataattcagcttattaattactagtacggtttatatactatttgatgatatatatatatatatatatatagagacaattaaccctacaataagtcaatttaacttaatt

SEQ ID NO: 230292 - DNA, 1958 bp, Cannabis indica
tgtgaaataaattatttcaactttaattaatggtataaattattttgaatttattgtttaatatttcaaaatattataatataaaccatcgtataaaataattgagattataactgttggaagcaaaaatatgaaaaggatacatccatacatacctttattttttgataaaattttaaggtgttatataataattcaaaatgtaatacacatttgattaaaaattagactatgaatataatttatattttgggttctgttttattattattatttaaacaaagtcaaagtgtgagaaacattccataggagccgcacacacttgattgttggtgtaaaagaattttggtttttattaagtagagtaatatatataacaggtacaacgcaagcaatttatatacatatatatgcactgtatacaaacctcaaaaacaacgaaaatgtgccaacatttaccaccttatgcgaatgccccggaagtgcctattcatatatatttcgatgccttaacttacatgcaaatatctcttctccctaattaatattcattcttatcatctaaattcattacaacttccttaccaaaccagaaatatatataaatattattttgctctccctataaaagttaaatgatgaaaccatatccaactcatactatatatatttaatttctttttatgcctgtgcacttattttccttccatcatagcaagagaaacatttgtatatatatgtaggtaagaaagcacataatcataagagatttattaagataatttactgagcataatataataacattaatatataatgggtttctttaaaactctggcattattactagtagtggtaagtgtggtggagtggtgggaggtagcatcatcagccttccatcaattagtggggatgccttgtccaagagtattttgtcttcgaaggccagcgttcagggaagctaccctcttctcaaagaatgacttggagaaaggattctgctctcacagatggctttgacattggagtaagtttatgcatattctcattgtcatttactcaaccattttctcattgtcaagatcatctgtctatatgatacataatatatatatatatgctactgtgaattttttcattaatattccaagttttaattttgatttttattttatatatatttattcctttccattttgattaattctttaaattacttttgtggtaatatgccttttacgaaatacattaaatgcaatttccaattatatatgaggagttatggaataaatattaaatgcacagtaaagtgttggctgtattaacggttaattctagccttttttaagacgtattaattctctatctaaaacgattaaaaaaatattacacttgaaaataaaataattaaattccatatataactctactcaatagaaatgctggattttttttcttttaaaccatttgctcttattttcctaaaaaaatatattgagattctacatatttttaagatttttctttcattgtgtaataggttgatttggtaggagggtactacgacgcgggagacaacgtgaagtttaactttccaatggcgttttctacgaccatgctagcgtggagcgtgatagagttcggaaagtccatgggacaggacctcccacacgcgctggacgccatacgatggggcacagactacttccttaaggccacgagtgtccctggctttgtctttgtccaagttggagatccttatggagaccacatgtgttgggagaggcccgaagatatggacacccctagaacacccttcgccgtctccaaacagtttcctggctctgaggtttccgccgagatggctgccgctctcgcggcttcttccatggcctttcgctccactgatcggggatactctgctaggcttctgaaaagagccagaatggtatgaatat

SEQ ID NO: 230293 - DNA, 1434 bp, Cannabis indica
  modified_base (99)..(99): a, c, t, g, unknown or other
gagacaagtgatgcagcagggttatgtattttttgatcgtaagccaatggtgatgaagccctggaaccctatcgatgatttcacaacgagagtactaangtgccacttggttcagctaaagggctggacatcaaatactggggagaggcttctctgttcaaaattgcaggtcaactgggagttcctttagcaagtcgacaatgtcactaaaaatagggataggctgcaatatcccaggatcctcattcaagtaagtttagcacaagttttcctgaaaaaatcagttttatcgatgagtttgatcatgaagtggatcttgatgttaaatatgaatggttgcctttagtgtgttacaagtgttctggaattggccatagcacttctgattgcaggaaaaaagaggaaaaaaagaagcagggaaacaaatgtgggtgcctaagaaaccagttatgaatgcagagaaacagttggatgatgaagggtttcacaaggtcagcaaaggaaaaaaagtagtgtcaatgaagcagacagaaggggcaatgacaaagaatatgtttgaatccctccatgatgctactgatgttatagtaggctctgaggtggattgtgatataacagatcaggaatttgggcacaaaacaggaggggagggagatccctcgtcttcaaatggataggtttttatgctggaatgtgagagggattaacagccagaataagcataatgagatcaagcaattgatgtattcgaagcaagctgggtttgttagtctcttagaaacaaaggtgcaaaataagaatatggaaactctatatacaagtctctttcaaggttggtgtttctcaaacaataatccttggttagacaaagaaagaatagtaatagcttggcaaccaaatgtttactcaatagatattaaatattgctctagccaaataatgcactgttatgtgcaatcacagcagcaaagagggaaattttttgtgtcactgatctatgcttttaatgatgagaaaaagagggaagacctatgggctgacctagaggaattggctaagaaaattactgagccatggatcataatggaagatttcaatgagataatgaatggagatgaaagaattggaagaagagcacaatgtattccatctcagagattgcaagattgcatggagaactgtagcatggcagacttgaagtattcagggtccttatacacatggaacaacaaacaaaagcccatagagagaattttttccaaaatagatagagcaatggtaaattcacattggcttaatgcctttccttgttctgaagcggttttccttcctgaactgagtttcgatcatagtcctatcttggtgactatctatgaaaataggttatgtgggaggaaaccctttagatatttcaatatgtggaaacaagctgct

SEQ ID NO: 230294 - DNA, 1696 bp, Cannabis indica
cgcattttactacttgttattgtcgagcaccgatcctcccgttatggacgctgcaccataaccaccgtcttcgaccacttcttgtcaatcggtaagttcttcatttactcgttgttagagttttgagggaatcattaaggtgcacccgattctaggacactagttttagcagcgtcattcttgagaattttaggggttaaacaatgaccttttttactgacgtgccaacttttgacaggtatacaatgtctacctcggagaagaccagcctttctgagatggcagacaatagttcttctatcaggaaaaagtagaagctcgaggtgtctgcccttggaatggggggaatgaggggccatccctagccccttattctcaactgaggctaggccagcccagatctctcccctcagctctgccaagagtacctttggtagggtttaccttccccaagagggcagttccttttgatcctcttaatatacaaagggaaaaggaaactgagtagggccctgaaagggcatctagaggcgaagagctccaagttcgttggcaagcggtcgtgatgtgagcggtttgcaaagttgagattgcagacaacatgtacgcggtgcccccgacggggaagaccgtggaggtcgaggccctagagaaacaactgacctttaagttggggtgagaggccacagcgtttgctacagagctcttgaaccaagtgactgggaacacctccaaactgcccatggagacctaggcatctttcagtagcgcagatgcttttgcgctggcccattttgccaaccaacagaatggttgggtaagacttcgagatgattaccttcattttttctttttatttgtgtctgtttgccctttcgcttgttctggcagttcagctttctaactaagcctattttgacaggtggccctattggcagttggctgttgaggagactattatgatggtgacggagttggaacaggtcaaggcaactaactgcgacctgtgtgccactaaagagactttccgggccaagcttactgacagcaggtttcaaattgggggcctatagtaggccaactagtagctggaggaggagaatgcacgccaggcctacttcatacgaagtatgaaagccgttcacgacctttatatggagactgtggtgcagatatccgctgcaggtttatgctctcagtgaagcagcatccaatcttgaatctccaacaggcctcgtttgaaaaaaaaaaattctttgttgcttcttcttcttttttttttttgtatccttacttttctgtctacgaagacaattaatattttaccatggtcgcggggagcttttaatagtgaaatagggtctttctttttgttgttccttttcttggagatttgttgtagcagactgtctaggggttggttgcgttactgaagcacctggttccaacggccagtgcttcaacctttttccctttagtagacagaaaagctacgcagatccaaagcgtagggatgttgaattccagattggggattttgttttccttcagatatccccaatgaagggagttcaaagattcgggaagaaaggaaagttgagtcccaggttttttggtccgttcgagattcttgagaaagtagtttaggtagcttatcggttagtctacctcctactttatctggggttcataacgt

SEQ ID NO: 230295 - DNA, 1673 bp, Cannabis indica
ataaatttctgaaacttgtaataataataaatcgtttaatttcttgaatccctctaattgttccatcttagcttacgcttatgtaatgatgcaaagagattaatatttgtttgtacacatataagcgtgtaagccaaaccttcaatagtaattaatacactgtacacacactgacacaacatctatatctatctatttatatgatgacgatgatgatgatgatgatgatgatgatcacaatattgttatcttcttgttttgatatattaattaagaaaagaataaatggatttaattaattaaagaacctgttgttcaaactcgtaaacagagttgacgaggacaaagtgaggtttgtgtgtgttagagaattgattcaacaccatctgaaagtaagcagggtaagaagcagggacacccacaaaggaaggcatctcatcaagtgatgacagaaactccaacccttcaactgacacaggaaatgagtcgattgggagtttgagtaacccatggtggagagaatagtagatgtagttagaagttgaggactgagtgaagaagggccctgcagccaatccaaacttgttggccacatcaagacaccaatccaagaatgagtcatacacaacgcaccctattgggttattggactgcctgtgcctctctatcagctggctcagtgtcttggagccagcagcttggagtcggctcaggtagtcatccacgccagaggattgggcgaagccgcctgtgtcgaagccgtctgatatggtgtcgaagtggatggagggagggagtttgttggggttgggagtgaatgttttggagatgaagagagttgtggcaaaggtgacagtgagtccattgttgtgtgaaacaagtctcttgcagaattgaagaagtgggttgatatggccttgacttggataaggaaccactaacacatgaccaccataacctgatcctgatcctgcttctgctgccattgccactgccattcacattcacatcactacttgtatactagtctaatatttatagtataatgtgccgtatcaattactactctttctttattatttatatattggactggttgttcactaaatatgtatactccgtccctttactatatagattgtcaaattccacctcaatttcttttctttttctaataaatatatagcatacatttcaccatctctaatggatagtttataatttgagctaaaattaatttacaaattgagttaatattagtccaatttttatgaaaaatactaaaaagtacccgtatttgatttttttttcaatgttatattgttattggtgcaattaagtattggatatcatataatttaatataataactttttgagagtatcgttaattaatcacaaagagacacgtctagaaggttctatacaccattagtattttataatagtgttacaatacattagggataaaattaaatttttttactatataaaaaagtacaacaaaattaatgaaattttattacaattctattaaatatataaataaaatataaaaattattttttttgtagaaaaatataaaaaaaatattaattatgttaataaaaaataatatttattattattattttttgtgttgaatttggtataagttttaaaatgtgctaattt

SEQ ID NO: 230296 - DNA, 1770 bp, Cannabis indica
gataatcatcagcttcaatacctacttctgcaactgtaagctcttcaacttaagtctgatcagtgccattttctatctgatttgcaatggcaggctccacctcaacctcaaccggtttgtcactagagctttcttctggttttgtctcacccttagacttcatagccatttcatcttctctgaaaacaacatctctactcaataggcatttcttgtatcttggttctaagcaccatagcttgtaacctttcactcctttaggatatccaaggaatagacatttcagtgcccttaattggagtttgtcttgcttaatgtgggcatatgcagtgcatccaaacaccctgaggtgatcgtagctaggtggataccctgtccatttttcttgtggaattttgaagcctattgcagcagatggaaatctatttatgagataacttgctgtcttgactgcttctccctagaatggtctctcaagaccagcactgtgcatcatacatctaaccctctcagtaagtgtcttgttcattctttcagccgccaatccattttattgaggattcttggggactattttgtgtatgccaatgccttattttctgcaaaattcactgaattggttagaacaaaactcaagaccattgtcagtcctaagtttcttgactgtttttccagtttggttttcaacaagctttctccaagtgtcaaaggtattgaaagcttgatccttggatttgagtaagaaaacccaaactttcattgaaaaatcatcaatgatgcgtagaaagtagttgacacctcccaatgttttgatctttgatggcctccacaagtctgaatggatgtaattcagtggctctttgctggtgtgcataccagttgtgaactttgctttgcaacatttcccatagacacaatcttcacagaaacctagtcttccttcaagcttgccctttaacaatccttgtttttcaagctcttaaagacccctcacatgccctagcttcaggtgccatagcctggtttggtcaattccttgaactgttatagcaggtacccataacattttttccaattaaagaatacaaaccattctttaattcccctttcatcaccaatgtggagttctttgaaattttcaaaactccaccttccaccttgatgatgcaaccaatactgtccaacattccaatggaccataagtttcttctcaagtcaggaacatatctaacattttttagtgttcttggaatgccatcaaacatggtgatgacaactgagccaattccaagtacactacagaccttattgtttcccaatagaacagtaccccctgcgactttcttgaagtcactgaacatctcaattttgggacacatggaatgaacaacctgagtccataattcattcatcttcacaggccttactagagactaccaaaacatcaacagatgtgtagtcttgtgaagcaatgtcagcttctcccttattcttgccttgttctctggcaagtttggctttcaaagccctacactcatctctaaaatgtccttctttttgacagtagtagcattttttccctgacatgaactgagacttagattgattactagacttggacttattgtgatggttcttgaaaccttttttattagatccccctttggttaatagaccttctccattactatcccctatttcatcacttttcttttgaatttcttcagagttgagggcagactttacatctgtcattgttagtgattcttt

SEQ ID NO: 230297 - DNA, 1307 bp, Cannabis indica
atatatatatatatacattacactgctatatcgtaaattacttcaaaacaaaaaactaatgatcattaaatttcttttattttaatatatatgttacttatgtcgtgcatatatttaaggtacttgtaacttccttcaattaaatcacacccaacaacatcataatctcatagacatgtccttgtctgttgtgatatttaaaaaaaatgtagttacatgaaaaaaaaaatgattgatacgtgtttgatttagggttttaaatgaattttttgtaaacctgaataacctatctaaatcaaattaagataatttgtcgaaaattacgaactgaaaaatccgaccaaaatataacctgcttaatttttatactagatgagttgagaataatatcaaaccgtctaatcaatccgaattaagcaattaacctcatcactaacccaattaattattttaaatataatgttcaaactaatatgtttcttataatagttgatttgaactttgaattcaatttatatatatttgtctcattattacaattcactaaactataaaaaatgaatgtaaaatttaaaccggaccaaaccgactaatttcattaggtgagttactattttcttttttcttaattggacaggttgcacttagattttttgtaacccgatctttatattgggttgaataaaatgtaacataaaccgaccgacgtacacccctaattcaaatattacttgctccaaaaaataaaacggaatgaaattaccgaattagaatctaggttgagttgcggattaagtcactctctttaagatgtttgtaatactgcccagagtcgtgcaagtataactatcagttccgtcatccccaagataaaacagcacaatcgaaccactatatcaaagttctattgcacgataggaaaccatcaaaatatcacacttaaaaataatattgcgcataatacatattgtaatataatcgtaatataaaaactgtatatagattttttttgagaaaaaaaatgtctttttcttgttggttctactttattattgtaacgtccccgcttcaagtctcattgggtcgttacatccacgaaatgaatggctcttatacacgagtcgtcactctggccgcttcatggactgacgactgaccctatagaccaacacgagtgtttccaacgtgctttgtcctcactcgcacgcttcctgggaaaacttcccaggaggtcacccatccttaaattaccccaggtcaagcacgcttaactgtggagttctttcgagatgggctaccgaaaaaca

SEQ ID NO: 230298 - DNA, 1446 bp, Cannabis indica
atctccaacaatggcttcaggttagtgcttccgctcatcctttctcatcttctacttctttaatttagcaaaggttatattgatttatgatttagggttttctatattaaaacacttttaggaatattattagatctgtgatatatatatttcttgagtgttttataaatcctaacatgcatatattataatgtctgttttttttaatttatgtttatactctactttaactaattattgacattatagaaattagtaaaaattgattaatgcaaggaaaaaatatcaataaatttttatttttcctgttttttgcaacaaaatgactggacaaaactgccgttgaaaaatacacaatttataattaaacaaaaaactttactataggtgacagattaaaactgtgcctataccactatagacgatggtttaaaaccgtggcctatcgtataggcaacggttttaaactgtggcatatattataggccacggtcttaaaccgtcgtgtatagtgttcattataggccaccgttttaaaccgtggcctatactatttttcggactatttttaatcgtcgcctattcaagtcagtattcgcgacactcgtataggcgatagttttatgaattgtcgaaaattttttacctgacggtgtaaaactgacgggaattcagagttttttagtagtgggactagcaataaaaattagcacaaacgccataaaatacattagaaccataaaaaaaattgtacaaaaaaccagcacagtcatcaaacctaaattttattttagatagtctttttgaacctaaaaaatttaaattaagtttgaaattattattggaatatattttacgaggacctagatttactaacaagtatgtttttaccatcctaaatatgaattgctaaaacgatgaaaataaatacataaaaggtatgagaaaccttacgttggttccagcagaattaaatgactcattccgctcacctctctaacccttgtatcatttctgtcgcagagtataatcaagatatgagcccgaaactccttcacttgtttggattcttcacagtcttacacactatgattgtggactaacttgctatgggttggcatgcactcagtcactaaaggctaaatttattttgtgaagaatactatagcggtcttacaagaagaaaactaggtcaagagtcattagttagattatgagaccattcttttctttttatactaattcacttagggttaggattgaattatttggaataaaaaaagataaaataatagcaaaaatagggaatagtggccggccattagtgagccaatcactagttagatttttgcaatttttcccaaccatttatatatttttcacaaataccacttttagcaatttcaatcctataaattcccaaagtatttatttaataattaaaat

SEQ ID NO: 230299 - DNA, 1014 bp, Cannabis indica
ctatttttaatatttaaataattttttttctatgataatatatattgtacttatttaataaattatataaagttttgaaaatttaaaatattttacaatataaaaataaagtttatataaatagtttattttgcacgtgtataaaataaaattgacacttcacatacgtgtaaaacaaaataagcacttcacgcacgtataagacaaaataggtacacgtgcaataaactgtataaactttatttttgacacattaaatttcaaaaaatatgtaaaatgatttaaataactacgttgtacattctcatataaaaaaataaaattaattaaacaattatttaagttagtaatattcaataaagaataaaagcatttaaaacttaattacacattaattttgatataatttgtgcaaaaatataattttttttaaaaaaattattttatgaaaaaattaaaaaaataaaaaacaatataacataaatgattacataattagttattcctttggttactgtttttcgcatatttttttgaaaatttctcataaatatgtatttcttttataagaagtataaaaatgttatttgtaaactttgtaagcatgttgtattttctgcaatattacagaagaattaatattccatgttttagatgggtgcacctccgctcattcctgctggaatcgatcttctttgggggttggaatttctgttgcaaccaactatgtagactggtttatggagttagcagcaggggcaattcgggtttaatagaagaagtcatgatgattagttgggttgtatggaagcaggatcggcccaaccaatttggaggccttgggcgaaaaattaaaattgggccttttattaaaaataaaatcattaatcaatacttcataaatttaacttaaaaaaaccaatacctcataaatttgtttacatttatttagtaaatttaaatattctaaataaaagtacaataaaaatattattcaaatttgttgatcgatct

SEQ ID NO: 230300 - DNA, 1258 bp, Cannabis indica
tctctctctctctcctcctctctctctctctctctctctctctctaaacttgactctgaatctaaagtatcaacattggagatacctagagagagtaggggcacttctattgttgggactccctttaagttggtgataaagccaactgctataacttacaactactttcttcaaattcatctaatgagtgataagatggaactataaactttgacagattaatctgtgagtttcataaatggattattttacatatacacaaaaatagaaaaaaaaattaaaaaatacggttgtatgaaattttaattatttttatgattttataattttatttacaaaaaatacggtattttcatgtattattttttattaattttttgttatttgtatgttatttttgttgttatttttctattatttttatgtcgtttttttgttatttttatataacaccgtaaaaatatataaaaaaaaattattaatgtaaaaattttgtaaaaaataatactttatataactattcttttaatgtatcccaacaaacaatatgggagtaatatttattgatggcttcgtccagaaaccgatcgagaccatggctgttgctcatgcagtatcggaagtggcacaatgctgttatccacattggttgatggtttttctaataagagatcatttctcaacttatgttattattgctaagttttgaattgcagtttacatcgatctgaaatggattaggagatattttaactctcccagactctcacaatcttgcagcaacgactgctaagttgaactatttttgctttttgtcttttgtggagatggaaccttttgtttctataaactaactttgggccttttcctttggtctttttttctttttttttttttccattttcataaagtttctattaagaaaaaaaaacatattgatatagttcaataaaaaaaattattgatatattgatgaaaaatattaaaaggcattagtaatacttattatcattttatatgttaatatcgctattaatttaagttttaggtctcatatataattttatataataacttctaaaaaatattgttagctaaatgtaggacgacacatctagagatactgaatatcattttatccaacagcaatactatatttttttatacatgccgacagggacggagggactttagcccatgtgtgggctaaagccctcactcaaatatatacattaaattttttatatgtagatatata

SEQ ID NO: 230301 - DNA, 1157 bp, Cannabis indica
tttaactcacctaattaaggttagctttaagtgttcatataaaaggtatattaaggtgtgtagggttatgagatcgaatctgatcatataagtaactcaaaaaatataatttgaaaaaaaaaaatagaaaacaatacattgtgaaaatgacttttgaataattttaatatcctttctataatttctcttgtttttcggtcaatttagttatatttttaaacaaataaaaacagtacaatattgtttcacaaaacaaaactaatgaattataaataaataaatatgtaattaatttttttaaagggtaataagtgatatatatattttttgtctaaatcaagtatactgagcacaaacaaacaattacaaagtttaaaattacttacaaagccaatcttttacagacactatgaagaatacaattaatattgacatttacgtccaaagaaaaagtgtgaccttgataataagtaattttggtcgtatagtactttgtttttagcatgccaaacgtaataaatcatagttgtaatgacacttacatatatagaccctttgtctttctaatcaaggatttcatgaagctcttttttccgagctagtagaataccagtcgtccaaagccaaaacttgtgcatcactttaattttttttgaaataacagccaaaaaagaggtggcaatggctctccaacccatttccacacactaaacaatttaacgaattggtgaaagtctattcttcaaagccaataactagataataatcttgtgtttgggaagacaaaatctatcccaaataccattataacgccagtcccatcaccttgccccattttggaacaaagatgggctatggaaaattggtatttttaaaaatccttttgagtaaacacaccctttatcctttccttgacttgaacaactcttctccaataccaacaccaattctaattcttaaaatatttgcattcacccatgtcacccaaagattgtctttctttaaagaaatagcccaaacatgcttttcggtagcacactagttccataataaggtaatgtcttagaaatccaacccaccatctttcttagacttgcaaaggtcatctcatgtttgttttagtgttattttacgattgttttccataatttattttt

SEQ ID NO: 230302 - DNA, 922 bp, Cannabis indica
tatgtgtcaagtagagtgatagaaagtttcataatctcttaaagttatgcttcagggtttggaactttgttaccatctagggagttaatgatctatactagatggattagatccttatctttttggattgacgattgtgagttaactgccaaattgattgagctacagttgtgtgcttttgatataattttgggaatgtacttcttatccaagtatggagtcccaatctattgtaagcaaaaaatgttggtatttgaacctgatagtgctgacctagttgtgtttaggggtaaggtatgaggatcatgtatacccagaattacaaatttgaaagctagagacctaatgcatagaggctgcatataatttctagttaaaattgtgaatactagacaaacaattacgattggacccaagagtacgaggcttgtatgttaatttttatatgtattttttagaggatttgtctggattacctcttcatggggaaattgaatttgtcattgagttagtttcaggagtagaatcagtatcaaaatcaccctatcaaatggctcttgctgaggtaagggaattaaagattcaattacaagagtttcttgatcttggattcattaggctgagcttctcactatgggctgctccagtgttatttgtaaagaaaaaagatggattgttatagatgtgtattgactatcaagaattaaataagctctctatcaagaacaaatatcctttatctaaaattgatgacttattcaaccagttaaagggtaagacagtcttttctaagaatgagtttaattttggttatcatcaattgaggattcgagaggaggatatcttaaagactccattccatacaaggtatggacattatgagtttttggtaatgactgttggactcactaattctccaata

SEQ ID NO: 230303 - DNA, 994 bp, Cannabis indica
acctaactctctcacactcatctttttacaactcacttttttcctctgcacatctctctcacacaaaaaatacatatttataaagatataaaatttaaataccaagacattctaaaacttggtcaccaaaactctcatttttacacaattaataattactaaaaaaatataaaacattataaatataaaaacaaaattaatttgaatcaaactccaaacaaaagttatttttttattttaaaaaaaaacatgtatagctaataatttaatataaattaattgaaattataaaaaataactaattgtatagaacaatatataaagataaccttaattaattttttttataaataaagaaatattattgcaccacaaaaagctttttacaaccaccagtcgaaaacaaaaagtcccccctccctcccctcctccaaaaaaaaaaaaaaaaaaagaaaaccggaaaacaaagacaacaaaaatctatacaaagagagcttggcaactaatccctattagtattaaaaaaaaagtttagaaagaaaaaaatagaaattcttttacaaacatcatgcttgattctcttcattatacaatcagctcttagggatgttttttccaacaaagttttattctttacgcataacatatacaaattaacatacatgagtgccactgcgctaatctctacgtgctaattcactatcttacctgataatccaagtatgaggagatttcaaatccctaggtgtttctgagcaagcctcggtaatcttagtcacatattcacgggatttcacaaatagggttaattctaaattcattttcatatatacacataatatgaactccaattatagattaacacacagaggccaaaacaaactttccagcgatatcaagaacatccaaaacagagttcagaatcaaaagttatggcaaaaacgagaaaaccaaagaaactgggataattaggccctcgttgcggcgacccaag

SEQ ID NO: 230304 - DNA, 2495 bp, Cannabis indica
atttctactagtttatttcaattaggtaaactcttatttatacaagaataagattaggaaactaaattaatataataaaagaaaatagaatcaaacatttatggcgattacgatgcaatttaaaggactgttgccattagtcatttcagagaatcaaagtgtttttctccctaataaactcatcacacataatgtactagtggcctttgagataatacatagtatcaagaataagaaagcaggtgcaagaggagttacaacattaaaacttgacatgagcaaatcatttgatcgagtagaatgatcttttcttgaagagatcgtgataaaaatgagttttcaccaatattaaatctcactcataatgacatgtttatcatcaacctctttctctttccttctaaatggtgaaattactagttttatccaaccatctaaaggaattagacaaggagacgcactcttcccatacttgtttcttatttatcctgatgggttctcaaggttattgaaacatgaagagcaaatcaaaaatcttcaaggtcacaaaatattgcctggcatgctccaagtgtttcttatttattatttgccgacggcagtctgttattttgtcaaagccaatgagcaatcgtggaatgcaatcaagagaatcttaaacatctatcatcgtgcttctagtcagctcttgaatgcttcaaaatcagtaatagccttcagtccaaatacaacactagcaatgataatttatttctgtaggtgattggaaatgcccctaaaagaatgccatgagactcatttgggtctgccacatcttattcaggacaagataaaaagaagcttttaagctaaataaaagagaaaatatggaagttacttcattcttggcatgaaaagctcttctcacttggtggtaaggaagtactagtggtacaatcaatctcaacttacgccatattatgttttcaattaccaattaaattttgcaaacaaattgactccatattggctaatttttggtggggatcaaatgctgatggatcaaagattcactgaaaagttagaaattcttatgtaagaataaacttgctagaaggttgggatttcattcaagctttattggctaagcaaatttgacatatttttgacatgcctaaatctttactcagtcgcttacttaaagctaaatatttttcacacaacactctcttagatgctcgtattggcaatcaaccttctatgacatggagatgtatttgtgctaagagatatttattaatcaaaggtctcaaatggaaaataggtactaacatccaagtgttatgccttaatgagccttggattcctaatcatacttcagaacaatagttgtgtccacatatatcaacacaaatagagagtgggatatacttctgttgctgtaacatttctcagcaattgatgttgataatatcaccattcccttgacttttttttggataacatgatcaccttatatggcatttccatgacacaggcatttataatgtgaaaatagggtaacattcggttctgctttggacgatcaaaactattcctcttcttcacaaaatcatgaatcttggaagaaaactttttagtcccttcaattacctcctaaaattaaaatcttttcttggagagttatgaatgatgctttgccggtagctaccaaacttgtcaaacgaaaagttattacatctgctacttgttccttatgctcacatgcttgggagtctattggtcaggcaatgtttcgttgtaagtatgcgaaagctgtttggaaacactcagattttagcttttactttcatatggctaattcttcaaggagactacttaatccatctgtcaactatattttctatggctgaagtagatataattttgtgtcatgtggtcaatttggactgaacgaaataaagtggttcaagaaaatcgtgcttaactagctataaagctttcttcatctgctgcaatatagagtagcttgtactcttcctcctacaacctcgacccctccaattgtctcccctggtcctcacgaaccatggaagccacttgctagtggaggtctaaaacttaatgttgatgtaactgttaatattgcatgtaaaattttaggtgttggagctattgtccgagatgacttgggacgtgtggttgctgcattttcaaaacctctcacaaggtgctttaactctcatgagatggaagcgatgtctctttttcacagcttcttttgggccacacaattacaattgtctatcaatgaagtggaaacagattcacgtaaagtctccacaacaatcaatcaaccttcacctatgttatctatttttacagacattattgtaaaagttggggtcttttatccttattctctagagttgtctttcatgtgggtagagatgctaataaaatctctcatggcttaacaaaatatacttaagagttggatgaagtctctgtttagt

SEQ ID NO: 230305 - DNA, 3001 bp, Cannabis indica
agcataaagaataacagacacgtatcaccagttcatactaccacatcatagtacgaaaaataggataacatttgcccctcaagtctgcactggactttcgaagtcgcgcgtagacttcacttagtttgaattcgtgtttgaacaggtagcacgtgttcgatgcgcctgttggtgatccgatgtgattctggaaaaagttctctttgatattcagctcataaatgttgattgattcatacctcgaaatactccaacgatttgcatgctttggcggttgctcttcctcaagtacttgattacttgttttcctaacgtttacttttaggaggaaatcgaggcatttaaatttcaaaatgattacaagtcttcactaatttgcttataaataggacaaaaagtcataataaaccacttttagcattttattatttggtgatttcagagaaagaacacctttttctctcaaatcctttgaagaatttctagaaagtgttgatcagcgtcatctgagcaacctcaaagcttcgaatagtgagtaagttcttcatctttaacatttgaatctctaattttctgggtttccattgtagaaaattcaatagtcttgaacttgttctatgaaaaccgtagagaatctagattaagaaataggagattttaattgtaattgaccatataacatgattgtaatggcattctgactttaatttcacgatattcggttgtcacttgcccattcggggtttagtgaagataaacccttaatctgaagttttgagattctaggttatgaacctaaatcacacgaaatttccttttttaatcttttgatcgaacctggtcgatatactttgtttgttttgttcgatatcccgaccaaatactcatcttgtgtcctatcttttgtagatgaaccctggtgagttttggggaggagaacattgtatcgactaggatcttctccaacttctgtacgaggaccaacctcgtctctccgctagtccatcctcatcaagtgacggtttgtccaatttgagtttcgaagattgggaggtgagtagtgaaggtacgccttccccaaaacccgaggtacaacaccatttctatcccaactagatcgcgggtgaaggttacggatgcttcatctgggaactcaggaaggggtggagacgatacttaccgtccagctggacatacatcatccgaccagacttagtcgatactatccccgtgggccgaccaagtaccgctgcctttggcattcctatcgccacctttatcgtaactgttgctaggcatactaaccaaatgtcgtccagggataggatgatggcccacactaaacaaacaatgcagagaattgcttcaactgatcctcacgtggctcggcctgccataatgccgagcgctgaacaggcccgacctactgttgaggaggaggataatgaaggggatgttgaagtccaacagagggaggatcaaggcaaggtccgtcctgacagtccatctgaagccgaggaggagggagttgctcaaagattgcgctttgacagttacaacgaggcaggggaaccagtgtttgaggccggtgatgtcttggtagagggtgatgactacgtcactgaggaatacactgaagatgttcctcaaggaaggcaaggtgccttaggagctcggtgggtgtctcctccctctatagtaacccaagctaagatgaggactatggagaaggacggatacctgggaggtgttgaatgctttttcctttctctaaatcattaggcaactagcccaagacagggatactgtgcctggtcggctgcccatactaagcagggtgcaatgctacccttgcttccgtactttaagaggattgcagattactatcacttctgcccgacccagtccacaccaaagggcatcaaatacttatccgccctgtttatcctctatgcttcccaaggatggggtgagtcatctccgcacgacaccaactggctcttcgacctgaagtcaactcctaagtagagtaggttggggtatttttacttctctcaattggctgagaaatggctaaagggtactgtggactctgatgtcagcaaaatagggcattttgtggacgagtactacttcgtccagggcatggataccgtccacactcggtttcaaaagattccctcgtactgctgtcctcctttcacgttgggactcagggagagggtacaaaaattcttcaattgacagaagctgctgcttggaacatcactttgttgaccactgaggccaactatgtgaagtacaagctcttccctaaggattttgtgccgaatcccttaaaggaaaagaaaaagaaggccaagtcgaactgagttggtggtaccgagtaggagaaagagctcattcaactcaagcgtggggctaagttgaagggagacggcggggccaatgctcaagaatattcacactaggagcagtatgctcaagaatattcacagcaggagaagccaagcaagaagaagaagaaagctcctccgaccgaccaagcaccagtggaacatgctatcaggattagggaacctaatatgcctgctcggccatctacccctgtagagggaaaaggaaaattcgtcctggtggagcagggagactcttttgacgatgatgtcccatctgtacttgttcgggaaaatgcacctactcatgtgcagggtattttaactttcacttacttctcttatattatgctttcacatatattatatctgcttctaactgcatcgttttatccgtgcagaaatatctcaaaagatgctccaggccttaaagaagagagtgggagatagtttgagcctgtctcctccgaccaagaagtctaaaggcgatgagattctgtctaaggagaaggcgccagttgatgaggtcattgacctttctgaggagcgacctactgtggaccttctagctcagaaggccttgaagtcaaagagttccaaagggg

SEQ ID NO: 230306 - DNA, 933 bp, Cannabis indica
acatacatatattagcataacaaaaaaaatataatcatgataactatacattcctctatgttataaaatactaattaatatcaacaaacatgaatggaacagggaacatgagtatataccataccatatgtatgtaatgtatgtatgtatacatcaacaacaaaagtagatgcatacctcttccttcgttctaatcagcttcaccaataatacgattgggaacatgagcaatcttatgccaatctgagcctacttctggtttgcatgcttcctgtaatgcatcacaatcttcaatctccaaatgtgtgagggaagtgaggccttccatcccatcaggaagggacaacaattctgggcaattcctaatcacaagcttctcaagtgacgtgagttttggcagccactccggcaatctcgataatttgggacaacttccaatatgtaacttttgtagggtcttagcagcttgttggagccattggggcaattctgttgtctctggtaatccataaataagaaatgcgtggaggctcaactgaacatctttattaataaattcacttgctaagttgagttgatcacaaccacctattatgagagaacgtaatgtattgcaatttatcaagtcatgcggcaaggatctcaaatttttacacccaccaataaccaataaacgaagagacttcaagcatccaattccaccttctgccaaaaagctctgttttgttgtgaacgtaagagtccttaggcttaccaaattccctatatccttgggtatttcctcaagctccacacatctactaagaatcaaagtttgcaaactttgcaacttgcaaattgaatcaggtagtctcttcatatttctattaccgcccaagttaagatatctcaaatgcttcatggtcccaacagaattaggcaacacctcaaaag

SEQ ID NO: 230307 - DNA, 1263 bp, Cannabis indica
attatagtaggtatttgaaccccgcattttagccctctttgtaatggattttaacatggtttctttgaaccgagaaaaggcttaaaacaaggggatcccgtctctccactcttgttttagaaatggaatatctctctcgaataatgataaagattggccaaaaggatgatttctaaaagatacaaggagttcgaattaactcatttgagttttgcggttgatatgttactttttggtcatggagacataaagtctatctacatgttgctacaactgtttgaagcacttctcacatacttcaagctttcaatcaagtgaggctaaatcatcactcagtgcctcattttctccaaaatttgcgaattcaatatgtaaccttagaaattcatctagattttaatcaagagtcctgctggtactcatcttgtaaccaaagattctttcttaagaaagatcttgttaatcaaagacttcttttgaaactgatttcaagcttttttttcatttttttgctagtatcttctttgtcaactaacctgataatataatcagaaagttaaaaatgattaatgaaatggcagtttcaagtaattcttcttgtgtagatttagaagtattttctggccatcctataggttcactaagaaaccttagtaatttgttttgagcaagaagaactctaatcttcttcctccaaatcctataatcactacaagaaatgtcacttttatcagcatatttttgtgctggcaaaaatttggtattgcgctggtaaaatagaatttacttctgatgtgttagcaaaaggggttggcaaaccaacgttggtattagaacttttgccagcacaaaataaaaagcgctggcgaaaataacttttctcagcgcgtaaatgcactggtaaaagttagattttagccactacaaatgtgcgctagtaaaactttaactttttaacttttttgccagcgcagtttgcgaaatgcgctggtaaaagtaacttttaccagcgcagtagagaactgtgctagtaaaagtgatatttcttgtagtgaatcctctgatttatcaaacttatcaacatctactctaatattactcatattaatcaaattgaacaagataataaagtaagcatgtaacatgatgtattttaggttagaatttttctgtttatcaatttcttgataatcacaaatctagtttcttcaatattttgatgatctttcttgttttttgactttgttcccaggtgttgttgaa

SEQ ID NO: 230308 - DNA, 789 bp, Cannabis indica
aaaaaattgagattataaccattatcatatcaaaaatataaagggggtgcaatagtgcatcaattttggtagtgcaccataaaaacacccaataaaatatattttgaataagtatgaaaattcgataaaagcaccataaaatagttgttctgttacactctatttgttttagtattcaagagagtttttttagtcagttttttatattatttttgttttataataatgaacattgtagtgatttaagaatatcaataattttttttagaaaattctaaatagtttatagtgtcaaaaataaggttcaagcaactatttaccaagagtataaaaaaagtaattgtaacaaaatatttgtattttatttttagcactataaaatattaaatttttttatttttatttttaaaaaaatttacatgcacttctaaataattacaatatctacctaataattataaatagtgtgtgaaacaacttttttggaatttgtttttttttttgtataaaatgttttatacatagggaaaattagatctcacggtcattacataggacgttctctagtattgaagacactagaatcataccaattaagttttagataaaaacttacttaaccacattacaggcaacgaaatttttagaaatctttgaaaaattacaaaaattaggaaatatagttatcaagccatctagaagaacaaaattgatgacaatctccaaatatctctcccccaacacaaaatcacaacccttttgctactgcggcttccaccgcaagcatgc

SEQ ID NO: 230309 - DNA, 1923 bp, Cannabis indica
aagagagagacttaggtgggtaatagttgagtatgtagtagattgttgtagtagatgtagaagtagtaccgtaccacgtgaatagaagatagttacgtgttagtagaggagagtgagtgaatgagcgcgtggaataagatgtagcggaattaattgggtccagatatgatatgagagctttattatcctgttgtctcctgctttgtccggatacgcggtatttccacttcttcaatctcatctcttttgacttaggagagagagagagagagggtactacacagtcagttcagtgtgggattatccaaaaccattttctattattattattattattattacaagtgcataacatgccaaaaacaaacttacgtggatagcaggtaaagcaaaattagtatttgtattttgtttttcggattattccttgtttaatacttaattatgggaacatatgcttttgttatttttactgtgttagggcactcttaattatattatcaaattaattaaattcttattaatcaaacaagttttaatgagtttaatttacaaagtgtaattcaacaagtggaaagtgaataattcagacactaatacaacatttattgttggaaaattttatattctaatacatagaatattatattaggataagatgttataattcttttattacttatacaaatatgtaataataagattcaattttaccaataatatattacatataattataaatgtataaatataggtttaagtaatatctttattgattcaaggagaaaaaaaatatgaataacagaatcgtaccttaattcataaatagtgatgattttaatctatcttaatagaaataatttttgtggtaattttgagtaatgattttctaaaaaaaacaagacttagaatttttaaattttctctcttgatgagagaagatgagaatataattgctcttttttcttggggacaactatcattatataaccttatattattaattttagtatttataatttagttcttcaataaattagaaatatcccttaagatatttattcatttagcccatgatactttaatacttaatgacctataattactaaaatgaccactttatttgagtcaaactttatagcaatacacacaaatacatatgagctcacattagagatttcaatccaacaatctcccacttgagctatatatgttttcttatagtgtgtaactttataagcgcttaattttgctatcataattataagtatttccaaataatctcgtccattgattatactaagatatgatcaaagcagttttcgccacatttagcgtggctaaaccaataaatgatcacacatatcaatataaccaaatgacaaagatcaatcatggatgcgtagctgttgtgaaaattatattgctttataattgcgcaagtgtacacaatcacaaacaagtaatacaatgataagtaatcaaagttcgtctccacagggactttttactaaataatgttaaatcaactaaaagtaattccaagaatttcaaataaaaataaaataaagtcacacattaattcacgagaaaaatttatagccttgattctaaacttgagaactaactttttaagctaaataaactaaaaataagaaactaaaagtgattaaaatggtggtaatttcagatttggaaaatagacttgggtgattaatttccacttgtatgtcccagttgatacagcaatgacccagcaatgactcagcaatcctggcagagttaacagatttcaaaaaaaccagcaagctttttccaaaacttgcaataaaccattcacaatctcacaatgcattcctacatcagtttagatcacaaatagcccaataaagcatcaaatccttagttatacatggtagcaaa

SEQ ID NO: 230310 - DNA, 2921 bp, Cannabis indica
aaattggataaactaggttttgatgtgaaacgaaagtatttacatagccttagtgacaattagattattgcgtaatgctgattatatgttagtctaattcagagatgattagataacatgtaatttagggcctaaaagatctgaaaagagttaggttaattttataatctgtcattcacattgagaaagagagtagtaattagcattaacaattgagtaataaaataaacatgattattttccctaatttctcatccttgattaaacaactttattactttctttaattttcttgtttatctttattttgaactttatcaaaattatttttatctgctaaatagaatcataaatctagtttagtggtattcagttcaattccctgtagttcgacctaacctgtgtgagtttactacttgattacgtgcacttgcgtattgtctcattgatctttttttctaaaaaaaagccctctttataattaccacaaaggccctatttatagtgagttccctacagttttgaatttcatcagatccattagtttgagaatatcaggttgctttcatactagatagactagtacctcaaatagtgtggtgtcttaagcattctcaatagcacaaaaactctctcttccacttgttccttggatgaggtcaagcttcaaaacggtatatagaacacctgaaacggacaccgagtgaaaagttatgataaaaatatgatttctgatctgctaggaatttctaaaaacggtgaaactcaaaaattttaaattttgcactcaccgaaacactaccaaaacttatccaaattactccaaacttgacagggcacatatataccataaatattgtcatccttacataacaaaaattaaaatcgagcccttaaataaaaaatgtcattagtgaatacattctcaaggtaggtgttgcttggatacttcaccctttttacttggaggttttgaattacttcggcatagctcccatgtagctcatgtcaaacgactggaatattctgacttgcttcttcatcgccttcaagaaagtaactggtaaggctcttactgctaaggaggtacactgtgtatagctttcttcacaatcccacgttatggggtttctattacctacacaagaaagttttgactgacctgacggtcgtcgatttgatttctaacatggaaaaatcttggaagcaagacttattctttgtgcccagtcaagcgggcgtgattgaagtcttcttaatgcttggtaagtaacttccttacctctacttacgtaattaattaataaggaaatccttcattatggccattttttctctccctgtttgcagaggtgcgcaaccatccttccctcacacaagaagagtatacttccgatatactaaagctattcaaagccgactatgaaagcaagctctgccactatcttctaacttttcccaacttggttgaatgcgggttggtctcagagaatgctgggttaaagctaagaagttgtacgccataccgcttcctttagcaaaaatagaggcagctccagaggctgaggtagaagttgatggtgataatgggcttaactaggctcttctagaagaacttggtgatgatgccatggcagaagaagatcgaactgtcagtgtcgggggtgatgtttttactggcccgctcttcaagtgggtcatcaagaggttgccccacggatgagaggcaagtcgcttccgcaaatcccctagggaagcttctcacctaaagtattcgtctaaatgctttctagctaaaacttcagttttttgaagaagaacatcaggggcgatctttagctggcccttctctaaagagcctttctcaggggaaaacaatgctagctctggtccttggagcaccatgccctttggtgctcctcctcccttatagaaaccgggtgcctcaactggttgtggagttgcacctatcacaactaccccagctccgtccttcacccctactaggcaatctgtgcgcctagcctagtcaagggcattggcggcctctcttgcgccttcccatcatgctcaagctacaagtgttgacggctgggttctagctacggtgtttgaggaagtaagtcaggaccgccctaggcgatcgagacacttaattttctctccctaagctacccaagtcgactccaatcgtccagagcagctcaaagatcccacaccttctgcctatgccagacaaggggatgaccatcctatggagattgatccccatattggtgttctttcggagatgcctcctaacactgctactagtcaaagtttctctagttgttggtttggccaaaactgaaggtgtcgcaagatgtttttatgcctttaaaagcttccttgcattcttccgtccattcaaacttcttattgccttgcaaaacattaaataatggaagacatttatctgttgactttgaaatgaatctgtttgatgctgccattcttcttgtcaaggcctggacttcttttggcttcgttggtgaagacatctcgattagggccttgatcttttctagattggcttcaattcctctcgcattaactatgaaaccaagaaattttccaaaggagactccaaaagagaatttcttcgggttaagcttcatattgtatttttaagtatcccaaagcactcttcaaggtcccttgtatgatcttcactctttatcgactttaccaacatatcattgacatagactttcatatttcgtccaatctgtttttcgaacatcccattcaccagacggtgatacgtcgccccagcactttataaaccaaatggcataactttatgacaatagagtctcatatttattacaaagcttgtgtgttcttgatcagggacatgcattttgatctggttatatcca

SEQ ID NO: 230311 - DNA, 620 bp, Cannabis indica
aaaataaaataaaatattatgaggtgtaaattttccaactatttatgtgtatcatcatgtgtttattgtcatcattaaactttgagacttttacactaatcggtacttgtttataaatatatattatatatgattgcacaaatgaatagatattgtttgtcaattctagcattttgtgcattttggtgacataaaaaaagataagagtatatagagatagcagagaaaaagatccataagatatatttttctatataaagatcataaagtattgtctaattatacaattttctttgttcaaatcatggcagcttatgacaaaaacattctacttattatatgaatacacatttatcccatatatatacataggcagatctatatagagtctaagaaaaacttaagcgcaccctcaaatatcagaatagattatataaaattagagatagaaataatgcataattgttagacaacaaattattcgttattcagcagacctggttttgaatctgatttccctcgattttatcttctatttttatttatatataaatctacccttttgaaagaaaaaaaaactaaaaagtattaacatagagtacattcaaactacaaataac

SEQ ID NO: 230312 - DNA, 851 bp, Cannabis indica
tgtgtttaattatgtgatttgaatcattaagactttgaattgtgtttatatataatatgtttgatgattggtatctgccttttttggtcctctttcagatgttctgctgagggttctgttgattgtgcagaagcttttgcaagaaaacaaacatggttctaaaagagatatatattacatgcacccagctgtattttcaggtgagtttttttcttgaatttcagttcagattttggttataaatgtattcttgatgtttcatgcgaagatgcaaaattcacacttttcaaagtctgaaatctgaatttgttttcttggaagatgttgattactgtttccaatcgatgttcaccgggctcttaaagtaatcctcaatgctaatttttgcaatacagatcaggcagttgtagaccgggcaatcaatgatatatgcatccttatgcagtgcagtagacacaatttaaatgtggtgggtacgcttcatacatttcatttacaaacatgagacaatttatcaagtttctgtgtcaaataatagaggattaatcaagatagtcaatcaaatgaagagacattgtcttttttctgtaattcaaatgtagtttcagcgacacttcttaggctgcatgcatgagctgcttttttaagctacattcagcttctgagattcttcactttccatcattattgcaggtttctgttggaaaggggtatgcacctgagctcacgtcatggcataagtttatgtcttcatttttaattatattctaaatggaaaattttgaattttgtattcggatatgcaatttttggtctgtaatctgatgtttccttctcatgttaattacctt

SEQ ID NO: 230313 - DNA, 633 bp, Cannabis indica
aaaataattccaacattctattcctctatctcttggacctcaatgtccccctcatgatcctcctcctccatagcgggtggatcttgctggatgcttggcaacgtggtgagctgagccacatgagggtcggatgcgttgactcttcgcatagtctactttgttcgtgccatcatccttctcctagagagatactaataagtgtgtcatgcaacagtaacggcaaggacagttattgggaatccgaagttgccagaacttggacggccaataggaagggtattactaacacctggccggatgatatatgtccatttagaaggaagataatgtctctaacccttcttcaattcccaaatgaagcggccgtacccttctcgtgcgatctgctcggagtaagagtgatgttgccctatgggctctggagtaggagaatgatcactactcactttccaatcttcaaagctcgagttagaaagtccgtcactcgaagaggacagactggcacgaagacgaggttgatcctcgtacagaagttgaagcaaatccttgtgaatgcggtgtttgcctccgcagaactcactagggttcatctacaaaagacaacacacgagatgagtgtttggccaggaaatc

SEQ ID NO: 230314 - DNA, 1325 bp, Cannabis indica
attttcttattacatacactcaaatttgattgaattatataaggtttgaaacgtgactagcttttcaatatatgaaaagtaagccaagtaagtttgatgatgatcaaccaatatctatctatccaactgtgtatatttgatcatttgtaagttttctaaaatatttgatcagatttcttgtttagaaaatcaaagcaagacttttcttttctataaaaagaaagtcgcacttaatgctcacgattctgtaggtacaaaagcaaaaattctttggctaattgaagatctattttaaggaagtgtctagtgagttgtggtcttgttcagaccgtgtatgagctttcaataaggtgtatattgattataaatatatcttatagcagctaaatcttgtatctttttcaaatatttgtattttattcatatcttgtaaaaaaagagtggctttattgtgtagagaagtgggtgctcatctcttcctctataattatatattttgtattgtcttgagtctataatcaattctacaaaagaagaagaacaaatgtgctacacctttgagagaaggttctataagcttttgggagataggtttttcaagtcttaccctgggaggaagcaagcactcttcaatgagatcgaagggagttcgagcacttgaaatctcaacaagattcagttagaaagtggaatacatcaagtttgcggtatataataagagagagtctatttatgcataagttaattattttgtatttttgagatctatttaatgaatcttatttttgggtgtggtcacgtggactagtctaatctgcaaggattattgatttcacgtacaaaaatcttatttattattatttttttgattttattctataattacagagttgtagttacaaaataactatttcagtgttatatttattattctataattaattaattaaattaattgataatattaaaatactaaatttcaaaattatatatgagtaacaatatgtacatacatacataaatcacacataattatgtgtcaagtgattttttataggtgagattcatattaaggaaagatgattggttaagattatttatcatataagtgtgtgcatattatgttatatgcccatatcattattcattatatatatatcctattactacccctttctaaaattaattgatcccatgcatatggttgacagtgagaaagttgactacacaatactactagctactcttgaatactagtgtggttttatttctatgctgggtccccattcattataaccctaatcaaatgtgtacatatctatgct

SEQ ID NO: 230315 - DNA, 1973 bp, Cannabis indica
tttaaatcttcaaaaattaacataatcaatggctaataaattctcaccatgctatgagaataaatggagtgttcttattattgtaaaattttcctacttttttattaccatatcgtgtttgaacaggtatagaacaaaccatatgatccaacaatattattggtgatcctaaaaatcatttcagtgtgattaattctaaataaattattctaataatgaccaattgaccattgtttcataacaaaacaaaacgaaaataaatattttttaaaaatattaaataataaataaaagaaaaattaaacaaaataaaaaataaatatatttttttaaaaaaatattcaataataagtaaaagaaaaattaaaaaacgaaaaattaaataatgaccttactgtgaatcacttagaagtaaaacaaaactgaaaaagaagctgatgaatcgcaaaaggggctcggggggtttgctggttcacgcgcttgagagataaaagaggagaagaagaagggcttggaagttaatggagttttttggtttagaattaaaaaaaacaatatatagggatattgatgaatcgcgaaaaaaggtttgctattggtttgcatgcctgcaagagaggaaagctaggggacgatgaataaggttgagagattttaatgtagatttttagttctttattaggagggtatatggggataagcaatgagtgtatgcaaaagtgtgtaccggctcacactgcgcatcgctaaatccatgcgcttgacacgtagctttagcgatgcgcaaacaaagcgtgtcattacacacttttacgtacgcgtatggcacatatctataggtcatggtctttttattatataaaactataaatttttggttatattagctcgtgaccctctatatttttagttacccacattcttaatgataaacatcgaacattttgggtttaattgtgcggttcactaaaacttactcctaactctttagtgacccacacttttatacaggtcattatatagagtcacttaaagcttaaattgtagtacccctacctgagttggagaaaattgttgaacatcctagagaagaaaagtcatacaaggcagtttatgaagagccatttcatataaaaacaacgaatttacataataaaaagtatcaacgctaatattacctctaaactatttcttatccgagtgaagtgattattctcctttggcgtttgtactagaccattccgaaaagccatcaacgttagaatctgattctgatttgatcgacgaaatcacataacaacgttgtacaagtcctattatggctattttgtcgaagtcgattttgatccctcaaataaaaagttcacactcgaagccgaagctgaagctgcctttacaactctcctaaaatcgtctcctcttgtggcttatcctcctccaccttcttctctggtgacttagacagaggtgtcgacggctccaattttggagatttgacatatttggtctttggaattgttttgggttacatttcctatttcttttatttttttaatattttaaaaaaatttactaaatatgatataaaaaaaaataatgtgaaaattcaaaatataatattcttaattttcattacaaaaatacgctataaaaacccataaaaatgaaaaagaaaaagcaaaaattttgtaacccaaaacatcatttaattctgatatgtacaaaagttaactcttaaattttttttttttcatgtaatttgtactagacttagattaattagctaagtaatatgaaaaaaatttgtccctaatttcctattcctaccatgtgccaccaataatttcaagtcatttaatcaaagtagttaacagattcattaactcttgtctaacgttaacatccattaataattactcaattctctctctaactagttaataccattctatttctccaataaaaataaatta

SEQ ID NO: 230316 - DNA, 1432 bp, Cannabis indica
gaatgttgtttaacaaaaaaaatagcgaattagatcagataaacagccctaacaaattataacatgttatctctcatagtgctgcataataatgctcatcttttaaacatatttaagaaggaattataacttttaattagatgtcagcctatacgtcagtctaggctagcttcgattattttggtataacttaatatatttcaagttttcaacgccgaaaattaggttattcgataaaaacaatcacgtaaattacatgcagttcagatcgtttatacaaactgtatatataattatatcaacgagtaacctttagatggtccggcgtcacacatttggtccacacataaactttgtaagttaggtgatcaattagttgtgacataattctgttcgaaataaaaaaaaatagttgttacataattaagaataacatttaaatatcattgtataataatgttttatattaggtacataactatataactatattgtatgtgttaatttgttctttagttatttgtttacctgactaaaatgtatgagagtagataatattgcctaattgatattttataactataataacattaatattgttgtcctgagaattaaattagactaagaatatttttttgtcactcactccagaaacatgtaccaattatcagtatgtaaataattgctttgtgatcacaattgacgtaatgtaattggtaagcacacaccaacatttgatgttgatcgagataaattagaatatcacttctatatatcaaaaagaggaaaaaaaaaaagaataccacttttttactccatttcaaaatttatatatataattaattaaagttgaattttcatgattaaatgataatttcagggtatgtaatgaatgtgggatcttaaatatagacctttctaattctgatgatggtactattgtgcctaaattatggtagggttaggacttctccaataaaatactaaaattcaataatagtaaagtttggataaaaaattactctaataacactataaactacactaaattttctttttaatttttaacattatttaaagtaatgtatttatgattaaatttttatatttttatataaattgtattgtgagataatttaataaaataatataataataaaaaatattttttagtgtaaactttagtgttgtagttggaatagaaaaaaatttagtgctaaaattatacatttttagcattaatttaacactataaatttaactttctatttatttcgacaaataaaaaagttttttagttcattttttttttaagatcgtgtatgttatacttatttaagagtagttataaattttagattttgtgtagtttgcaattctaagaataagatttatatattttatgcacgcatgattgttttttttttttttt

SEQ ID NO: 230317 - DNA, 1083 bp, Cannabis indica
agggctattcaataagagataacggctcgttataggcagtacatagatgaaattatcgagggtagatgttgttatctgcaagaagcagcctggcctaaatttcccaatttagtaaaaattctcttagtgagactattatttttaccacgagtcagtgttactttttcaccaggtaaatttaattttaatatcatgactcttaaagatcaaaagttcaagatgcctcagaatcccgatgttaccttcaaggtaaaacttattgagtccaacattaagtttatcacatatgtcagacctttcttaaaatcttgtgggaagtatttagcacatcaaggctggagcccttcttcctctttgccaatatttcaaggacttctacgattaccttggggtcgctcctttccaatttattcttaatgcatacaagatccttgcatgtttaaaacatttataccacatcctgggttagagaagcccaacccctttggaaattacttttttcaatgctatcaaatcctgtcccgcgaggaagaaatgttctgatgatttttattatttgggagcacacattggcaaccataaaatgattgttaggctgtcaaacaagaaagaattcatgcaggactttatttgggcgagcgacctccacccagttggcaccattgccttccgattgatacgtaagttaattattttcttgttattttaacttttatatttttcaacctcgaaacttattggccgtttattgatgttttgttccttaaccttttcaaaagacttactccgactgcgtctatacagcattgtcacgagcagcttgtcaaccttccaattggtctgcgagtagctaattttttgttgaatgacaataatctcaaggcttgtagcctacttcgaagaaaccaaagtactattgatattaaggatcacaagtactttttctgggaataagtatccgtgtattcagatgacgaggactatgattatgtggctcgcacctaatacaagaataacctcgcaactcgggaagcctcccagacactagaaagggctccctgaggtaattcctcttatttttat

SEQ ID NO: 230318 - DNA, 1049 bp, Cannabis indica
tgtgggattgtacagcttacccggtatttccccttacggatcacgtgactactgactgtcacagaatatatctaaagttcattaagctagataggacattgtgtcttatgaatcttcctattgtagtaaacatacccaaaagtgattaggtcattaacaagcttgtcaaaccagtctcaacttgccctttaaaatggcattgtttcaccactggattaaatgtttatgagaaaccaaaaccgagtagttgataaaaaccccacttacatccaattggatgtcttccgtggagcaactaaagacaaagtagcattttagtttaaagcacctaatccttgcagttttcaattggatgagcattggttgaagcaatgttgttttggggtggactattagttgatgattcacccaataaggttcatgctcttagatgattcattttgttgctactaaagaaattaagatgttgcatatgttacataacaatgagtcaaaccaaattataagactactatagcaattcaattttcaacaaaattacattacaaataattaatttcctttcaaaaaaatagtcatgttttttactcttatatttttttattattattttaattctgataaagtaacaacccaactagtttaacggtcaagattgaagaaaccgttattctaatcttttcttctagtctaattatttcagcccatattattgtgtgggttcaaaaccatttcaatgaagtgataagcaacaacaagactcaagactattctttgctgtatttccttagctgcaagactgatttcctgaaattcctcctggtgagctttcttctatctagattcctatatgagattctatcaaccctaaattctcttaaatttcctaatctgtacaaatctaacttgttttgtttcgtctccaaatgtcaattctagtttagttctttcaatttgttagtggcttgaagtttttgaggattccttttccagtttcctattcatttattcatgtgtgtagttattttagttattctttgtgtcacaaa

SEQ ID NO: 230319 - DNA, 1186 bp, Cannabis indica
ataactccctatatttctatgacaatgttaattaatcattaagaagacattaaacataacaactccgaaaattaaacaaataatttagatactttcattctaaattgaatttgcacccaaacaatcacagcatatcaaattttactttttagatttcaatttgattcatagataaaaattataagtggtcaataaataattgcaaagataaaacaaattgtaaagaattaaataagagatgaagaagaaaataaatactacattagtccataaaagtggttcaagagaatcacataacaaccctaaaagagatttagccaataacaatcatcttaaacatccaaagattaaattaataacataaaagatatagaagatgagaaagaatactaattggagtcctccaatggagttttctatgcttccagtggtcctccttttattttccttcaatgtctagaaaattcgaatatattatgaaaatctagcctccactcgtttgtaggtcaaaaaaaggaaattgtacaaaatagtcaagagtcgcgacctttgatagagagtcgcggctcttgaatttttttacaaagacgagatttttcaatttttccaaaggttgcggctcttgctcaattttacaaaattatggcaattctaaaatcctattgcaatgaatggtgatgttttggtcataactctctcaatatagcttagaattagacgattcaaaatgtttgaaaagctaaaagagagatctagaacttttatcctgaatatttttcctagaagttagcgaatcatagtcaaaattatcttgaagatttatgctttattttcaatcacaaatggagcgttttgagcatcaaaaacataaaaattttaacccattgtatcttacaactccaaaattcatgctaaacacctaaaattcatcatatttagcatattttctctcatttcaactcatatgatgtattttaccattaaaactttaaataagcataaacctgaataataaaacataaaagtactaaaaacacatactaaaatagactttaaaaattcataaaataaacataacatgttactctgtagatgtagatacatatagttagtagtagtatatattgatatattaaaattatattgttgtctagttgattttttattgttttaattatatattacc

SEQ ID NO: 230320 - DNA, 1140 bp, Cannabis indica
atgtattgtgtaatatataaacgcttgaaatcaaaaaaaaaagcttattgttccaagtgcataactttgctgtatcttatgtgaggattttaacaataaaagctgtaactcggatacttttagttgacagcgacgaaacattcaatacggtggcccactataataaacggtgggggttgggataccgattcaacgtcaaaccacaaagactacgtggctgaaactgattggatgaggttgttgggctgcgaactggtgaactccgtaatcatacatggttgaatatgattggctgatgaagtctttacgagcagaggaaggaattggttgcactcgatagtccgttcctgcaggaccacgcttccttaaggttggaccgcatatagcaccttatcttctcaaactcgtgagtcacggcattgggggccagaaacgttgacttttcttcatctgggtcctcctgatgtgtcgcgatcttataaaagccaagaacggttgccctgtgactaccggtctgttactttgggacacgtgttatatttttgcttatgggccgagttatgtatgtttagcccagtttgttaatgggggcccactagaatcagcttcatcacgtgaaatcatgggttttccacaaagaaattatttcacaaaaacaataaaaataaaaaaagaaaatgaaaaaaatacggttttacgaaattttaaatatttttacgatttttgattttatttacagaaaaatacggtctttttatgttgtaatcttgttaatttattgttaattttttttatttgtatgttattatttattgttattttcatgaaacttttatgtaatttttttattaattttatattattttcgtgttattttttagaaaactgtaaaaatataaaaaaatattttttcaacgtaaaaatatactttacaaaaaaataatgctttacgtaattatgactaaatgcaatagtaagtcattagtcttttattattgttgaataaattagagtgttgagatggatgtaccttttaggggtgaaaatcggtcggttatggtcggtttttaaaattttataaccgaccggtcggttacggtttttattttacgtaaaaccgtaaccgaccgtttagaaatt

SEQ ID NO: 230321 - DNA, 1086 bp, Cannabis indica
cagcgtcggtgctagcacgagggtcggatctattgtctgacaactacttcccctgcctttgcactgggtggtgaagttgttcagaaactgatcttgtaatggcggtggctaagaggagaccatcagtatcgtcgacatctgttgggtctccagtcaggcctagttatggtactgttggtggaagcatgccatttttggcacagtttgctcaaaaggcttctgctgcccggtgtgactacagccccagagttacatcagagaaagaaactcaagagattataaaccagttagaaattccctgtcagtctactacttattttactgggagtctgagtctttgcctcagaagccatttgatgccctacacgtaattggagaaacagactgcccaggagattttggggcgaatgcatgcaacccctaaagcttctcgaagcttgggatgtgcatgcgcattactttctgcacatgaaaaagatcactgggttactgcagatcttcaaccctccttcccggaagggaaggactgcttgaagtctactttacacccaatgactctttcaccctttgatcttttcaagtgaagtctaagcctgaatttttatgcaacttcaatcttccttcgtgaagaaaattcaacatggctctcgcatgcacgttgtttttcctggaagaaagatcactgggggtataatatgttccatttggctttgcaaccagcaccagattttccaaccaaaccggatacaaggcttcttagaggaactctatggaggttaacttatcaaccttcactttcacaacttctgcctagactagatctaatggccttcttttttgatgaactagcactgcttgtctgcatggctccagcacaatatgtcttggttcattctcactgtggaaacaattttttccttcaccactagggacaaattttgtcccaccttgatgactttagtgggattagtttcgctagtgctggcttcttcaacatcctcgagtggttcaaacattctttctatccctactcggggatctaactcatctccctcccggatcgcctcttgtttaggctagacagtc

SEQ ID NO: 230322 - DNA, 574 bp, Cannabis indica
ctctctctctctcttttgttaattggcttaatataattttcattatgacaataattctcaaccaccacaaagatcatcataatcaaccccattataacgtctatctatatcttctagtttctcttatcttatcttttagagcttaatacacaatcccacatctttgaccctctcttgcaccgtggagttttactaatatcatgtctgtgttcttttattagtttctctttcatgggtattttttttaactatttataatataatactgtgtagagatataagagataaatagattatatggtaattaattaatacaggaatgattggaatggaatgttggataataattaacaagtggtttgtgtgtgtaggtaagtgttccatgcagcagcctgtttgacatagtgaccgtccgatgcgggcactgcactaatctatggtccgtgaatatggccgctgcttttcagtcactctcttggcaacaagatcatcatctccaggtatttctctctctgcctttctctaaattcttcatcaccttatatctagggcgcttatttctctctctctctct

SEQ ID NO: 230323 - DNA, 720 bp, Cannabis indica
agtcacccatgcacttctagattatcccagggctaagtccatttagaagcactttcactccaccatatctataccaataaccacaagtgtgacatcaaggaatattatctgagaggttttgaccatcttagcaaagagaacttcacattgtttattagtattctctagcaaatttagaaccgaaggaataatgctttatttaatcattactctaacaacatgattgatgtggaggaatatgttattagcttgttgcaggattatcaagaggctcaaaattaaaacacaaacgccaacatgttagaagctaccaaaacatactagaatagtctttccaactgcacttctttaaatcctgttctcctccctggcaattaaaggttaagtgttgatgcagccctcgacttcaaaaagtttcggacaggtttgggagcaacaatcaagaactgggataatcagacaattgcaagcctttcggtttcaaaatggggtgcttccacacccttctttgcagaagctcaagcctttctggaaggcctgagatggtgctctgcaatcaacctccaatccagtctcattgtctcagactgtttctaagtggtcactaaagttcgaagcaagtggaaagaccactcagctctttcaagcctagttgagttgatccaagagtccctatcctttctccataatgcatccttgcgccacctccccaggactgag

SEQ ID NO: 230324 - DNA, 1860 bp, Cannabis indica
tcaaaactgtaaaattaaaaaaaaagttaaaaaataatatatgaagtaatttccttttaaaaatcactataatattaaaaataaatttaatgtaatacaatatatgtcatttatatactaaccttcacgtcaaatttaactagttttattaaaatatgagtacatctagtttaattaattaggtttttttttttgttaggtcttatccttaattctataaatacattattttatcatataattgtatatctttattaatttattgatatgctcctgttttacatatctaagaatgaagacttggtgttagtattgcactattagtcttcattatttttcaattatcaatgtagatgaatagatcatgtatcttttctatatattcaattactcataatctaaattatatgtaaaatattattgtggtcttttataaaaaattttaacaacaccaacttgaccaccaaattgagatgagatcaaatgtctctcagaaaaagaagttcgtaatggctgagattatttttgaaaataataaatctaccgtatttagttggaagtaatgaaatgaaaaaaaatataaaagaaataattttcattctatttttttatttagttgcatattaaagtatttgaatattattttaatagaatgatctttctactatttcggtagaatgattattttattttaaaataaaaaaaaaaaccatttcaatgcatgatgagaattatgcattttaaaatttattttaatctattccattcttatttctattcttatgtttttattccttccaaccgaacgccatataagtttcttttttttttcctagtcgaaagaaatatatatgtaaaaaaaaaatagtttcttgatataaataaattatagagggaattgagccgaaaaaattgggataaattgagaaatactgtttttttttttgtaaccattaatcaaaaatacattcatattatattttattaaaatatacccacttttagtgagtgagtcgcctaatatacactcacactctctttaagtctagcacataatttatattaacttaacgggtataataggaataccatctataaaagtgagtatctcttaaagaatatagaaataaaagtaaaaattaaaacaagttaaataaagtgagtataccatcaatcctttttttttctttgtttgttttttactatttttttttttactacaaagttacttttttttttcttttttacttttgggaattagggattaaaacttagtacctcctctttacgagtagaagtgtgaaactaaccactaagttatgcctatgaccacatataaaatactgtttttgtaaaatttgtacacttttacgttaatagtttttttatattttacggtgttctataaaaataacaaaaaaactacatgaaagtaatagaaaaataacatataaataatatacaaataatgaaactaacaataaaataacaaaagtacagcatataaataacataaaagtattaaaaaaattatatatttccggaaaaaaaatttttaaattaaaatatttaaaatttcgtataatcatatttttgtaatttttgtgtttttctgaaataatctattttttcttgctaactaagtcaagcccactatttatttacgcaataaaataaaataaaaataaagaccattaatcaaaagaaatttttacatgaaaaatcacttttgcacaatttattacctaaatactcctacacgcctatatctacttttttatttacaaagtttgttttattacacaaataccacttagtcataaaattccatccatcatcaatcaaatcctactctcttcc

SEQ ID NO: 230325 - DNA, 1058 bp, Cannabis indica
agttggtttagaggatcaatttccacattctctaaccgcattcgcacttgtgacttgattctccaattgatggagctctacattagctgatttgagccgtcaaccgaaggagaagtgaatgatttatggtgcattttattttgaccgccagtcaccgaatttgtggattattgtcgcgagatgtggagctagtgaaccaaggtaagcagatcgagctactgagagtgggggaggtagggtttgaacagaagagaagaaatgaaagttttaatattttgaaatatgagatttgaaaactaggtttataaaaagagaaaatcacaacaaatactgtattttctaattttctttctttttttactgttatacgacaataattacatttatactgtattattttttctactctgtatactgtttgcggtataaccttcttaagtggtcaagtttttacaactaatcccaattttaaaattttggtggtaaaacctcctaaactcaacttctgttagcaattagccatttccatccattttctgggtgttaattgttaggttggcatgtctacgtctacgtgtacactgacacaatttaattagtctacgtaataaatatttaaaattaaaataaaaaaatgaattattttaaaataaaaaataaaaaaatcttttctttaaaaattaaaaaatttaaaattaaaaatttatttttataatttttctttttcttttttcttttcttttctttctctttccttctcttttctttcttcttcttctaaccactccgcccggagccatcacgtcctgcttcccactcaggttcgatccccaaccaatctcgtaaccactctgcccgaagccaccacgtccgccgcgcccatatcatcgtccattgatcatagacggatcgacggtaagagacttggtcagcgacgaactggagttcaacaagagcgtggatgaacagttcgtatcactagatctgaacaaggatgatgttctctcctgaactgagctctgaaaagctttccaaacgatgaggctcatcgagagcca

SEQ ID NO: 230326 - DNA, 1790 bp, Cannabis indica
ataaatatttaaatttaattattggttgcaaataaatatctaaatttattttttagcagtaataatacttaaattatatttttgaaactctataagtacccggtcgttaaatgtcaagtgattatttaaatatcattttcttgttgtatatttaacctaatttttttaaaaaaataaaaacataaaaatttaatggcctaaactaattagaaattggcacgtagcaatttacttaatactaaccgccaaatacttataaaagttctagaattataactgtcaaaaattaaaatataactaaaaattaaatttaagtatttattccgtaaattatttaaaaaaaaaaaaaagtaaataataaatatattatataatttatacattgaattagaccactatcacactttagttgacctcaatagtatccccgtgactcgttttccatttctttgtccttttaaactttatcttaacttctaatgactgcaaaaagaaagtgttaagagaaaagaaaacaacccaaaagaaaatttaataaattattaacaaagaaagaaagtgaaccttttatgaacataatgatgaaaggatcaaactttaaaataataaattaaaaagaaaattttggtacaattattaggttttcatcatttaacaagttgatttagtgtaaataaatgaattaatttaatgtcaatttgaaacaaaaattggcatattaataaatgaagggtaaataccattttggatcctgtgttttgcaaaaattaccgattgcaccttgtgttttgttaaatgacaaaatgaaccatgttttttccaaaatagtaaaaataggatcctgagcttaatttttgacaattttttttattaatataatcaacttgaaaacaattcctaatacgaacagggacagaaaatgtaaataattttgtcataatacttttagatcgaattataattaaattttattttgacaaaaaaatcaaatcaaggtcctatttgtaccattttagaaaatacagggtctattttgtcatttaacaaaatagagagtccaattaataatttttgcaaaacacatgatctaaaatggtatttacccataaataaataatgattttttttttttttgacatttagttatacgtatttaagttgggaccgattcatttttaattgtgtaattgtaattaattacataatattgtgcataaaataatatgtatacttttaagtgtatcacaatcaaatatgttttaggattattcaattttcaattttttttataaataattatcaaaattaacaatgagtgatttcctaacaaaaactgaaaattaataataacaatgtgtgttttatttaataatctagtaacaaagagtaaaagatatgattttttttcctttttacaataacaattacatcactattttaagtgattaattggtaagttcaaaagatctgatgtaaaagaaaaaaatatatataaaaaaaatagtaagtaaaaaggaatattattaaaaatttattgtaaattattccacttgttctaagttttctattaattgatcaaggtagatattttctattaataataacaatcattgaacatcacttttggattatttttagtaaagtaattcgaatcattgtatgaataaataaaataatataaatgtttgttaaaaaaaggagtcaaaaaattaaagtgtaaatattccacaacgtgtggttgaagtagaactaatacatctatgtatttcaaccaatcctagttgattttc

SEQ ID NO: 230327 - DNA, 783 bp, Cannabis indica
aatttttgcttggcgtgctttccatgaagctttacctgttgctgcaactctgcatcatcgacacatttaagcttctccccaatgtactctatgtcagctgcatttggagacgattaaccatgcacttttttggtgtactcgtgctaaacaagtctggaaaaattggaattcagtgatcaattggcaattatctaagtcccgctctttctctgatttttaatctatgtagcctcaaaacttcagactgaaaaggttgaactcttcattacaattctttggtgcatttggattgaaaggaatgctgaaagacatgctaaaacttcaaagtctgctttgtgtatcctgcaatttcctagcaactacttatgagattacaaacaagctcagaccagcaattgtaaaacccaccaacatgtctctggatgttcaatcccccaggatactgctgctgctagcagttcgcattctcagacttttgctgcggcaaataatgcaaatactcaggttttagctactttgcagcattgtctggtgcctccaaataagcctaaatggctagctccaccatcaggtaaactcaaattgaatactgatgctcctgtcaaagtttcttctggtgtgtttggccttagggctctccttcgaaactccaatgatgatgttattactgcaatggctaaacttatgaaagggtgtgttaaatcagaagaaatggaagcattagctttggcttggagtctcaaatcgctggtgtctctcagacttactgttgatttaattgag

SEQ ID NO: 230328 - DNA, 1083 bp, Cannabis indica
cttacttagaagttaagaataaagagtgtactaattattattgggtcgtctttaaggtcaataaaagtgaactctaagtttatttcaatatggcagttaatgcctagtactaattaataaataattgataattaagaaaagtcagtcagtccaatataacacggcaatatatatgagaataattattcccatatatatagtaagaactgagctgaggatatatacagaataccaataatattatatattatattattattttcttattgcatttagtcaattaaataaggagtgaaagaaaagagaaagtgagataaatatataagttcattcagaaaaatatgatagttatggatttatggcacaaaattgatgagagcaagttgaaggaaggagatcacatctacacttacagaaaccaacacacatatcatatcccttcatggtaagtatatatatcattctctctctctgtaaataagtgcatgtgtattccatctgcaacaatatgtacaaaaatttgtaactctctttatacaaaattcaacatagtcgtctttcttgtggcaattttaaatattagttatattatttttaaaaaaatatatttattaattttcttttatatttattgagttaacattaatgaataaaatattttgaaaattaaaataaaaatataaaaatataaattttaaaatagcaaaattattaaaaatatttaaaattagatataaaatgatttatatatataaaggaaaagtatgagcggtgactctaaaatcatttcaaatttatttttctcttctctctttaattttttttttattttttatttcaaaatcttcatataaatatatatataattaactctatatattaatttattttaaatttaaacttccaaaaaaaaattcaatcgtataactaaaaaatatatctattctatctatatatcatttctaaaacatcctaaatttgtggttaaaaaaaattctaaatttaaaaactaccaaggaaaaaaaaataagagaaatcaatagtatatatctatattttttcttaaaaataatatctatatat

SEQ ID NO: 230329 - DNA, 1249 bp, Cannabis indica
tatatatatatgtctacatttctcttctttatttacagacctaacaccaccaccactacccaccgcaactcacctaccaccaccgcaacccagcaccaccactgcacgaatccgacgaagacccaaaaaccccaacgagttgtttctaatatttctctttctcccttgctagtctcggctcaacaccgatgagccacctctaatgacactcgaccaaaataaagaccaatgcagacctccctgactatttaaaccttaagacccttaggtccccttcgtccatcgccgtttaaaaactcgttagagcttctcgactttagtctagccacactgagtcttaggggaccaagtgagtttcaaaagtgggttccttttgtgaagatcttccacatttgaaacttgcagtgggtcgtggtcctggtttagagaagatgaactagttgtggtgatgggatgaaattgggctcacgcgggttggaaaaagagagatagcataaatgatggttggtttctgggcagcgaagagatgaaggtggatgagtttttaggttaagatgaaaaggaaagaataagaagagggtttcgctgagaaggatagtagcaactatggaggttttagggggagaagagagaggtacgagggggaaggaattagttaaaagaatttattttaagaaaaaaataaaataaaatgggatttaaaatgtgtgggggaattaaaagggtgtattgatggtggtggggaatgtgagttacagagagagagagatgtagtttttggagagaaaaatagtggttatgtgtaacgccctaattcacagggaccccacgtgtgtgcttttcttaaaattactctttcattaaactatatgattatataaaaagtgtaggtaatttaaattttgtaattaaaacaaacacataaattttataaaaggtaaatattaatatttatggggaccccttattatcaaaatatttacattcaggattaaaagtgtttttacaaaataagttcatatttcaaaagacagtcaaaatggaacatcctgtccaccgggtggtggcactgcggctaatatgtacattgctgctgtgacctcagactcatggctgctcaactttggtcttccccttacctgcaccatttagcacccgtgagtcacagagactcagtaagaaaagtgattaaaccataaacagtataaaaccatattaatcatatcataactgttggattttatgccct

SEQ ID NO: 230330 - DNA, 548 bp, Cannabis indica
ggaggtatgctgctataggtgtaccaatgttggatggctacccaacatgtctatttcttttgcaatagggatgcttagttctttttaagaattgagtgagtaccaagtttgccttggctatcaaggcgatgatggctagtcgagcgagtgcattggctgttgcatcatttttggggactttccttttagtatagcctttgagcatacttaacaagtcttaaaattaggtgaaataggccattatccttttacattgagttgtgtattcacataggacatgacctacaattagttgagagtcgtggtgtatgtcaaggtatttagcctgcacttcttgtgctagcctaaggccaacaatcggagcttcatcttcaacctcatttttagaagctttgaaactgaccttttttgcctcaagcagccattggcctctaggtgccctaagggccatgcctgcaccgggcaggtggtcaatgcaccttcttggttgggttgtcttgctcttccccacacttcttctctcgttcttacttttctcccaaatcttg

SEQ ID NO: 230331 - DNA, 968 bp, Cannabis indica
tattattattattatttctctcttttctcatattcatttgtttgtaattctccgtgcttctttcatctcttttacttccaatcgacgacttttggagcggcttaaatatcttgagggcgagatccaaaaattactatcccaatgcgtggttgtgattaagcaacgggatgacgcccagcaagaaatcacccacctcaaacaagaagctgaaaagtcaaaagaagaagccgagaagaccattaaggcccaagctgatgaatttgagaagaagctcgctcagaaggaggtcgagaaaacagaacgatgcaacaagggttgctttcgtactgtatatcgagtttggatggtgaataccaacatggacacaagcttcttggaggagaaggaagaggaaactctagctttctacgagaagtccagtaaagaggaggaggagatcaaggctgaagaagaagaagagctatacaagtctcccaccatgtagacttggtttttatttgtcttcctcctttttttttttgaaaatgacctttcagctaagacaatggtttgcccctggttgcactttttgtaaagatagattggcgaagttggatggccaactttgctttttaatgcctcatgcttttatgtttaaacttcaacatgtggttgtttgcttgcatttcattcacaatttaaacaatcatatgcataaaatttattagaggtttccattgctcgtatttttctctaacgttaagtagttaataacctactttacgtgcgagcagcttatcttctgccttaccttcgatttgcgagcagtcattgattccgcctcacgatcatcaaaaaggaacttatttcaagcaaacttaaatatatttttaatgaccttgtcactttgtatatatctttacaagagcagttagatcttcttaccacatgttaggtttaagtattttttcaagacactttgatgtctc

SEQ ID NO: 230332 - DNA, 1029 bp, Cannabis indica
aattaaaagataattatcattttattttaatttatcttattaagtaaaataatcaaaataaataaatagacttttctatgtcaccctacatgtgtggggctaagctccacatgtctgggccatattttaaaacctaaaattgatttctcaatttttttataaataagatttattatttattgtaaaataaataataattgattaattctaatcaatcttttattttattatgattaaaataaatattattttacactaaaataatatatttatctctttaaatgttatttaagaataatattatatttaactagttaatatagttttattaaataaaaataagagaattttcaaaaatactcttcttttatgttttatttacagttttacaacctaaaaattttaattgcaaaagtatttttgtaagattttaaaattacaaaaatacacttttctaaacaaaaaatctactaaaaaataatgataaatcaatctcacaataactataaataaactgtaaagcaaccaaaaataatcacaaaaactacgagtccatgcttgacaagtggaagaaacatatactttttattagcttttaattgtaccaatgtagttcaatttttttactaataaaattttaattctctacttaaagtatataataactgatttataatatcaaaagtctactatatgtaaagatcctcatatttcaaaataaatttgaaatataaaactacatttttgtataattgtattatacacaacaacactacaatgtaactactaaatacaaattttagatctatgactgttgtatgacattcaagccagatactagcacaatagaacattttgaaccactacaaaaggagataaactataaatatatatgtacatatggtctaggttctactcgaacttctcacagtataaagcaatggtgtccaccattaggctaatgaataggcagtgagtatcactgatgttcattaaatgggtatataattttttattcattaaaaaatt

SEQ ID NO: 230333 - DNA, 1071 bp, Cannabis indica
attttattttattttttgctagtgttttatattatttatacatttcttttagtatattggtaaccttttttatatgtatatttttaagctgtatttgaataattaatatgttggatgataaataatgtgtaacattttaatttttatataattaaaattttaatataaatgttactcctacaatgggtccacataggaatttcttgttcattaatgatgaaactatatgagaatatggattgaaatttttagtgggtacgaaaatgggagaatactctctgccaatttcttaaactatgtgcattcctaccagtgacttgtattgaaaatcagatttaatagtttttccaatacaaatgaatgcttgagagcaattagaacgtatctttgagatgagtttgcgtctttgtcgctagatttgcaaatttatatttgtaatgttagttgggtaaataaggatttgactcttaatttatggaatcatttttactttttcaaaaaatcaatattctctatgtgtatcatctagatctttaactatttttttagcgtgtaggtcctcaatctctccgccattaattagaatttacaaaatagtatcctaaagtgctaaaattcaaccacatccacttacataaaaaatattttggactttcacaatctacattttatcttagtttttttgtgctttgaaattgttgttcttctttatgccaaaaggttcattgttaaccttatgtgctattcaaaataaaacaataataataataaaaaaagatgattaaaggtggtgtaatggcctgttgaagaaaaagagaaagaagaggaagtgaaaaatgtgtattttggtctcaattgctatcatttgcatatttcagaagttggtaaaaattaaggcagatgatgagttagatgacattgataaatgtcacgagataatctaacacattgataaatatcttgggagacatgctttcaaaaaaaaaaaaaaaaactaaactaggtaggacgaagtaacgacttaaactaactaaacgttgcctaccacgtaacgtaaccgtacatctataa

SEQ ID NO: 230334 - DNA, 1404 bp, Cannabis indica
catcaaaaaatgacatacaaataaaaaaaaaaatcaacaataaattaacataagtacaacataaaaaatacatcaaaatactgtattttctgtaaataaaatcatacaaaatcataaaaatgattaaaattctgtacaacccgtaattttgcaattttttttttggttatttttgtgtatttgtaaaataatcccttactaattggataggggattgaatgttgtctaattggatcagatcggatgatgattttttaaattcaataactaattaaattggatcgaatgaggagaaaaatattggattggatcgaatgcccaaccctaaaagtactgagaaattttctctcttacaatcactttattaactaatattaaggagctactccccttattctcatatggttttaaggtgaaatattcttagacttataaagtgaactctctcttagtgatgggtgctgtaaggctcatatttaacaatatattatatattttagagctaggacaagaatatagtaaaaaaattatatgataatatttaatataattgacatgatttctgtaatattatttgccaaacattatacatatgaaatattttaatgactacaaggtttgacagagccaaatgacaatttctctttaacaacttaataatttaattataaatacgtgtatagtttgatactagctagttgagatcttatttataaatagaactacaaatgaagattacataaattaactttaacaaagaatatatatatatatatataaatatatattatattatatctaaccatgaatcgtgttgttgtgcttgtttctctcattattgcaagtattctaacgttgtcatcatcaaacgttaccaccaataataaacatagtcattttgtgttggttcatggggctggtcatggagcttggtgttggtacaaagtggctactctcttacaatccacaggtcacaaagtcacagcaatagatctcacagcctcaggaatcaaccctatccaagtcacccaagtcaacggttcattgcttgactatgctaagccgttgacggatttcatggcgtctctgccgtcagctgcggcggcggagaaggttgttttggtgggccacagtttgggtgggctcagcatatcccttgccatggagaggtttcctcataagatttcagctgcagtatttgtcactgctttgatgcctagtcctaatctcacctattctcaaatatttgaagaggtaattttttttattaatttttttaatattaaaaagaatatatttgctgtataagagcaagtccaaagagacactataacatcaatatagtgtaaattctttctaaggtaacaccaaatccttcaccaatttgttgtatatactacagtg

SEQ ID NO: 230335 - DNA, 977 bp, Cannabis indica
tgtgagtagatctaagatcgtagtaaaataagttccaacagtaaagtggtcccactgtctcatattcataacttaaaggtgcaaatgacatccaggatctccttggggatgcttgctgtcagatttttccagccactttatttggaacacctcaaagattgtatttcaagctaaccctgggatcgatatattcctagagcgagcttgtagaggttttttacaaccaatttttcatgtcctgtcaatgacaaatcgaggctaatgatctgtctgacattaagcaacaagacgagaaatccctcaagaattacatccaaagatttttcgatgtcaccggtaagaagaaaatccttggcgaggatacaaatgtcatggccttagtagtcaagttcaaggagatgatccccctatggtcaaaccttaaaatgaaattagtctacatcatgaacgagtttctcgatagagaagatgacttatcaaactcgaggaagccaaatctcgagttaagggcttaaaaataaaaagaaaaagcaagactctcttgctcccaagtcttgggcacagaggggcagtggaaaaggagggaaacccaaggcaaaaaaagggaaaaagaaagactcaatttcaagctttttaagctcttaaaaactttttgattctcatgttagactgtaatctttttggtattttgatccacatgacagttttagaatgtataatgtgtgacttcttgatggaaaagatttaattttggccttcgttgtgattcttgactctctgaatcataaagaacatgaggcatgtaaagaccgcttagcttaaatttagaaattagcatataattaggatttaattatggaaattatttattaattctaaattattaatttatgatgatttatttgaattcagaatgcatttttgtgttacatatataaatttcatgattttactttttcagtgcccgacaacattgg

SEQ ID NO: 230336 - DNA, 1534 bp, Cannabis indica
taaattatatatttatttattatagaaagctgcctactacagtatgttccattccactttcaccaacaaaactactacaaataattctctacaaaaaaaaaaaaaattataaattgcacaaataactgctaattatgagaaaaagtataaaattattacaaacagtatcaataattatataccaagaaagtcaaggttattttatttatttttctgaaatgaaatattcattttaagaaggctataaattaactataattaagcaaggttagtgttgaataaatttcacttatgaccaattcttatacaaaatatccacataagcatacaacataaataactgaaaacaagattcaacttaggtggttttgcctctacaaaaaaccaaaaattaattataactgttttgtaactaacttcctgcttgatcaactacttgcattaccctatcatagctacaagtcagaagaaaaatacgaacagaaaaaaagagaagtaataactctggttgaaccttcagctccaagatccagagagaaaaggtccataaaaagagtgaaactcttgtggtgaggagattcgaaggagaagagagtacatgcacaaagaaagaaaacaaagttaaatctagtggttgaaaagagaagaaaaaaaaaactataaaagtaaagagattgagtcttacctgatcgaaacttgtgacaggaagctccacaagctgtaatcaccattgttgataatggatctcaagccaaatttctgacatgagctacagagatgtagcccttatttttggggtgaactctgaaataatttctggtattttctctcattttctcattttgtttctcattttactaatctctgtgtgtgtgggtaaacatcttagggttaaacttgctctgctagggtttcgagtttctctgatctcagtgttgtgtgtgttgtgtttggtgatttagggctttgagacttttcttggaagatctcttagtcttagatacaaacgacacaagctgagtagtcgtattgactaattgctgccgtttaaagtcttaaatcatttagacaaaggaaaggtcaagattgaccttaagaaactgataatgtatttttgttggtgtagggtaaacaagtaactttcctacagttacattatataatagtcaactataacataatagaatccaaagtctaaatgctacaatcataccaaccagttgagtttgattgtggctcaaatataactcttttgcttgctactttttgttgaagaacttcaacgcattcaagcaaaaacaccaatcagttgaacggtctgacttttcactaatttggactgaacatgaatgagatgagaatttcaaatgccaccaaataaagagtgttcaataaaattaaggctaattagtaatttttccctccgaactttgacatgtactaaatcgtgccccctgaactttttgggtcgttacaaattcctctcgaactattgagattgttaaatttaaggacttttatctaattttagtaa

SEQ ID NO: 230337 - DNA, 824 bp, Cannabis indica
agctcgctgccaggattattgttgctatttaagttcccagcgagatgcctcaacaagatacactttggaaaatatttaattccacatcagcattgaccttataaaagcggataaatcacaactgtagaattttcaattaataattgcatttatttacgtgttacgtaaatgaagcccacaattttgggaaatattattgtgggatttcaatctgattataattaactactaccttatgttactataaataggggccaaatgtattgaaaagggagggaaaatcctagagagaaaagaaccctagtttgtattagaataatttgaataagattgactcgtgaactatgcaaaattttaacagtaaaaccacgtaaaaagctctgtgttttattttcttcttttattttctataatttttgtgcaaattaattgcgaaatatgccttattatccttaacaaaaatcttcattaacagaaagaataacaggctcatcttgtgtctactcttgtactaccaacacttattattgtaccactagatgtgggggaatatataaagctaactgactagtagattaggaagcaaaaactaaatgaaccaccaattatggggaagaataaaaaggatccaaggtgaccagaatagcggtcaaggtgagaatatgaaatggcaaccttattcttagtgttaaagatgcaaaaaggcgccgtttgagccaatgcagagccaaatcttgttttattgtggaggagggtgtcatttgaaaagtacataccaacagttaaaaaagactgatgtgcaaggagaaaagtgtatgggtctt

SEQ ID NO: 230338 - DNA, 954 bp, Cannabis indica
aaaaatataaaaaaaattctttaaacataatttgtaattttttttataaaaaatggtggcttatgtaattatctccaacaaaaattatcgaatatgtttcaattaagcaacagaagtgtaaatacaaagtggcaacataataattttttcttttttgtttttttttaaacaaaatttgtaaaatttttgttactgtcttataaatattacaaatttgtaaacattgttacaatgccctatttttataagtatttttttttatcattgtacatttcattttttttaaaaaatattagagtgtattctttaatttttttttctaattattaaaacacgacattaccattgatctaactttgcaaaaattaatttttaaaaaacatattatgaaaaataaatatattctatatttacctagactgaaaaaaatgtttttatgttttttatttttcttttgtaagaagtattattattagatcaaaggaagtgaaaattgtaattttgaaaaacaaaatgataatttttgtttctttcaaaaggaaaaaaatgtatccaaattaattatatgggcctttttactcaactagattatccaatcaagactacttgaatagttatatgggcctttttatccaagtaaagaagattatcgaatcaatacaacttgaatagttatatgggcctttctattcaaaaagtccatttctttctccatgtgcttatcataccaaaagttgaaattttttttgggttaatttcacacatgcacaaaaacaacaaaaatacggtttcacgaaattttaaacatttttacgatttttttagattttatttacataaaatacggtctttttatgttgaaattttgttcatttgttgttaattttttgttatatgtatgttattttttgttgtttttttgttgttattttcatgttacttttatgttgtttt

SEQ ID NO: 230339 - DNA, 2516 bp, Cannabis indica
gtgactaaaaatcacatttaatcccaaaaaaaaattatattgagactaaaagtttgtgacaataaattttttaattatatatggttgaaatttaactaattacacatcattctctatatcattgcgtataaaagaaatttagtaaaaatttgagtgtcacatcgtttctcttcaattatatggttataattaattagacattagttatgatcgtatataacttttgtgtgtggaataagagagtgacagtcattattactttttaagaaatgggagaagaaagatattagttaaaggtatatatacttaattagtattatttttgttgaagtatatagagatttatccacgtgatgaattgtaattatatgtagttttgcattcagcattttgaagtacatcgatgaattaagacaggtagatatatagcatctttgaaattaattaacaagacgttggtcatggtctattcttctctctagctagtagtgacatttattatgaaaatatggataagaatacccaaaacatacaaatatatgttgtatacgtttgctctttaattttttatcatcactttattcatcatatctttgcctaagaagcccccattatgttgagacctatagttaagctagcttctatagaaaagtatctcaaccatgcacgtgattttgttacaataatacattttcttttcttcatcaataaaattattcatttattttccaatttcgatatatatcatcattctctctctcctaacatgttttcattgcccatttgcatgaacttatatatgaatacgtgtatctatatatatataacccctagctagctagatcaacatattccactccttttccttttcttcatcccctctctctctctgatttctttagagtttggattagaaattacaaggccaatagagagaaagaaaaaaaaaaaatggatgattatacaagaacatgtagtggtaactcatctgaagaggtagaagtgagaaaagggccatggacaatggaagaagatttgattctgataaattatatcgccaatcacggtgaaggagtgtggaatagcttggctaaggctgctggtacgtatataaatttatataataatcagtaaaactatatataataactatatagttaaagtttatgtatatatatgtatgaataggtctgaaacgaactggaaagagttgccggctccgttggctgaactatctccggcctgatgttcggagaggaaatattacaaatgaggaacagctcatcatcatggaactccatgctaaatggggaaacaggtacctattaattaattataaattataattaagttttgcgtataattaatatatatagagagagagatgtgagagttacatatacagaagcattaatcatatatattattcatctaatcattatctagatataataaaaaggacatatatatatactactattacatcaactctctaattattggccaccaaaattatatattattgaaaggctgtttaattggtcaattttccaacagttccacagtacttttgtatatattttctttttcatattcaatatttcttcctttaccctacaataatacctagatttccatatcatataaccctaatatcattacaaccaaaaactcaatgtgtcatctaatcataatatatatgtttatgcacacacacaatcacgtggaataattattttacttttctggattgaagtgcacaaatagggataatatgggatctatcaaattgattatatataaagataaataaattgaatgtttatttataagtatatattttgtaaaactataattattatcttaaataagatacatataaaaaaaacttatattctaaattcatgcatacaaatatataatatcagttacttacaaatattttttaataaatttaaaacagagttgcgaaatttaaaaaaagataccgttttaataaatattaaatttataacgtttataaacttaaaattttaaatatatatacacggttaacaattaattaacaagtaattatatatagctagttttgaagaaaagaatatcaaatcatcacagctgtagatatgggccaatcgaggagggagagaggctaattatgaatgaatggaaatcatgttatgcaataaagggcttctatttggagctgaacctacattaattggtcccatgttaaaagaaagataaaaagagctttttctctctttggttgaaatggacacaaacttcatttttggctcttctagacttttataggacctggtcccccacatgtatttatgtatcaaaaaatctggatgcaactaagtcgatcgatctcactttgaaaatattgctgaattaatatagactagaaaaatttgatctcaatttcatcataataaataacaatattattgtttaaaaacgagcaaaaaaactttacttacgttactataagtaattataacatgcca

SEQ ID NO: 230340 - DNA, 1100 bp, Cannabis indica
ttgaaattaacatgaaatgaattcttgttgctcattaagctttatattgcaaaatctagcagcctatacatagtttaacgacatctggtgttagtttgatccatcgataatgtaattaacatttttttttgggtcaagtcttgttgctttgtgatacaaattgtaaagaaaagtgtccatatggttgaacatattgaatcctgcaactttgatttatttgtctgttgcatggaacattcataatttgtaatgtggcaccctaacaaaaaaaaaatcgtggatgctttcctattataattatatccggtaagtaacttttggttgaattttgaactcaaaagtctttaaaagagatggttgctttgaaaataaacattgaaagaacttgaggcaaatgcttggctgtaatatgtgttgctttgggaagtttcattttctgattcaatgacaccagcctaaattaatcttttcaggaaggcctgctcctcacaaagagcttaccaatgaatttaatgtcttggaggccggtctctggaattcaatctctctaaacaaaggtatctcagttcttgcttataataagggggcaaaagtatctggcagcatctttaatcttatattgaactttttacttctcagggtgttacaagggacaagagactatatctagacttataacctatgatggtgttaagcagagattatggggtatttctctttcctcagcaacagaacccggcagcactattgttgttgatggtaaaaaggtgggcaattgattttgtctttgtcaatattttattttatattttaagaaacaaaacttttactaaaccaaaataacaataacaaggcttcctcaaaaagaaaataaattgcaaaacactacacaatacccataaacataaaaactaaacaccattcagcaaagtttgccctttaggtctgttgtagcagatttaaaagaattcgttcactttctcacgcctagttttgtgttgcttgtttcttagcataattctagttttcaaaataagaatatgctcttcatcatgatattacgataaatagcatttgtgtaggtggggaagctgactagc

SEQ ID NO: 230341 - DNA, 1203 bp, Cannabis indica
aaaaaaaaaaaaacttaagtaaattcttattaaagaaaacaataaaaaaaacagagaatagaaacatattcttaaaaaataaatccaaatctaaatccaaatatatacacttatacttgaaaagaaaacatataattaaaagatatagaaaccaaatacaattacatatagacatacatgtatctttctataaaatagaaatcaaattaaaatatatatacatcatactttataaagcataagtaaaaataaaaaacaaatctaaatacatatataaaacttataattaaaaatatacataactaaaaatagaaactaaatctaaacatataaatgcatacttaataatatagaaaataaatttatagttattcccactctcacaaagaaatgtgtgtatatatatatatttatatatataagagcacatataataaaatatatcatatcaatataattatgtatcattgagtaaaaaatgaagatgacttcttctaacaccattattatcataagttttatgtgcattgcattgttgttggtctccggtgagctttcaatcttttttaatttgttaatttattaaaattatatacaaaaaaaaatattatatgtaattatctttaatttaataatataataaatatgagagcttcattggtaggggcgtcatttttctcctatagttagagaaattttgtaaattgttttttctttattatattttgaaataatatattgtagttataatagacacttattagtttttaaaaaattatgaataattaatagtgtcaaaatacaggttcaaatagtcagttgcacgtatgttgtttcttagagcttatgataaaataaaatatacacgagcacaactcttaaattaaaccttaattttaatactataaattattcaaaaattatatatatatatacttcaataactattatgtatcattttatatacaaaaattatgcataatcctttttacgtgctaataaaatacaaaactatttttattggtagcgtaaaagtgatactcccactaatttttttcatagtactttattacttttctcatagtatttcattagtttttttttttaaatattacacattttttatattcaaatattatctatcatgtttatattaacattatggttaaatgtaaaacagagcctggacatgcaataaatcta

SEQ ID NO: 230342 - DNA, 896 bp, Cannabis indica
tttgtggctagacgctctcgattttactctaatcgtagcattcttaaggataatgttctggctgatcttttcatgccatcttgtattctaaatgttaattttaatgaagttgatatttcatttttcaaaatatatatatatatatactactataaattgggtttttttttatatatttataatcatcttctctttattttcttattttattttgtgtatattttgtgatgtaatattatttaatattctagttttatcattggattattttactccaagttataatcttgctggtgtgtatttcggttgaagcacaatatttttcaacatgtgtttattatagataggattacaagttattttgttggattggtgttatctttattttattttattttttttaaaaggggcttatcagtcaaaagggttcaattttttccagccaaattggaagttatttatagtttagacaatacaactttattttttttttttgaaagagaacctcagttcattaggattaaaacaaagtaggattgacagggggcaatccctccccgttacaacgataatcaaccaatcttagaaccctcgcttgaacagccaggtcattaacaaaagcaatacagttccgcttaacaaacttaagattacaaagctcaaacattttcaacttttccattacattatagaaagaaatgtccactctccaatccggtactttcttttgctgtaaagcatcaacagccattttgcaatcggagaaaactgtcaaattccattacattatacaactttatttggtttatacaattcagctgtgtttggtttatatgttcaccgaaatttctattacggagagtagagattttttttctttagatttcaaataaatc

SEQ ID NO: 230343 - DNA, 1826 bp, Cannabis indica
gggatgcctgccatagatgaaactctgttttagacattcggaccaccccagatagcccttgcagctaggctggctgctgaataatctgagagttaatagagcatggaagctctaaaatccctttcgcactagcagcttttatgtcttgagccgaaaagctcttcctcaaattacacaacttcttctaataccaacttgtatctaatttcaactcataattccaaaaatcatcccccttgagatacacaacattaacccatttaacccatttaatatgttattcatattaaataatgtaaactttactagaaggctttctttgattggaagacaatataattttacttgtaaactctaacttattttataaggaaaaagttccattatcacctatatatctatagaaacatagggtggtgatatgacgtcttttatatgaattatattttaatttattttttttcttcatttttactattttttatttattttttaaaattttattgatttcattctttagtaagttattttttttaaaaaaaaaaatctcacattttttagaaatgaatgtagtatagcacttagagactatgtatagatcattattcacttaagtttatataaaattaatattacataatttataatttttatatgtataattgatgatttttacttaattaattaaaaaaatttagataaatgcaacatatctaaaaaaaaatttattttttaaagtatgtttttttatttaataaatatcttaactttttaataatgtttaaaataattaaaaaatataaatatgcacaataatttatctatctatatatataaagaaaaacacaatttatatgagcacttttgtcatgattattttgctcaatttttatcatttaattagattttagactaaaatttaacaatttatataaaattaaaaaattataaaacatttgactaataaaaaaaatcattatcaatatcaaatggtgttaattttagtaatttatatttatatatctatagcgccttctataagttatatgaaaaaaaaattagtaatgttaaaattttatacaatttaaaaatttagttatcattaaataaaagatataatttattatcttgaagaacatgttgtttactaggtactttataatcacaatattattaatatttaagttagtatatgttgaaaatacatatgaatacttctaactattcgtgtcatttcgaaaatggccagacttgggaagacaggagacgagtttcagccattatcaatcggtatttctcagacctttttacttcgtgtcaacctgttatctcttcagactttgataacctattatccccattaatagaaccgtgtgacaatgaacttatgctggaaattccttctgataaggaaattacagcagtagtttttgagcttcacccgttgaaagccccggggccagatggattctcgggttgttttatcgaaaattttggggcatagttgggaaagatgtgtgtgccttagtgaaggattttttcatcagtggagatatgaataaaaagctaaatttcacccatatttgtttgataccgaaaattgaaaatccagagaaggtagagtagtttagacccataagcctatgtaattttgtttacaaaattgtcactaagatcctttctaataggcttagaccattgatggacaaattggtgtctcctgttcaatcgggctttattcctggtcgatggatagcggaatcctctattctgactcaggaactcatccacaagattaagacaaaaaaaggcataggtggcttgat

SEQ ID NO: 230344 - DNA, 1993 bp, Cannabis indica
aaaataaaaattttatataacatattttttgtatatatatttgcgattataataaactagattaaaataccatattattataatagaatcttaacaactcccagtactttaaaatttataatttaccaaatactcagctcatcttttttctacagttctgctacagctgctttttcatacagcacaactacaactatttttcttcacaacatagttgtgccaaactcacccaaagactcaaaaaagatatggagtggtctaaaattttcaagctttattgaacctaaacattttagttgaaaacatgcttgactaagtcttagtcttagtcaagtcagctatgacaatcccgaccaacttaattgtaaaaggtatctatataaggatgtccaaaaccatgtgattaaggctaagtttttccatttttatgctagagagtcttagatgatttgttgttctctctaggaatatgttgttaataagtgaggaaagcactccattgattcttttgttatgtactacttttaaataaacattaaagtattcattcttcttggtgtgatagtatacttttgattgaaatgtgtttactacaaaaaaaacagctacatttagtgacaaatttttaattacagcataaatttttttgtgactagatgtgacttttagtcacaacaaaaagtacatagtatttagatacaagttgtcactaatttagttttagtcacaacaagtattgtgactaaaaatacatttagtcacaacaaattataatttttgtcacgaatacatttagccacggaccttttattagtcacaacaggaataatgattcataattagtcacaatttttttacttttagtcacaaattttattgtgactaaaaataaatttttttatagtggtttgaggattatgttgttattcattagtgttcttgagcttttacatcaatctgattcgtaacagttaaaagttagtttgatgagttgtcaagagtataagttagtttttcagtattacttgttactactctgtatagaagctctattatgagctattgatttttttgtaagttcaatccatattctacaaagttcattttctttaatctctctctacttttctctatctaaagctaataaacctatccaaattatatattaaactttgaatttaatataatgtaattaaaattatattcaattcttatattttgtgtttatatattcgtttggtagtaaatttacatacttttcacaaagaaaatgcttaaaacctcaatttattattttagaattaaagatgtggaaccaaaaggaaaaaaaaaggattaaaaaagcacttgtttattttttttgaaaaaaaaatacacaacatgtttttactttgagctttgtgtagaataacagataaaaatttatatgtggttcctgaaactcgttatatataatagatacttgcagatatagaaattaatgtttgcactaattaatgaaaagctaataatagcttatatgattcaaacatgttcaagaaaacaccccttaaatctgtggtacttatgtttccctccctattttattgtaatttttatgtactctcctattttattaattcaaattagctataaattcactttttaaatctataaatataacttggttgcaatttactaattataactgtttccattcactataaataagaactttttgtgtaagtactaatcaataataataaatacttttaaatcaattatcatcatcatctccaataataagatctctaaaaatgtctctaaatcacaaagcttcaataaaagttttgttgatgggacaaatactgatggtgatgatgatgataatgattgctagcacaacttccaaaccattcccaggcaaaaagtcatctcatcataaacattctcacaataaacattctcactttgacttcctcgatactcataatgccattcgagcagaggttgg

SEQ ID NO: 230345 - DNA, 769 bp, Cannabis indica
cgtgtaatttcagctctcggggcatggatttgatttcttaatgtcttcatgctatagaatactgaaagatagtgcgttagaaatgagtattgaagtctgaactttcatcttacagtttccaaagtcaacttaggcacagggctagggacccctcctagaccgacttgctatgactcaggattacttaactctgaaacctcatctttcttttacgtgttaaatattaatgtccatattatgagaacttgtaaacagtactcacatctcatttgctaaggtaggttaatagtatttatagcacaaaattttacattatatgagaagtactttggcttctttaatttggtttttttttataatttcttgtaactcattttttttcattcatatttttcccattttaatatataataaaataaagttaagaacatggaatatttaaaataattagattgatttttgttaatatttaaaatctattttatatttacaaataactttttttttaactgaaatacaaataatttaatttccaataataaagttgactagtaatcattaaaaatgcacatcctatatagtaatattgtttagtactcttttaaatatgagttcattgtccactccattaaataaaaaataagttcaataaatttaaaatttaaaattagttataaatataattgtatagttgaataaatataattaatttaatttaaggtaattggcagtgaaatagttttaatctttttttttacatttaatttat

SEQ ID NO: 230346 - DNA, 866 bp, Cannabis indica
gaaatggatcaaactcatataaacaaccctaattaataatgaatgctacatctaaatatgcatgaatgtatggccaatactattgatcataattgtgaaaaaataaacaaaaacataagagaaatcataatatattagaaaattaaattcatgtaaaatatataatatatatatatataggtttgaattgaacaatgaacatgcctgcagcaccagtaacaagtactgtaattggttctttctccatctttgtgaagctccacatatatttggtaagtctcccaaaaaaacaccccacttaataaaacaactaaaatttgctgaagcaacaaaaggcagttgtactccatttttatgtttgttattttcccaagaaacaaacagaattaatgttttgatcaataattatcccaccccagcttccaatttatatatgtatatttttgtaagatgatgattatggatggatggaacaaacaaagaatatacacaaacaaacaccttcacgacagtgcattcattatatatattccaaaacaaaatccacaagaaatgttttatacatgatacaatggaatagaatctctatctcaagaaaggaaccttttttttttttattattttattttatatttatggagatggtgaaaatgataaatttacccatgtgaaattttttttttttgtagtgtagcgtaatagtattttacaattcgttaatagcttaatagcttaatagctttaaagtcctaggttcgaacccatgatctctctctttttcccactaagctaaccttagtggcttacccatgtgaatattgatcattgaatcaatgatgatgatgatgatgattccattttggcta

SEQ ID NO: 230347 - DNA, 1286 bp, Cannabis indica
tacacattgtataaaaactcataaaatgtgtaattttcataaaattaaattaataaaataaaactaaataagaactatgaagtaccatcgtgctatgttgttaattgagaacaatattttttatatatatatatataaaatcattgaatggtgtggactttatgatcatataatgtttgataaatgtttctttttaggttgattatttaggtaattgagatgacatcaaaaacatgaaaattggcataattgtgtggaagaaagaaagcaaacaagtagaggaagaagcggaaagaaacatatgcatttgcatgggatgtgaatgtgaatgtgtcgttttgttaagtattagtgagtagtgagtgttgtattgtaagaacaaaaaccaaaaacattgtggattatatggtctgactgacatacaataattaagaacaataatggatactctcattatcaacccaccctctcttctctactctactacacctacacggatggattggtgtcacttactattttttttttctttttgaataatgctattttgtatagaatggttttgcaagttattgattggatctttattttattaaataataaatttgattatgattttttttaaaaaaaaaaatattattaaaataaaacttaataataaattgaacgggaggtgtgtatgaccaaactaattatattttttgtatttgttcgtgctaaaaattaactttaagttagttatgttaaaagaaaaattaacaaaaattgagttcatattaatgttttatacctttttgtaaaatatatgaccatttttgtcatttaacaaaataaaaagtaccattaaataatttttgtaaaatactaactccaacatgttaattaacattttctttattgaaacagaatttcttattttccacaaatccaatttacacatactcatttgagcattgccattgaatattagtagtaattagcactttccacaggtggcgtcctatgattaattagcgatattgtctaaaattattttacaatacttaattgcacccataacagtaggataaattgcggcatagatatttaatgtttcaaattttatatacttaaatacctaatgtttatttttggagacaaaactacctaatgttacaattctcttacaccgttactactattttcgttaatttataaatgtagacacgcggagggttcagatgcattacatttatttttattttattttaaaacttaatattcttaaaatcagaaactaaatgcta

SEQ ID NO: 230348 - DNA, 799 bp, Cannabis indica
aaagagttttatttagggcataaaacctaacattcacatgctgttaggagagttaaatttcagtccaaacatttatactcttctttaattgatgcctcggaggttgactatgctaaatcagtttggcataaacttgttgtcccccaagcacaaatttatcttctagcagatttgtaataaccatctacttactcgggacaatttggttcgatttttgcccataatctcaaagctttgctcagtttgtgagttagaaagagaaactcacagccatttattcatggactaattgttcactaagttgcttgtagatgatataagcagctggtttggggagatcagctggccgaagtcaatttaggagctgcgggattataaaatgaagccttcttgtgatctgaaatagcaggtgctcaatgtgttaacgactgcaaccttgtatttcatttggaaaaataggaacaactgtgtgttttatgcttgttgttttgctactggttttatcagtagagaaattaagagagtggttaagtatagagtgcttggttcagcagttaataactccaaaaaagtgaccgatatgtagtaaaaattgtagagagctggtgaagttgtttgcagcctctttgtgtttgtactattcagtttttgaataaaattatctatttgtaataaaaaaaattgaaatctatgagtacctgcaaggcttttctataccaagtgcgaatttctaattattaaatctccatgggtaagtactaagtttattttaaagatcccaggttatgcaatgtaatat

SEQ ID NO: 230349 - DNA, 949 bp, Cannabis indica
caatacgacctaatacgacgttctaaacgagcccatatatgtattatttaattacatattgcttcatcttccttcttaataaccttaagaagtttaaaggctcataactttcttggaataaaaattaacaaaaaaaaaaaaaaaaactctaaagaaagaaagaaagtgaaagttgagtggtggagtgagtctccaggtgtgtagtgtgtcttcaaatagtcttcaaaatcctctattatagctaaagtgagtgaaaataaaataatcaataaattacttattttaatattttctagaattttttttttgcataaatgagataggtgagttgatggaagggtacaaaagtaaaatatatgatgtgtaacttattgacaaagataatagtgtgagatggtaaaataagctaattaaatgcaagagaataggaaattgtagtttatttttagatttcgcaagatgtgctcttttctagttaattttgttgatttattacaccccaaacttaacattttgctaattgtcgagcaaaagaaaaatttaaattattttttaaaaaatactattagaaaccaaaaagctaaaaaaaaataggccattctaccccttaaaaaatgataaaatgaagaaaaaaaaccaagaaaactcaccacctccaaacttaattcatgcattgtactcaatgtattcaatcacaaaaatagagagaaatatagaagagtacaagagtttagagtttagaatggccatacctcaacttggagtatttgagaagagggaagaagaaagtaaattaaaacaaaatacatatttatagtaaaacaataataaccttgcccaatgtacatgaaagcgatcaatgaccttggtaaaaggaacatgaagaaggatcttatccagctcaacaatttttgattctcaaaatagttttaatttttgtccattaact

SEQ ID NO: 230350 - DNA, 1897 bp, Cannabis indica
agggtaccccctaaagagcattctgagctttttagcctttctaccaggaacatagatgaattttggctctatagacatacgaccaactacataccaaatcacatagtttttgccaatccgattacaccattgtattcgtagacccaaataaatagcgaataccaagtcctgtcccattccggacaatattgaagatatttatgaaaataccactgcactaacagtgatacattatggccagaactaagcggtcataccgtagtgcacaaccatctgatcctcacgttgccaggctagcaacaatgggcaaggttggcatagtggaagaggccacacaacctcttgatggtacaaatgcagaggtcggtaggaagaagtgcttatggtcgaccatggtgctgagagtctaaatagcgagtctaaggtggagtaggatgcgcctactaggaggaggacgtactagacttgtactattttctctaacagccctctaggctcgtatgatgatgataggcagccattgaacaggcttggtcagcccttggtgataggtgtagaccatgtcttggttagtattcagagcctcaagttctcgatgttggggcacaaggagaccattaggcctcttctccatttgtcatcactattgagactctcaataggatacaagagagtggactggtgagaggcgtccagtgtgaggtgccaccgagggactaaggagcacactgattgaccttcaattagatggcattatagagcgccacatccagcaggtggcaatgctacctttacacccatatttcagagacataactgcttactttggaatgtgtctaacacaaatcaccccaaaaggtatcaagtaccttttggcaatatttgttctctatgcagagctaggctggccttagcatactccgtatgagattggatattattttgatttgaagtctactttgaagctgaatcgaatggggtacttctactttagccagattggctatcagtggttgggtgacaccaatagtttgcttttcttaaaagtaggagaatatgcccggaactaatagatgacacttcaaagtccataaagctttccaaaatcctggattaatggagggagcaggcaaatatttcatctcttgaataaaattgtatgtcgatttaactgtatacacacctgaaacatccttgctccaataccagttatccaccatatttgtatgggagataggaattttataaattaaatctctatctctattattgaaaaggtcagaaatgatttcaaaatcccatcttttctcattaacatccattaaacatctcacatttttaccacaaagaattggatgagatgaggtaatatatgggttatcaccatcgggaagccaaggatcatgcataatagaaaccccctcacctgatccaataagcaaccagcctcttttcatgatcagctcttttgcttcaagtatacttctccaaataaagctagaattattgcttaattcaacaataatgaatgaaccacgaggataatatctagccttaaaaagcttgctaacaagagagtttgtatgggagtgtagtccccaagcttgtttgccaaaaagagaaacattaaactcatgcaaatgtcaaaatctcatacaacctttatcatttgcaatacacataagatctcagctcatccagtacctgaaccttgtttagaatttgatctccaccagaacttacacatcagcccagatcatcacatgtacctttgggaatcaagaagacactcataacataattaggaagagattgggcaacagatttcaaaagtatttctttaccagcacgaaataagaatttattgtcctaattttcaactcttttcctcatctta

SEQ ID NO: 230351 - DNA, 969 bp, Cannabis indica
gaaaagattaagtttagtgatattctaacatccagcctcatcaataaagatagacatagtaagggtaggaaagggaggaccattcaaaagactgggggagttcaaatgaggaatccaatttgagttgatagcagaaatataattacattgcccacttttcaacaaaggcccttgagaaggagatctcttccccaaatgagactcctccaagtagccgaggagtaatggccttttgaagtagtgaggaagtcatttcgttaaaagtatttagcctttaaaagtgaagacaagagagaaaagggattggacatgactctccaagcttgctttgcaagcatggcctaattatgatggtgaatagatctaaaatccagacttgcaaagaactttgaatcacaaacctctaatcaccccttctaatgaatttttccattcttgctcgctgcccccaccagaaattagccataaggctctcaatactcttacaagtggacacaagtaatttgaaataggacatggcatacgaaggaacagcctggaccacaaccttaatcagagtttctttaccagaaccttaaaaaaaaatttccattccaagcattcattttagacgaaacatattgaatcaggtaatgaaagacagatttgctaattctactaatacattggggaacacctaagcactggctaacaaagccatcttgcaaagacccaactagccacagaaaaactctctatccctagaactagtgttggggaagacagaacagaggacttggcaaaattcactacctaactagtagcatgcttataaacatcaaaaacttccttaataaccaaacaagacttgttactaacagtagtaaacagaagtttgttatcaataaaaagcaagagtgagataacaggggtaattctacaaatagaaataccagcaaaatccttaacttgctctctgacacgaatggc

SEQ ID NO: 230352 - DNA, 2264 bp, Cannabis indica
aattacaaaaaatgtagagcatcatgtctttaacaaatctctagacatggccagagtcggacaatgatagtaaatttattagatgatcattagctgtgtattaattctgttataaagttagttagcattctgttagttgttaggtttgtcatcctcttcaccgactctacttgattgtatatatataccattagctcttgtaaaagattcattcagtgaataaggaacaataagactctgtcttttttcaccttccaaatctctgtttctcatatggtattagaagaaaacgcctccatggccagaccatccataagatctcaagatggtgtttccccatcaacaaacgacaacaacaactctgatgttcctcctgatgttacctcagcccctcttgcccaaccagtacccacaaatcatcgaacaactactgctcgatccagacctcagcttcatgatgaaatcgaaactcaatctccaagaatcgaaactcagcttctagctcaagaacagagaaccagtaatcaccatatcaacgatgatgactccagccccttcttcctcagctttagtgaccatcccgatcttgttctcgtttctactgtcctcaatggtagcaattgccagtcgtgaaaacgtggaatcacgatggccctggctgggaagaacaagctccaattcattaacgattccctcccatagcctgaacctggtaacaatctcctaaactcttggcttcgctgtaacaatatggtgatgtcttggctagtcaattcggtctcatctgaaatagctcaaagcctaatgtactttgatcttgctgtcgatatgtggcaagaccttgctgagcgatttaacgagggcaatggccctcggatcttccaactccaaacccaactcacaaggttgcaacaaggtgacagatccgtcacttcttacttcactaaactcaaatccctatgggatgagttgaaagaatttcaaccaaatacaacctgcacatgtggtgcaatgaaaatttttcttgactactacaatcaaaaccaagtccttcaattcttgactggtttgaatgagtcatacgcatctgtccgtgcacaaattttgctcaatgagcctataccaaatctttctagggtctttgccatgataatccaagaagagagacaacgttctcttggttctcatgacaaccctcctcttgttgcttctgtcaaacccccatctacccatcccccacgaaccaagaagcctcgaccttcttgttccaactgtggaaaacttgggcatttggttgataaatgcttcttcattcacgacttccccccggttatggagataaaaagaagcaggacaaagtcaaagctaaagctcaccaggcctcttcttcaacccatgttgataccgcttccattcacatcagtgaaaatcccgtctatcacgaacgcaccaaacatgttgagatatagactgccatttcattcgagggaagattcaacaaggcctacttcagctaatacatgtttccttacaacagaacctagctgacatttttacaaaagctctacttcccactcattttaatcaaattgtatccaagttgagtgttcttaatatatacactccaccttgagggggcctattagatgattagctctgtattaattctgttataaagttagttagcattctgttagttgttaggtctgttatcctcttcaccgactctacttggttgtatatatataccattagctcttgtaaaagattcattcagtgaacaaggaacaataagactttgctttttttcaccttccaaatctttctcataaaattagaatttgatgaaatagagaatctatctcaaaacatgaatctttttagtatgtttgaatgttttctccaaaagaatatatattcatattttttttaattaaatatagaaattcaaatttttcttttattatttaccatcgaatcaaaatttaatggtttaaatttttttaaattaaacatagaaaatcatagccttgaccttattttgctttgtttcagtattttgatctttgatggtctctcaaagacccatatcatctaaatgaatttcagcattaagaattcatgataaatatattcttccaaaaatatcaagttccacaaagtcaaattttgcaaggtttgcatgaagaaaattatattaatataaagtgtaaattgttagacatatacataaactttggaaagaaaataaagtacaacaaaat

SEQ ID NO: 230353 - DNA, 1273 bp, Cannabis indica
agtgattgtatccagatgagttcggatgtggcaagagcaagtgccctatattcagattcggtgctgcttcgagctacaacggtttgtttcttagaacaccagctaattaagttgttgccaaggtatattccgtagcctgaagtggacttttgatcgtcatggcacccggcccagtccgaatccgtgtaacctgttagttgcagggtggtagaaggagtaaaaaccaggccaaggtgtatagttccagcgagatatcttaggactcgtttacaggcaccccagtgttctgttgttggcttttgcatgaattgacttagtcgatttactgcaaacgagatatctggtctggtgttgcagaggtattgaagggcaccaattatgcttctgtactcagtcggattcggtaagggagttcctgagttaatggacagtttggagctgtcacacatcggtgtggactgaggcttggcatctaacatttcggtgcgtgtgaggagatctttggtgtatttttgttgattgagaaagatgcagctttggtctcgaataacttcaaatccgaggacgaagtagttgatggaacccaattgttttaaggcaaattgagactggagagcattgattatagtctgtatttgagttgaatcatcccatgtaatcagaatatcgtcaatgtacactaataacaagagaatagaattttgttgttgcctgtaaaataaacttgtgtctgacttgaaattgtgaaatccccactgtaagagagcatctttgagggtgtaaaaccaggcacgaggggcctgtttgagaccgtagatcgctttattaagcttacacacgtgatcagggaattgtgggttgatgaaccccgggggttgagtcatgtacaccgtttcttgaagatctccatgcaagaatgcattattgatatccacttgttggatatcccagttgtgtgttgctgccaatgtaaacatgatgcgaatagtacatggtttattacaggactgtaggtctcaaagaagtcaataccggggtttgttgaaaacctttggcaacaaacttggatttgtgtcgttcgactgagccatcatcagagttgtactttattctgtgtatccatttgcagctgactattggggtatctggtggctttggaactaatatccaggtgttgtttcggatgagagcttgcatctcaagttgcatagatgggttccatatagggctggccaaggcagctttaattgtagttggttcagattcaggggtg

SEQ ID NO: 230354 - DNA, 1147 bp, Cannabis indica
tctccaaaaggtggattaggtctatgccattcagaatggatgatagggagttgagtgctgaccttgttgagctagtcatagcagattttgatatcattcttgggatggatttcttgtctaattatgctaccaatatcgattgtaaaagaaaaatggtgactttttagctacaaggtaaagaactatttctctttgtgggatcagtttggtgttctcaaatcccaatcatctcagtattgaaagctaaaaacctattgtaatatggatgcataggacttttagcgattgtgatagacactagcaggcccaaaatagttgagcctaaagacattagagtagtaggagcattcctagatgtgtttctcgaagaattacctaatgtaccaccacagcaggagatagactttgtaatgtatttggaactaggagtggggccagtttctaaggcaccttattggatggctccaacagaacttaaagaattgaagctacaactttagaggatgttagacattgggtttacccgacctagtgtattgccctgggaaactccaattttttgtgaagaagaaagatggaacacttagaatgtgtattgactattggaagttaaacaagttgacaatcaataacaagtatccactacctagaattgacgacttttttgatcaactttaggggaagacagtcttttccaagattgatcttggctctggttatcatcagttgagaatccgagaggaggacactccgaagattgccttttttactatgtatggtcattatgaatttgtggttacgtcctttgagctaactaatgctctgaaaactttcatagatctcatgaatcgagtattcaaggatttctttgatatttgtgtcatagtatttatcgattatattcttgtatattcttagtcagaagtggagcatgaacaacacctaagaatgattttacaatgataagggagcataagctttatgctaagttcaaaaagtgtgagttctggctatcgcaagtatcttttaggtcacacttttagtaaagatgaaattatggtaaattcaagaaatattaatttggttagggactgaccgagaccgaagaaagctaccgaagtcaaatgcttccttagtttagtcaggt

SEQ ID NO: 230355 - DNA, 1310 bp, Cannabis indica
agtctaatgtgatccaaccctgaaaaaagatagggggtaaaagccacaattacaatgattctttaaaaaagccacgaaaggagtatgaccaaaagtacacagagtatacaagtctaatagacactcaagaaaacatgtacaaagagacctataacatggtccattacaggaaacctctacgaatgtcacatggaggaaggaatagatgtgatcaaaataaagagtgtgagtatcattaggagaagggtcacaccacaaatgagtatgattatttaaaagttgagattgaaatgttggtccaagggggatatctagacactgggtccaaatcctgatcatctatccaaaatagagggtcgtacacggacacatgattgttaccgaatagtataacgttgttatccctctataggggttggatgttctcaagctcaaggagcatcattgcctgtactccctgttctaccaggctcggttggggtggcattacttgcaccaggaccgggaaccccatatcctcttggactcactccacctttagtggacggacatatggttgcaatctaaggtggaccccatcttgccagaagtactcaaaactcgcaaaaattttacttgaaagaggtagtagaagggaaagtgtgtgtgctggtgcaatctcccgtacagtgccccaaaatgatgaatatttccatcacctttacagaggatgatgccaaaaatgtgtgattaccccataacaatcctttagtgattgatgcctaaattgcaaacaacgagtttccacggttcttatggttaatgggagctctgttaacatccaattcaaattggcattccaagggatatggcttaccgagatagacttaaccccttccccattcaattgcaaggcttcaatggagataccctcatttttatggggaaggtctagttacctatcaccctcaaaggagaaaataatgcaagccctttcaagcactcaacttttacggtaacaaactgtccaacctcatataatgcaatactagggcagccaactctaatgggttttggggcaatgacttctatcaggcatttatgcatgatattcccgtgtgataatggatgtattggcacaaacaaacggtgatatgaagagtgtgaggaattactgcaacctcaaaacacgagccgtgtacatgatccgggaagagacacttacgtctcccagaacgacaaatctaatggacattgaggctgtctaggaggatttttcccatggttgggaatcaaagaaacctagaaccaatggaggaggtagaagaggt

SEQ ID NO: 230356 - DNA, 757 bp, Cannabis indica
gactaactaacagaaaacagaaatacattagtcattactatctctaacaggattgtttctttgctaacttaatcatcagtaggcctcatgatcgccatgcatgcatgatgttaatatgttatggcaatttaatttataattagcacttattaggctcatgattcttaatgttccaataataaatttttgataaatagtaatcaatcaaaaaagatttttgtgcttacaaagttgtttgcatgtgattatgtcagcacagtattttcttctttttgtctctgcagacaaaattaattaatcactgaaacatgtatatgtaaagatttaattacaatggtaattaataattaagtgtaagtaactttttgagtgcataatcaattgccgattctatgtccattacttttcagctttttcatgttgcaaagtcttttcttttcttttcttttttatttattaattcatctatatctatcctcaattaactagcttagatctcccaaaatccaggtctttcacgtcaagaaagtttacctttttataccaaaaattagaaaagaacccatccacctcatcccacacaaacgtcttttcattccttgtttgtcattccaatcattcaaaagttcatccctccattccaaatattttttttgctttcttcaaattatgtttattgtgttccagacaacttttaattatatttataatttatgtatgtatgtatatgtttatacacaaaatataatttttaaaa

SEQ ID NO: 230357 - DNA, 1779 bp, Cannabis indica
tgtaaactaaaaaagaacaagaaagggtacagaagctaagaaaatgaaaacacaattgttccaaagaacctcttcaccagttcgtaacgcctggttagcaatgttatgagcaagagtattatggccgtgaggaatgaagcggatggttgcgctaggaaagtgaaataaagaggaaatgatctgccaaactttatcggaaagagccgagaagttgtgctgcctttggattattttgttaatgagcagttgacagtcggaaacaatcagaccaatggggaacttcaccactaaacaccatgttaaagctcttaagagagcttcggcttctgcaaagattggttctgttcgagagacaaccgaagagtggaaacctactatgatctaaccattgtggtcttgaactacatccccataagcctatttattaatgtgactctgaaaagctgcatcaacactagcttgtacaaactaggggaggttggaaagtgtctttggtgatgtctgtagaggagctgccctatgaagacttgaggtctagaaggactttggattgagcttcattgcattcccacaaataagaattaataaagtgttttatgtcttgaaagtttggcttcttatttgcaaaaatagtcttgttacgattattccatatagcccataagataccaaaaaaagtgtaaagttcttgtttagaaagcttttcaaaacctctcaagagatattctttaatatcacactgtttattgctcttataaaagtcaaaagaacttgtattcttccaaaacttacctggaacactctagaagagaatgagaatttgagtccactttgttagaacagagggtgcagtagggactctagagaaaagattaagattggagggaagaagatgattgaaagcttttcttccagacggatttccaccagcctttgagactgctggggttagaggaagaaggagaggaatgatgagaattagctaagtgatatgatgaattaacggtaaccgtactagaaggatcatgtccccaaatgagacagtccttggaagagggattagttggggtagatagaatggacttaaccatatccttgtcaaaaaaaagttgagtttgtgaaaatctcaattgccattatcttgataaaataagagatagtgttctcaagaggaaaggaatcatctttgtagcaaggatgaccattatcagacaaccaatttgggctaagggtaggaatggatttaccatccccaatcttccaaacaaggccctttaaaggagatttcttccccaaagaagacttctccaagaaacggaaggagaatgaccaaaagaggcttggaggaaatcattatgcttaaaatatttagcctttaagataatggtaagaagggaagtaggattttgaaatatcctccaagcttgtttagccaacatagcttggttatgatgaatgatagacctgaaaccaagacccccaaagaatttagatttgcaaagaatttagatttgcaaaggttgttccaagatttctagtgtatcttagatttattttggccttttgaaccccaccagaagttggccatgagcttttctagttgcttgcaaatcgactgaggaattctgtaacaagacatcacatatgaaggaatagcttggataggagaggacagacatgttacctcttgacggagtaactcaggaggtgtgaagtgattgcattgcttattggagcacagacaaacaaaaggtacttaataaaatttttaattttagt

SEQ ID NO: 230358 - DNA, 1020 bp, Cannabis indica
tatcaacttatcaacatcatcatactacactacctaatatccatcccatacaaatctaaaccaatacaaatttattctcaaaccatcaggtctacagcatattccttctccaagatgctccaagcgattgaaggcatggaaactactctgatttggatccctcggactgagaattctggggcgcacactctggctaagtgggctctccataatgattgtaatggatttgtgaacttttgggaaattactcctagcgtttttaatgttctcttttctaattaatgtattggggagatgttcctactgtgagcatcgctttctttgttttatgaagtttgaagtttagcaaaaaaaaaaaacgtgtacgataatgggtgtatgacaaggataaccaacacaatcgtacacaaaatttcacagctggcaacttcaatgtttctacgatccaccgccgcaatccccaattagtaatcgtacacaaaattaccaactactgccaagggctgattccccattgcaattatcattcggcttccaatagccacaatagtagtactagcccttctcatatcgttaacgaacatatggccttagagaacatatggccttatagtatatattttttgtcttactataatatacttgacattatttgtttgtagcttattaaattttttctaaattaaaaaaaaaaattacaatcaattaagaaaataattaagtacccaaaattttaagtttgtaagtggcataatcttaatatttatttttagcggcataagtacccaatgtttgtaaaactgtaatttttctctaatttcgtcaatacaaactctattattttcttgaacaggctacatataagttctagattcttaatcattgggcctagacagaaacatgtagtacaatttacctccaaatattcatttaataagttcaaaacggagtcagtactgacaaaatttgaggaaaattacaggcttacaaacatttagtatttatgacgctaaaaataaa

SEQ ID NO: 230359 - DNA, 1237 bp, Cannabis indica
caaaccagggcctcgttgtcgaatacaaatctgactctcgtcgtctgcaagaagaatggaatacaagacttatttttgggaaaatgaatgaatatgttagaatattagctctatattagttataaaaattagagtaaattgtattttctaatttcttatttgtattagttataaaaattaaggtaaattgtatttgtatataaatatatagtattctatagaatacaatatagaattaattcaccattttttatatggtatcaaagcctacttaagattgtgctcatttaaaaaattaaaaagaaataaggtttgtttagggttcttttttcggaaatcctatttggagtgcatcttagttcttaccacccacacagggaggaagcccaagaagaccagcgagtgggccccacgtgccgcctcttttggctgccattatcctacgcaccggcgcgtggcactgttctaggtcgtcatttttcttcatgttgttctcctcgacctccctggtggttccgttgtccatttcagttagtatgtgttatatgcttcgttgatttgtacatgtgaaggtatgggttctcttattttggttgtgagatttttcgattgctagctcaatatctcattttgttcccagcttgtctcaatttgtttgctcctttatcggattgttggttggtttgttgtttgagttagtttggtgggacgaatatatttgtaatggcttttggtagaccagttcttgtttctgcggatgaatatgtcaaattcttacagtatcaagagtctcttaagtattcatcttcttttatcactactattgttgattcaggtaaaccaaatttgtttcttccaaatgggttattgattctggtgctacaaactatatgacacgtaattctagcttcttttctaatcttcaacctcacgtttccacttctactagtagatgggtcaccatcttgtgttcttggatctagtacaattattcctactctaatgcttcctttgtcatccatcttacatttacctaatatttctattaatttgatctatgtcagtcaacttactcgcgatcttaattgttatatttttttttcttctaatcattgcttatttcaggattttatggcgaagcaaattattggtaaaagacacgaatctggaagtctctacattcttgatacaccaatatctaaatcagttaccttttgtggtgtacaatcccccttcg

SEQ ID NO: 230360 - DNA, 695 bp, Cannabis indica
tttaatattaaaaagtaaataatctaaaataacttatccaatcagcacttttacggattgaatttgagttacaatacggattgaattgaatccaaaatatgaacaaagaatacgtaccctatagtactattgtatcctaaagtaccctatctcggcggttcgaaccgccgagattgggtctctaaattcaattttttaattttttcttaaatttcatcaatctcgacgattacactcgactgtgacccatagaagggtgccgagatagctcaattttttagtaggctatcaagaacatgtagaacaaaggtcaaattcaatggattagaagaatgagaagaaagggtagcatattattaatatgagaaacaacaagctttaccatttccaattactacagatcactcttgaccaagaataaggcacaacagagtccagatactccatcttgaatgcaatgtgatttgtggaaccaatatctgcataccactctgcattaattatccccaaaatttgagatagattgagtaacataggcttgcggatcatagtcgaagacttgttcagtgaggtgagcttaggttgagaggaattaagctttggagtgacccaattcaacctgtaataacaagtcacatatacttttgcaacaagtgaactaattaaaattggtgagaaatttcctgcgtgaagaa

SEQ ID NO: 230361 - DNA, 1967 bp, Cannabis indica
atgtccctcttgctcatctccctttttctaggagggggattcttgtatgggatacgtgagtggccatgtagatggtctcaagcttctccgttagaagggtgaagcatgtgaacttctcctccttatctttctagtttcgtggcgtgagagaagtgttgtgcttcccctttttgccattatttcttctaaagctattgttgttgcgcttgcccccaatgttcttacgactagaggtctgtgctgaagtgctagtgcttgcctgcgcacctggaaagtcatggggctgcaaggcaccttgagactgcctattgccgacttgcactgtctgggcttgtcgaacaacttcctctagcttaataaagccatcaactctgtcaaggaactctttcatgttgttggttgagatcctcctgatttctttccaaaagtcacttaatgggaggatgcccccgagtatggtcgtataccgcccttattctgttaggcctttgaccttagtggcatcagccatgaacctctggatgtaatcctttaaaggtttttcttgtcattgtttgacctcgacaaggtcttgtagctgcaatggtatcaacctcaaggatgagaactatgtgtagaattctcaggaaaactcgttccaataattgaatcttcctaaagccagcttaaagtaccattgctaagctaattctgacagggtttccaggaagatcttacaccgcacatcaccagtaatcttctagagatcaagttgcatcccggagtatttgatgtgagccagtgggtttcctcatccagtatacatctttcatactggcatcttgaatttgggaaagggcaaggcattgatatatgtcaagaattgtcatcctcttcacctatcaagttcaaggtttgaaggttttgggccaactaggcccttaatcatgtctcttatttgatccaattgttgttgcacagaaggatctgttgttgcagggacttggctgattggcccttcttgaataggttgtagccctgaaggttccaaggtttggccgaccactcctagaaaggtggattggctttgctggaaaaccccattataggtagctgttcgtgtccagccagccctatgccgggtagggcctggccgcccgttctcccctaattggctggtacaatctgtgtgttgactggggatagatcacaccaattgctggagttaggtggatctagatatttgaagtgactagactcactactcaagttgttttcttgggtgtttccacccattcttgggcctagccagttaaatattggcctttgggttacttgctctcgaaggccctaggacgggagttcaccctgctggctggccagaggtgtaccactcaggggctagccagccagaggctgaccaattgggggtgttgttaagcctgagatccctagctggccccccaggccgttggttgactttttttaagtgagtccctttctttcttttctctctctatttctcttttttttttttattgttttttcccaactctctctctctccctctctctcatttttattgtcaaactaaacttttttttttatctctgtatataataaaaatatatataataagtatatacatgtttatatcttattttttcacattcttatctatataataaaaaattagagcacttctattaattttttttatcttttacatgcttaataaaagtaatatatattttttgtggatattttgtagtttattcagagttaatttatgaatgatttgtatattttataaaaagattgatgtcttgttattttttttatgatttatagttgtcttttttgttattttaaagttattttagatttgttttatgttgttgtttatgtgttttatagttgttttatagttatttttctgttatttttatgtattttttgtacagctgttgtttaatttatgtgtattt

SEQ ID NO: 230362 - DNA, 1068 bp, Cannabis indica
aaaatcatatccctatatataaatatatagaaatatatattgattgcttgttcatttgctttcttacatataaattaattaactctccaagttatcgatgtgcatcatcaaatcaaacagtgcaacgtacatattgaagctaattaataatatcgaaacaattatataaaattaataaatttctcttattatttggagtttggacctctctctctttatatatatataatacattctcgttcgaacaagcctttgacaaatggctttctcttgagcaacttttacctatattgacgatttgctgtctttccgtatccaaaaaaaaattaataaataaaagaaagaatattatttttttatttttttaattacaaataaaagtaaaatataaaatatttatttttaattttaaaaacaaaaataaaagtaatttgtaaaatttatttttatttttattttttgattttatttaagttggctctaggtttgtagtcaaattcgggttcggatcagagaccaggttcagcgccagggccgtgggggagagatttgggttcgggtatagtcaaagtctaaaatattgattaagaaaaaaaacagtttaaaaaaatattgaaaatagcttttttttttattatttttaaaattttgattctcatttaaaaaaatgaaaagtgaaaacagttttatagaatatgttttcgaaaatatttttacttttccaattttaaaaatagaaaactgattaaaaaaatgttaccaaacgccaagttgtcccctcaagttgtctacgtacccttatataagggatcaaatcccatcgtagttcagttggagggtagaatagtcactccactccattattcaaatgtgttcacctatcgttgtgggttgtacacccacttttccatggatactagcccgtgacctaagatagtgggaataattgtaaccgccttggagcagggccggccctaggcataggcgggctaggcccgtgcctagggcccacactttccgggggcccgaaataaaaaaataaaaaaaaattattagacttttatttaa

SEQ ID NO: 230363 - DNA, 1518 bp, Cannabis indica
tggatcttcagttaggccagcctggttgacggcttctctaagtttggctaactcgagatcttctcccaagttcagatggggcaccaattgccggtttgccaactcctggtcctgtttctccaatatagtacaggagatgagatctgattgtcgttcctgggggttgttacccaagggtccttcctttagtgggaggcaccagtggccggtcctccattggagataagggcctactctttagatctaccgggatgtttttgtcactttggtcagctgtagtgacaaactttatggtgcctgtcgtggtgactggattgaccacatcttcagtgttcatatgaattctagttgtgcctggaacacgaacattagaatctgcagtctgtgggtgttgaggaagatctgaagaggttaatggtgcaaccagagttcttctcgtgttaaccatggtgtttgaattgatacgatatccactcgctctaaatgaaagcaccaaactattgacctcgaaaagtggccaaccgatagcggggtcctatgaatttgatgttttccatgtgttacacaattagaactgtaaagtaaataggggagcgagtagctcaaaggctgatcttcaattgactaggatcaagagcgagtggaaacactcaaagtaacaatctaagaagaaactaatgactttaggtacttagatccaacaaacttcaacaactggtgtgatcgacctcctatcaacacaccaacaccattagccaatcggggagtaacgagcagctagacactacctgatccaggtttgaccggcatggacagctgcctagtgtaggctttgttagccagagccaacattcctacttggagtggccggccaaggtctacaacacaacataggtctggctgatctccaccatacactctctcagagtatggccggccagaccctgtcacattagagtctgtaacccctccaaggagggccagtcagtcaaattcctccaacaataaatccttctctgcaagcatagttggacaaactaagggacatgatttagcgcatcactagtccaaaccttcagatctttaactagatcggtcaaggggatctccattctcaacatacataaatggcttgccctttcccaaattcaagatgtcgatatggaagatttatactagaggagaagacccattagcacacattaaatactttgagatgcagttgatctccaagagattactcgggatgtgtaatgtcgtatattcccagctgttgatctcaaaaaatgatcaaccgctcacagggtcgtgcagatcagatgcttgtcgcgtgtttgcacaaataagaatgaaaagtaataaaaaaaaatatttgttatagagtttcgacctccttgtgatagcgggaaatgtcatactccccttttagttgtatttataccgagggaaatactatccagatcactatagttgggatctgctatagtactgttaggattacaaggtattaatcaataa

SEQ ID NO: 230364 - DNA, 2021 bp, Cannabis indica
agttaaaaaacgttgggataaactatttttttttttttaaaaaaatctatttagtattgccaacagttattcaccgttggcaataactatcccaacagtttttttgttacagtgctaaactgatgggaaaaacttccacttattttttccaacagttcctataattaaccctcttctaaaccgttgggaataaccctttttgtagtagttaaggtaaaagaatacgggagattaggggcccaagcttgggtaagagtgacattacaaaagtctcgaatttgagactaccgagcatggaccacaatgtcaggtcaatcatggaagaaaaggcttgggcgagtagtggcgtcaccaccaccctgcaacacaaagtacacccaaccaacaatactctacaaccactattctaaccctacaacaactactttgagtcatactctactaatttttctcctttgttgttttgtaagtttttaagttttgttttcattttacctacattctaacttttcgatattcacacatcgagtttctggtcactaacttcgttgacgagttctcatcgtcaatagacccggtaagactctaataccctatacgaccttttcccccctctatgccccttaaggctatctagtagtttccaatgctactattctatttgaggcaagcattaatgtttaaaatcaagctttatatgatgatgcaagaactattagtttattcaataagacacgaggaagtgaaatgtaatttctcaattgttggagttactactacaaaaaattcttttaattgttggacatagtaaagttttggggagttttctagtctagcattgttggactagaaatataacttcattatgtcaaataatattagtctaaaaaattaataatggacatgatatatatataaatatatatatatatgaatatttcttatttgtttaaaactagtatattttcatgtctaattttgttggactagaaaaaataatccacgtccaactttatctaagttgtaagttggactaggtaaattaatttaaaaaaaaatgcataaagatagtacaatcttattagttttatttttttaagaagtttttattataattttttttattttattattattattgaaattttcaagcctaaacttatagaggtatttaagaaacctcttgaaaccctaatcagcccaaataattttttcaatagcttgtctttcttctctttgagaatccacgactgctccttcagcaaaaataaaaaaaaaaaagaaaagaaaaaacaattcaaagagcaaccatgccgagctccggcgattgtttcacgaagcggtgaattccaccgtgttcgacgacctaaaaatcaaaatagaaagttagcttgatggtcgttcctctcttttctctctcttcctttctcggtgaagccacgagaaggcctcaatgactgttaacgaccaatgttagcctaggggatcacaaaatcataatcattcgttctcacaaaccccaaacttgaaagaggagctaaagcttttcggctttgatttggtcatgtgtgagttcttcgagccaaacgaatcccagaaccgtgatcctcttgtaaagacctttaaaatctcatagcctgattttccatactctatctttgaccaaaaccgaccaccatacatggtggttctctagtgagcatctcagccatcctcactaggagaagctatgcaatcggataactgagatcacgaagtcaggttcccaaaggatcttaaatacattagctggtgttgtgacagctgaagcaaaggacaaagggttgccgcgactttcatcatatgttcagtgttgaatttttattattgcaattatatttttgctctcatatttgtaatttgttttttttttaaaaaaaaaattttgttacaaatgtttttgttcaataagaaattttattattgtgtttttttcttgtagtatttgaatttactttttattcaaaaaaatttgatttaat

SEQ ID NO: 230365 - DNA, 1523 bp, Cannabis indica
accaattactcttatttatttaatatttatttatccctcataaaaatcacgtttatgtattgttcgacaaagaaaaaaaaaaacaatagcacgtttaagtaaccatgacgcaaaacatgtattttttttattattattattattaatcatttagagaaaaccattttattaaataatatatctatataccaccctcattccctatatatatatatatatatatattcaatatatataataatatataatgatagtatgatcatttgtaaccaataatattcaacacttgaattgagacatattataatttcaatattgtttatttatttatggctttgaatttacaaacctgacggctgatgcaaattatcccaaatgagcaaaacaattttagacacaaaacataaacagtatacttaacctagtaatatattctttaatttgatggtgatttgataccagctataaagtaagcatttttgagcaagagtaatgagtaatgatatacactgcatttatgagatttatattaaataacgataattacttgaaattgcttgcctatatatgtagcactttagcgttttgtgtgcacatacatatcattagtatatgtatattatattaatttgaatgtgcatatcattagatttaaaaaataaaaaggattaaggtgcatgaaacctaaaaaaaaattaggtggtgtttgtttggtttaccgtattgtaattttaatggtaataagaatagtaatgaaatgtaatggtaatagtaataagaatactattatcatatttggtttattttgtaatgaatattgtaattagaattaaaattgataaaaatattcttgttttatttatttatttatattttggctaattatgattttttttcagtactttgacatgtattaaatcatactccctaaacttttaaggtcattaaaaatacccctgaactaatgagattgttgaatttaaagatttttttgtccaattttagtaaaaaaattctaacatagatgaaagttcagtgagcatgatttagtacatgtcaaagttcgagtgtataatttggtagatatcaaagtctgggagcatggtttagtacataaacaatcactgaaatagtaaaattgaatgaaactagaaaaagttcttaaatttaacaatctcaatgatttagaaagaatttttaacagtcaaaatttggtacatattaaagtttaggggcaaaaatcctaattagccttacattttcaaagtgagaaagggaagggtaaaattataaaagtgtaagattgtcattgtaatccttattcaggtgtaagagtataatgagaattcatagaattagtgtaatatccattataatagaaattcattacaaaggttagaaatacaaaaactaaatattgtaatgtgattttattccgttacaatcttaaataatttgagggagagagatacacattgctaacatttttgtattaattctcatgtcccatttttttttttttt

SEQ ID NO: 230366 - DNA, 1016 bp, Cannabis indica
gagatgcaggagactttattgagcttcgatagcaagctagaacgattacacctcttgacagcaaacagcaagaattctggtgttaatactggtgcaggtccttctgcagctcttgcaaataaacagtcgaatcacaacagtcatggaggcagggggtattcgaactacagccaacacaacactggtagaggaaatggcagaggttcgaatcatcccaataatcgtggaggaggacatccaagtcgaggtggccgcggtcgtggtggtagaaacaccaaaccaacgtgccaagtatgtgggcgttatggacattcagctgctcattgctataataggtatgatgagacctatatgggcttcaccccaggcagcaacaactcttcacaaaacacaaaagatcccagcgcgtttgtggccacacctgaagttgtcgatcatgaagggtggtatgcggactcgggtgcaagcaatcatctcacttcggaccacgaaaacatgagcaacaagtctacctacagtggtaaggacaagctaaccgtaggtgatggtaatcaactcaatattactcatattggctcaggaaacatgcattcttactgtggttataatctgcaattaaccgatgtattacttgtgcccaaaattgccaaaaacttgattagtatttcaaaactaactgctgataataaagtgtttgttgagtttttctctgatgtgtgttttgtgaaggacatagcaacaaggacagtggtgcttcgggggaagcttaaggatggtttatatcaattagaagggtccactgtcaagaatgtcaagccgtctgcaactcccacttctcagcctctttccgaatctgctttcagcccttttactggtttagttgagtcaaatgttacccttgctagtcaggaacaagtgtcaaagaaggatgtgtggcataggaagttaggccacccttcatccaaagttttaaatcaagtgttgagtctgtccaatgtaaaaatttctactaatga

SEQ ID NO: 230367 - DNA, 1400 bp, Cannabis indica
ggctgctttattggtgattttgtagacttcaaaaataccaattttcatagttttgggctctatttgtgctatttttcatttcttttcttttaataatgctattttttaattcaaacaacaatcacaattaaatccaaacaatatattttcaacataaaatatatcacaataattttaataaaaatatttatttaaaatttcatttacatttctttaaataaaaacaatacattttctttattacttttattttttgtttatcttttttattttttttacaaaattaactgaacattatattattttctaataaaaatatattagattaatttcataaaaatattacatagaaataactttattttttttatttttacactaatgaatatacatttttgactacataataattcgccactatgtagcttgttttaccaaatagtcttaccgaattagttatttattttagcgaaagacattgccggaatttccaaaacccgatcggacagtaggatcattccaaaatgtttgaaccctgtttttgtcgtgttaaattcgtttgaattttttaaaattttacaggatgtctttttttttaggagaaataccatgctatttttagcaaaagactaagccggaagtctccaaaacccgattggaccgtaggttcattccaacacacgccgtaattaggtttggtatgcacgatttaccacctattgcgatgattgacctacatccgtcactaacatgaacttaactacacaatgttgcttcacaaacaactaaagacaacaataaagataaccaatctcaacaagaacacacaaaacaataacacataactaacattgtttaaactaaacaaacagaactcccacacctatttacagtaatcaaataggttaaggaaagagaaaactccctcaagggtcgggctcttcgccatcaatcggatgccaaggcgcaagaatctgatctagaaaatctggatatcccgggataactttgcgcaagttgttttgcatcgcacgcctcacccacatgtctctttcccattcatactccaagtttatcgattttttttttcttgaatccaatactcccagttgttgcagcattgcctcatcaattcattcttttatgcatccctgtttcaaaatgctgagccaatgctataactccagggacatgctgctttgaacaacaattcctgcttttcatcatatttcaataacttcattttttgccttgcacctgcaacaaaaatcaacaccatagcaaaatcattagtaactgtaaaaatttgaaaattatatatatgtaattatataagtatgcatataataatttttttctttttttttttctaaggggtggcacaccccaaatttaatttt

SEQ ID NO: 230368 - DNA, 821 bp, Cannabis indica
ttggctatgatattgactgtaaccacccacttatttggagaaacttatggcgtttatcttgtctttttgcaataattataggaagtgctttagcttttcctttagtactaacttttctggcttactttcatttcatttggcatgctattctagttttctttaacaatcattaacttctacacgtctgtataatatggaggagttaaaggtttgttaaactcatttgacatggcagagtttcaagcatatcatgaaggagttacaaggggctattattatatcttcaacattccaagcaatacttggatatagtggattgatgtcgttatttttgaggtatgattttgtattttctttagaatttctcctaattgatattattagtgtttcaccttgaaatatttgcaataccttatcatattaaattctatgagtttgaatgtatcacttttcatttagaaattaattgccatatttcctatattacagtggattaattgattattttttaattgttaaatttgtttgttggtctttaatattgaaatactttcatttatgtattctgttgtttatgataccaccagtgatatcatgttatcgattgagtcatgagagtaagagttatccaagatatcagtggctttttctggctgcctttgtatgttggctctatagctttggatcatctcatgataatctgtaatggtggtttgttatgcttgcttgagaatattgaaaattgagaatatatctggatagtctagtccagcacttgtcttggcacaaatgaagtcaattgtaaacataagaatcacaag

SEQ ID NO: 230369 - DNA, 811 bp, Cannabis indica
aaaaaaaaaaaaactagtgaatttagcatttgagtttgagggagagagtgagcctagaatatcgaacaagtttggattttagtttttggatttaagctgaatataaaaattggattttttaaatctgttttggttaaagaaaccatctgggtgcggtgatttgaaatcaaacctctcagttaaacttttcggatgtgttatgcagcgaagtaactccttgtcgtctggctctttcgattgctagggacatcagctctgagttcgttattgtagagagcgattcgatgatagttatcaatcctcttaatgggtaggagtcttactggacaattaaaaattatgtctccttttgtaatagttattttcctttatttagtagttgtattttctttaatattagtagaatttgtaattttgtaacccataatgtaataaagtaagtgttttcgtaacataggtttggttttttattttgttttctaccatttctattaacattttatgtaatgagggggagatttaattgtttactatttatctcaatcatgcttttttcaaaaaaaaaataaaataaaataaaaatggatagtttttaataatgtgagagcgtttttctttttgtgggtttgttaggtgggctctgctttgtcttcttgttggcattgtgggtatatgccatcaaccagcagcacttagagagagaaataagagagagagagagaaacagaagagctctggaatctgtgaattttcaacttttgctttctcttttgctttttaagctaaactgatgctttcttattaaacaaat

SEQ ID NO: 230370 - DNA, 884 bp, Cannabis indica
tttttatattgataattgtaattatatatgaatgtatataattttattatggattttcttttcttatttttttttcattctatttttttttattcgatttatagctgctttattgtggtgtcttttctatattttactttccactagcaagttcggccgtgatgatgatgatcatcatcataataaacctccttcaacaacaacaaaatatattaataaaaatcttatttgaattatcattatatttccattttctatttgttgagttatatttacctttgtccaacaagatctcattaatcgagaagaaaagtgataaagagtatatataaatattaataatgatattagaaagtctgtttaagaaaataggattcagtgaggtatatgttaaggtgtgtaagacaaataataaaatccttaacaaaaagttaattatatgaacagctccagctaggcaaaccacataaacaacctcagaacctcttaatgaatttcaatattacgttcatcaacaaaaaaaaagtattaaattattgttattccaataactagcttattgccacaaaaaaatagtacttggaatcataatataatttatgattacaaatatatcatttttgcatatgttattctgaaaattattgttaaacagtaattaatttttttctcttgtattctaatatatatacatatgtctatagttgggacaacggacaggggcggtaccatctttgcatggctccctaattttttaatttataattttttgagagaaattgataaaatttattgtttaaaatatatatgcatatacatatatatttattcattatgagtacatgaataaaaattatattatattgctatattgtcaattactt

SEQ ID NO: 230371 - DNA, 1491 bp, Cannabis indica
tattttttggaaaaccgtaaaaatgtaaaaaaaatattctttgaatgtaaaaatgtaaatattttacaaaaaatggtgccttatgtaattatttcttaataatatgtgttttgtataattataaacgtaaatataattgtaatcgtgatatttaaattgatttattatataattattgatttttttagttaaacaatattgttattattatttattatatattaatataattaatatttataatattattattactatattatgtttagtatattaatattttaaatttttttaataatataatatatttattaaaacacaaaattaataattttataaaattaattaaataaataataaacagttttaaaaaaataaacaaactagatatttttttcttaaattttaaatacttattatctatattagtataaataattataatttaaggtttttttttataaaaataaacatagtaaatatttttttattaaaaaataatgcttatagtccattttattatgatttattataaattaaacaaataataaaatataaagtaaaaattataaacacaaatgtatatataagatttatatttaactttattaaaaataattttttatttatgtttgtactattaacaattatgtttataaatatatgttagagaaaaaattaaataatatgaatatgaaattgtgatcccataaaagttaggtacgattaaattataattaaattagttaattaataatatagataactaaattgaattagtaataatattatatacaaattcattattatatatataaagatgagaatatatttgtaataatatacaaaatgtataataaattgtaaataagtttttttatacatatattgtaatggataaatattattttggaccatgtgttttaagaaaaactactgattcatgaactctctattttgataaatgacaaataggatcttgtatttttaaaatagtacaaatagtaccatgaactgattttctgttaaaataaaacttaataataacataatttagaggtcttatgacaaaaatagttacgtttattgcatctattcgtgttaggaattgttttcaagttggttatattaaaaaaaaattaaaaattgagcttagggtctacaattttagaaaatacaagatctattttgtcatttaacaaaacagagggtttagtaacttttgtaaaatactgggtccaaaatgatattaaccctattataatcaagggattaaaaaatagtgctttatataattatttctataatagaattattttacaaatacacaaaaataacaataaaattataaaaatacggttgcacggagttttatatatttttatgatttttttattttatttatgaaaaatacggtcttttgatgtaattttatgttgttctcttgttaatttgttgttatttgtatgttactatttttttcctatgttg

SEQ ID NO: 230372 - DNA, 1145 bp, Cannabis indica
tgaacttctcttcttttgattttgtcttgcgtttgcttttttgggtaatacgtcgttataatctccgtcccttctccaactatgacttcgattagtatacttgtgactttggttgtagttgtgaatgtgatgatctcttgtaatacaattccttcagtttaattttatgacaaactcaactaaataaaaataaaattagttaacatcaaactcattatgatgatatataaataaataatttatttattgtatcatcataagttttggtctattataattggattgtttatttgtttgattaattagaactaataagtcttgtttaattgtttgataattataaataatatttatgtaaaaatcacattcatatccatatttcaactaaaacataaatgtgcgctatttcaatggagacttcaacttaagaaaactcatgagctgattaccgattgttattaggtaattaaaggtgtttgtagtatattttctccaaataaaggtaattaaaggtgtttgtagtatagtttctccaaataaaaaagttactataaaactatccaagtaatgtaaacttagttgtctcctgaaagtatgctcccagacagctaatttgtccatttggaaagaatctcgtagaatgatagctgctttccggaagtgcattcccgaaagcctacttcaacttttgtttatatatatataatatatatatatatatatatatttttgattaaaatcactcatcaatttacgacgcccacgtccgccaccggcgctggaacctcctcgaaccaggatatatatatataaaatatatatatattgagtgggttcaaatgaagaagaactttacacaaaaatatttttctcaaattactctgctatcatcaggtaacaaacatcttggttctaaatttttctcatttaattttagattaagaaattatagaattggatgaagaaaattttagaaatatgaatataaagtttgaagaaataatttgtaactatgacatcagtcttcttatggttgattttgacaagtttgcatggattctcatgatgtaaaaatatttggaacaaaagagaaaatgtttgaaactaaagaacaaaaaaatataactataactatacattgaaaa

SEQ ID NO: 230373 - DNA, 1268 bp, Cannabis indica
atcatgaaataaatcatgtgaaccatgcaacattaaatgttatttctgatatatattaataagtaaatctgattatattgaaatgagttttatttagggcataaaacccaacacttcatgtggtcatggtggccacaaggggtcgagttagagtggaggaagagactgctcagcccctctcatggatgaaacagagatggacttagagagagggagttctgacgcagaattcgagctagaggagattgctctagtaaggaggaggaagtataggacttgttttatcctccctaaccatcctttgggtcattagaatgcccaagacaatcaactaaatggactaggcacgccttcagaactaggactggattatgtccttcagcagtctcccgagtcggagatattggatgcaaaactacctaaaaaaaggtgggttttgcctgcttttgctctctccgatgaggcctttggtaagatccttactagaggcctaatagtcggtgtccattacgagattctccactgaaactgtagggcgcataggcccccttcgggctggttcggatggtcggagcaccacattgagcatggggcggtgttgccgctccactagtactttctaaacgttgcaacttactttgggatgtgcccaatgtcaggctatttctagcctatactttggatcacttttatgtttgcttttcgatgttttaggatggaattatgcttgttttttatgttttcaggttcctcggagtaatggaggtcctgggatgcaaaagtgcaataaaagacaagtggagccgagaaaaatgccaaatttagactaaatgcaattctggccgcggcgagatagtcatggccgcggccataaagtccaaacagagatgaggtttttacaagccccagtcgccacagcgagaccatcggtggccgcggcgagcgtccgtacgatcagaggcaattttgtctgacgaaccctaaaaatcaaatataaatagaaaactacgattggaaattagtgaagagcgatttggagacctaaaacacagtgaagagcggcaagaagagcaaagtgaagatccagagtcattccaccaacagtttctttctctattcctttttaatttctttatgctgaatattgttttaggaatggttatggatttgattctgaactaaatttcccatttagggaggatgatgattgttgtttaaagttttatcctagttaatgaataattgccattcgtccattcttgattgtg

SEQ ID NO: 230374 - DNA, 1144 bp, Cannabis indica
cttttaatgtaatggaatatacttggtagtttgattaaaacatgtaggaatttggaaaatgtgattaagattaaaactacttttaatcttttaactaatgaaggtgaaaatgagtgttagagtatttttttcctgtccaaattaaccatcataaacaaaactggactggataaacaaaattagtattataatagttgtattttctctctcaatttaacacaatgtttggtaggagggagagagatgggagcaaatatctattcttcttgtttggccaaatagatttgagaaggaaaagaatagttagatggagaacaaatccttctaaattctcaatttagaatctttctatggaatcacactctcccttttaaattgttcgaaactacaattatattttcttaatatgtcattaaaacattatttataaggactacataataattttagaaacaaatactcttcattccccatcgttttattgttttctaccaaacaatttaaaatgattgctacttcactttattatttatccctcgtaataacagagtaatgagataattaacttgtaactaataattaccttgagtaaaaaattatatatcctgaaaagaaattattattctgctctgctgccacggccaaaacttcaggatattttttctaagaaaaataataaaaaaaaaaattacgagaaatgttaaaaggcactaatagtgtctaataggggtgggcatccgatccaatccaacttttttttcctcatccgatccaatccaattagtaattggatttggaaaatcatcatccgatccaatccaattagacctcaaaatccaatccaatccaatccaattactaattggattggatcggttttttaattggatatccaattacacagctaaagttcaatattaacttaaaaatatgaagaaaaatacgtaaaaactaagtattaccttttatttaagtttaatacttcataaatatactatttttacaagtgtaatgtagctaaagttttaaataattaaaacaacaacattttaagtaataaaaagaatcaaaacatcataaaaataaatacacaaaacaatcaagtgttacaaattcaaatatacaaaaaaaaaactaaataaaa

SEQ ID NO: 230375 - DNA, 1802 bp, Cannabis indica
aaaaaaaacataaaaagaaggctcatatgataattgggtttcccgtacacacatacataccacctaattctaaccacacacacttcgccactgcaaccactgctctccctattacccttcgccacaatacttggtctctcccactcaacatattattttcaacaggtgtatatatttgaaatcgtttcatagctcaccttataattattgcttaatatataattctgatactttgtcttctcattttttgtgattgtttttgaatgcactaaaagtacatattaatgagtagttaagttgagtatgagtaagttaaatgttggttaatttctctgttattaaattgttgtttatttttctttacaggccattttgtaattttactatatacaatcaaatatgggagtgatgaccttgattccaagctgtagcttttcttgcaactatcaccagtatcatcatcagattattccctcacacaccttaatagctcaatcctcaatagaaaatgagctttcaagaacaaaaggggctgttggttcaagagcaaattccagttgtgttgataaagaaactgagaaattctgtggagttttgaagagaagatccgttttattatctgggttttctttaatttcatcagcagcagtgatgggttacccaaatgaaagcctgggtgtggtcaaacaaggccttttagctggaagagttcctggtttgtctgaaccaaatgaagaaggttggcctactttattacttatcttttatttcttgatggaaactttattacctatcttatacaaaaatatatagaggaattctacaagggaaatttacatagtatattaatttttgctaattttttataaaaatactgctagacggtattttttacttttttactgtgtttttttttaagtttcatgctacagtattgtgttaagttttcactggtgttctactggtgttttgtagtagttctactgttgttttgagttgttctgttttatttttactggtgttttataaaaatacagtatttttgaaaacttttccgtgtgactgtattttagtaaaatttaatccaaattacagtatttttataaatttctcttctataaggtgtcacttttgccacaattctagcaattagtagcattagttgccacaattctagcaattagtagcattaggcttacttcataataggattttgaaaattgagtaaatgttgtgttagatagtgatttaaccaattataaaaaaatctactttttggtaaattaagaaattataatttaaatgttataatagtgtaattattaaaataataattacaactctattttaaaatataatttacaaagtgtaactgtaattaatattttgtaatacatccaattcttataaggttatgagaattggagaattcaattgaaactctttatttatttcaaattactaattattgtgtaattattaaattttataattactctaaattacattcaattataattagatagcaactttttaaatatgcactatacttaatatagtgcatattgaaaataatttaaattattgtataaagagtttcttggtgcttatgtttttttgtaaccggatgcatacataaaaaaaattgagttattatttgtgtcaaaaacagtagtgctcctacaataaaacccccgtaaaagaaaattgaaagtgatgaattttcatgactggaaattgtgtgtgttattacttagtaaagaaagcatatcgttagacaggttggaggacataccaaagac

SEQ ID NO: 230376 - DNA, 907 bp, Cannabis indica
cgaatacacatactacccttgtcactgctaatattctcaccacggttactgaggctcaaaatgattctctacttgactccggtatcaaatgaagaggtccgtaaagcccttttccaaatgcatcttgataagtctccaggccctgatgttatgaccagcgttgttggaacattgtaagatcggacatgatcaatcttgtaaggagcttcatgagaacaagagatcttccacaaggtctaaatgatactaacatggttcttatcccgaaattcaggaatccatcttcaatgactgttcttaggccaatctctctctgtaatgtgttatacaagattatctctaaagtgcttgccaatcatcttaaagaagtcttgccacaactgatatcaacaaacaaaagtgcttttgttcctggaaggttgattactgataatattatgatttcttatgaggtgatacattatctaaagagaaagagccatggtaaagaaggttttatggcacttagtcttgactttagtaaagtctactatcatgtggagtggcaatttctaagggatatgatgtgcaaaatgggttttagtcaacattggatacatctgattttgagttgtgtctcttctgtccgctataaagttctgaatagtggaagagaaatgggacctataattccaacaagaggtattcgccaaggtgatccactttatttttacctatttctaatttgtgctgagggtttctcagctttgatcaagcattttgaaagtattggacacctcagaggttgtaaggttgctaatggtgctcccattatctcgcatatgttgttcgcagaccatagttacttatattgtccgagctaatgagagagaagcctctaatgtgatccaattgttgaagatctttg

SEQ ID NO: 230377 - DNA, 876 bp, Cannabis indica
ttttgaaaggggataatttttttggacctctaagttagttgggccctaaacacagcctaacccgtctatacttagggtcgggcctagttgaaaaccttcacatccgaggatttcctataattgtttacatatacaatagaaaaaatctaaattaattaaaaactgccgataagcacttacttgacacttacaaaaagactgcaacaaatgtgtaataaaatatatttttacggttaaaaactttacttacgtataagtattatcaactcaaattactctatgattatttatttatttatttatttcgtctctataccaatataacataattattagattttaattaacttaaattttggtaaatgctttgttgtgttcatttaccattggagacctaagagaggaggagacgagtaaagaaaaaaaaaaaaaactagagaagaaaaaaaaaattaagaaactcaccctataacgacgacacataataaatcttcttcttgggttcgcatttgttcacaaaattttaatcactgtagagcattgacaagaggagatggagcggatgactcgagcaatagggtgagtttttatagtaaatagtaaaacaaaataagagttcaataagttttactatcaaaaattgtgtttatgtgattaagtgttaaaaaatataaaattcatgtgattttgttgctaatatcccttaacagaaccacactaatttaggatagttttaggataaaatactttcaactaagacaataataattgttaatcaaaaaataaataagtaaataaataaataaaactaaaacaataataatgcatatgaaaaaactatactatatcttcttgaattttcttttcttttttttt

SEQ ID NO: 230378 - DNA, 1248 bp, Cannabis indica
attatttttatatagggagagagttaactgatgttaaggctccattgacaaaaatgaagtaataattatgttattgaaattaattatccaaatagttttcaaataaaaataataataaatcataaacttggattatgagcatttatattgatagatatatagtggggtttagagtaagtggacaaacatagcatttgattgagtggggaatggaccacacttttaaggtgggcgacagggagagcccacaccgcatggtctctgggccgcctgcacgtgaactccttaagattgggcccaccaatgtggagcccaagatggcaactcaacctgcacatgcaaaagcccacatctttctctctctctctctcttaaattataattttgtacttgataaattacagcataaaatttaatatttagattatatttcaatacataatttgagtttgatcaatatataggatatcatcataaataaaataatactgaatataataatatagcttttgttgggtcataatatatatatacaatacaaccatatccaacatcggttagcccatatgtaagattttttcttttcttgtcttttctttcttttcatattaatcacaaaagtacttatattttattatatatgccacatcatcataaaaaaaataaattagaaatcgtgggtttattttattattattaattttttaagggaaaatcgtgttttctaatgtgtgtttttattaactgaatatatataattatactaaattaatattagattgcacatataattaattttttatttaattaggtgatattaaatgcaatataagtatgtttaattttttaaattaaataatatatatttttaaaaaaatttaaaaaaaagtttgaaattttgatctttgtatttttttttttttgctattgcaactatattgatatattatttgaatgtgattatttatatatattttatatgtacaataaaattaaagtgagatatcgtggtgaatatataatttagaaggctaaaaataaaattgtttagtataaagatgtacaaattgttaatgatttattcaattttgtgaaatttattgtaaagaaagtttatagtctacatatacttcttttttttttttgtagataaaaactattgtattgatataaaatcttcctcaaatatactctaacaaaattcaatcaacatccaccaaaaagcattaacaaatcaaaaaacatgaa

SEQ ID NO: 230379 - DNA, 1886 bp, Cannabis indica
ttaaaaaataaaatttataaaaatataactaaatattagttgcacgtaaaaataatctagtatacatatgaactcaacttaaaatgtacttattatccatttaaacataaaaaaataattattttgttttagaaattaaagataaagaaaagttttctatataggctatagtaattaatttgaaagtaaattatactatattatatgttaattcaagtagtttcacgtcatgtgtttgaaattagttcaataatcctatatatatactattatatttccaaagcaaataatcaaaggtgacaagaaatgtttttgtttttgtatgagctgtgtgaaacgaaaaaagaaaaagaaaacgcaataaaagataaaatttcctttaatataatttaattataaagctatttttcatatgagaattaggacactattgagtttccaactcatcaatttcatgattaggcaaaatggaggcaaccgactcatattttatttatcataatataaacccataaattggccacttacacttgtaaagccaacttttgaagttttaagtgttgacaagcaaaaagaaaaatccaaaataataattatttgtatgaaaatatattatagcataataagcatgcccactaaatattattattttatatcacattatataatattatatatttaaccattcccactagaagtcgacaacttatgagttggattaattgatcatttgcatgctaattacacaattaattaatcattaattttctttaagtttggtcccatgtagctaggtttttgtgtgtgtgtgacaattttataaaaataaatgtaacatatggtatatgtgatttgccaaaataaacattttaaaacccacttcagttgctttcattcagtacttgatagatatagtgaaaaataatactatacaatattagtcaattatataaatatatatatatatatatatactgtataagacaagttcacttgtttctaggatttcaaatttcttcaatactattctgttgaaagtgtaaaaatatatgtagttaattaatataaaatatggtatatatccttgtctgatgactattgactagttttcaaacctttggattttttcttcacttctagctaatgaaaataaaggtcttcttaggaatggctattaagttaatagagatatttgtgctgaaatttcttaatcttaatgtatataattgttacatatatgattataataaaaaaaaatagttaaagtattttattttacgattttgttacgaatgtattattttttagacattaagtgtcaacttagaaatacatgacaacatattataagattatgtattaaataaagttaaaaaaaaaatatgttgctacatgtttttgagtaagcacttaacggatttaattgacatttaacaatcaaaaaaggtacgacaacaataaaattgtaaactaaaatacttctactgttattttttttaattagaatcatatgtataacaattacaaatattaaaaaaagtgttgctccaaatatctcaagttaataaaccttgaaaagttgaccccttttcttttattttttctaaatttaaattttagagtgcgtgcataggcattcgaaaacaactttctaaattgttagaaaaaacaattatctaataattaaactcttagtaatattcattaaagaacaaaaaaattcataattcatatgtgttattatataaaaaaatttatatgaagaatacaaattgacaatttatttataaaaatatatttagaaagtgtgggtaatatatcattttaagggttaattttacaaatgcacaaaaacaacaaaaaatacggtttcatagaattttaaa

SEQ ID NO: 230380 - DNA, 638 bp, Cannabis indica
ttttttttttaaattatcccatttagaaattcttatggtttgtaacaagttttgtctttaatctaaaatttgggtgacactaattttttatttttcaaaatggtgccaatacttcctaaattctacttctgctgacatggatggattgaggtaaaaaaatatgttaaatttagtaaatattatgaaaaagtaattattattaatgaatcaataaattagatgtatattttaaaaaatgatagtaatattgtaattaaaaaaataaatttaaagtaattgttaaatgaccaatagtataaataaaaaatatgttataattggtacaatgctatatttgtattagtttaaataattttaaaattataataaaattaaaagagaattttaaaggatgaacaaactatataaagctgtgaatactttttttgataatggaatccgcaaacaatcaatacagttaataagatttatattaggtcattatattaaggaaaattaaaggggtatgcattatgcaataaattgagtagtcaaacaattttctagtgttttgctattcttctattgctctacaattactgcaactgttttttgtctagtgagttagtagttggatcttgaaataaggagaagctgaa

SEQ ID NO: 230381 - DNA, 1202 bp, Cannabis indica
ttattagtaaatctgattattttgcaatgggttttatttatggcacagaacccgacatggtaggttttaaagtaaatttaaagggggaaggggctgaagccaggagatcctatttctcccttgctctttgtacttatcatggagtatctcactagaagacttcaattggaagttcaagaaaagtctttcaaataccatccaatgcgtaaaagtcttagtttaccagtttgtgctctttagatgactttatcctcttatgaaaaggcactcaacaggctattaggcatctttaaattgctcttgatgattttagctcagtttttagattgaaggccaacaatgctaagtcccagattttatttggtggtgctacaacagttgtaagattgaaatcattcggaagtgcaatttgatgaaggtcagtttcctctcaagtgtttaggggtcctgttacgaaaattgtaaatagtacgcaagtgcacgtaatcaagtagtaagctcacacaggtgaggtcgaaccacagggaattggattgagtaccactagattaaatctatgtttctatttggcaaatcaatatttcttgagtttaataattgaataaaaattcaagaagcttaaagtgacaataaaaattaatcaagatgagaacatagggaagagagtcctgttgatagatttacccaattgttaatgcctaattaccattccagttcttgttataaatgacagattattcaaattaacttagctcttttcagatcttctaggttctaaatctcatgctctctaattaatctcttaattagtttcacataaaatctgcattaaacaataatctaaatcgtcacataagtcatgcaaataccttcgttttacataaacctagattatccaaattttagcattctcaattctcacttttcagatttcgaattgagatcatagacatgcaaaaggtgatcaagcttaaacatggaaataacacaaataaggataatttcacaatcaaaatgaaaaggaatggcaattaacattaactagggcaaactttaacaaacattcatcatcttccctaaatggaagattagctcatgttcaaatccataaccattcctaaaacagaatttaacataaagaaattaaaaaggaaggaagaaagaaactgttggtggaatgaatctggatcttcactttgctc

SEQ ID NO: 230382 - DNA, 977 bp, Cannabis indica
taaacaacaacaggattctcctccctatcatctcatattgcttaaactttaactctgttttgagttttctgaattacttcaattcttttaaatcataattattttcgatttgccaaaaagaattataggtatagtttagtagtagttaatccaattccctgtggttcgacctcacctgtgtgagtttactacttgattgcgtatacttgcgtagtattcaataattatagcaacaggttggggtaagaggaaggggaatagaaaggatggtctgagccacgtgggccgggtagcaagactgaattttagctatgtccccacgtttgccgagtagcaagactgaattttagctatgtcccacgacatagtggatgttataaaggatgcgaccttgtcagggacaggggataagggagaaacttgacggaaacccgggatccaatgatcagaagaagtggaagtgttctgtccattgccaatttttgagatgaggcctttgctaagcaactctttccctcagcaaatgctacgccaaacgaaagaaggagaataccccgtggagctattaaggaagggagaatgagggtaatatcaggcagataaaattctggaaaccgttgagtttggttgctttaagatgcgccaggcttgctttgcaagcatggcctgattaaaaatggaccaaagaacgaaaaccaagtccgccatcctttttggacatgcagagctttttccagctttgccagtgggttttggggctattgttgtcattaattccccaccagaagttggccatggtagattcgagcgagcggcaagtggccaccggaatgcggaagcaagccatgctataggtaggaatggcttgaatgaccgatttaaggagaatctctttgccccctctcgaaaagactttgtttcgccaattatgaagatggccccagacttgtcatgaaggtaatgaaacagttgttttt

SEQ ID NO: 230383 - DNA, 1882 bp, Cannabis indica
tatttataagtgaacaaattagttataccaaacaagaaattattattagttaaattgagaaaattatgaaaactgaagtggtttcgttgtgcttgcatgtgcacatgtcccacttttcttgttttattttgttattatttttatagagtttggaaattagaactacaaaaaattactatttttagtgatggcaactttttagtcataagttttagtcacaacaagtattgtgattaaaaatacatttagtcataataaattataaattttgttgtgactaaaagtaagattttttggtagtgtagataattaatgttattttggtacgtggtgttatattatattatgttggattgtataatattgtattaatattatttaatacaatgctatatttggtattgacttatattaatagcttgtgtaaaattatattatttttaccataaactcgaccccaacttagacccctgtctggttctggagtccaaggtcgagttcggatccgggagtcgagaccaagtctgggtttcggggtcgaattcgaggtctaggtcccgatttggatgggggcgagatccatgtttaggaccgggttctagttcgaggtttgggggccaggttggggtttggggtctgagttcgagtctggggtggggtcagggtctaggtccggagtcggattccagttcaagtcctaggttctgggttttggactgagttcaggtttggagtttggggctgggttcgaggtggggttcggggccgagtacctaggttttggtttggggttcgagattagggttgggtccccaattacagaccttttttaaatattgtaatacaatttaatatacttataatttgttatgtattaaataatacgattcacaatatatttaaatttatgatcataataattaatacaatatgatattttatctaaacatctaaacatagtgttatttattatttaatacaatacaatcctagacaacgccgttaatagttaatagtatatctaattaattattagtaattaccaataaaattaacagtacttgatgtttagaaataagaatgagtgcaatggatatgtagaaaaatgctaggaagggcaaagattagaccaccacctcatttgccctaataataacatattatttattattattaattattattaataataatttaataattattataaatagtccccaattatttataagatgtcgtattagggataataacaatactttatacttgtataaaaactattaactacgaacttgtttggtaataacatatgacctattttttaatcaatatccatatgacctatttttaacatatgaaattagacaatttaatcaatatccatatgacctattttttaatttttgagggtatcgaataaaatttttgatcaccttaatatactttattgtacaattgggactattttaactcatttagagggtggattaaaatagttccaatagggagtttttttagggattttttttttctttcacatttctacttctaaattgattttaaaaaattaatatataaatatatgtaacgtatgatatatttaaaataataaaataataatctttaaatatttcaaattataagccatgttaattttattgaaaagctttttatttatttatttgttgttatttataatatgatgaaatttaaattttagaataataaattatatatcataaatattatataatttttagaattattatttttgtttattgaaaattatttagtttatttaatttaaaagcttatttaacattattttcataataatttatatacatttttaataatattttattttgaaaattattttatt

SEQ ID NO: 230384 - DNA, 1188 bp, Cannabis indica
aaaaacattaaagcatcttaccaaacaatgtttttgttgtgaaactactagtaaaaataaaagaaaaatgatataaccaaataatatttttggattgagtcgcggaccaagttgctttttttaagatgttcgcggcactgctcaggaatgtgcaagcaaccaaaaaatttttggtcgtccccaagataaaacaacccaatcatcgtacactatatcaaaacaccaatgcaatatagcgaaccatcgaatacaccctaaataatattacagctcaaaataaatcaaataggaaaaatagttttgtgaaaagggatgtctttctcctgttggttatgatgcattatatagggaactcagagaaatcaaatggtaagaaagtcattttttctgaacaggggagagtgagttagatcgtggctgaaaaagctgaggagaaaacagttggaacttattttatcaggatctagatttactaacatgtatgttgattatagaactataatttaacatcctaaatatgaatttcttaaaataatgaagtaaacacataagagattaagaaatttttacattagtggcagcgaaatataatgtttccatcagagagtatgatcaagatctataccgagatctccttcaggtgatagaattcttcacaatcttccacaaaagcctgagtattggcttgaattgtgtggacaattcctcaattcactaagggtttcaaaattctaaaaaagatgagaggagaatttcgaatatacgaggctctctttattttctatgttgtctgaaaaagtagtctgataagcattataaaaataagatccatcactttctatttataggatttcatctagggttaggatttgaattatttgaaattaaaaaagatttaattgaaccttaagtggctgaaccctatgtgggccctacaggtttcaattttacttgtttatttagcaacttatcttttctttcaaaaataccatattttaattctaactctataaatgtcaaatctatctatttaataaaattttcatttaacttatttattaattagaccttacaaagtctcttaattaacaaataaaccctaaatcttatatttcttctcaattaagcccttgcttagtgaaaattcacaaacaagacatagtcttagttagaattataattgattaa

SEQ ID NO: 230385 - DNA, 1102 bp, Cannabis indica
ggaagaggtcttccttatcctctcggctactagcatagcgaaggaggtcttcttcacctctttggttgtattcataatagggaaggtcttcttgacaaatgtcaatgatgtcttgtaatattcgcgtgttgctctttggttgtcaaagagatgatcgataccaattggtgtcaggaacttaacagataagtggtagatagatgagattgtttggaggttatagagtgttgacattcttattattacattgaaaggatatttggtgtcatccactatgaaggtagtcgttgtggtgttctgccacgatgcaatttcaactgttagtggtaatctgatttcaccacggggagtgatgtcgacttcgctgaaaccatacataagttgcttacatggctctagattcttgcagggacaaacccattatttttagggtctatttgaacgggatattcgatgatgctccattgttaataatcaccttttccactatcatgttagcaatttaaacctcactgatgagcagttcattctttggttgatcaaagatacaaccaatgcatgttgttgttgggagacaggtaggtggaatgctgaaagactagctcagtggttgccttagttttgttgtagttgcccctagcatcaatttcatagtaactgaggtgagaagctttgaaatttatttgttgaagctatcttctagcagtgagatagaccactggtgagacgtagtgggttattgcttgtgctcttggtgctcgtggtgaacttcgtgcacgagtttgatatcttcttgcgatttttacatgtaatgcctgcatttgctcctgcatgatcatgtattgtgtatttgttaattgaataataccgtcgaaagcttgagcgggtgttattggtagaaaatggaccatagtggctgtaggtgttaaagtttctccaacatggcctgaaaaataaaggaaatagattgaggggtattgtggtagtacgccccactcttcccatcacagcatcaactgggttgtccttccaccagtaataggaacatatatagatagtgccaatgttgatcgttttgatgttggtgttcatgtttgtctat

SEQ ID NO: 230386 - DNA, 1043 bp, Cannabis indica
gattcggttcaagaaatcgttgcaggcgactacctttgattgctgccagaacttggtacttccatggtaggtagttaaactcatccaatcgcacagagagagaatgagagaaggaaactaggttagttttttgtaaattgaattgttgagagatacctgggggatttgacgaggctccattgttgattgctgatgaatgctccgtgaaagaacaagtgaagctctgataccatgttaatgctcaaacaaaagaaagaaagaagagaaagatgaaacagaggtaaaagatgaactgtttttcattgatccagaaaaagagacaaagttccttatatacagagagatgagtaaagtgcagagagaaaagactaacaaaagttagttacaacagtcctaaaagagcgcaacaaaaataactaacagtaattgaattaacagaagcttaggttcctttgacaattaactcctttctaattaaagattttaccgtgtcatgaaaatcgtacgttatttaaaattaatcaaacactatttggcttcttcatcatgcatgcattggccccataataataataattataaagatggtcaagatcgaaagcaacaaccttggaaatatgatttaattgctgtcaattattggatacacaaattggtccattgataggatttatcatactttaattaaattccatgctctaaataaaagagatatatggtgtattgtgttgtgttcacttttcaatagaaatttgttgaaacgcacttgcttaatttgaatcccttgacccaaaaacgacatgtcattttggtgttatatgtaataaacggtgcacactgtttacatatagttacgttatgtatgacattagaatagattttagttcatgaccagtgccgttttgaatagggttgtctttaactttacgattaattaggccaccaactagtgatacgtatatcattttatcatgaatatttgtttgactgttcatataaatcaattaattattgtttttggctaattaattgtaaaagcttga

SEQ ID NO: 230387 - DNA, 1483 bp, Cannabis indica
tataatttgaaatatattttggtaatcctaaaacctattttttaaaagttttaaacaattaaaggtatgtaaactactacaaatttaccacatgtacaccgtgacatatccgttataacagtacttaacaaattattttgaacgaaatgagtaaatagttaatgatttgttttcgtagttttttctttatatctcaccttacatatattatatattgtatgggtataattaactaaatatttgagttctttgggtaatcgatttttttttaatgtgaagactatctagttattataaaggtaattttgtattttacaaaagttattaattggacactttattttgttaaatgacaaaatagaccatgtattttcccgtttggtaacacttttttaatagttttttgtttttaaaattgaaagagtgaaaatatttttcaaaaacatgttctataaaactgtttttactttttaattttttaattgagaattaaaattttaaaacaaaaaaaaatcactcatcaatatttttttaaacagttttttttttctttattaatatcttggacttcgatcagacccggacccaaatcccctcacggccctggcgctgaacctgacctctgacttaaacccgaatctgaccccgaacctagacccgacgtaaataaaattaaaaaataaaaataaaaatgaactttacagaatacacttttgttttctgtttttaaatagaaaaacaaaagttattacagaacacatttttattttttaaataaaaaattttactttcattttatgattaaaaaattaaaaaaaaaatagttacagaacagcacctaaaattgtatgaataggacccttaactgattttttgtcaatataaaacttaataataatctaatctaaagatgttttgataaaactggttgcattttctgtatctattcgtgctagaaattgtcttaaaattggttatattaaaaaataaaattattaaaaattaagctcatcttatttttattattttataaaatatgaaatttattttattatttaacaaaacagaaagtccaattgataacttttataaaaaaaacagggtctaaaataatatttgactttgttataatgcctcttacaaaaaatttgagttataataagtgtcgagaatagaatgacatactacaataataagaagaaaagtgttggtcaaccaataaaattttcttagatatttagattgatatgtttatttttcacgtaggtaactcattaacatgtgtacaagaaaaatgtgttaaaatgcgtcattattgtacgtgtgccaagaaatgacctatattttttctatgaacgtacgtggtcgtggggtaagtatcaattattaactttgccacgattctcatgtacgtgctactttcaaaacgaattaagatctttgttaaggagtaaatattagtggattttgtattttgcaaaaa

SEQ ID NO: 230388 - DNA, 1444 bp, Cannabis indica
gaggagcttgccacggctggtgtggagctgcagatgaagaggttgccttagaagctgaagccaaattgcctgttgaaaactggtgagataagccatcgattttccataaatggcagcaggattaagggccaatttgttatggaaaatattgtttctgtcaaaccaaataaaccacatggtgcatagaatcttttccaaatcaaatttggtatataattttgacagaagcataaggaaatccccatcttgcattcgacttgcagcttgaaaatcaaagtggaaatctgacaatctccaaacggctttagcatgcttgcaactaaacatagcatgtcccactgattcccaagcattcgaacataaactacaggcagcagaagtaattattttacgctggtatagagctgctgcagtgggtagtgaattctgaatcaatttccaaccaaagatcttaacctttgaaggtatgttcaaaccccaaaaattattccaccatgaagagtcagagctggaattagaagaggaatgttgatcctccaaagagcaagcgaaatggtagccagattggaccgtatattccccatgagttgtgtgatgccacacccaacaatcggctagagcagtggaagataaaggtattgtgaggatcttatcaatatcaacaactgagaagtccctttgcaatagaagtaggttccattcatgatcagaagtgatatattcagcaactgtagcatatggtgaaccagtaaagtgaattggtgtgaatgttgttcgacctggaagccatggatctgtacaaagcgtgttcaatccattcccaacttgcatcctcataccttgaaccattaactcacgaccccaaacaataccttgccatgtgagggatgagttataacctttgttagccgaaagaaagtcaccatttaaataatatcttgctttcagcaagcgtgacagaagagaatcgggattgtgaaaaatccgccaagcttgcttagccaataaagcttgattaaaatgaacatatgaacgaaaacccaaacctccttccatttttgttttgcagataaatttccactttttccaatgagtcttgttcttatctccagttgaaccccaccagaattgagccatcattgtatctaattgactacaaaaactctttgaaagcttgaaacaactcatagcataagttggaatagattgtactaccgctttcagaagaatttctttaccaccaatggagaacaacttatcattccaagcatgtaaaagcttccatattctttctttaatatcagcaaaaaggtgttttttgtcatgctcagagtatgcaggaagacccaaatatttttcatgacattcaccaaccggcatacccaatatttgactgaaagaactcttaacagccgctgaagtgtttggtgaaaaggacataaca

SEQ ID NO: 230389 - DNA, 615 bp, Cannabis indica
attcaatcacttttttcttcttatttaaaatgaaaaatttgtggatttatctgactacttcatgtcatgtttggtaaatggtaacaagtactaataaccgttgttccaacccaatcatttattttatatcttttgctgcacgtccatatatgtatatacttttttttttctctttttgaattatactgtatacgaactctgacaaaacactcacaacacaatttcaaatgaaacttttttatttgaagttcataattgaggaagccaaatggaaaagttctattcttggtcgggtcatcaagtttacaaggttaaaattccaatttttttagtaagaacacgattgatggggttaaaaggggaattagagaggccattggaatcaatgttccagagagtaatgtgaggtacctcggccttcctccgtactagacagaaagatgctgattttaatttcatcatggacaagctttccaataagttgcaacggtggaaagcgacaattctctctaaagctgggcgagccacccttatcaaattagtggggctggctatgccggtgtactccatgcaaactaccaaactctcgaatcgacttgcgactagaattgatgg

SEQ ID NO: 230390 - DNA, 2695 bp, Cannabis indica
agtcttgaaggatctcaagagttgagttggtgcactcagccacaaagtctataaaggcttgaccctttatggctattcttggttggtatgtaatctcaaactagccaagctcaatgacccatttgagtagtcagcctgatgctttaggtttctacaaaacctgtcacagcagctgattggtgtacacttttatagggtgtgcctggaagtaaggcctcaagtttttagaagccaagagcaagctgtaggtcaacttttccatgagtgggtatcgactttctacgttggttagccttttattgatgtagtatacaaagtgatgtacactatattcttctcttgggaggatagcattcaacatgttctgtgactgctaggtacacacctagctcttcattgactaggggttttgacaattaccgtggttgggccaattgtttctttagcacctagaatgcgttttcacattcgtctgtccactcaaattttttggttcctctgacaatgttgaagaaggatacgcatttgtctatagacttggacaaaaatctccttaatgcagcaatgcatcctgttaggttttgtacttccttgacagttgtgggtgacttcatgtccaaaagggcttggatcttgtttggatttgcttctattcccctggcgttgactatgaagccaaggaattttcttgagcctacgccaaaagagtatttaagggggttgagcttcatgttgtagctgtgaaggattttgaagcactagtataggtcctccacatgcccccaacctttttaaacttgacaagcatgtcgtccacatacacctccatgtcacgactgattggatccgtgaacatcatgttcaccagccttttatatgtgtcccctgcattctttagccctaagggcatgcctttgtagcagtaaaggcctaggtccgtcatgaagctaaagtgctccttatctggtggatgcatcttatctgattgtaacttgaatgcccatccatgaaactcaagatttaatggccagttgtggcatctactagctggtcgattttaggtattagaaagtagtcttttggacatgctttgttcaggttggtgaagtcgatccatactctccacttcttgttggattgaggcaccagcactgggttggatacccactgagggtagaacgcctctattatgaagtcattggattgcagcctttcaacttcatcattgagcactcggacacgttccttgtccagtaacttcctcttttgctgaacaagccggatgcttggatcaatgttgagtgcatgggtcatcacgaatgggtcaattttgaccatgtctccatgtgaccatgcgaaaaggtccatgtttgcccttagaaattctatcaagattgatttgatttcttgagccaaacctttaccaatctttagtcttcttgttgggaaagtgggatcaacctccacttcttccaacttttcttcaggtccgaagcttcatgtaggatccccaaaataaggatctatgaatgtgtgcccgccttggactagacttcattgccccttgttgggctcgttctctgggcttttagcgggcatcttctcttttttggccttggatagggccagggtttaacagtgatgggcagactgttggtctcccctcacatatgcaccccatgccttgcaggaaatttaaggcataggtggtagatagatgtcactaccttcaggtcattgagggtcggtcgacctattatggcattgaaagccgagggaacgtcaatcacgacgagttttgccatcaatgttctggtggttgaattttctccacctgtgaggggtaatctgatttacccaacaggtgcgatgccttggccaaagaagccatacatcacttggttgcaaggtgccaggtttgtaaggtggagccccatcttttcatattgttaatttgaaaagaattttggaggaggccccgtcgtccaccatacatcttcccactgaagccatacatcacttggttgcaaggtgccaggtctgtaagttcgagcccaatcttttcatattgttaatttgaaaagaacgttggaggagaccccgtcgtcccccatacatcttcccactgtcatgttcccaatttgtacagtaatgactagggggtcattatgtagcaaactgacctgagcaacattttcttcggtgaaggagatcatgggctctccatgcttttgttgcttagatctctagtctttgacaactatgatttcacttctgggcttatgacggagtgtcttagcatagcgctccttagctttactggtctcgcctgcaatgtggggtccaccaatgatgaaccttaggtgtcctgccataggcggtggcatctaatctccgttctagcctccttacacatgggtctgcttgtcttgcacataacgacacaggtggggattgttatgccttattagatattcaatctccctcttcagattttgacactcattagtgtcatggccgaagtcattgtgatactgacagaactttgatatgttcgtcttgcccatctatatcttcgtaggaaaaggctatcggtattggactattccctgattggccttgaagatggcctcaggcttctttgttagcagggtgaagtaggtgtacttctcctccttattcttctgtggcgtgg

SEQ ID NO: 230391 - DNA, 1514 bp, Cannabis indica
taatttattaattatggagatttcatcaggttatgtgggtattgtaaataccattttaaaataaaatattttattttcgagttcggcgatcgtggaaaactcgatggagtggtcagaaatgtcacgccggttgaaattatgttgtattggaattataccggactaggttaaaatgttgaaaagtagataaacagagaaaaataagaactgacaaaaatacccctatattatattatagcttaagttttaaagggagtggtagaataattattttgcaaggttagattcttttgtcttttagtgtttttaggctgagatttctttgattagattaagtgtatatgttaagtattatattagtaaggatttataacatagaaaaattaggaaatacccaaagtttgctccttctctctcttcccttcgaaaaacctagagacccactgaaatcagaggagttcttcatcaatttctttagattctagcagatttcactcccaagttcaacctagaagctttgaagtaagttcttttctatgttgtttaaggatttttcaagttttaagttagttttgggttagggttttaagattttggggctgaggtgttaaattgaagttagaacaagtttttaggtttgatttaaagattgtttaagcttaatttagttaggaatagggctgatagttttgtgttagagggattaaggttttatgagctaaatttctactcaactttggtaatttgatgaattgttgtgaattgatgatttgaatgcattgtttttatgttatgggactgttttggagcatttgatcaggtttggtggaggtcgggattggtttcggggtgtaaaaccagaattaccacaaatctaccaaaaccggtcaaccagttttaaaggtaactggcaaactggttggccagttgggggaattctagagtttttccttgaattttctttttggcacggggtgtttcccagaatctagtttagggcattttagtgatgtttgggttatttcaaactactggggagttagatacgactggttacgaaattagggtttgtttgcagagtttggataacttgtttatcaaattttgttgtcgtgacataggacccgggattgtcgagctttgtttccactcaagtcgatgcgcacagctgattactggactaaggtaagaaagctaaatgcactactaagcatgttaagtaagaaacaattattattatttgtgacacgattataatcgaggtaaaagatacagtcattaccgttagtatcaatgagtaattactcgcttaaaaccgtgaatatatttcttacttatcaattgttgtatcaggcatcgatagtgacatatatagcttgtggatgacgggtggtagggatgctttatgaggcatcaagaacagcttgtcttattagagaaataattgttgtgtaatgcttgataatgtgctggacatgcgtatatgtgtgtatgataaaattgtacgctataca

SEQ ID NO: 230392 - DNA, 746 bp, Cannabis indica
tagcttcgggtatactaccatggactttcagtaagaaaaaggcgagtttacatgtgaagattaaacatgatcaataaggatagtataggcaccgatagtattttttaccaattctctttaggagcattactatatgcgggcgcaccactacattctataactttggtgccccacttgttaccccagtttgttgtaagtggtccaagagcaatgctgatctctaattggccagaccacgtcgcccatcaaaaaatcgtcacaagttgcttatatacaaaaacgatctctacggttgtaatggacacacgccatttttacggtacctacgtcttaaagagtcgtataagtgaatatctcataacgttgccgcgcgtggcagttcgtttggtcctccctttgaccgttaaaaccataaaacacctctgagagacggcatcgcgtataggctttgaatcggtgacgagaaatgcattaggtattattattattacgtgtttggttcctgggaaaatcgaagtttttcagttcataaaatttgtccgaaaattgaaaaatatggtggagaagaaagaggaggagaatggaaagaggaagacgagaatgtcgagatggacatttgtgtgtgccctggcgattgtgttcgtagcttcagcattgagctctattacaactccttacctcaatttccctttttctttcattaaggattccaagccctgtcactgtcctcaggtaatctctaatta

SEQ ID NO: 230393 - DNA, 1036 bp, Cannabis indica
atatatatgtcactgacgtgacaatcaattttcccatcaacttttattaatttaaaaaaaaataaaaaacatatcttgaagtgacaaaaagcatgaaaaagaaatttttttatactaattcagtatacaatatgttaattatacagtaaaaaaaatatataccaataatagtaaaaaaaaggtttatgaaaaaaacagtatcttgtgtaaatatctctaagaaaatgtacatccctaccaagagcaatactatttttggagatatatccccaaacatattttagaagcccaaccaatgggggcctaataaccttagtgttggtcacaactttgtttcttaaaaacattttcttttccttcttttttttggcaactatacaaaactgttaagtacacatagaactaaatatttctaaccctgactctgtcaatactaaaaatatttgtttttatagaaacattcaagtttaaaaaaaagtctcgtcaataggttggttttagctctatatttctttcttcctattagtatgtgtttaggtataattaattggaattataaaagtaaataaagactcatatttattattagttactcgtttctatagcgagctcttatatggtactaaaatatttaggagaattactatatatactgtttttttaatttttttttttaaatttaccgtttaggtttttttttattgcaatttagattgccatactagttgcaatagaaatttctatgtataattctctaaaaataccaaaaaaaatattattttaaagtgtaaaaaaactaatttataatttttattaaaataaaataaataaaacgccatattaaattataacaattataatattacaccgttataaaagtattagcgattataagtatgctttaaaatttctcttttgtctctggtatttctgtttaatattccccgccatagtttatgtactgtagaaccttggactactaactaactactaatctaaacatgcactctcttaaagtagagagagagagagagag

SEQ ID NO: 230394 - DNA, 2015 bp, Cannabis indica
tttttttgtatttttatagaaattcacatataaactcatatagcaattaacggatgaacttaaatcaaaattaaaatctatatagcaacccacaaactattagagcaacccaaattaaaaaatactatatgaggtaattcttctaaattaaataatgaatatatattttttatttatttttgtttgaggggattttttttaaaatacgcaccatcttggacaacataactcaattatttttttgaacaaaacaaattatcaactcaattataggattgctctatttcattattaattaatttatcatagcgtgccaactaccaaatatttaataaaattaaatcttattattttattcacactttaatttcttcactaaataatttttttattaggggattcactaaatattatatgcttatcttttaagcaatctaatttttttcgcacgtgatgagtgaaaatatacattataataagattattataatatctcatctgctgtccatatgattcacgatttatattttatagggtaaaatagttgaatggaagtgatttaatatcaaattgaaattgattcaattcaattcaattagaaaatattatatatttaattataattgaattaaattagagcttaaaaattagattctagtgggattaggttaattattatagatgtcaatcctaaagtctaattaaaaactgatattaaattacatttaatatataataaagaagttgtttatacttatttatatataataaaagatattaaaaaataaaatatctatactttaattatatttttttggttgttttttttttatgttgaatttgtatcacttagttgttttgtgtatttattttcatgatattttattctatttttattatttgacacaatattattgttttagttattttaaacttttagttgcattaaattaaatttgtaagaatgatattttatggagtattaaactttaatgacagatgatatttagtttttaagtatttttttcttcatgtttttaagttaaaataaaaatttaagtgtgtaattggattagatcgaatgttgattttctaaatccaattaataattgaatttaatcacattaggagaaaaatattggattagattacgttaacccgaaaaattaccctaatgacatggacatcaatatttgacacgtggcaagaaagaaaacatctcagagctgagtagtcctgagttataacattcaacctaggaagggtccctaaccctatgcccaggttaacttcgggaactctagaatgggtgtttggatcccaccaagttgttttcaactcactaactttcagtattctgtaccataaagatatgaagcatccaagttcaaggcttgggagttgaaaatacacaaaacaacaccatggaaatgaacctgagcgcctagggtttcacccagtgcgcaagttgacaacccaactagggttttaattccaagactgtcttagtgcaaataggtcaaactttgtactaggacatgaattagacatgtcacgaacatatttgaggcatcaaaatcagatttagaacacttttgttttttgcacccaaagcactaggtgccctaggcatccagtgcccaagttgacattttgtcaacctgtggcacttccaagcatcaaattgaagaactatcccatgcattttcttcctcttcatcaaaaatgaggaaaacaagtactttcagggaagaaaccgaccaacctggaggctagaaatggagctcaacgcccaggttgacattttgtcaacttggggccgattccaaggagttttttcaagaagtattatgggaatattttttgttttcgccatatattaagataaaagtatttttaggaatgaaacggaatcatctagtggcctaaaactagtcgcagaacccaggttgatgcttgatgttgggcccaacaccaggttgactcttggttctaggcccaacacctaagttgac

SEQ ID NO: 230395 - DNA, 1529 bp, Cannabis indica
atgggtttacttagggcacaaaacccaacaaaacgttcccgagctcttgctaggaagcttgaggaagttttaggacgtttcatcgaggttgacactgcatcctttaaggaaacttggggtctatatcttcgtgttcgaatcgaaattgatgtcactcaacctcttccccgaggaaccggattccactttcaaggtatggccgcccctgtgtggttggaattccgttttgaaaatctgcctgacttttgtcacttctgtggacaccttagccatattgttaatcactgccctgatttcctagccaagtgcgattctccctctaccccacccctgctacaatatgaccacactctaggagccaaaatccacataacctcaaatcccttttatattgccaatactcgaacccgacttcgtcctcatgttactaatcctatttccttagcacctcctccaaatcctcggccccctacaaaccaaatcatctctgaaccaccctatagtgatccaacatctgagtttgggattcaataatttcatcaaccacgaaccaccccggtaggatgctacatgacacatgtttctcaaaatacctccttcaattgtggccataatggaacaagctcccccccccccacacactgcttttcggcctggccaaataatggaaatgtggtggatcttgatagcccttctcataggccttccccccctttgcccatacccgatcatcaatgatcaaaacgctcacatcaataatactatgccgctccctgaacaaattgctacatcaaatcccattgcggcttcccctgttatcactagcaccatgaataccactaatacagccggttacacggttccggtctctcaagcctttgctactattatggcggatctcaatgcaaaccaacctcttcattttgccattggttcatcatcctcaccagcagtggcttccccttcagttcgccgatacaagccaaagcgtctaccaagcattaacgagattgaatttcgtaagatgcttaaacgtactcgagatctttctcgtgctcttgatgaaggatatattgatgaggcgggtgctgcccagcgcacccgccaagccccatgattgtcatcagttggaatgctcgtggattagggagtaaacgagcatttcgatctctctcccttttaactaggaaatataagcccacacttttgtttattatggagtctaaactccctgttggtgctttaagtagatttaaattgcaacttaattttcctaatggtttagaagttcctcgagtcgggcttagtggtggtcttttgttgctctggactcatgatgttgatgtaactttattttcatataatataagtcattttcattgttacctaaagcctaataatttttttgctttttatttcactggattctatggggcacctagtcatcacaataaagttcactcttggaaagtgctccacagagttggatccaatatccacaactccccttggttgataatgggtgattt

SEQ ID NO: 230396 - DNA, 1290 bp, Cannabis indica
tctgttatactcatattttgagcggcaatatagtattgacgcgtgtaaagaaaccagctcggtctataatgcgattaatgcattcaataaactcgtctcgaaaaatacatgtggtaaaaatatttaaactcacccttttaaacataagagcaagctatgaataataactaccgattgataaaattggcgagatgaacatggttccgtatcctcatccttcgagttaaacacagttccattttacttttgggagatcttttttgtgagctttgttaactctttaattttacgctccaaacattgagtcgtaacatccgatgattctcttccgtgaatacgatcgttgatatggtttcttaggttttctccgtgagatctgactcttaattttggcatcatcaacaacaggcatgtcttaaggattatcctcttgatcaacagagtcattctcctcacattcattgccttcattcataggatcttcagaggcttcttgtcagtttaatccttcttgtggcaactggtcgcctcagttagatcttctttgtatctcgacttagaattggtaccaacatcaacctttgtagggtcattaaatggaagaccagacttggttcagatgagtaccataattattaaaagtaatcttaaaatggtatcactgctttcttcagctcttaacgaaagtactaaaatatttacagagattctcggaaaactaattatttaatagtaaagctaaagaaaatataatcaaaagaacaatatatgaagaagacgtccagaatttttacgtggttagggcgttaatgagccttagtccatgagtcagtattattatgagattggctagaaaagcctaagagattacaatgaatatgagcactctattcttttcttgagcaagtaactcaagaatttacaaacctttgtacgatggattcaatgagtatttatagtgtaatagaggtcatacttagttaccttttccctctaatagtgaatttacaaataatatataagtttggacttatctagtgaagcccagcctatgaggcattacgtgtatgctgatgtggataattaatcacgatcaaatctgttcacaccgtgtcctattattgtgggtaattaatgatatattaattacttaatctctagttgtatagtttttgagatttaaggaaactaattccttatactgtacgaaatagaaaacaagaaactataactggcttctaggtacatgctaaaagtttcttctagctacacgaagtcatgactcttcca

SEQ ID NO: 230397 - DNA, 1505 bp, Cannabis indica
aagagagatataggtctacgaccaactcccttataagcggtgaatactacttctttcctaataactatagcatttgaatatctaatctttttgaactgaacgcacaaattcctatcttcagatttacgaacaaaagctttgtagtgaaacatgaagcctttctttcctcgcgggcaggaagcacaccagcagtgtgcgttgcgtgattctactgtgttttttgcacttgattgggtggacagtggactggaagagaacttcgattcactcgaccaataggcgggcagcgtgcttatcttgtgtgacaacactacaaagtgagtggcgcttctaggcgggcagttctgtgacaacactacagagaaagcggcactttcgtgtaacatgctatagtctcaacgcccttacaaggtagtgatgagtttcactcgctttaagcccagctatcgaggcccaacttgcaacttggcttgctgtccacgtatgagggttgcacatcaaaatcttgccagggaaaagctggtcgaccatgtacttgtaggatataggctggtaggccatacaatgtttgtaggttgaggtctggccagccatgctcctgccagggtctggccgaccatgtgcataccagggtctggccggccatgcgcctgccaagatcttataggtcatgttcatgcactttgacaagtggaggctagcccttggagatagaggccaacttttgtacactttttccttgtagaggtcaggcttccttagttgaacgtacccttccttggtttgaaagtcaccttttggccagccagcttgtgctcgaaccctggccgaccatataagctcatcctagccagcctatagacacccttggccggccaaacatggtggtatagcttcttgacaactcacttaacttctttcgcttgctacttggcagttttgccatactttgtaaggagcctttgtcttactattggcaaggttgtattctacatgtactctgtcttggctaatgtgcacatgccacgtcatgtggacaaaatttgggataacatttgctctctaagtctctgttcgtacatctggttggatagtgactttctagcccttgtcttgcttgtagtagccttatctagtcgagtgtttcctttttgtatggcatgcgtgcttttaaatctttgatcttttctctctatatatgcttcatcttctcttctttgatatctcatctttatacctgccatttataagtttcaagatttttaagctcttaaaaactctttgattcccatgttaaattgtaatcttattggtatgttggtccacatgatagttttagaatgtgtgatttcttgatggaaaaaattcaattttggctttcgttgtgattcttgattctttgagtcatgaataacacgaggtacatatttgtatttgtaaaaaaaacaacacatttaattcaaactaaccttggccagacgtagtaggtcttatttgagtacctg

SEQ ID NO: 230398 - DNA, 1652 bp, Cannabis indica
tacaacaaaatctatataccaataatttacaataacccataaaaaatttaaaaaaaaaagacataacttttaaataaaaaagattttaacaaaagtaatataaatataccataatctttaagtaatttgcttctaattttaaaaaaatatgcaaaaaagtattaatttttttatgtggtaaataataatattaatgataaatagtgtaaaagggtcattctccacaagttttaaaataaggacatttaattatatagtgctttgatttgagatcatttgctataattttcattaaatatttaactttaaattatgtgagattaaataaaattactaaagagtatattatatgaattataaatatataatatttaaatgaaactaaaaatatatactaattggataagacaaactttattaattagtctgagacaaagaaaaataacatactaagaaaatatttatctgctacaatattttctacactatagcaaataataatgcttggactaatgaaagtgaaaaagaaaaatgtatttatagtctagttataaaaaaccacaatactttctaaacaatgtggtattttttacaaaattcgtaaggaatctataaacccattaactaactagttagttaaaacggttatagttagtagttaaatgtagtttgttataaattctgttaggcatttttcttgtgtatctgaatgtaatctacactataaataaagagttcaaagccaactgttttggttgagctttcttggcattttacatttctgtttctctttcttttcctcttctctgttttctctggtttgtaccactggtgtgtaccaattctccaatctgccattacaagcttttacatggtatcaatcgcctctgacctctgtctctcatggcttcctaagataacaactcctctaccgctgctcaaaatgatcttgttactgatactgctaccgctgcccctcctctgcctccacaagttcagccatggaatccatttggtcattccctctctgcatcggtcactgtaaagttggatcgcaccaacttcttggcctggaaatcccaagttgtcccaaccgtaatcggacatgatcttgatgatgttctttttactggtattccacccccacgaaacctagtcaatggagctcaaaacccccaatatcttcaatggaccaaacgtgatcaacttcttctatcttggctaagatcctccgtgaccgaaggcattcttgctgcagttgcctcttacaccacttcatcccagctatggcgtgcccttgaacaacgtttcacaagccactctcgtgcccgattactccaactaaaaggtcaattctctcatgttcgtaagggttctttaaccatttctgattatgtggacaaagtccagtcgctttctgactctattatcactgctggttcttctatttcggatcaagacttaatccttcaattgatgaatggtttgggtcctgaatacgattccgttgtctcgggtatcacttctcgaagtgatgatttaaccattgaagaagtgcaagcacttctaatggctcatgagagtcgtcttgatcatcacaacgctgttaccgatctgaccttaaagatgcaagccaatcttgcctatggctc

SEQ ID NO: 230399 - DNA, 2092 bp, Cannabis indica
catacatccgatattagcatactttttcaaagtcctggaaagaacataacacatatccaaggtgtaagtaagctttatcgctgactacgacattagtgtaaatccagtacattgatgaatcatgggacattatcttttgaagcatataatcacaattaccttccattgtgttgacatcactgtaattgtgaataactatatgttttggatttcacagaaattgtatatattaaaccataaacatgaaaattacatgtaaacataaatgacttctattcttctattgataacaaatcagattgtattgaaataggttttatttagggcataaaatcccaacaccaggtatgtaccattggtggagttggagaatagacaactttgacaacgattggctgaatctaactgatgaaacgatgagttggagagagagtctgcaatagccagggcggcgccgggaacagttcatcagaaccaacctaatcctacggtaaaaagaccgcaaggaagacctcgaggcttgagaacaaggagacaggaaacaaactaggggaatacccaaaatgcccaagaagaacaacttggggatacaagagatgtcccaatgaataatcaaacaaatcctaataatacaaggaatcaataacaacggtgagatgttcctcaaaattcttatggatttgcaaaccaaggaaatgaatgaactgacatgccaaaggcatatcacaggaatgaagaggtgaggtagcctcgaccaaggaagtagggaatccctcgcaataatgagaaaaaccctagaaatcaaccaaggtcaagtgagctacctccaagacatcctcaatgtcctcaacgtctctatacatgtacttaaatagaggaaatgtatctaatctctttcgtgggagaaggccagtacaagatgaagcaagttcaacctcgagacgttcaaggtctgagagtttagtcgatcgagttggcaaacgcgagaaggaagtagatcttgacgttattatgctgaccaagaaagcatgagcaattcgtgaagttattaatccgagagttactctaaaagatatgtatgtaattatgagagaaggcagcctcatcttcgcgagaacttaaatcgaagacaacctgatcttcacgagcgtctgaaataaaatacactcatcaacttaatcaaaatgaaaatcaacagcaagtggaccccatccaactacagataattgaactagatgataaattcataaaatatcaagatggaaaacttggtaaattaccaggctacgacttgaatgaagaaactgagcaattccatccaaatatcttacattttaagtttcctcagggatttaagaacccacatgtttctcagtacgatgggaccaaagacccagtcgctcacttaaacaactttaacacaactatgcgagctagcaatgtctcgaataatttgcgttgcattttatttccaaactccttaacacgagatgcgagcagctggttcgataaatttacccatcattccataacatcctgggaacaattgtttagggactttaagaaaaattcaagccgtaagagagtgacgacctaaagtatcgtccttaaccaatataaagcaacaacctggcgagtctcttaaggcttatttaagtcacttcagcacaaccgctgcaaaagtcagaaacctgaatgatagtattcaatgaacgacacttcaagtaggactcacaactgacttatccatggctggaggtgaattatgggatgaccttaaaggtcgccctgtgaggaacattactgaattcaatgaagagcgcaagtctttgtgcgtaaagaggaagcaagaaatgaaatgaagttgtttaaaacaggcttgggaagaaaacacaccaccagtatggcaacagcgagcacagtctcaactaaagtggataatcctagtggttcaaacacgaaaagaaaagatgactcgaaagaatcatcaaagaataaaaagaaacagaataagcatgacaagtatgtatcgatttatttggtatatactgagttgaatgaaactcgcgagaacatattcctcgctaatgaa

SEQ ID NO: 230400 - DNA, 869 bp, Cannabis indica
aaataatttccaacagaaattacatgtggagggatcaaccatcgatcaattttttggggcaggaattgctctcttcacacctgggggaaacctctatacggagcaatcaaatttgggttagagcctctaacagcgaagcatagtatgtagaactcatagctggactaaagcttgctcaagaggtacaagctgaatacattgaggtctgtagtgattcatagttggtggtaaatcaagtcttcggggagtacatggctcgtggagaaaaaatgatggtcttgcgggtgatgtggttgtaccctgacatgtccttagtcatgtgcttgtcttgtctttttttattctacctccaatggtttcctttccaacacttagaaaaattcagtaagtatttgtggtgttattgtggaatgcaagtacttgatggaatggatgggggatgttattctcgttgaagtgcatgcttggcgaagatgcccttggagaagagcatgccgagatactcttggtgaggcgcatgtaaagatggtgctcttggtgaggtgtcaagttgctcaccgcattggtggtaccaagatcctcaagcatgcttggccaatatggtatccatagggacttgatcgagatgcatacttgaggcatgtcaagatttttcccttggtgaggtgccaagatgctcaccacaatggtggtgttaagaactcaatcatgcttggtggagatggtgtccatgggtacttggtcgagatggttcctaaggtacttggccaagatggcatccatggggacttagccgagatgcattcttgaggcatgccgagatggtgcccttgttgaggtgttgagatgctcaccacaatggtggtatc

SEQ ID NO: 230401 - DNA, 1427 bp, Cannabis indica
agactggaggctatggcagatgggtgtgaagaaagcctttctacatggagaattggattgagagatatacatgatgcaagcaagagaaattgaggatagagctcatcaagactatttttttaaactgaaaaaagcactctatggtttgaagcaagctttgagagcatggtacaacaagattgttgagttcgtagtggagagcggttatgtaatggcacatgcggattcaaacttattcatcaaataaaagaagcaaagattgtagttgctcttgcatatgtcgatgaccttattattactgacgatgataaagcaaaaatttgtcaaacaaaggacaacttgtcagtttgctttcaaatgaaggagcttaaagaattaaaacacttccgtggattagaagtccaccagactggggaaggtttattttttagtcaacaaaaatatactaaagagttattgcaaaggtttggaatgctcgagtggaagtccatctcacgacctatggaagctaaagctatgtgctcatgctgagaaggacttgcgagatggagcaatgtatcaaaaactagtggggagtataatctaccttacattgacccaactagatatttcttatgcagtcggagtagtgagccgatatatgcaacatccaaagaagcctcatttggaagtggctcgatgaatgttgaggtacgtcaaagataccattaactatggtctcttttataagaagtaacgaggttaaaattgttggatactgcaacgcagattatgttggagatcatgatacccgatgatcactactggatatgtattcaagctgggatctggagtcctatcttggtgtagtaaaagacaaccaaaaatgtcattatcaaccacaaaagcagaatatagagcagcagcagcaatggtcgctcaagagagtatgtggttgattgtaataaccaaaatatttggttattattattctagcttagaaatctcgatgtggaaatagtgattgcataaaataagttagcttcatgaatagagtattatttttacgaactatataagatttatgttagtctccaaaatgataagaatgtgggtagtattatcttatttttaaagccaaacatagttatatattggagaattagattatggtattttaagcatttaaattatatactatatgtggcataatgacccaagtcttagggcattttttttcggccaaaacattgtataggatagagagttttatttgacttaattaacaagtaataatggagagactaagtaagtgtgtggtgtagtagtagtagtggaactaagtgatatttaattaagcttaattgctcaagtggggacgtgtactgtccatgtgaattaaagaatataaagcttatatattttttttaagcttggacgtgtggcac

SEQ ID NO: 230402 - DNA, 2993 bp, Cannabis indica
aattggagaagttcgatggaactcgggactttgtgctctggagataaagtctgaaagggatccttgtacaccaaaagtttacaaggttcttggagatgagaagttattggcagaaaagaaactagagaaaaaagcagaaatggaggagatggtgtactacatgatcatcatgtatcaattaaagagtgtttgaagaaaactcattagagagaagaaggcaaaaggagtttgggataaattggaagaattatacttaaaaccatcgataactagcaagattaatttgctagaaaggttatacagttttagaatgatttcttccttttctttagatgagaatattgatagattcaatgagattattgtaggtttggctaacataaatcacaaagttgatgaagaaagctaggccatcatcttgttgagaacacttccaatcacatatcaagaaattaaggctgccatcaagtatggcagagatgttattgcgttggaagatgttcttgccgcatttaaaactaaagattttgaattacagttggaaaaagaatccaagaaagaataagtgtattttggcaagagaaagatcacccaagaaagtgagtttgaagagtaaacaccatcactcttattcaagatcgaaatctagagagaatgacactaggaagtgttacttctgtggaaagtctagacacttgcaaagattctggaagaagtacaaggagcaacaaggcttcaagaaatctcacaatggagataggaaggacttccaacatcatcatcacgggaaggattttgctacaatcacagaaaatagtaatgactgctcctctgacggagaactgttctctatctcgaagtcatctatgaacagggagtggattctctatttcagatgcacttatcacatgtgtccaaatcgaatcattttttgattacaaatcaattgatggaggtaaatttctaatggataatgatcattcatgcagggtcattggaacttggagtggattctcgatttcggatgcacttatcacatgtgtccaaatcgagagtcattttttgattacaaatcaattgatggaggtaatgatcattcacgcagggtcattagaattgggaaggtggccatcaaacaatatgatggcggaatcaaggtgctgacgaacctaagccacatcccagaccttagacgaaacctcatatttctgggtgcacttgaggataaaggatacagatacaaatccatgcatggaagcttgaggatcaccaaaggttctctggtagtgatgaaaggtgaaaatgtcaatggtttataagttctccaaggagaaactatcctagctggataagcaagtatagtgaaaggactagaatctgatatgaagttatgccatcatagacttggacatgtcagtgaacaaggcctcaaagaactacaaaaacaaggtataattaaaaattaaaattgttgtgccttcccattttgtgaagcttgtgttttaggaaaacaacataagttgaagttcactctgacaaagcacacaactaaaaagatacttgaatatgtgcatgctgatctttggagaccatacaaggtgcctactcactccggtaagaaataatttctttcaatagttgatgattacagtcggtgtgttttgacctacttgttaaccactaaggatgagtttttggaacaatttagaaattggaaaacctaggtggaaaaccaaactgatcttaaaattaagaaccttaagactaataatgggttggagtttgttaactctgaatttgacaagatgtatcaagagtttggaatcactaggcatagaaccgtagtgaagaccctggagcaaaatcgtgttcttgaaaggatgaaccaaacattgttgaataaaattagatgtttactgtttagttctgggttaggaaaaccattttgggggaagccttagcaaccacaacctaccttgttaacaggagcccaaatagagttatagaccttaagacaccttatgaaatgtggtacaacagaaccctcaacctaatgcatctaagaacatttgggtgtactgcatatgtacaccaatctattgacaagcagggtcctaagtttgtgaagggaaaactttcctaggttatgccttaggaaccaatgggtatagaatttacatttcccaaaaggataaaaaaaatgttgtgattgctaaaaatgttgttttcaatgagttagaatatcctcacttgacctctagaaaggatagtgtgtctctatgtgttacaggaaaaacaggaaacaaagacaccacaagtgtagaagtggagtacggaataaagcttctagaagaaggttcacaggaagaagatagtgtggaactagaagacaatgcacaaccagaagctgttgtggagtcggaagaacaagataatgaagaccaaacagaggtgctgaaagggttcggacatataggtctggaaggttatcagttggcttgtgatagaacccagagagagatttgacctcttgctaggtttgcggaagcagacataatagcatttgcactggtggtagttcaacaaactgaaattgaggagcccagaagctatgaagaggcagttttatgtgaaaacaagtgtaaatggctccaggccatggatgaagagatggattatctacagaagaataagacttgggtagttgtgccgaagccaaaaaacaagaaaattgtggagtgaaaatgaattctcaaggtgaaagagggaatcaatgagaatgaattagtgaggttcaaagccaagttagtggctaaaggttttactcaagtggaaggtatagactatactaaaatgttctcacctgtgataaagtacaatacaataagactgatgttgtctttggcagcatatttggagtttgaagttgaacaactcgatgtcaagactgcctttgtaaacagattcttcgatgaagagatttatatgaagca

SEQ ID NO: 230403 - DNA, 1426 bp, Cannabis indica
tttatttttatttcttttggaaatctggtaagtcaagttttccaacttcgaactatactaataaataagttgctatacatatgttgttgtggttgctgttaattttaaataccaaaaaaaaataaggaactgctttaagagtaaaaaaagaaaaacttcttaatttgtttataattatctatatatactttaagccaaacttgtaattattaattgtagaatataataattaattaatcctcttatgcctagctctgtaatgatcgatatatcggttaggtgaacgtgaaagcaacactagctatagttagtcccttttgaaattattatatattcttatttatgtgttcgatcgactagctgcagcttgtacttgtagtagtgtatatatatatatatatacatatacatatatatattatatatagataagctattttaaacgacatgtaacaaacttatcgtcaagatcttcatcaacctaccactgcacccccactaacaaaagagacagatcagatttccatagatgtacttctattttgtaggttgaaacttaaattgataattagtccgcacaagtaaagtaacaatagataagcagagaataatatacgcacgagaaatatcatcatcggtataggtattttaaaaagttacgaaagtggatatcgatcattaattagctcaaagattaagattatggattattaatacatagagaccagagagtaaaatgatatacatgtatatataattcaaaaacataatgtaaaccaaaacatatgtaccaaagtaatcaactactaacacatatatatatatatatatatattaaaaatatacttgttgcatatatgttgtgtgtcacatatataatccccctctctttatataaaaggtgccaaaatatgaaagttaattaaatttgcttttctttttatttcaaagtactaatcgatattaaaaaaaccgacgtcgatagagtttttatagcgtcagttattatacaaaatttaatatcataaagtacttatgactattattattattaaataatcaacgtcataaggtttcttataattttttttttcaactttaaaatttagtgtaataatatatattttttcattaatttaattttatttaaaatttaatttttttcatatatattattttatcattcatatatattgttaatgctgttattaccggttcttaagtgtacaagtgtcagttagttagttgggtctagctgactttctgttatgtttgtttcaactgtttctctgtaaagactttgtataaataccctgtattcattaatgaatccaagcttttagtaattcagtttatctgttctttgtttttcttttctctgcaactcgcaaggctctgcctatagctcttacatggtatcagtcgc

SEQ ID NO: 230404 - DNA, 2242 bp, Cannabis indica
aatttaaaaatataaaataaataataataaagttaaaaatatagtttaaaaatatttataatatttttaaatttaaatttcttcatataatatctacattatttttttttatttttaatttaaagttaagccaataaatttaaaaatataattaaaaatatcaataatattttaaatattttaaattaaaatttttttatataaaatatttatataattttatttttaaatatatataataatattataaaaattaataaagaatattagtaataggatattctgttaaaattaacgcagaaactcaaaaaattatcgttaaactaaaaatttcgtcacgtagctacattttatatatgatagatatatacttttcctctagtatatttatattacagtataacacaaataaataaaatattatatatagacatgtgcactatgtgcaacaaacaaatctaactttataaggaacaccattaattagagtaaataaaacctaaacattaataatcaacaattataaatacttaacaaaataactaagatagtcttgaaaaagtgataagaaaaagtccatccattaagtaagcatatataatccattttcattttttttggcctacgttttgtaaaattagattttattttttaaagcagtacaaaataatattctaagcttaatttttaataattttttaatttacttattttgaaaataatttataacaggaataaatataaaaatataactaattttatcataatacctataaattaactatataattttttgagaagtccaaaaaaatacaactagaaaaaaaaaactccctataaattaagatatatatgtatgatttttcaaatatagaatattgaaacgggattaatatatatgaataatttaataataattcgatgtgttataacaaaactgtttatactgtatctattcgtgttaggaattgtcttcaagttaattatattaaaaaaaaataacaaaaattaagctaagggtcctatttttaccattttgaaaaatacaaagtctattttgtcatttaacaaacagatggtccaatcagtaacttttacaaaagagaaaattcaaaatagtatttagccatttaataataaattttggtgctataaaagtaagacttgtggcttctcttctcctccacactactacatactttgttctctcttacacaaacacataatatagttatctctttcttttctctatatcttccatatataatataatgaagtcaataattgtagtgatgatgatgaccactatggttgttgggtgccttggtcgaataatggatgtagccatttttatgaatccaactccaaataggtgttacatacctggtgaatattgtgctcacattgagttcaaagactgttgtgaaggacttacatgtgaaggaggtgccttcagtggtacctgtgttcctgtttctcattgcatttcggaaatcggggcggtttgcggtgctggaatcggagctcctccatgttgctacccaaacacttgccatgttgaaggattttggactatcaacggacattgtgctgcccccaacactttgcccgcttctgaataattacgaggactttctagaaggtcacctattctagtactaataatttatctgataataataattagtatactagtatataatatatatgtttgccttgtgtgtgtcaaaataaaataagaggaaattaattaagctagggtttgatgaattaattaatttcctcttaatacatttacacaccaccagtactatcactaccttggtagttgtgtgtatgtgtttttaattatgtgtctacttctttattaattaagtttgtatttcatttacttaattactacacctttgggtgtacatcttattacaatatttattgttattagacgtggaggattctactgctaataatcccacagtccgccggtaaaagttaatagcgacaaaggctctaccgataacaatccgctggtaatacttagtcactaaaaatgagtattagcaacggactgacactcccaccactaatactagtgtcagacacataaactggtattattagtatagctgcagacagagacggacctactcttatcaatgtgggggctatagcccccacgaacaaaaatattgcctttaaaaaaattaaatgtatttttttaatttgataattataaaccaaa

SEQ ID NO: 230405 - DNA, 1036 bp, Cannabis indica
agagtgtaatttcctcttaaatatacataaatatacagagagtgtatattattagagagtgtatattattgtttaacaaaactaatggcatcttttaggtgggctttcttagatactacgggctcatatgcctgatgggccgacccattgtgccaggcccatagtatatatccgtgtagaaaaatgccactggtctggtttgatcaaccaatattagtctgaattttgtgcaactcttctataaatataaataataataatttgtggtataaatatttaagttttaactcccgttgtaaataaatacttaaatttaatttatgaggataataatacctaaattacaattttggaacatgtggaagtacttagtaaattgtcatgtggcaattctgattagttcaggtcattaaatttttagacaccgactgttaagtgtaagtaaattgtcatgttgcaattctttaacaactagtatttacgaacgaaagtttcataaatataagtttaagtattattttcgccaattataaataatgaaacaaactcactaattcaatccttcctaagaagaagagcttgtttttgctgacaatggccaactttcagaggtaatttattctctcaaattacatcattattgtttattatgtatacattttatctttattcttgttttttaaataaattcatgtaaaattttggtgttgttctgagtttcttttggtggatttgattgaattgtgttcatcagattttcaaaactgacaaaaacaagatgcatctcttatggatggaaggaacttcactcttaactgtaggaatctaaataaaattcttcctatgttgaatgaagaatggagttatgaaattctaggtttttagattgaagataaatatgtatgttttttgtgtttattgaatcaagaacaatcagatcacaacacaatatcacaaatttatgcaccatagttacattattttacttttgttaaggagatagatagataggtagggttcgatcatgagattgcag

SEQ ID NO: 230406 - DNA, 1116 bp, Cannabis indica
tctctaaatcaattaaatggatgtcttcattggttactcatgtcctatattctacataggaataccagcaaatttaactcatattgtcatttccctaactggtctaccccgtcagatgagttaccactaactaacatacatgcacagtccatttagatcttttgatatcccctcattgagtatacaatgtttaatattgatatcaattgaaacagtaacaataatattgcccataatattctaacttgagtcatctaaaagaccagtgcccgggtccccttgaatgataactggcacatggacaaaacttgtacacttttcttctttaatatcagtctttcttaattgtggacatgttctttttagatgacgcactaccccacaatgacaagatttgtctctacattagcccaaatggtgcctttttgcatcttgaacactcagaataagatcgcaatttcttaatttcactttgaccactatccttgtcaccctagaacctttttgttttatcccataattggtggtttatttagtttttgcctgctgatctgctcgtaagttgggttcatacatttcaccacatccagttgcataacagaaagtgtcgatagtaaaagaatagacacaagacgagcctgttgttctcttagatcttggatctgctttcccttgttgtctaatcatatcatgcatagtagaatttacatgtttacagtattacgacaataaaggattctcttccttaccgtttgccccaagcccagacagctcgctaatcaagcaattcaattacccttactgtataacttgtcacacatttaatccacatctttgagacacttaaaacttggacatatatcaatatcaatatgtgtataccatacacatattgttattatggataattagtacgctacttcttctcactataattatctaagcaggtaaggtaatagcaagtaacataaacacttactataccatgagtcgacatgtcttcgcaacaaatgtacatatttaacaagtgttcaggatatttaaaaccattattgctctcataccaagttgtaatgccctaatcgataggaaggccacatgtgtgattttctaaac

SEQ ID NO: 230407 - DNA, 1629 bp, Cannabis indica
ctgctctctctgatgaggcctttgataaggtcagttactagtggcatagtaggggtgtccgttgtgagattcctcgcaagaattattaggtgcacactccccgttcggttggttggcatggtcagggcgccacatagaacaagcagcggtgttgctgctccatcaatactttctggatgtcgcaacttactttgggatgtgcccgacacagctcatgccaaaaagcattaaatatctattagcgatgtttgtcttgtaaagggagcttggttggcctccacctacaccttacgagattggttattattttgagttgaaatctgggccaaagcagagcagaattggctacttttatttcagccagcttggtcaccaatggctgggcgacaccaactgcaaagccatgtcaaagttgggcaaggatgccaaaaaaaactttatggcacaaggcctttgcggaattgtgcaccatgaattttagttggtgccgctcttcagaagttccatccctactttggagacaagggatcaagcaagctgctctcatctctgggttgcaaactaatcttgaggaacataagaagaagttataggaggctctcaatggccagcaggccattaaggaagattacatcgacttgtcctttgaacttacttacgagtttcgcctgcacatctctaaagccgatttgtcatacatgggcagtccaacctttgtggagagagcactggcccgtgagagggcattgttcgaaagctggatggagatagactagaccgctgcttattgagaggggtaatcattgggtacccgtgaggaggtgctggccgacccaccagtggaggaggtggctggccaggatgttgcccactaggcctgccagcatagtgatgatggggccagcctggactctgtggatctcacctgagggctccaaattcagctcttactgcccctggacacatgtaggttgaatttttattagtattcaacatcatatttgtattgtatagactctattttcatgttctccatagcctgtggctttttaaggcctgtggcatcttggctaaggaacattactcagtttgcgttccatgtggcctatggccttttgaaactttatgtcctatgtggcttggagcctttttagaacattactttattttcagccccaggatcttcatgttcgtatctttggccataagccctctgtttttttaacactactagtatttgatcatattgcttttttatcatggattgtgtgaccgaccaagcggtctttaaccctggctatcttcttatggccttgacaagtaagggtacggattactttgccaagccgaagtatgcatatacgacttagaggcaggtttagtagcttatactaagcgttaaaatttctctgcataagttctttatgctagttcaatgcgttgtacagtatgggtgcgcccaagtgaccatgcagacaaatctcttggtcacttgctattcagtaagtttcacagactttgcctgggtactctcttgcgagggtatcatagtatgcatgtggaactaagagaataactttgaaaagttaatctgtgagcatgtggttcatagacaaaataaacagaata

SEQ ID NO: 230408 - DNA, 1042 bp, Cannabis indica
ttcttggtttatgaaaaattagtgagtgattttttttaaatttgaaatgtgtcttcttttgagaatttaaggtatccctttatgatttatgcaattctgttgtaattttcaaatgtttcttgaattaattatagtatactttatattccatcaaatattttataggattggtttcaagttgcagagaagcaataattttttttttgtttgacacaacaaagaagcaaaattgtaataggcgctcctgaattttcttctataatgattttttttttgttgttaattatacatattttttcaatgatcaaatgaaaggagctcacactatccaccccactggtatttttatctttattttctctcagttaatttatcaggtccatataagaaatgttaattaacgtaaattgtacaatagtgatgagaattatgctaacatttagatacttatgtttgttgtcaaaggagagtccaactttgattttgctttttcagaagatggacatggtatcttaggtgtgtaaagtattattaattctctgatgttcttttcattgattgttgacactaaattaccctaacattagcactttctttaatttagtaggagaagaatttccattaaaaatcaatagaaataaaagagatattgaattagagttaataagagtatttcttgttgcagtgatagaaataattacattttggaaataaagtgtcaatttatatagagttaatcgatatattaaattaataatgtatcactcacaatttttcaaactctctctttctaccaccatctcagtagttggaaatccttttagtaaatttctctcttccgaaaggatctactttagatatttttttttcttttgcgttatatataaatatataaaagtcaataattactacacaataaatattttattatttttataaatactactatatctatcaggctaatactcattattgtttataaaactacataatataaaattaagtatacgtgtctttcacgttaatttttttctagtatata

SEQ ID NO: 230409 - DNA, 649 bp, Cannabis indica
tttaaaggattgagacaaagattttagattttgtaccctaggcctaccacctgaaaaaacactattaggatacaattttcaattgtggttagtgatgtaagtttgcgtgtgatgtgctgatcgaacttgtatttattcgtatttttttaaaaatagattgtgtcatagaaaaatatgagttgtatcgtatcatgccaacatttttatagggtaggcccggcacgacccataagcctaatattttcatgtcgtgttcggattcgttcgtgctttgttcgtacgactcatattttttaaacatatcagcacatttttatattcagactaaaattcgtgctttactttcatatttttgtttgtaattactaaattatatgtatatttaaaagctttagatatattcatataatttttgaataatattttacagattatcattcaaaaatattattaacatcattataatttaaatatttacttaatattacgtcttataaataaattattatatagtcttagttttcaatgttttaatagttttaattatagaattataatgtttaatattatatttaagttttattattattttgggtaaataccattttggacttaatttgtgtttcgtaaaagttaccgattgaaccat

SEQ ID NO: 230410 - DNA, 7494 bp, Cannabis indica
ttgatttggaattgttgaaattttaatataattgagcttgtaaatttcctttgtgaccgagataatggtggtgactggatttggaaatttttttaatggttttttatgtggatttagattgtatttgggatttatattaatgaaaatttttgaatttctccatacatggtcgtgacccaaggtagggttttagagcttagtttgtgtttatttgaccatgtgaatatttaaataactatgatagtcttgaatttttcttggataatcttggcacagatgaataatttgatatttttaaatcttgagctttgttgatgaacttctcataatggctatggtattacaacttcaagtcttgaaattgttgtgaaatgttagttcttaaaccaagaaatcaactttgaattggaactttttccttgaattttcctggtgatgttatggcacatttaagcttggactaacatatttttttttatttttgtgtagagtcgagtcaagtcttgttggagccttaccatccatcttccttgttcctattctactttttctgaggtaaaactctagactcattttttaattaatagccaagcacagtgaacaggtaccttgagatttttttcttctctagttcatcttctcatgctcacagaaattattttgatgattatagtgccagatgtttgccttgaacccatcgattaaagtcgtgcaatggtttagtttttataagacattcacctagtgcaacaaactcttcgcttcttgcttcacaaatgtcattttagggtgtatggtctttttaaaaccgacaagaaaaccaaggacacttaccttgacgaggtggaaaactggaaaagtataatcgagccagtgcatcttatctgaccaccgccaactaagcttgaagacaccttgaactctcccaattaatatctatgtcatgacacactgagtgtgtgacctctaatttggaaggaaaagtgtgcgacttatatactaggttctctagtggagggtggtcccctacttaactttctagtgaactcactctttttaccaataaagaactgggagttgagttgttgctttatacgagagtagacaaaaaagtccataggtgggagaggagaggccttgatcgcaagtagtccaacttttaaagtcttatatgcgtctagattagacaaatatggctccaatttctagtctaagaaagataactccatgttacttccctttcgtcgagagagtgataattccatgttacttccctttgatcgagagagcgtaacattaggagaaggtcttccttttttttctataggttatgatttaatactttgctcatattgtattcatcttgctcaaagcttgcttgaatgatttggttccttaatgcttacatctttttcctttgacacacattttaataacttacatgctttcctctttttttaggtaatatgaatcaaatgcatatcaactttgaagcaaaagaaacaaaaaacttcttctaagactttgatgtctttgccttctttgaatggtggatctacatcgaaagtggctcccaacattgctatcacaccacctactcttgtgatggtgactctgaagggaccctactcctcttctactttggttatggtctttactcaaattgcttttgtgccacagtctctggcaccaccacaacctttgccctcaaaaggcttggtaaccccttcgataacgatgactttatcttcttccatgatagctccaccattcgagcagtcaaggatcacccattagatgtcactacaaagaggtggaacttccccttgccaacttgatggatttaatcattcgaagggttaaagtaatgaactcactcagtactagcctcatccacatgaatgcagctatctagtaggaacttgctggtgactctcatatacctaataaactcatacaaaggcgtgtggacatctaagccaaagtagatttttttcttccaaatgttcattacaactatcatttttgctttgcattctaacatttcttctttctttggtaggcagtcacggaaatgccgagctcgtttgaaaatagagcggtactcacaatttctttctcacaaagtccatccaacttcagaaagaaaaggagacgtttgttgtgctttgtaatgctgaggccatgaaagtgaaagagttggaaggatagttgacctcacttaccaacatctatcaataatctaaaggaaaatttaaagaagccaagggcaagttaaaggcagttgaggaggctaacgacttgaaggttaatattttgaggaaaaggtcgaattgtggaatccaatgaataagagtctctcgatgcttgtcaaattgtagttgaggtcatataaaagacatcacaggaagagcttgaagcttctaaggaacaatgcgaggtagacacaaaagctgccctagctcaccttgagaggctttgtgagcacattttcttcttgatggtctctgagtgttggctccaacacaagactatgaactttgagtttttagagacaaggaacttgaggtagtagcgtacattgagcgggccgaggtggaagggtctcacaccaatgatacggtaattgacatggagatcgaggaagctagcaaggggccacttcttatgtggtttcatcttcttgagttgatgggtatcttcttgacttttagtacaacttatttaattttttaattgtatttatttatcactttattgttgtcctttagtgcttgagcaattttgctaatttgttgtgactttgaggattcctagtagtccttgtaatattttctttttactcatatgtttggtttgggcttttattttatttttgagaatgctcggcctcttttgtcttggttagtgtctggccaaggattgatttgcccaaggtcttttgttgttttagttaaacaacttttgactcatttatctatacaactctgggaatctaagtaattaacctaaggtggcgtttagaaatacttttttttttttaattttttaatcacaaaaattaaagtagaatttttgtttttaaaattatgtttttcaaaattttatttttaaaaaacaaaaatgcattctgtaatcacttttattttttgattataaaaacataatacaaaagggtattctgtaacgtttatttttatttttaattttttatttgaattaaatcccattcgggtctgagtttgggggttggggtctggtgtcgggttcaggtcggggtttgcggtctaggtctgggggctgcattttgggtcccgttttgggtttaaagtcaaggttggggttcggggctgaatccgggttcgggtttcgtgcttgggtttgagtttgaggctaggtttggggttgtggtatggggctaggtttgacgttcggggtctggtgtccgaggttgggatttgggtccgggtctagggtttgggcccgaaatctgggttcaggtttgacatttgggttaggggctgggttcaagttcggggttggggttgggttcagggttggggctaggttcgacgtttgggtttggggccagggtaagggttcggggttcgattccaagtcccagtcttagggacttgggtctaagttgagtcggagtccaaaatattgatttaaaaaaaaattattttaaatttttttgaaagtgacattttttttatttttaaaatttttaaaattttgactctcaattaaaaaattaaaacataaaaatagatttatagtaagctaaaactagtaagtgaaagtttggtctagtaaaaatgaaatttgagagaaagtttactagataagcacctatcatgtcaaatcttgtcgaatcgtatagttccagttatgcatgttacaaattttcaaaaaacattcacaattttcaaaggaactattatctacaatagttataaaatttacggcaagtgtagttaaatgtttataccttataccccaagttataaaactttaaattatttttgtaacttgtttagttgggtttggtagtaacaaatattagacaatattaagtttaaaatattgaaaaacttaaaattaataattgttcttaaaagaaaactagtcatacctatgctaagagcaccaacaagggtaatgccattgatgttgtttatcagattggtaggcccatatacagtagaaaaatagtaaacaatatagcttaactttatttttaatttattcctttttatttgattggttaatttaatttaaaaaattaataaaagattatgtgagatcaagaagtcaacatttattgttgcctgcgttaatgatgccctaatagtacttaacaaaacatgataattgttccagaaataaaaaccaaatcattaaaatgacaaattattaaaaataaaaaatgatggagaaatcctccaaccagattggctttccacaagttcactgtcaacttctttcttcgattcctcttccttgataccactgacaacccttggttctttctacatgccactacactccccctttaatttgggaagtttacacatctaggacggattgtggatgatattggtatgaatgttctcaattctgtctaagcactccaaccaatgggtcacgagtagaaaagaaaacccttctttgtataagttctcccatttcaaactccctattttgaactttggagtcataatatttttttgacacgttgtttgtatgctacactgcaaatttacgattcttgtcttctctcatcaagcatgcctaaaacttcttatactagtaagtggttttgattttgctcgtaatactatatttgatgagaggtgatattgatttcaataagaatcgtcgtctcgctaccaaaggtgagtcaaaagggagtgttcctagtcatagttcgatgagttgtgcaatagggccaaagtacttggggaagctctttaggccatcttcctttcacttcttcaagtatctttgtaagaaaatttcaaagtcttgttcacaacttctacttgtccatttgcttaaggttgagcggctgaagtaaaactcttggtaattccatctttctcataaaatttggtgaggatgtcactatcaaactaatgctaattttagcagtattctatagcaacatataatgttcttcactataaagtctaaaattttctttgactctattgtcgccaaaggtttgccttagtccatttagtgaagtaattgactaagaacacgacatagtttacacctccatttcctggaggtaaggacccaactagatatattccccatattgcgaaggaccaaggggatgtcataatagtcaactctactggaggtgtgcgtggaattaggagaagtactaacacttgtcacacctttgtatgtattagagggagttcttttttatagtagggtaataatatctttgttgaattaattttttataaggctttgtctttcagcatggttgctacaaaatcccttgcgaatctctttaagtatgtcttatgattcctttgtagtcacgcacttaaataaggacatggaataacctctcctataccaccttccatcgagcaagctaaaccttcgcaccttgtatagtagtttgtgagcctatttttgtcatttggaaagatctcataagtaagctactcatttatagatgccatccacaagtctattggaacatagtcttgagctactttgggagtgatactttgcttaggtaggtattccactggcaccacgtttagcatttcaacctcttttattgttgccaataatacaattgcatcatcaatggagttaaactttgcatgtcctttctttgtggtgatgaaattttggggagggctttaattttctcaaggtttgcttcgataccccttgaattaactataaagcccaagaacattctagatgaaataacaaagaaacaatttaaaggtttgggttttatgttgtattgttttagcaaagtgaaacatatttccaaatccttaacgtggtctcaagcttgatttgatttcaccaacatgtcgtctatgtagatctccatgtttttattaatttggtcaacaaaattattttttattagacattggtatgtggcatcaccgtttttcaatccaaatggtgttacaatataaaaatatggacccatgtcaatagtaaagcttgtatgctcttcgtcaacaacattcatagaaatctagatatatctagaatatgcgtccatgaatgacatgagtttgtatctagtggtatcatcaactagctgatcaatgcatggtaggtgttatctacatttccagataagagacatgtgggatcctcaaggtttgtctggtctgcataattccaagcctaagccttcttgcgtacgaaggcccagtccaagtcggagatggcccgagcccttctaaactctaagagcctcacctctgaagacacaatctttccactctcgagagcccatcaggccttccaagagacgtagcaaacaaagtcctccagaaaatcaataaggcatattggaataggaagtctaagagatgcatctagaagcccttatagggtgacatggtttccctctaacgcttggtctcaccaaatcaaatcatgtcccctatgacaggacatggtattgcgcatactgaaaaaatgaatatattccttttgtccaaagacaaccatctgacattcctatctattgtaggagaaccctcacgtgacacctatccagaccgcgtgggccctcttccatacggaagtttccaccccacgaggcaaaatcttgttatgggcctcaaagtcatatattctatgtatttaccccaatagtggatccattttgcataaaaaccctaacaggtcacgggtatgcccgaatccaaatctaagccaagaaaaatccatttaccacttcatgtattctaagttctctctaagcttttttcttcttcttctaagacaaaccaagagagaaaaacaatatagcaagaataagggttcttcaaattgtaagacccatttgtaacacatcaagcctttttaggccaatacattgactcatggactaaggttcattaatacctgaaccacataaaaatttccatctcattacttaactaattgtttaaagctcttatttaatttagtttttaaaaaatctccgtaaagagtagggaaaagtaatccttggggtatgctttgattagatgaaatatatgcatgtctaccacttcccatttgttttaggaaccaagattaggttttcagcccatatgagatagaaatttttggccaagatttttgtcaaccacttcttcccaaatgaaatttttggcccaagttttgtcaacctcttcttttagggtcacgtaccttgcctcatcaaagagtctctgtttatggtgctttttaagtatttttttcaaggtttttttaaca

SEQ ID NO: 230411 - DNA, 1676 bp, Cannabis indica
tccaaaagaaatgaattcgaacagccaaaaggaaatctagtaactctggaggaatttttaccgaaagagttataggacaaggcaactgttggtgatgacaacgtgtcccgtttctgaacctacccacttgaaagtgaaaaagaggtagatgaaatcaccttgcaagatatgcgacagaaaatttttccaaagaaggaaaaagaagtgaaagagcttgaaaaacctaaacaagaccttcaaaagccttcatcttcggcaaaccaagaatttgttaatgacagtcaaagaggcaaaagcactggtgaaaagaggcaaaagcactggtgaagataaaatgatgcaagcaaaatatgatatattggctcatctaaagtgcatccctaccctcttaagcatttatgatgcactgcaaatgtctcctgagcatagaaatgcacttattgttgcattgacaagtcctgcattttacacgaagaaaatagagccagtgaaacctacatcacttgagacgcatacctcttgtatggcatgcataacttttgatgataaggatcgttagttgggagctgccttacataattggcctctctacatgacgggtatggttgttgatattcatgtaagccccatcatgttggattatggattaactgtgaatgtactctccttaaaaaccttgagaaatgctggtttacacccacgtcaattgtctccgtcatcattgataattcaaggttttaaccaagctggagaaaaagtaaggggaagtgtcacacttaaaattgaaataggcgagttaaattttaaagccttatttcatgtcatcgattcagatacatcctacaatgtattgttagggcgactgtggcttcatgaatgtggggtcattccttcaagacttcaccaatgctttaagttttgcaaggaaagaaaagtcaaaagtgtcaatgtagacccaaatcccttttacatgacaagtgaactatgctgatgcaaaattttacaagctagctaatgtcactattctaaaagagaaacttaaggagggtgaatgtcatgaaagctcaacctcacaaaactctatgcaaattaagcaactatcccctgtaaaatctcctcagccaaaagaggagaacttgaacttatctaacaaaaagtgaatcttcaagtacatccctaaaagttgacgaggagtagggcaaaaagctttgacaccgatcgaaaattcaataacagccctgatgacaaactttactttaccgctaaggaaaatcgatcagtcactacagggtaaaatgaaatttcaatttcctttggtaaagataacaagaaaaataaaaggtttgttactctcaataaaaaaatcctccacttctgtaactccaaaaaccttcaaaacggagaagaaaaagtttcattccaagaagcaaaaaggagtcacaatgaatcaaaatagtgattgtttaaaagcttcttttgaaccaaacgagtcaatagaagaggaataaaaaatgtttcacagtggcaatgtacctacaccttccctacatgtgccggtatttaataaacttgaagcaagcacatcaaccccacgagtgtcagcattcgtagagcttgttttcccaagtgctccacaaccaaggggaactaaaaaaaaatagtgggtgccaaaacag

SEQ ID NO: 230412 - DNA, 895 bp, Cannabis indica
ttcgtcgtaaaaacattagttatggtaccctgatcatcacagaacacagcagcccctgctgagacttggatgccgatagccacatcagtgttgcacattctccaattggtaggtgggggcaaccattccgtttgcagagaatgttgagcatcctgttttccatccaactcagctagtctgcgattgatgttgtgtacaacgatgttgagcggtattgtggtattcatatgcacaacagaatttcttaaattccataatctttccatgattatagccgccccttccaggatagtgtcaaaattgatagcctgaggtctattatccttcttcttgaaccatctaatccattggtcccagtccgtgacatggatcagattagttctgatattccagttgcttccaaaccaaacggctctggtcactgaacactcccaaagcaggtgaaaggagtcttctattgccgttgagcaaagggggcagaatggatccgagataccaaaggctttgagaattttgtttcttgtgagaagacagtcggcaagcactctccaccacatcatttttgctctgttatgcattttggcaccccagatcagaagccacttctcattgtcgattgaatttggctcgatattcttggtaatcctataggcagacttgacgctgaattgcccattcgcttcaggcagccaaagccacgaatccttctcagggatatttggcaaagtgatgttaaggattctaatggcgtcttcctgcttaaaccattgtcttatcaaatcttcattccaaccattatctctaatgaagtttctgaccatgctaattccttccgttgcatctttcataggttcaggttgtaaatctcctcctggaacccaagggtggaaccaaa

SEQ ID NO: 230413 - DNA, 1003 bp, Cannabis indica
aataggtgactgaactctcaggtaatgaacacactaaatagaatgcaaaatacatataaatgtcactactagcttcaagttgacaaactagtcactcactatattaacataatagctaaaaaggatccacaaacaaattagagactccagaagagaacatgattcaaaatttgactctttagacatgaaaccatgcagctaactatgtaagtaagcacataaatcctttaccattataatcaaatttccagaacaagatcaaacaaaaaaaaatattaaaaatgtgatagagaaacaaatggaaaactgacataccagaggagttcacactttccaagagaactttgaagcatctatgcatacagtttatctcccgggtttgaatccccttgtgcggagttgctaaacaactaatgaagaagagaaaaggccttaaaacactgcacgatatctgtgtccgtgtcaacgaaccaacatagccctcgtagttcttgtcccaatcttcttgaagctgcaaagccacttttaaagtaacaatgtaacttctccagactctctgaaataattacaaaaggaaacgatcagagttaggctgtttctgttccaaagtcaactcaaggatagagaaaaaaggttgaactccactgaatctcgcttccaggagtctccagatacaggaactcctcatttcagctataataaaaggatattaaatgtttaaaaacagataacccattatactcaaatcccaaatcatgaactgtgctctcaatcttccattgcctctaatcattatagcacagaatcagaagttataatgttctaatacaaaacattctcaataaacaaaatggtatctggaatagcaacttctacaactcttcactctcccatgtcataatatggcacttttttttcttattcaaaattttatagtacaccaaacagaacccaaaaaatcaaaaaacgtatcgaacaaaatcttcaataaatttgacacaat

SEQ ID NO: 230414 - DNA, 666 bp, Cannabis indica
tattatgcttacaccaacaaacagctcaaaaacacatcaatgccttccaataacgtataattatgatttagtctaaatatttacatgacatgataattggtactgatacttgtccatatcaacactgtttagtttccaactttgttcatgttgttcttgctatgctttggtttggcaaatgtaaggcatttcgagtttatggttcatcccttctattctcttcttgttgaacaaacagtataattttgatgctatactttacaagtttaaaataatatttatgtaaaccctattaggatagcaccagaattatactgtctgtatagtaagcccataaagaatgatggggccattcactgggtccaagtagatcgatcaatctccccataagcaaagttgaatgaaacattcaggtccgatagtcactttctcacgactaagccaaacatgtggttcctgaaggcaatcacacatttagttgaaaatttaactaattaaataattttaaatttctccaatgcacaaaataaaaagataaaaaatctgtattataacctcacaaatgttaaatggaaacaactaacatttaatctcgaaatggaaactatagtttgtgaaatagaaacaactagcatttaatctcaaaaaatagaaatcatttaactt

SEQ ID NO: 230415 - DNA, 1032 bp, Cannabis indica
ttttcgggcttgtcgtgtgtcgtactattcagactagtctattcgtgcttacatgtcattctttttgtgttttctcgtatcgtgtcatgctaaaggacatatttttcgtctcgtgtcgtgtcaatttataggatcgtgctgtgtcatgccgaagcccgtgccagtttcgcgtcgtatcaaaaagtccgacccgtatttacaacactagtctaaactagagagagaaaccttttctcgtaatctctaagagtttgtgaagattattgtaactttttgaacactgatatcaatgaagatatgattgttgctgtttcgacaagatgtagagcattgcacatagctcgaactcgttaaacctagtgttattttttttgtttactgcttaattcattacttaaattctaagatctcttggtttattatttctttattgtgttgcatttttgttggtccggtatactaagttgtaaatcattgattatttccgttttgcacaacagtgtagatattcacaatttgcaaattgaattaaatggtgctgaattaaatatttcataaacgcccctacaaatcagagaaaatagaataatcgtcatactcagaacatatgaaagtttgaattggagttgaattgacatttgctaataatacataaaattatcttaaatttgtcaagataattaactccaattctccctttttttctatttgaaaagaataagttaacattaatacttttcatatgtacaatgagaattatactattaaatttataattacagatataacaagtggaaaaaactagtatttaaaaccaagtgagtaataattaagagcaccaagtaaaatacagaaaatatttaaaaactactaaaaaaaactaaaatacgatatagcaacccaagctattttagaatctcaattagtagttgtaagttaccaaaattgtctactaagcaaaaaaaatttgtcaaaaaaaaaaattaaaatataaaccactaaagaaaataagagttcatggagagacaattc

SEQ ID NO: 230416 - DNA, 1073 bp, Cannabis indica
cttttaatcacaaattttgttgtgactaaaagtaagaatttttgtagtgccaacatctcgctaattcctcttctcggcctccccatctcgcctaacacttcattcgtgggcaaccatgaggctgttttccaatgtgcttggataagtttcaaaaattattaagtgctaatttttggagttaacacttgcctctcactcaacaagaattcttttaagaatttttgttgacgaatggattggttttttatcttgttgaaaagcaaaccttatccccttcacgttttttgagaatgggcttattatataaagaggacctctttatgttttcattcacttcatcaaataattttttcatggttgtaaagctcattctacttgcttgagaggtcacgagttcgactcttcataaggtcatttttcacctctaatttcttttcccttacttttatgacttaaaaagagttttttttttttggaaaatgtgcgccaacactatcccgatgttcgggggaaactttgggtgagtagtcttgatgagggtcttctttggcaagaaacttcaatgaatggttacgtttcctagagaagcttgcctcggcatctgtgattgcattttgatacatgtattttgatttatgtggtaggtgccctgctcactttggcggagttcgttatttctcaacagcttttctcaacatctcaaggtactaaaattctcctcttcttttgctttttggattttcgcattgtagtgctccatgtattgtctcccattttctctcatttttataaaacttccatttgtcatgcttagaaaaattattagtacctctcttttaccttttacggttagggtgtcgagacgtttgcgtctcactgaccttgtccaccttagtttttttagggatatcttggaaaaattccatttgtggcttacattattgacatattatttttctctctaagggtccttgagagaaatccgatgagatgcatgctaggctaatgttcgagaggagaggccatctaagtgtccaagcgaaaatttatttagttttgagtggggagcagga

SEQ ID NO: 230417 - DNA, 1933 bp, Cannabis indica
tttaatataaataaaaagtcacccacgaatttctcataaaccaagaattcggttatatagacacactttattctcataaaccattttatttttaataataaattattttatttttaatataaataaaaagtcacccacgaatttctcataaaccaagaattcggttatatagacacactttatatagaatagatatattatagtaacttactttatatctcaaagcattcttcgattgaggatgtggtgtcaacaacttctcttaactttgtttttttagagtgatgctcaaaaaaagttttctaactctcctaataacttgggtcatgagcgatgtgttgagcattggactaaatcgaatttaccatagatcaaagttaatgttgatggcgctattttctcagacgatgttcgttttggttttggaatggttgctagggatagcatcgcctctgtttcggaggcagttcaaatatgttgttttggttcttggagtcctttaatggtgaaagcaatgggtctcaaggaagctcgaagttgtatcaagaggaaagggtggcatcatgtaatagtggagtccgattgccttacacttatcaatgatcttaagaatgctaagactttagcttctccttatggtttagtgttaaaagattgtagaggcttgttaacctctttattttctgttgaatgttgtttggttaaacgatctgttaataggcttgcgcatgcttttgcgagagctttttttttttaggctaatcgtgttcttagtggagtatctttacctgcttgctattcttccatagttttggaagatttgagttgaataaagttttgattttctcgaaaaaaaaaaaaaaaactataaagggtagggtacattatttttcacaattggtttaagaaattaatatttaaaaaataattatttttacaaatttactaatattgtatatttaagaatgttaaagttatggtcaccaatttttttatcaccctaaacaaatgcaaaatattattttagataagttcatagtacgccctcttaaaaagttgtttcgataaattttttatctatttcggttagaagagtttttaattttttttttaagatcacgttcgttgcagctatataaaattatctgtagatttttaaagaatttttgaataatttaaagtgtcaaaaataaaattttaatattttgttacacacaattattttttcattagtgaatagtattaatgagtgacaaaaaggtaattaaaaaatataatatttattgtgagctaaaatttggctatgctatcttttgtgtcaaatttgacacaatttaaactaaatttaacacacattttatatcactattagaattaagttttagtaaaatactctaaaaaaaaaatgaaaatacatcatattttatagccattggagaataagatatgaaataggggaaagttgcgtgaagcttataggtacatggacaagtccatttgttttgaggactcagattgggcttgaaacgtgttaagtgtgagttcattaaatagaagtacagaccaaaaagtgatttgcttctcaagtccaacccagtccacaagaaagcccaattcttatccatgcacataaacccattcctgaatctttacctattcttcaatacattgatgaagacccaaggctcaggttgataaggtgctagggtcgcaactccctgattgacatttctaagcatttttcctagaaagtctcccaagagttttctccattttcatcaataatgaatatacaagtgttctcaagaagcaaaataaatgatttgatggccaaaacatggacccaacgccaaggttgacactggtgttgggccctgcacctagacgaacatttaacttggttcgcatgcggacattcctcttatcttggtcc

SEQ ID NO: 230418 - DNA, 749 bp, Cannabis indica
ttgcattgtcttgcgactaaagaaatgactcttaatgagttttttttttgccatggagaaagacaagaagacaaaacaaacaagtacagaatcctagagaagacgaacaaagagagacaatgctggaaaaacgtcgttggagttggagaagagcaagagatggagaaacttgagagagacgacgcagaaaaaatgccgttggaggcttccacgtgcacccatgcaccggcgcgtggagagtcgctgcggatggaggtggcacgtggggcccacgcgcagcttaaatggacgttggatttttgggttttgccgatcggaggtgggacaagctccctgggttggaggtgagaatagaaaactccttttaattagttttctaagatagagactccaacccctaatttttagaaaggaaggaatgaaaaaattccttgagaagcttttacatgctctgataccatgaaggaaatgagagaaaatgatttgtattttctgatgatcaattttagtatatacaaaggatatatataatacaatgtgaacatctagaatactagagtaaatgaaaaagcattaaatgtaaatttacacctaatttacagctagcttgatttcctacagattaaacaaagtaatttgtccagtccagtgtttgggcatgcaagaaatcttgataactaattcagttaatctcatttgtttgagattatttatcccagcttgcaaggtgaaataaataatcccataca

SEQ ID NO: 230419 - DNA, 2145 bp, Cannabis indica
aatccttgtcaagctccaactcattgctcctctagcttagctttgcccttacctacacaaggtagcaaactgatgagtcaatagactcagtaagatatgcataaacatatataagcaatgttatactggctttatgcttaagtcgtcctgagcctaattaccaagctcaacaaatggttaagaacattctcaacgaaagtacgaccactgtaccatatgcactataataccgactccgtactcgtgttggtagggccattattgtactttcgggagttactgagggttgtaccacatgcacgccgtaccacctggtactcgtgttggtaacactgtacctaccctaaaacccttcactgtattaacacccttaaaactacacatttaacaatgctagtagtgtaaacagataataacatgcactcattcacatatatatatttatgctatcttaccttgttttcgtacttaggtgtgccggtcatcctgagtggaactgcaactcgacgctttacagggccctaaatcacaatatttgaaattcatattagagacacgctaaaatacttcttggggatttaaaatcaaaactagaaatatccctatcgatgaataacatggcaattctctaaataacacaaaaatagaaaaaactaaggttccaaaattgtcccaaccggtagatcggttccccaaacgaaaaaaactagggttctaaaattgtcccaactagggttcccttttatttaatgaaagctaatctcttaatcaacccataatacccataaaagacaaaaaaaaggatatatatagcataatgactattttacccttaacaaaagacaaaaaacttaatatcatataagggtttttggtcatcccaaaacccgacactttcctgacattttcaatgcctaacaatggtacatcgctattaacattctaaataatacaatacatgactctctaatggcccaacgtcgcttttcactgctaccggactagaacaccagaaacaaaaaattcacatttatagcataattgatacattctgaatttaaataaatctccataaacatgaaaatcataattaataattcaatatcataattaatcctaattatttaataatctaatatattgaacttaggcggtctttatatttttacactatatattaacttttttaattttttttttcatttttattgtagcatgtgtattattacaattttactgccttatttaaatactatgtactgacatttttttaaaaaaaaactttttctttgcattttttgttaccatgggtctcccaatacatttatattgtatgaaaaagtataaaaataattgaagtgatgggttatgttacgtctgtggtagttttttttttaatgatgattaaaactgatgtttacctctcttactcatttgttttagtaatattttatgttattgttccagaattgaaattttaaatacttatgttctcatcgaaaaaatagttattttccgactattttggtgttggtatagtggtttggtctgtaggtgctgaagatggaggtttcgtatgtgttttggggtgtgtatagtataaaagaaaaaaaaagttaaaggtgtgaatagtatttttgtaaaattttccgtgtggtagtggtattgggttaagtcccgcaacgagcgcaaccctcgtgtttagttgccaccattgagtttggaaccctgaacagactgcaggtgataagccagaggaaggtgaggatgacgtcaagtcatcatgccccttatgccctgggcgacacacgtgctacaatggccgggacaaagggtcgcgatcccgcgagggtgcgctaccccaaaatctagtatttttgtaaaatctcctaataaaagtaaaagaaggagcacatttctacagtgatataatattgaggaatatttttaacaggtcatatattataggagacatcattcaatagtgtcataaatttatgggtaaaaatgttattattgtcttttaaaaaaattatttttctaacttaaaatatgtgattctgacacttaatattagtatatttttatgttttcagatctttaataattataatctaaattttaatatgtatattattattatta

SEQ ID NO: 230420 - DNA, 663 bp, Cannabis indica
aaaaaaaattaaaaatggaatattaatttcagtttttgatatatttattttacacaagggtttaattttttatataataaataagtagtatgaattattgaattttgaaacaatcataacgtaatacagcaaaggagaaatagaagagataaagtcttaccttataataagactaaaggccatttgttgctatttctcatatatttatagcggcccatttatatggttgttaataaatgtcgataattaagttgagtatataatgtcacatatattgacttttcaatgacaacatgctaaaactagtaaaagtaatgacaacatgctataactagtaaaattaaaccctaaattcatttggctaattaactaaaattgccaagtgaaagagttttaataggagcattgatattagtttcgtgtctagtaccatttatagatgattcttataaggtagtgcttggtttagataaatgagtgtaggaatgaaattgctattatcattcaagtgtttagtttgtttattgtcattggaaaattcattctataggaattgtaattcatgtaaactaaggaattacttttcctaaataaaatgacttgaaaagtcattccataccaactaagaattaatttttctttatttacccttcccataaataa

SEQ ID NO: 230421 - DNA, 830 bp, Cannabis indica
ttaaccaacaatattatatttaactaatatattattttatgtgaataaaactaaataatttaaatgactttaattaattattgaaattaagtatttctcaaaataatcaatcctatattaaacattccctgtacaatgtggtatataggtaatctagctagggactgtgaacatataatttgaagctataaaaaaattctacattattaatgatctcataaataaaatactctagtttattaattttattattactctactataaatatagaattgtattatttgataatatagaatattatttacaaaattctttctagtagtccatgatataattaatataaatagttcgtcctccaatttgttatttcataattagattggtcaaaattattattttacccttctaattatttcttgaattccttaaataccattaattcaatgtaattagttaatctataaatccaataatagatttgggcccaactgtaatcactcccaaaactaacactttaagagaactaatatttgatcctttcaaaaaatttggattccacttatagtataacatgtttcgatccatccgtgttattaagtttccaatacaaaagtttttaagagtcatctcttgaaaaactttaacgagtaaatcaaagaacctaatgaacacaaacatgagttcatgaatagtcaagatttatagactgatctactaatacttattattttgatataactaactcttttatgataaacacggcacgttgataaaatatattaatttatataggtctaattatgtataaacaaatgatacataatacatt

SEQ ID NO: 230422 - DNA, 833 bp, Cannabis indica
attattttaaaaataaaaaaaaaataaaaaaaaaaaaaaagaaatattaaaaaaataaaacaatttgttttttttttactatttccttttcttttacctaaaacacgatctaagagaatcagaccttagaccccttccaactcagacagacgatgtgccccaacttaaaacccaaaacccattgcttcgatccgcaccatcttcactagatcccatgccaaaagtatcgaaattcaaactctctagcccccaaaccattttgcttaaaacccaaaccagtaaatcctttgagtcccaaactattatccatcagaactcaaatctagatcaacaacaacaatttatacaaagataatccaaaccaaatccaatcagtcccataagcaaaataaatccataccaaattagttagtaattaacccaattcaaaaattcaaagtagacatgatataaatcaacaatcaaagaaaaactaacaaatatatctatatacatacatattaaatatggtttagagaaagaaaaaaataacactacaccaaaaatgacatttagtaacacttcaaaatgttacaatgacataattttagtaatctttatagcttttgtaacataaaatgtaagagattagtgtgagcaaatgtaaaatgttactaaaatgacattcttaaatgtgactaatgaataatttatgtatttagttttgggaaattctataatgtacctctttaaaaaggatacaccaatacatttatctctgttttagtatccgaaataattttttagacaaattttttctcatggccatgtaaattctagttatttaagacatc

SEQ ID NO: 230423 - DNA, 2148 bp, Cannabis indica
tttttataattttttaaattatggttttatataatgagtagtatattgaataataaataatgtgtataataattaatatgttgaataataatagttagaggacatccatttaggtaagctataatactcatttattaaaaatagagaagagaaagataaaaaaatgtcaaaaattgctggagctattttagctcaaattttaaagaatgctacaatgtttctttacataatatgttattcatatctaattattgtttattttatatgtattaaaaagtaattttaaataatgtagagaaaagataaaaaaaattaatgtatgatataatgtaaaaatttgaattaaaataataaaaaaaaaagtataattttaacaaatgatcttataatatacaagtaaatattttaatttataatcttttgaatatctgatgagtattcttattagacgtgtcactttataattagttagtttatattaaattatataaaacttgaacccgatattttatttatactaatagcaatatttatactaaacaccatcaatactttttaacatttctctactaattaaatattggcacacacaaatttaacaccaataacaagagatctatagagatctataattgaaattattttgaaaacaaatatgtataaaatttgtgtataatttatatattagagatgtgtaaatatatgtttgtatgtgcacataaattacccttagcttattcatttaaatataaaatttaaatttaaagataaaaaaccacaactaatattctttttatttaatattatatatattttcagatataataaaataaattaaagtgtaaattattcatgcacatacatatatatcattacttttgaatcaaaaaaaatataaattattattgattccatgttcagcaaataattatcataaatatatttacactaattttgttaatttaaaaaaaaaaaacttaatttcagagtaataaataatattaccttaatcttctcaatatcagaagttgaagaagaagaaagattagcattggaagaagcaaagtaagcctcgggacacctctcaacgacgtcgttttctctacaaaacggcaaccaatgagcaccgaacttagcagcttcaatcaacccaaacaaactcaaatctgacccaccgtcatcggaaacataaacggagactttccccgccggataatcaaaacccataaccgaaagcacagtgttcaccacgttcatcggcggttccttgtacggatccgccgtacaaacgaacacatcgattgccggaaactctttctccgattctttactgatattttggggaaactcattacggtggattggtttcattcgaaacgactgcgttgtgagccatattaggaataaaacgacgtcggataggaataaggctgaggagattttggtatttttagttgtgaagagtgatgatagtgttacagtgtggtgatacagtaatgtcaccgcagctgtggcgtaaaccaccgcaaatattcggtttgggattgtgagtcgggaaagttccggcttgtggagtggtttggtactaaaacgacgtcgtagagtctccatttttaattttttgttgattaataattaaaggaggattttgtgttgttgtatatataagaagattttatatttttggtaagcgtgtgagagtgtgaattactcacgtgtgagatcattggattctaattatattaaaaggaaataggataatattaaaagaagtattctaattcaatagttgaccgacagtcaaatcttgtcatgtgaattttgagggagagaggaatatttattatagagcatttttaggatacttatggtgtttaatattaggatgaaatattgtattaataattttttataatatttattaaagtaaaataaataatttttgatattgaattacatctataacgatatttctctttattatatggaaaatgctaagagcactctctcaattatcttatatcgatgtcacttttaagtcgtgttaagtatcactaatatcttaataataatttttacaaaactatatatgtacataaaaaagaattgctaaaaaatattattagtgtttattattgttctcagtgt

SEQ ID NO: 230424 - DNA, 980 bp, Cannabis indica
ctctttcctatacagatctaaacctaaaaataccctaattttcttctttctctacaaaagtcactctctctccttactttctttcagattagaatcgcctccttctctcttaatctttcctccatcttcactcccattctactccttctaactttgaccctaaatatctccgacctcttaatcgtgcttaatattcccacatctaacgcaacatccctctttagcttcagtttgtggctgtggaggtggagatttcatgttctccggagatggtggtatgcgaaggcttggattcgcaatggtagggatttccaaactatgaatgtgcatattcttctatctcatgagaatttttttttataatctaaatatctcgagactttttttttgtttgtgtctctctccctctctctgatttgtgcaggtcaatggcgtttgatagtgttcatgccgtctaatagttttaggtctgtggtcgacgactgctcttgggcttcgtggggttcgtggtttacaatgggttaatggttgatggctcaactccgggcagagatggcgtgggggtgggcagagttttctttttttttttttttgttgaatagggttgagagtattttgtaatatatattttaattgtttgattataatttttttatttgagtgaaatgaaattattgtatttgaattttaatgaaattaattaatttttatttaattattaaaattaaaaaattcttgaattattattaattttatttagttattaaaataaaaaaattattgactaattattatttaaatttttatatatagtaatatatatttaaattatttattattatatttttaatataaaataaatatacaagtccaacaaagttggactagaaatctaatatttttgtatgtcttattttcatgtctagtaatgttggactagaaatttttttctagtccaatattgttggacatgaaaaata

SEQ ID NO: 230425 - DNA, 998 bp, Cannabis indica
atattcatatagtgtatatgttcttttattccgcatattatatacacatatatatatatatttcagtttatacatataaatgtctaacataatgttgatattttttttcttagattgtttaggatttgggatttaggataaaatggctgtattgacgtgataagttcaaactttaatttgcttagtttttaagaatgagtgtgttttatgactaatgttgtatgacctgaaccaatgcataccaagagaaatcacgtgtgaaatggtatcttgagcaaagatgacagagcaaatttttcttgaaatggggcagccccaacttttctggtgcatatctttaccaacatggttttatctttgggtatctatgctcaagatactccaacatttctatttcaaagtgaaggatccttaaagcatatgcaaccccacttgtgagtggcctttcaaaagtcttaaactgtctaaacatgttatatagtcaaattgtatgtctaacatgtgttgaaattgtttttcttaatggatgtgtacaaattgttgtagcatttattcttcatcatttcattttccaagaaattaaaaaaaaaataaatgtagtagttttatttattttaaatttaataaataatattgtattttctactaatacaatatatatataatattaggatatgtttatggtaagtacattggttttgttcctataataggaatgtttttttttttgcaagaaatggtaagaatgtttttacaaccatagataataaatatgtttatggtaggtacgttggttttgttcttatagtaggaatgtttttacaactattgataataaatctaatggtgataaattaataagtgcatagcaatagttaatatttaggatgtattacttttgtaaatttatttattaataatattttatcattaaataataatttattaaattaattaattaatattttctttaccccacaatttttttgttttttttt

SEQ ID NO: 230426 - DNA, 1605 bp, Cannabis indica
cctgctctcttcttctacagaagctatggacatgtgtcattacctctaaacattttctttatgttcataacgggaatgtttgtgaacgggccatacgctcttataacaaccgcggtatcagctgatcttggtacacacagctctttgaaagggaattcgcgagcacttgcaactgtaacagcaatcatagatggaacaggctcggttggggctgcaattggacccttgttaactggctacatctcaactaagagttggagcttagttttcacaatgctgatgggagcagccctgattgcaggattatttctaactaggcttgttgtgtgtgaggtgactgagaaaattgaggaatcaagatcacaaggagggtctcccgcgacaagatcttcatctccaattgatgaggtttgatctagtgatagcgcgattagtttatgtattgagcaactgtaattatgtatgctcttgtgattcattccttgtaaaatgaaaagtaaaagattaaaaaaggatcttagtaatttacatggagaggatttttcagccttctccttgaatttacttctgatatagaggaaaagaaactcagtggaagagtgacaaaagggtgtgaggtggtggggatagaataatgtgtttgtagttacctgtttgtacagttttgtatgttatagtaaattttgtgttagattcaaaatcaataaaacatttcatctgttcaatcattacattcatctatttagaatcagtcaacttgtagcacatcattccacactaatttccagtggaaaacatatctgtaattttgaaagataaaaatatctactttgatgtagaggagatattttaataaatttttatgataaggaggagatattttaatttcttaatagtggaaatatagcaatgacagaaacaatcaaacaaatagaagaaaagaaagaaagaaatcaaacttcttgaaacttggtcacatttagtgggacctggttgttaaaaagagaccaatgatagaacatcctttttcattttggttataaattgtgtgctatacaacaaggaacatacataatggcttaggaagaaacagagtacacatctgtgacatttcttctccaattatccgtaccaaatattcaaaatcatactttcgtaattaaagaaaaaaacttagatcattatatattgccatgtaagaaaaagttggtagccatataggtagtgtagtgacaatattagttcaatgttattgaatattagctacgtgattattacatttgtcaagcaaaagaaagaaaaagaaaaaggcgtgattatacaatttaatatcaaattttgtacattatagggctcgtttggaacgtcgtactaggtcgtattgtattgtattgtattatattaaattgtagtttatacaatatttttatgtaaaactatatgtggtattaacttttatggacacctaaatatataatattttagtataaattaaagtttaacatagtataatataaaaatatgatatataatccaagacaatataatacaatacaatacaatacgacttaatacggtgttccaaacgagccctattatttttaa

SEQ ID NO: 230427 - DNA, 4345 bp, Cannabis indica
atttatgcactataaaatattaataacacccatgtttacaatgcgagaccaagctttatgtctctctatattctttaagtactatatatatagctttactagtgatttttatagattttttttttctttagttcaaatttaataagtgggcacgtctgttaaatgatgattcgattaagaccccccattgaagaaataattaaccctaaatttctttcctttttcttgtaattttccaagatactaattggtgatgttatatttttttgagtatatagtcaatatgaaacattaatgtatatatatatatataataaagagtacgaattagtcgtatttcatgaaatgtgtaatacaaactactaaaaaaaaccaactacttattgtcacccactaataacaacttccgcacttttcaaacatttgttttatacatctcaagactcaagagtactattaagtaaaagtttctatatattattatatataccaactaattaaatcttttatatgggacatagcaaaaaaataaaacctctttctcctacttacgtacttttcatgaagctctatattcacatcacttatatcttcacaagtatacatattattgtgtatagatcgatatatatattgatgatgatgacacatggttgaagctcatcatatatatattgttggcatattgcagatacatatacaacatatacatatataaaatatggtcacttagtattatatatatatatatacgtacgtaccccactactgtgacctttattaattacttcatcagaagaccatgatgaccatggttttgaataacgctaaaaaccagctgagttcatcaaatatatgtaaaaggatgttacttatattctacttctggtgcctattttaaggtgtatattttgggaaaaacaaaaatgtaagatgaggagagggagagggaaaaaaacaatctttttgtgtttgttcagaaaaatggatggaaatgaattattggagttggaagtcaagaaagggaaatgaacttgaaacatctttcatcaaatcatctaagtcccattccccaactgttagctcatgtgcctggaaataactagtctcaaccccatgaatatgatcaccattttcagctttgacactagtagtagtactgttactactcatcaagtaattgttattactcatattaatcactctttgaggatgatgatcagtagtttcatcactctccagtggaggaacaaacagttctccttctatcccaccaactacttctccaaaaaaaccaagattatcatggtcattattattaaccatcccagcaatttgtgatgatattggattaatattattattcaagaattcattactattggatgtaccaaacatgttgttgtgatgatgatggtggtgatcaaattgcatggctgggaatggccttatcaagtggtggagagaagtgggtgatgataaatcgtgaaggtatgaagtagaaaacatggtgttttgatcttgactagaagcacccgggatgatattgttgatgatgatcttattattattattattagtatccatggatattgatgatgagtccttgagctcgaacgaggagtcacttgtgtttggtgaggttgtagatgaagatgacaagttcttgagtcgtttcttactgttgagttccaaaaattttttatttcgttatcagttcttcctggtaagcgtgccgcgatttgagaccacctgagatcatacattataaatacatgcatgagtttcatgtgccttaatatctatttatatatagagaaaggctaaaagacacccctatgtacctaccatctctctcggcgtcaaaccggctactgattaataaatattagatctcatataacttaaaaaaataattttttaaaaatatcgcgaaccaaacatgacgccaatataaaaagtgttaaaaaccactaatatccaataaaagaagctcataatatatatgtctatatatatatctatatatttatattttatatgtatgtatgtttgtgtgtggagtgtgttaaactcaaagtggggatcggtgatgatgtagacacatggtgtatatatgtatgtaattcatcgtaagattaagattttcttttggccgccagacaagttggacttaaacactaataatagaggtatatattagactacgtacttgtcgggttgaaatggaattatctgatcaagttaatagtactagtcttttgtctgacgcctaaataaaaaatattgcaatggaaaaagattacatattttatagatatatatatttaaatacttgaatgaaaagttaggggcttgagtgtcttcaactcaagggctgatatatcagcaccataaacatatatagaagaccgatgtcattttcatgttttattacattgatgtatatatatatatatttatatatacatttcatgaggttaactacagtattaatgtataagagaactgaaggtatgtacatatttttatatatatatgtgatgtgtgtagatgataggtgtagtacatgttcatatatatatctgaactgaagtagttcccatagaaatacttgtacgtgtacatatatttcatatttgtatactcaaaaaaggaaaatataaagaaaaaagtaagtacatatattgactttagttttatggaatacgtacatatatatatctgtcggtaaagatgatcgggagtatttattaattatctattttactaaagagatgattggtagtattagtcttaactataaataattaaatatttgctttattaattactttcgacaggagttaataacgtattctctcatctttctctctctgtagtgtgtgtgagagagagctatcttactatgtatatttttggtaattaacaatgaaacatgcatatatttttcattcaaaaaaaccataacgaatacatatgtacatgcaagaagacacgctaattctaactctatagtctatacctgtcatttcatcaaaaagttggtagaaaatccattaagaaattcacgcatagaaaaatgaaataaaaaaaaaggactctgcagcaaatcaaaactagacacgagaccacacataaaagaaaaagaaaaaaactatagtataattcaccatattagttttcaatttttcatcatcatcaatatgaataaccaaagttaattattagctagtatattgtgccagtagactttgtgtatatattagattctaaatatataatataatgtaaataaaaatacaatatatatagaagtaaaagtacatgagaaataaaaataggatatataagtacagattgatttaattaataaattaataacctgttgccaagaagagagtgcaaatggatgatgagctcttcttcttgaggggaaaaagcaccacgtttgaggtcaggccttaagtaattgatccaacgaagacgacagctcttcccacagcgctgaagcccagcgtttctagccacatcgctccagcacccttgcccattgttcagcatgtaattcatcaacttatcatcttcttcaggggaccatagcccttttctcagcttattgttattattattagtgttattgttattgttattactagaagatgatgatgggtctggctttctcatcctccagcagagatattactatagctagaaaataaaactaagaagaagaaagagatcagagaagtagtagtagtgtgggtgtgggtgtgggtgtgggtgttagaagggttgatgtaaaaatgtggtaagtaggtctttatagagaaaaattaaaagagagaaacttgaggttgtgggaatgatgatgataatgatgatggtgacggttgtggggtttgcttagaatataggaaagagagagaagagagaagagaaagagagaagaggggttggttgatgggtctgagtagaaaacggtttggagagggacctgatcggggtatgagagagattggtggtcgtcttgtctttgactccatgacctttgtctttttcttctcttattaaattaaactaaacttctacttcccattaacattaacaataatcccccttgattctcaaagaaacaaaacaataatcccccttatatttcttcattcacaagatatatttattattattattattattctttattatctctgtcattcataatacatatatatatatatgtatatatgtatttgtatagcataaattaattctaaataactttaaacatatatatacattcagatcaattctcatatgtaatatgtatgacatttaagaaaac

SEQ ID NO: 230428 - DNA, 1184 bp, Cannabis indica
ttctacttatgaatccatacatcttatgggctgtgatagatgttaattatacaatcaaaatttcttttagatattgtaatgacagtttatttactaaagccatttctatttatggtggaatagataatgattatgctctatttaatgtagctaatatattcaattttgtttgtgtgttgttgagtggtatttattgtattatcctggaaatcatatattagtttttctaatttatatatgatgaatagagcataattagattaaagtgatagatcgtttttatctgtaatgtttattagtccaattatatggtgtttgcgatttggactttttttccctcaatcctttttcttgtgagttactttgtctattatgataagtaaatgatgttttttattgattcatttgtttgtattggaacttttttcttttttctttctcagttaggttaattggccaaaaacatgtatccattcaacagtgtctctttgctaagtttaaagttttctttggagtgtatgattttatatgtgattacgatatagatattacatcaatgaacctgttgtgcagtaagataagaatttcaaaatgaaaagaatggaatagagaaaatgatattgtcacccagacacaatattttaagaccccacgccctaccaaaaagatacagtcaacaattgatgacaatcgaatgactgaggtggagaagagacttcaagagactgatgaaatgtatcgccaaactcaacaacaattaaaggaacttctccaacaattgaacactcaacatagcaacgtggttgggacttcacatgcatctggttcgggtataggaggagcatcaaatgaaccagtgaatatttcactgcagagtgtctctgctcaaccacgagtgccaccaccgaatgtctttgcccgaccagtagcaccaccacttagtgtatctaatctaccatcagtgccacttcctgcaaatgtctctgctccaccgacaccaccaccagatacaacaatgtctgagaaggtaaatctattttcatatttattttattatatcgttcttattcgttttaataaattgcactaattataattgtttgttgtttggtttcaaaatatagaaagcaaagtgttcgatgtacttggttaccaaacaacccaaaaatagtactaagtgtgtt

SEQ ID NO: 230429 - DNA, 918 bp, Cannabis indica
cacagtacgtttaaaaatcacgttaacacgcctatgctagttagggtgttacataaaatataatatgaatgggttatatttttccaaacccatttaattaggttggcccattgaaatttcttcaacccggccaacccaacccatgatcagccctagttgtaaccgagggtgcaaacttgatttccatagcttactccacatgttgcacgtttccttaaaacggtgttgttgacttatccaataggagtttttaactaagaacacactcgacttagaagctttccaaaacagaatatcagccccttcctccaaaggccttatttgaaggatctcttcagcaatagttgggttaaaacaatcttgaatcagctcctcattccatactctcagtccgtctacaaagaggtctttaatgttctaaaaggcctgattgtgtctgattctgaagtgagtttttaactcctccatgttcctatggggaacctatcccaaagctcgctgcttccatctgcaacaatcagccttgcaccatccaaatagacttggcgagcctcaaggatactcttccagcaccgcgaatcaatagctttcctttccactgaccatggggacatcaacctgcaatacttgtctctgagaacacgaacccaaaccttattatcatccttcagcaccatccagaaaagcttcgtaagaagagccacattcatatctgcaaaccttctaaaaccaagacccccactcttctttggttggcataactcattccagcttttcagcgcacaatacctgttcctatccgagattccaagcccaccagaacttagcaaggatcctgtccaaatcattgcagagcgttttgggaacaaggaccgtggacatgaagcaattcggaatactctagagtacagaacttat

SEQ ID NO: 230430 - DNA, 2507 bp, Cannabis indica
cttaacgttagggcgttacaattagtaacaatattataagaaaatcacaatttggttgttaaaaaaaaacccaacaaaagtaaccataatagtccatttaagtcacatacttttgattactcctagaatatcactaaccaaatagatcaaaagaaaattttcaagagagggaaattagaattcatgttcaagaactaaaagaaaaaaaaaagaaataatttagttcttacaaaaaaaaaaattagaaaagatagaaaatgttactagcagatttcttcatctacaactaaagagattatgaatagtggtctctcattcagagcatccctaaaaatagataattcatttatctctagctctgggcctcaaacggtcaagtctccgttggacatttacaagagaaaatattcaagcttgaaaaacttaaatgtgtgaacaaacatttgccttcttttaaatattgaatcaatgtctccataagtctgatcaacccaattcggtggctaaaaccagatgggagtgggcgtgggtaccttcattcggcgattgaaatcacaatccctgaattgataccatgcaatatttataaacccaatcgatactgttattcatgagactgaggcatcaaaattgattgtacaattacctagacctcaatcggtgttcgcctcatcgactattctaaagatgattaatcaataacaaatttaaatcgattctaattcaaaaaccgaatgcaccattgaatcggtctatcgatttaaaaatcttctattctctcgcttcagttgaatttcgaaattggatcgacttacaaatcttctattccctcgctttagttaaattttgaaattagaaatttaaagttaatgggagggttaatctcaattaagtttaacaaaataaaaaaaaattaaaataccgctaaactaacaattgtcgttacataaccacttttaatatataaagataaagatacgtatttaagtttaaagtcgttaaaaaaatagctttaagtttattttttcttcttttcccgactcaatttagctgatcatgaaattttctaaggaagtaggctttgtttttttaaaagaaaaaaatgtaattattatacccaaaatttatttattcatcagaaacggacacgtgctctacaaaagaaatatgaatcagttcaaagaatatagtaattaaattgcattattaaatgcaatttaaaataactcgtttcaattaattatgagttgatagaaatattcgaactatttgccacataaacatatgcgagataaggataataactacgaaactgatatagttgatgagacaatatgtccatctcgggataaacagagtatataatagaaacctacaggatgagacatcaaggagcttaaagctcgttaacccacatacttcgaaataaaaacttgcaactcaaggacgtatgcaattgtacatggagaacatcacatctatccatctcgctcttaataccacctcgcgaatagctttacaatatgaagagtactacgagaagaagaatatatacactttaatatttttacctctaagaacggatcagaaggataactcatactcagcgagaaataaccttctttgtcagcataattgttcaaagataaagacaaagagcggttgagtagctattaagtattatctcatgtacataaaaataaaacctggggaatgtctaagtttcataattagttgtaaatgaatagatcccaataaaaaataactgtcaacctacacacctataaataggggtagaatcaagggaaaagggacggtaaaataaagagagagaattctattatttatcattattgagaattgtttatgattattattaaattctatagcaaatttattacgtaaaaaggctataaatttagttaacaaaaaactgcgttaatagtttggcgctttcattgagagccttggtgataaaaactcagaaaatccctccttataaacatccatatcaatggctgagaacattccccacaaagttaatcatctagaggaaacaacccctcgacctggtaaagaacctatgggatctctgagaacccacacagctgaaataccacattcgagaaggaacaatgataatttcaatactgctggtgattagattctagaaaggagtgaggatgcctataatcctaacagatatgtcccactagtataattagaaaataggaaacttcaacaacgcctggctaaatcaaaccaacaaaacgctgagttagagcgagaagccgcggcagccagggctgcacagagaacagttcctcaaaaccaacctgacccaattgtaaggagaccacgaggaagatccctcgagactctaacacaaggaggcaagaaaataaccaggggaatcccataaatgctcaagaagacaatctagaaatgcaagggatatcctaatagatagagaaaattaacccaacccaagtaatacagaaattagg

SEQ ID NO: 230431 - DNA, 1246 bp, Cannabis indica
cctaacaaggcttctttcggctgtatataagtattcgggtttttgattaatatttattgccatactgtacattttgatggacaacagcttgcaatattaaagtataatcatggaagatcgacgcctaagtaaattatttaaacatacatttatatatataatcaagtactggtggaataatagcatttttcattttatataggaaacattgaagagattgatttccacaatattttcattattacatatatatatatatagacagagagatcgaagtgtctagggtatgtgtacacataattgtatatgtcattatttatattattgtagaagatatggtttaatataatatatgatttgtagaagaggacaagtctgaatgaccagtaaaaatgtctatgggtgaaatgaataataagcttaaaagaagtagtagtccaaaagaaactgagacacctgaaactaaataaaaaagtaacaatgtggaaaatagttgttagtgtttggccaacattcaagtactatggaatatgaaaagtatatctgtaaatgttcctttaaaatgggcattttctagataaatgacaataaagctattttactatatattggacatttcagtgtgactatatactatgcatactacatatatactactactactacactctttttccctcgctctgagaaatccagtgaaggtgatctgtaattgaagttaaaagttcttataagttataaccctactactgattatttaccttggaatggggaaaagacaaccatagctcactaattacacagtatagtctttttttagagtactgctcggttcatatttggttaattaattactacttttattttactacacacatcataatgaggtattgttcatatatatttgatgacactttataatatgtaacaaatatatatacatatatttgaaataataacaaatagggttttttcaaaggcaaactactcagatagtcttagtagtaaattatctgacgaaaaattgtgtgactcaagtctatctcttcgttgttttgtatcagttttttctttacgtgccacaaatatgtcacattaactttttttagttagtaccatactcattattattgtatattaaatatataagagtaatattgaattgataaaattaattaaaaaaatacacataactaaaaaaaaaatcaaactccaaaggagtgcaagatctctctttttctctctc

SEQ ID NO: 230432 - DNA, 1429 bp, Cannabis indica
ataacttttacagagtaaaaagtttaaaatagtatttatcctaaaaatattatgtctacacaattttgagaaaaacttaacttttaataatttttttatagttaaaactatttaattacaaaaataatgtattttattttaccaatttgcattgttttataataaatatttatcaatgttgtttacaaaaataaaattcatatttttgtatgatttatttatatattttaaaaaaatatatgcattttgtaaaattcctcctattctattcaattttttttttattattattatttattttcttttgtagtattaaccttgaaaaggtaaaaaaaaatgtaagaatgttacacaatagctagcatttatgaattacaatgttagagttgcaactaacatgagaataaataatccaaaaaaattggcaataaaatctaatatcagaaaacaagagcttatcattatattaagagaacctaaaaaaatcataatagaaaaatatcatccaataaatttaatgatataaaagctagctagatcttatctacgcatttgattttttttcttagaccaatacggaccaatatgaagcattaactaccgtagatacttaattaaattcctataaaaaaaagttaaaacaaaaaaataaaatttgtaatgtgtaaccgttcatgaaagaagaattttaaccaaagaactaatggcatgtttactaataagtaataggaatcaatagtaaggtaattattcccttacatttgtttacttacattattaaaattaagaaagggagaacttgattaaataaaagagaaaagaaagggagaacttctcccaccaattttataaggaatgccattaagggtaatggattttaattatttttattttaatttttaatattaaatatataatgacaattttatcctttaaatatctcttacaaaataactaccatataatatagtttaactcaaaagggtaatttagtcaatttaagcattccgattacgtttcctaataaagtaaacaagataaatcactatcattccatttccgaaaaatttttgtaaacaacatattacaaatattgattccgattatttttcatttattccgttatatttctcctttaatttataaaacttattgtaataaagtaaatttatttggttaaagtcctttaaaaagtgttattactcactcaataagctttttatttaactaacagtttttttatttcacttaaagtgattcttatactcaagtcacgtgtttaacggtttgattaccataattttctgtctaaaaagcttgatagagatagaaaataagagcacacataataagtgcatgtttgacatcataactaagaaattattttttgtttttaaaaacacaattattttttgaaaacaatttgact

SEQ ID NO: 230433 - DNA, 2669 bp, Cannabis indica
cttaagattgagcagttgaaagctgagcttcttcagcttgatgagtaatgaggtttgttatacttcattttgttgtactttttttcattggttttgtttagagtttagaagaaagaagagtttgtgtttgcttaattgatataagtttcacaataatgccattatggtgttcttcttgaatatgtaatgtgaagactgagacatactatagctaataaaaaaaggaactaagttattcatgtttgtgatctctggtttgtttttggtatatatatatatatatatatatttatatgtatacatgaaattcaaatactcactaagactatgaacagcaacaatatcatcatttggatgagcaagaactgtgattgcctctcatttgagtccaaagagatgcaaatgagtatcttagaagagcttagaagaagataccatttttgttttgttttgagttttccttagaaaccaaaaagtttcctaagaaaaatgtcagttattttggtttggtgagtgaatgatgttgttaagaagattgaactgataataatcatgacaataagtgtaacccaagaggtataaaccaaaacttttaaaataggatttggtagttcatttagatttaccaattttttcatggttctgttgatgaaccattttcggaaggtaataatagtttaaaggtgaagactttgtgctgtttaattaattaatatgagtttcacaataatgccattatgttgttcttcttaataatgtaatgtgaagactgagacatactattagctaataaaaaaggactaagttactcatgttgttttgttagagtattgtttgtgatttatggttgatttcagcttttggcttatataggcatgtatggtggatatgagttcaagtgcttatctttagagattgaattgataatcatgacaataagtgtaacccaggagatacatgagattgagttggttgggtgatcttgggtcttgttttgctcacatgagatttaggatttgatgactcatgggagcctatatatcaatatttagaatcctgctttctctcaaagattgaaagtgattaatgctcagaaaattatgttttgattgaattttgtattgtaataattattacaatcacaaattttaatacaataatacaaaccgtattattcagtacaaaacaaatggtcgaaaggtgaattgaacctttctaattttccctttcactatgatgagaaggagaaggaagaaagataatccaattacacaaatagtgatagcaagagtgttagaaagtgacaacactgagtaggtaccagtgacaaatgctaccaccatgaatcccatagcccatattgtaaactccattgacatgaggtagttagatacaaactcctcctttgcatcttcaccgaaagatgctatagtatggaaaggttgataaaaacagccgtaatagaaagtactagggctattgtgtctgttataatgaaggcttgaaatgctctgttattccttagaaccgcgctaccttgttgtggatgcccaacctcgtcgcttatgtaacctcccggtaatgtaaatcctgctgtgaatgtcactgtcgcaatcaatgcagccgcaactagagtagactctctaaaatttgcaattctagtccttgttttttctttttgctcaatctttttcttctcagcctcggtcaatattttttcgcctctgtcatctcttgcaagtgattttcgcaaccaactctttattgtcgggtttttaccaaaaagctttggcaaccctctctgtcatgtataaatatgcattatcatcacatgaggactagctaactggattaaaaataaaatataaaagttctagttaccttctcatattcactggaatcaagatcatatgccatgtctagaataattttgttttgttggttgaataacattttattcactttaggatgagacatcaaaacttctaagttttctgaataacatggtgaagtggcaagcatatgaagcaatggagtatttccttcattatcttttctatttaaaaggtaattattgagtagtgaagaatgatctaatatgagttttaatgtggaaggagattgtctcctcatagcatagtgtagcaggttttttgcctttttcatcaacaacttcataactatctggacacctcgaaagaattttcttcaccaattcataacctccaaacctgttagaagctgcaatttgaagagctgtggtgccatctttatctttgaagtaggcactgctttcatccttttctaacaacatcttcacaatctccaaattattatctgaactcgaagtgggcatcacagcataatgcagaggaatgaaaccatccttatctgcttgtctggtcagatctaatacgttctccaaaatctttcttgttaggcctgaacaatttttgttaaaaaaaaaatacttattatgtaattataatctgtttggtaaacgaaaggaaatcaacttattagttattacctgaatttttagttaaaattgcagcatggagaatatttctacctttagggccagtagtagccggtgaggagcaagtgttgagtatttcatcaaccaaatccaagtgctctgcctctacagccatgtaaagtggtgtttc

SEQ ID NO: 230434 - DNA, 2999 bp, Cannabis indica
catcacggattacaatccatgatgatacaataacagaacaaaatcataccactatctctttgttcacatttatgcagctattagatatttaggggacatacactgcatgcggacccctcttctcaattggtggaaggaaggcttatatacaatgtgttttctataaagaaaatcatttaattgatagtagatttaacattttggaaacctactcattttcaactaaatatatatatttatgaatgatatacatgtatgattttccattaatattaggtatttttttttttaatttactgtatatttccaattgagaagcaggaaggttcattcctttttattgaagaccaagaatacaaaactaattaattaattcacgccatataaaatgaaactgatctgtcaatgtttgtcatattctacttaattactttttattcacatttcatattttataacatgaaatactatacatagcacctacagactgatgtaatttatttgtttgtttaatataataatgtcattattattagttgatcaaagctcttgaaaggtatactgtgtactatatatattagttatggtatttaccctattaattaccatgagaggtccatgacataattatacaataatagatattgttttttttttgatgaataagatcaattgtattgctgaactaaacatttacaaacaccaattgtttctcactttgtatcattctatacatatatattatatagtcctcatactatgtccccccacattaattacaattcattacaatttcagcaaccaagtcttatccccaattgacattttgctaagaagtgctcccattagtctagtcaaagcatcttgttgtatcttcttgattgtgcgctttatttgccaaattttttggttccacagtgcttcattcctcacctgccacaagttataaaccaccgaagcaatgatggttaataagatactcttccttgccttgctaatcttagctttagagatttttccaagaagctcaagaatgttctcagtttgtactttccattctaaccattctttgattctttccaagcatttcgtactataagaacatgcaaaaaataagtgattaatgtcttcatcttcaactccacaaatcaaacattgaggatccaaacttggttcatacattcgaattcggtctttggtcctaagcctttgccacataacaagtcacataatgaacctatgtttaggagtaattaatctatcccaaacaaactttggccattcttttttctcttgaacatcaaatagaatagtgtgtcccgcttgaatactgtatttttgacccacaaacaccgcttggcttatcttttccttgaacagatttttgacagccaccaaagtcttccaataccagctgcaatctgtgtgggatgtgtgtaatcccaccaattgtaatttcccaaatatacagagttgatccacttaacaaacaagttgtcctttttcttagcgattgcccatacatactttcccatagccgcgacattccacttttgtatattcctgaatcccaagtcaccatttgatttcggcctacagattgcatcccatgctataagtcctgcatttgtgtttactgcatctcccatccatataaaggctctatagattgcttccacttttcggagcaatctctttggtaagatcataatttgtgcccaataagagtgtattgttaacaaaggttactctggccatataagataaatttcgagtgctccgaaccttgattctataatagatattgctagtgctgtcaatatttggaacccatataccttttcatttattatgactaagtaaaaaaattataaattattattcttattatgttatgatgaaaaagtccgtaattaaaagtattagtcataaaaattacaatttgttgtcactaaatatatttttagtcacaataattattgtaaatgaaattaaattagtgacaacttatatcgaaatattatgttttagtcataaataattttttattatgataaaaattcatatttagtaacaaaaatttatgttatgattaaaaaattgtcactaaaagtaaatttttttagtgtattaatggtggctatatatataaatatatatacacgtatatacatgaggctaggggtgttggaccacatccaatgttcttaagcatatctagttccgatccaattatatattggatgttagattttaccatccgatagtcatctaatcgatctaacatccaatggatcggttctatccattatatgtattgggaaatttacatggtatactaacttttatcatttttttacaaaaatactgtcaggcggtatttttttacttttttactgtgtatttttataagtttcatactgcagtatactgtgtttattttttagttatttttttgtttgttttagtgttgttttacggttattttctataatttattttttttaacgtcgatttcactgttcttgcttcatcttgctgaaattaatgattgttttttgggtgttctcgtggtactgtgttggtttatctgtaggtgtggaagatggatgctgtaaaatacattatttcttcttcattctttatggttattttgtgcttattttctgatttaatttagttatcctaaaaatatatttgacgagctcactacaaatttttttttgaggtgtgtggttcttttacatattaagtggttatatgtgcttatcgttttacatttgttgttgtgttgttttagtagtttttttgttctgattttttataagattgggcttgcaaatataactcctattagattgggtattgaggctatgcagaacattttttagtttttttaagcatgttttcctttcttttgtttgaattattttagtgttattttacagttgttttgtcatgattatttatttgacgtcgatttcactttttttttttct

SEQ ID NO: 230435 - DNA, 1582 bp, Cannabis indica
gataggagtgaaattggtagaatgaattgaaaaaaaaaaagataaatataatagattttttaaagagagggtaaaaattaaatgcatcaaattaaaagaagtatgtagagtaattttctttttacttttcatgtgaacttgtcacagcggaggactgggcctcccacacgttgtttgatatgaattttataaatagttaaaaaaatatataaattatataatttaaggtgaattaaattacaaaaaaaatagataatagtctaaaaaattttaaaaaaaaatacaaaaaaacattaatattgaaattttttaatttacaaaaatattttttcaataaaaatttaaaataataaattgattgtagttgttttataatttgtttatagttgtcatgagtttgttttttattattttatagttaatttatagttttcttgaagttgatttctcgttctttttttatttttttctgaacaaagtgtattttataattttaaaattttacaaacgtatttttataattaaaattttaagccaaaaaattataaataaaatataaaaaaaaaatgcatttttaaaaaataaggtgaattcaattggataaatatgtaatgtatatattgttttggagattatattactttgactcatgttgctaatgaaccactcaaacattaatatacttcaattattctaattttagtagaaaaattaatcacctaaactcaaaaaagaacatcttgcaaaaactcaaaaaagaacatgggtggtcattgaaagcatcaataaatattagtatattaaaatattattagcctatagcaatatactcatgtatattactctagctagctagttttttccattccattaaaatgttcttggttgcttattacttattttaaaaattattacgataagtacctaaattacattttaggtttgaaagaagtcaaataactaactaaaccttcaactatgaaacaaacttaacataattttagcacacatatctttactcattttataccatatttaatttggttgaaatcactaaagctaacctctttctcttgttttctaaattcttcatatatttctgtacagaattgttggattcgttatagaaaatacatttgaggagaattcttaagctgaaagaactaatacatgtttgaacttaaaggggttaaagaataatttgtatgcaagtttttagatgctttaatatgtaccagcttttgaaaaaattttgccatgcttagtattaacggttcagaacactataaattttaatttataattctaattaattcatgagaatcaaacaatagaattaaagattagcgaaagcgtaccaaagtcaataaaatcgtcttttgaatggtatgatcttccaatttttacattaaaatttttctctgaaactttagtctcttaatggtggggatacaagagagaatgatacgatatgaaggatacaaaaaatagggaccaatacctgtttactaataattgaaaaaacagtaattaatctttttttactatttctaatttgacccctcatcaaattagaaattgt

SEQ ID NO: 230436 - DNA, 1835 bp, Cannabis indica
tatttcaaaggctaaatatgctgcaagatttacccagttaaggctacattagtcccaactaagttggaaagtccctatccgcacagacgtctgaagagggacttgggagtaaatgttagcccaatttttgtccacctgatgtggcatgtctacgtggccaacatcagtgccacgtgggagtacagctcgccaacaagaaggccaagtcatctactcagcacttcaaccaacgaggagtctcagtacttaagcgggacaacaaaatgacgaaccaactacctcaagggggctcgccatccacctctggtcagccctatggccagcataggccgactaagttctagacatccatggttggccatcatgcatcctgcacggccggccagcctttgacttgataggattttggtgcacaacttcatacatggactgtaagccagaccacgaattgggccttcacatcccacgaaaaataaagggaaactatctattttttaaggacattttagtaatttgtattttttttttaatttagtatgtaaataatagcttatttgacctatttctaaggaatttgaagggttaagctctcctatattaaaagccttagtcaaatcctaaaaccctaagtccgaagtccttaagtctcaaatcctagagatcttgaagggtctaagtttgataacttatatctctctctcacgcccactgctatactcatactagagattttccaactctaattctaacattgtacccttaagagagctacttcagatcccatcagtatagtgatctgagtagtattatctctcggtatcaataacaggagtaggtcattaccgctaactaagggggccaaacctatataaaatcctgtgtctatttactttattattctaattgtgtaacacgtggaaagtatcagtattaaatacgactctgctgtcgattggccaaatatgaggtcaacacttttataattaattacgtttaaatttttattacaaattcatttatgttaataaaattttgagtttagcaacatttatttcaggcatcaagatcaatgtggatgcaaacttattcgtaagcgaggggcaattttgttttgagtttagttattcaagatatctcagggaggtttgtggtcttagtttttatgctccatatcatagttagaaaagcagaagcagaattaattaaaaataatttaaatctaatatgaactataagccgaaggatctcaacacaatatatagatatctatatatattaacaattgactttaagatttagggtttagggtttagatatctatatatatctaatacatagtttgtttgtaaatttaaaatttgaaattaaaaatgtgtgcaaacatatagaactaaattcgagtcatcggccgcaatcgcctcgacattcggtagttttcgattacatcggtgccccatcatgtgcaaatctgtgaccgactagactaatgaaaaaagtgacaataccttttgtagcctatcaggagaccctcactatcttttcatattattattggacatccaatctgagaacttgctaaagagttcacaccacgatcttttaagccaacctcaacactcaggaatagagcgagcttttagattcaattggatgagtataattttgtaatcatagtctatttttaactcatgagatactgtggtaagataaagaaaaataaaaatctcacgccacactacagtgtgtagacgtgtgagaagaagagagagagagagagagagagagagagagagagagagagagagagagagagagagagagagagagagagagag

SEQ ID NO: 230437 - DNA, 1195 bp, Cannabis indica
tcaagagtctgtagtgactcagagtgatagtgggtttgctgcccactacttctagttttggtaggggtggtggtagttcctttaatgatcagaaaagaaaagctccatcaacatctagtggttcgggtcagaataagaggttcagagggaaccagaacagacgtgcttgtcagggtggtcctgaaggtcgttacacctatctagagttctcagtttgaaagaaacatcatctgggtgagtgtaagggaaagacatgttttcactatggggaagttcaagaaatattgccttcagttgaagaagaatgaaccccaaaaagaagcaaaactgacccaactcagatttttgctaccacccaagtagatgttgaggttagtccatcagtggtgataggtcagctctctataaaaaattctttatactcagtattatttgatctggagctacgaactcttacgttgctagtagagtgattgataaattggataggccctgtgatagttatgcaatagggtttaaccctactacctaatgaaggattagttatctctagaagctggattagatgtatgccagttagagtggatggtagagaaatgggtgctgacttagttgagttatccacagaagactttgatatcattctaggaatggatatttcctatataagtatgcagaattatctttatggggagagatgtgaaatctacatcgatcacaaaagtctcaagtacttctttattcagaaagatctgatcatgagacaatgatgatagttagaactagtgaaagattatgattgtgagattttgtataatcctgggaaagctaatgtagtagagcagaaaggatcccgggcagatatccagttctaagttggttttttcccatttagcattagagatgactagggctggtatttagtttgtggttggcaagcttaataatttgactatccagtctaacctactagaaagggttagaaatgcacaaatgtaagaccttgagttattaaaatcccataaagaagtcctacctagtagggctaaggacttttcaattttttagagtggaatgcttcggtacaaggatcgagtttatgctccagctagtgatgaaaccaggaaggagtttctaaatttagatctcatctaaatttgtgcacaacttttcagtcccagaattaacacttaaa

SEQ ID NO: 230438 - DNA, 1382 bp, Cannabis indica
ggttgcacttaaattttagcaacccgaactttagattgagttagaaaatatataggaaaaatcgcccaaaccgaccgatgtacaaccctacagacaacatgttcatagaagcctagcatagttttctttttttatcaaatcatgcagaataaggaattaattctccttaaatctcggacagaaaatcatatcaagctaaaataaaaaactacctaaaatgaagatcaagtaattaattacccatagttataggacacaattataaaaatatgtatatgatttcttctacaaatacattaaatctaaaaattctacatggtttataaattattttaggtgttacacatgtattataaataaatatttgtattgttattttgatttgttcaataaatgatattttatttatgggtgattgattaatattttactaaaattataatattttaatttcctgtaatttaacctactatcatattcgataatttatactataaattacattaagtattttattttttataatattaagtgtagatatgaacattaaattttatatcaagttttgtaattataaattgaagtacaacactaaatattaatataaatatatcataaataatgttttgggttaaatataatttttatatctcttattaattttaacacttagaggtcgtttggaatgccgtattagatcgtattgtattgtattgtgttatattaaattggattatacattatatttttatataatactatgtcaaactttaagttatactaaaatattatatatttaggtgtccataaaagttaatgtcacatatagttttacataaaaatattgcataaaatacaattcaatataatacaatacaatacaatacgacctaatacggcgttccaaacgaacccttattgtacaaaatattacaacttttgttaaataccgctcaaagcatgaattagttctctaattcatttataatcatgtaatgtgtaaatattttgttggtgcgatggagaaaataaaatgagtacattttttactacagacattaaaaagttttattgttgattttccaaatgcatctttgatctttgcatgctgaaaataagtttttcaatctactaaagtggttctcacaaaaataaaaaaaaaaaaaagtttgggaactaactaaaatctatataataaaatagaggaataattacacctactatacgattttaaaagttcttacaataaatatggcatatttaaggttgacaaatttatatggttatttttttatttttaggtctttttatggtatttgatatgccatatatatatatatatgtaaattaggttttcaaatctcatatttaatatttttatt

SEQ ID NO: 230439 - DNA, 2440 bp, Cannabis indica
gaaagactccaacgtattttggaatgatgtggtgtgtgctgttgtgaagaacatgaagactcgactgtccatctgttttgccactgtcctcttgcgaaatccctttggatggcaagtctgtggggtgttcgtagtgaggagttgaacttcagtagccccttacaatttgcaaagtggttggttgagcctttccctttgactcatcaagccaattttgaagtagaggagttcaggaaatatggaatttccctctgttatgttctttggtctgtaaggaatcaggtgtttcatgaccatattcagttatcctttctcactaccttcaaccgaattaagtgcctggttgatgacttgaattcagtgtctcccaatcttcaggaagcggactcgggccatccttctctctctggtttgcaggagcctttacatggagactttgtggtttatgttgatgctgcctgcaaggaccttatcaccaccaattcgaactctgcatttgtggaagccttctcggtcgcccttcaggcaaaattgccgctggaagctgaggcatgggcgttacttcatgcggttcatcgctgtgttctccttggtaggcacaatgttaactttgctctggattgccaatctctagtgtatggtattaagctgcgcaagactccggattggaagatggcgactgtgtttgagctgctcttggatgggttggatcgcatcctgttggcttcagtttcgtggataccccgctctaggaatgaaatggcccataggcttgctaaatggtcttttaattctagtctttttggattcttttctgctgaggagttggcacctcttgttgccttctaagactttggtgttttctggctggtttttcctttcaatgaagttatctttctaagcaaaaaaaaaaaacaagcgtaattctattccaaaaagaataacaaagaaggaaaacaactataaaaagtgacccaaaatgtaggctaaaaatagcctaacaattgtgttttataaacaagacaaattgtagtgaagatctttttatttgtgaggaaaatacaaaaatctactgcccgtttgcttacccctagtatatatatataagagcattgttattggatactagtagtatttagcacgcttaagacgtgttgccttgcgattggctagcgatactccctaaaagctattacattaaactatatgaaacccgatacttaattagaccaatagcgatattgacaaataggaaggtgcttagcaccactggtacattttagcatttctctatttataaatacataatgtatatatttcttttcgatccattaaaaagaaataaaaaagattattctccttgtgtggtctatacactaaagtactcatgagatgaattaaatgccaagttttttttttataaaattaaaacaattgattggtatattttatgatggtggacccttttgcttctatgttttaatgttattcttgttgatgctctaagtgcattttacacgttataattaaaaagtatttttaatttttaaaaatagaaaattaatttttgaagacaattataggaactgtgatggtactgttttggaagcttttgcaacataatctcctggcgattcacatgcttctgtggcggagattatgagtataaaagaggcattaagtttgataaagaagaagtgctagaataatgttattataaaaactgactctttagtggtcattcaaagcactaaaagtttggttgacatgccatctatctttggtcttcttgtgcaaatctcctactttctttgcataatgttaaaatttgtcatattaaactgtctgctaataaagctgtatattgtctggctcgtggctcttattattggtctgacagtatcttctctgggagcaatgttctttctgctcttcaaactattgtaatagcagatttagctatttaataaaatttctacttttattaaaaaaaatgttattttctatttcaaaaaataattcacttttgattaatatttttttccactttatctcacattatcttttcatattattttctctctcaacattttttcacattattttctctctcatcattttctcacattattttctcacactttctctctcatcactttctcacattattttctctctcatcactttctctctattcacacattattttctctctcctcatttttgtacgtgttgggccggggtctgaggccaagttcgggatccgtgtctgggtcgaggtcaaatctaggtctgtttttcgggctaaggtctggggccaggtccgggttcgggttcgggccagggtctagggttagggtccgaggctgggctagggccagcccggcgatccaggtccaagtcagggttaggtccaggccggtgttgggtcagaggttcg

SEQ ID NO: 230440 - DNA, 895 bp, Cannabis indica
tcaatagagtaacaagctaactcgaacaaacaccaattcctataattccaaataaagtacaatattgcagcatgaactacatttggaatttaatgtttcaaatcaaataatatttgtgaccacaattatagaagaaatctgtgtttaggcattattaaagaattccaaatagctgatctgattttggaccaaactgttattatataaccagttagtcttaaaccagccagttgtacttgctttaagaatcttagttctcaaaaatttcttcctcaaatgacataatttgcgccaataccaactagaatctagttaaagttcataagtccagaagctcactgatttcagatagatgttatctatccatttaacctagagaaggtcttgctttgttgaaatcgcccaaatatacttagcaagaatagattggttccacttgactccatttttaaagccaaggcctccgtaagccttcagaaggcaaattttctcccaagaagcaatgtggatcttacttttgttaccattcatgccccaaagaaatcctcggcaaagcttttcaacctccttagtggtactatgaggaaaaacaaaaatgctcatccaataatttcgaaagccaagtaaaacagagtggattaattgaaccttattagcaaaggagagatgtctgctcaaccaagtgtgtaatctctgcttaatcttttttacaatgatcccacagtcctcaactttccactttgtcgaccttagagggactcccaaatatttaagaggaaaaataccctctactagttaaaaatcgtaaataatagcttgtttctccttggtttttaggcctccaaagtaaatttgggatttcctagagttaatatgtaagcctgagatagagcta

SEQ ID NO: 230441 - DNA, 1504 bp, Cannabis indica
cctcttttaaaaattctggattttcatgttcagagcaaaacagagacatttttttccataaaaataaagaaaaaatgctattgtatctgtagaattcaaaattcaaatttacaattaatagtataaaggaatcacaaaagtcaacttacttagaataaaatcctgagaagaatacctagaaccccaaaaaataaaaacaaacctcaaaattttcaatgagaatgtcatagcacctaccagattctacgattggaggtgtaactaacaaattcctcactagtaacttatgataccaatgttctggtatataccacggtcttggcttcaaaaaaatgatggaaactcttaaagagtataagagagataaacagccataatttgtaagtaaataaaagagagagaatcggagatcattgaagttttttcttcaaaaaatggcgaaaatggtgaagaaagctcaaaaaattcgacttagaaggggccttgtgaacatcatttgattagcaataattcttaatctacagtaatcaacttacttggtctgggaaaaatacagccctgattgatatttaaaggatttttcaaaaaactaaaattgtcgaattcaaaacgtattcaatatgcaagaaatggcagtacaattttctatgtggtattacaaaattccttataaaaatcagaagtaattttgagagggcgattgttatactaatattttaatgggctaagtcacatgacatgtgtacataaatattaaattaacaagctaacatttcactcgctcaacaaagaatccaaaattaaatatacatctcaaaatatattagctgaataatattgtcataacggttaaagcagctagaaaaaagccaatatactattcaaaattgccttaggcaaagaagaacattctctcactccaaatcatggatatctgaagaaataaacaaggaaaagtcacctagctcaacacattttatcgacgagaagaaaaaatcatatgattcatctaaacctaagtttgtgtacgatgatttggctactgcctgctattgagataagatgttgtggctcgcttaaaatgataaagcaattaagcccgatccaggtggtcaacttgaaaggttcgtaatctggaccaagttagctttttaaagcataactctatctatggttccttcgacaagctttctaagaagaagggtcttacataactctactcaattacaacatgttgtggccacatcaagacaacgattatcttatgtttacaaaatacaagcagttatttcttcccgcctattgcataagagcatgaaacatgagaaatgtcctagttttataatcgtaatttagattaaattaaataaatgttattctattcctataaatagtagtgagaacattgtaaagaggagggcaattattctagcttacaaaaactctatcaaattgtagacacatctaaaaaatccagaaatcataagaactcatggacaatgta

SEQ ID NO: 230442 - DNA, 1308 bp, Cannabis indica
cacactattttcttttttaataatattcacacataccttttacaagacaatattcacacatatttattgtacaaatgcatttttcaaatttagttagtaaaataataaaagctacccgtagtgtctaatactatttaagatgttatatcattattagtataattaagtatcaagtctgtataattactataataacttttatgaaatatcatcaaccaattataaagtattacatataagtagtgctgaccacttgtgcctcattgcaatgcccatttaattatttatgaaatgtaagagaagtgtcaagagaattgagcaaaaaaaaaaaaagtgtcaaagatatatacatatattgttagagatgttacacatttatatcaagaaattacaattctaatgtaaaatagtataaaaataaaataaaaagaataattaataaatgttacaatacatatacattctatactatatataagaaatgttaaagatgaaaattacaacacaatatattgtataacatatatagtaaataatatatgaagaagatgataaacactcactcacaaccttagcgtagattagtgagatcaccatgacatgaacaagttattatcacttttgtttaaaaatttatttctcatatctctaagtactaaagggaattctctaaaaaataactttgagaattatcaagtcttgtgttttttagcaagtgcttgttaatagaaaacttttttatctcaatatcagtatttaggatgtatatcactatttgaaaatttaactcataatctctcatagatgtcatggactcaattaactaaatataaaactcattttccaacaactacaactcttataacattaggaattttaagttaaaatctgtaacacttttttacacatcgtatcaagtaactccaccataagtaataaaatattgataacttgtacttattagtttgttgcacatatttaatctataaattatattatttgcaaataatataataattttttagtagattaaatattgtctctttagtaacaaacttgcaattttataatatttatttaatcaattaaaaatagtatatcataatataagattcatccactttgattgaataaatatacaattttatagaaatcttgcttaggtgcattaggtaaaatgtctttcaaattgaattgtaccttaatgtagttactacaaaatttgataaaattttagttaccgtagtattgagctactattcctttagtacaaaccggtgatgacacacacacacacccttgttaatg

SEQ ID NO: 230443 - DNA, 1634 bp, Cannabis indica
aagaatattatccaaatctaaacgtcttttagattacatttacaataccactactacttcgtctactgcttaccctaataataaatatttatcttataataggttaacacaacactttcgtacaacgatccttgctgcctattccattgttgaacccaccagctacaaaatggcagccaaagaccccaaatggcaaaaagccatggacacagaaaccgatgctcttcaagccaacgacacttggattgttgtcacacttcctggcgggcatcatgccattggttgtaagtgggtatacaaaatcaaatacaatcctgatggcactgttgaaagactcaaagcttgattagtagccaaaggttacaatcaaaaagaaggtattaattacttccacacctttgctcgtgttacaatgttcaataccttaaaattactgcttgctattgcagccattaacaattggtctttataccaacttgatatcaataatgccttttatcatgacaatttacatgaaattgtctacatgacactccccaagggatataaacctaaaggagatattcctccaaatgttgtatgtaaactaaacaaaagtctctatggcttgaaacaagcttctagacaatagtttgccaaacttagcaactaccttttatccactagatttgctcaatctctttcagatcccacattgttcattaaaaatcacaaaggcatttttcttgcctttttaatatatttgatgacatagtggttacttcaaatgatgatgatgctgttatttcctataacaacaacttaattctgtatttcaacttaaggatcttggccctttacgttttttcttgggctttgaaattggtcgatcttctcctaaaatttttgtatcacaaagaccattcaccctacaacttttaactgacacatgttatttaggagcttctcttgcttctacactaatggaacctaatattcggctctcatccgatattggggaaccattagaaaacccaaaaatatatcgcagcattatagttaaactcatttacttaaccatcactcgccctgatatttcctttgctgtaaatacgctaagtcagtttttatctaacctaagagctccccatcttgatgcatagaattttacgatatcttaaaggcacttctggccaagggcttttttctcaatctgcctcttctatcaatttatctgcttatgctgaaactaacatgtctaatactgactttcatcttaagatcttttcagatgctgattgggcctcctgtagtgacattcgaaggtccgtttctagctattgtgtcttccttggcaaatccttaatctcttggaaatcaaaaaaagcaatctaccgtctctcattcttcagctgaagcagaatattgggcaatggcaaatgccacttgtgagatcacctggttgttagctctccttcgggacttcggcatccaccacaaagatcctgccattctttattgtgacaatacaaccgccattcacatctccgagaaccccgtattccatgaacaagcaaagcacattgagattgactgtcacgtttgttcgagagaaaatctaagaaggcacactaaaactaattcatgtcagcacc

SEQ ID NO: 230444 - DNA, 1089 bp, Cannabis indica
ccgtgactttacttacaaaattctttattataatttttgtttttaaaggaaaaaataaaaagaaaaaaagaaaaatggtagtactgagtgaaacaagcgttccagtgattgatctaagagattttgattttgaattcgaagatgaacatgacaaatcatcatcatcatcatcgtcagaaaaagtagtttaccagaaattgagagaagcttgtgaagaatggggttgtttcagaataatcaaccatggaatccccatatctttaatgtcggacatgaaaaccctcatccgatctctactggatcttcctccggagatcaaggccagaaacgctgacgtcatcaccggaagtggctacgtggctccttctccggccaaccctctctacgaggccttgggactctatgactatgcctcgccggaggctcttcgtcgcttttccgatcaattgggtctctctccattccaaaggtcaaccttctagtttattcatttatttaatccaatcctatttatttatttattattaataatcatacaaactctttattatttttattttttaattttcaataaatgaggttattttattataataaataccatatgagagagcctaaaacaaagttatctattacatttcattttgattgatataaagttggaatttggtttaacaaaatgaattttgttaggtttttagttttcttttgaaaatgaatgattttgaggattattattaatgttggtgaaattgtattggagaacagagagatagtagaaaagtatggtagagcagtgaatgaattgagtttagatattgggaaaaggatggctaagagtttgggtttgaatgtgttgaaattgaaagggtggccatggccatgccaattcagaataaacaagtacaattttagtgatgatacattgttgggttccagtggagtccaaattcatactgataatagtttcttgaccattcttcaagaagatgaagatgttaaaggtcttgaaattattaccaaaaatggtcaatttctgcctgtggatccttctcccggtactctcttgctcaatcttggagacattgc

SEQ ID NO: 230445 - DNA, 1458 bp, Cannabis indica
ggtcgccccattttgaaagaaataaaaatagtgacttcaatctaccatcttacaatgaaattccctacaccagtaggtgtaggatcagtgagaggagtttagggaaattcaagggaatgttacaatactgcgatgaaggtcctagaaaagaagaaatcagtgaacgtgacatatatgctcgaagcacctctgccttgccatgaatagtttagaattgaagaaatcctacatgaggaaaagcccgatctagaccctagggtcctcgattatacaaacatcgcacaagctgctgaagagacagtagaggtaccaatcgatccccttgatgattcaaaagttttgaaaattagttctaaattaaatttgtagcagtgagaaaggctggtgacctttctcaaagaaaatctagatgtctttgcacggtaacatttacacatggttagaattccacctgaggtcatgtgtcatcgcttgaacatagatccagttgtgcgaggagtatgacaaaagtgccacaaaatggaccccacgagataccaagcgctaaaagaggtagtagatcgactacttgcatgcgacttcattaaggagttgttttatttaaactgattagccgatcccgtcttagttccaacaccaaatggctcatgatgcatttgcatcaattttacagatttaaataaaacttgtccaaaagaaaacttctatttacctaacattgaccaacttgtcgatgcaactgcaagtcatgagctcctcaactttatagacgcgtacttgggatacaatcaaatcccaatgtacgagcccaaccagaagcacacctcctttagacagaccgattgttttattgttataagtaatgccatttaggcttatacatgcatgtgcaacataccaaagattagttaatatgatttttgcagatctgctagaaaaaatgatggaagtatatgttgacgatatgctcgtaaaatctcaacatgcaactgatcatgtctcccatctaaactcgatgttcaaaaactgtgttaatacaagatgcgactcaatccgctaaagtgcgtctttagtgtaggattaggaaaatttcttggctttgtggtgaatcagtgaggaattgaagccaatctgctaaagtgcgtctttagtgtaggattaggaaaatttcttggctttgtggtgaatcagtgaggaattgaagccaaccccgaaaagaccaaagccttagtagagatctgatctcctacttagcctaaagaagtgcagagtctcactggtaatgttgctgccttataccattttatttcacgttcctttgacaagtgtaaagaattcttttagattttaaaaggcaataaaaaatctcaatgaattgacaaatgcaaagaggcttttcaagctctaaaaatgcacctggggcaactcccaatactctctaatctgtttcctagaaaa

SEQ ID NO: 230446 - DNA, 1612 bp, Cannabis indica
tagaaaaaattagtttactttaagtaagaaatttagtttattcatcacgatattgattttgagttataaaggagtaaatttatgagtttgtaagtttttaaggtttattagtatttcttcttatttagttataatgatatttattttattatttttagtttttttaaataaaaatatcatatatataatacattaattaagtttgcatcttatatatatcaaatatatttttcaatatttttataaatatcccaagccaaatgtaccaaaatttaaaagattaaattttatatacaaataattataaaaatacgaaatttgtattaacaaccagatactaatgatgaatcatggtatttattatcatatataatcacattaattaataaattaataatatttgtgtgcaatctgttgtaggtgagaaaagagtttgagtggcttagagaacataaccatgtgatcagttccattgatgatcatcacttgatgaggtgggttcctctcaatcatccacctctgcaaactctcctcgatagtatggtcttggtcacacacgataaaaactcttctcactgatccatatttctccttcgtcaattttagttgtttatttaacaattctttgttactaaatgtatcataaggtctcaccaatgacaacccaagcaccaaatcctgataatagattgataatataacatttttattaactaattaatatgaaccccaatattacatatagatactatacataattaatattaattaataatgtaatgaaataagtaataaattaatttgtgcaatatcttacttctggtggagagagctggtaaaattttgatgccaataaatttgggccaagaaataaagcggtgggaggactgtttggaccttcaccatatataaatgttgaatccataagggaaccaattcttcttaagttctgtattattaaaaagaaatatatattaatatatattattacattatttaccacattatacataaatttattgggacatgattttgtcccataattgtactttcacgaaataaaaattagacctcaaaataaaaaattgttacttttagtgacaattttttagtcataatataattttttcgttactaaatgtgacttttagtcacaacaaaatattacttttgactaaaatataatatttagttacaagttgtcactaatttagttttagtcacaataaatattttaactaaaaatacatttagtcacaacaaattgtaatttttgtgactaatacttttaaccacggattttaaaccacagcaagaatcatgatttataattagttacaattttttttatttttagtcgcaaattttattatgactaaaagtaaaaaaatttgtaataccttaatatagtatagtactcatattataaaaatttacggcacaaatcgtcatttgttatattttatttatcttgttgcatttaaactcaaatatgtaattattctttgttgcgaaaattgttcatcctaaatcacctttagcggtaaaaatctaaattgttatacatttgatatatgtaacattagtcctatagtgatttttaatttgctct

SEQ ID NO: 230447 - DNA, 962 bp, Cannabis indica
  modified_base (93)..(93): a, c, t, g, unknown or other
aaccagtcaagagacaatgaacagaagtaagaaaagattaaataatcttgagtgttttatttgatcttggagagaattacaatgagagagtanagtacaaggcttaccaaaagaaatgagttgacaagctatttatacaagctgaaaataaaaaggacaaaaaaatgcaagactgtcaaaaaataacagttaacagaattaactgtcaaaaccgaacaaccaactaactaactcctagtttgcacgtgtgaatttggtttgcatgtgacagatcataaacaacatttatcaaaattgtagataaaaaagagaagaattttcttaataatggacttctgtaattttttattaagcaagttgtatatatagaagagttttagagaaaattccttttgattttcttgatttatttttattagggtttaaataaaattaacttagtgaggatgtagagaaagaattatgggtttatttcaatttgaggagttttacaatttctcttctcatccaagtgctaagccatctcaaccaccaaacgaatcgataaatccaagcgctaagccatctcaacgatgatgccttgtttggctttttgttgttaataaagttgtttccaacgttattttttgttggccctcttttcattgttaaattcatttttatttgttgcccccttgacctgggagtcttggctgctagagcttgccttgtttttgttgcccttagcttggttgaggcctttagcgtttcactcagcctcttctagtttagtaaattcatcagctctatcgtaacgccctaaataattaggcacgctacccaagaagttattaagccctaatcccctaaacggaattactaataaaactgacgcgaaatttaaactttaataacaataggaatgaaaataaacttgtaatactttaaactttataaactgaaagttacagatgttgggatcc

SEQ ID NO: 230448 - DNA, 1574 bp, Cannabis indica
atttcttgaatttattttcttactcgttgattagcaattagattggatcgtcttgctttttgttggaattgagctatttacgtagatcgggcttcctccgattcaattgctcatgaaggtctggccgtctttgaacatagttgctcgttgacttgtacttgagtaactctcagattggatactccttgtatgactcatactttctcgatcattattgcagcaagatctatcccctcctcgcgtatatcgattgtgatctcgagatctcgtacggcccgagctagaacttgcctcgtctcgttcaggcattctcccttgggaacgatttgatacatggccattgttggggtgtgtataatcctcctctctatcagtgcgagaaggacattgacggtgtctcagtggtaacccacctgtcccaggttgagtcccaggatttctctcgttagcacgagggatctcctagcccctagtttggggtttccttctattcgtttctatgggaagactctggtaaatcattgttttcattcccttaggttgtgaatccctgaggtctccgaggaacttcttgacgaggtggcttgtcatttggttgttcatcttcaggaacatccccaatttccccaagttgttccttatgagtgttcagggggttttcgtgaaccgtctcctgcctcctagttcgtgaacctcgaggcctacctcgcggccttcttactcaaggatcacgttaattctgcgtcttgttttcttgtgtcgccctgactatggatgcctccctttccaactcagtatttcattggtttgcctcagccaaacattgccggagtcgacgattttccaattcaaccaacggtacatacctaatggaatcgtaagcagttgttgtcattgtccccattgtcaatcatggagaagagattcattctttagtcaggagggatttttctaagcttttatcacgtaggctctcaatgaaagcactaaactgttaacgcagattttcgttaaagattatgagcctattttgtaataaataaagcacaaatataaagagaataataacaataacaccaagatttttacgtggttttgtagttaactctacatagtccacgagtctatcttatttagatatttttggatacaaaattagggtttataatcagtttactccccttttttctttagattttgtgtcccctctttttttgtatactctacccctctttatagtaatataagttagcagttaattacatttaagttcaaatccgataacaatattccctgaaagtatgggccttaactacgctccacttaaataagtgcagttaatattagaaaattacacagctgtgatttaagccgtttgtaaggaagtcaatgctgacgtggattaggacatcctaccaaatgtacctcgctgaggcgtctcgcctagtacataagtgaatgacttagtttacttgcattccagcaacggcatgagctccagtgtactaagcaaacttaagaagtgcactttgaccataaggcctttgtaacgcccttacttacgtaaaataaga

SEQ ID NO: 230449 - DNA, 1299 bp, Cannabis indica
ctacatgtcgtagattggtaaaagcattcttgtccatgactatgttttaatctgtttgtggctctcaaaaagtactgatttcatacttctctttttttttttctgcttttgtttcatctgtctactcttcctggctacagtttcttcatgaacgtgtatatgaaagtgtattagatcaactggttggagtttacaaacaagtgaaaattggagatcctttggaggaaggaacccttgttggtccactacatacgcaaggttctagggaaaattatgtgaaggggatttcaaccataaaatctcaggcatgtatagtatgttgtataactaatttaaagtctggatgtctctggctcttagaattgttaaacttttggtcaaatgttttgagataagtatttactttcctagtgtatacttgtatatgcagggagggaaaatcctcacaggtggatcaattgtagagtcagaggggaatttcgtagaaccgacaattgttgagatttcatctagtgcttctgtagtgaaagaagaactatttgctccagttctatatgttatgaaaattaaggtaccatatattcttgaacctttttgtttactgtcactaatgagctgtttctctgatgcgatcacaaatttgtctttcataatttgcagtctctggaagaagcaattgaattaaacaattctgtgccacaaggattgagtagttcaatctttactagcaggccagaagctatctttaaatggattgggtaagtcataacctccttaaaatgcctcaagagaaactggaattgtgtattgtctgcaatccaacactgccattgagaatccattttatcaatacaagttgattcagatctactttgttcatatctcatgtatttcaattttacacaggcctcgtggaagtgattgtggcatagtaaatgtaaacataccaactaatggagctgagataggcggtgccttcggtggagagaaggcaaccggtggcggccgagaagcagggagtgactcttggaagcaatacatgcgacgttcaacttggtaagttttcagtacagctcaaagtttgctggtgaaaaacagtcgtatgaaattgtctgtaacacaaaacactaaaaaactacttacattacttatttttttacagcacgatcaattatggaagtgaactacctttggctcaaggcataaattttggctagggaataatcggcaaggtcacagcccggccctctgcatcggcatatcaatgtgcagactagacataccttgccagcttggatc

SEQ ID NO: 230450 - DNA, 586 bp, Cannabis indica
gacatcatctataaaagtaggtaatatcttaaaagatataaaaatagaggtaaaaattaaaacaagtaaaataaagtgagtatatcatgtaatttcctctaatttatgtttataaattttttgagtacgtatagagtcatatttttttcctaaaattttaaattaattaattaatgttagtgttggggtataaatataaatctaggcacaaaatcaatgatcatataaaaaataaaaactaatagaaaaaagtgattaaaacagtattagaattcgtgtacctattctagtgtctgttagtctgttagttaattgtctgttattacagtttttactgttctttctttcttggtttatatcagctaagttagttaagttcttaactaactctgtactggtttacatcatagtcggttgtacagttgtatataaagtctggttctgcctttgtgtaaattcattcagattaataaaatcactttcattttcttttcgtaacatggtatcagagcaggaaagatagtctttcctgtccgatcctcttccccagctgaatcgtgttcttcatctccgattgagctgtgtt

SEQ ID NO: 230451 - DNA, 1091 bp, Cannabis indica
tattttttacttttttactgtatttttttataagtttcatactgcaatatactgtgttaagttttcactggtattcgttgttctactgttgttttgagttgttctgtttgtgttttactagtgttttacaaaaacacagtacttttaaaaatatttctgtgtgacaatatttttgtaaaagttaatcaaaattccagtatttttgtaagtttccctactatatatcatattatatatgtatatatatacatatatgtagtcaataatgcatgctggccgtctaaactctagtggcccaaaatgtctaggcatcaaatgagtcaaatcttgttttttttttctttccttttttaagaatcggcattaaaatatacttactttgacgtatttgctcgatcgacctcaccaccaaataatactttagacgctgctcattcactctaaatttccttccgaattactcattacaaacatctacaattccatgagaataaattttgcttcactcatgagaatcacgatttgtcacaatattattatcacgatataatatagcttataagttgattttgaatgataaatgtaatgatttgtcaagtaattccacacgtggtatttgcttagatttatattcagtaaacaaagacaatgaattttcgctaccaatatttgttccaaaaaaaaaccttttgttacaaacatttgaacttagaattaacagtcacaacatgaaatctcaggcgtatgaagaagtggagagaaaagcaagggagagaaaaaaaaaaaaaagtgtttttaaaaattttagaagcatcaaaattatatttgtaaaattttgattttaaattaaaaagaaataaaaaggaattacctcatatactatttttttaacttgttttttaaatttacggtttgggtttctaaagtggttgcagcgctagttgcaatagggatttctatacgattttttgttgcaatttaggttgcagcgccagttgcaataggagtttctatgtagaatttcgtaaaaataacaaaaaaaaaaaaaaaaaaattgttttaaagtgtaaaaatgaaaaagcccaaaaata

SEQ ID NO: 230452 - DNA, 1326 bp, Cannabis indica
agatagcagtaattaaaaaatcactatagtgtgcctaagtatcagggcgttatagactgggtcttctcatttatggtctagtttgatttgggggcttgagttactgaagaagggtatgcgtagggtagtggatgatgggagccagatagaggctttttgagacctgtggattcctaaaccaagatcgtttcgtcctattacttgttagcctgggaaagaatcaatggcaaatgattttatagatggtgatggagcttggtgtataccaaacctagaacaaagtttctccactttggatgtgaaagctattttggggattcctttatcggttgggtctgcgatggattcacgatgttggcattatgattcgcatggctattattcggttataattggtactgtttgtctcttgacctagtgactacaaaacagcctaccccgttgtcggatttgagtgagtggtggaacgactaatggagtttgaaagtgcctcaaaaggtcaagattttcatcaagcgaatgtataaccaagctattcttgtggcaacacaactcattaagtcaaagatacaagttcatgcggtgtgcgagagatgtggagaggctgaggaaacttcagagcatgctttatcattttgtagcacattaatcccggtgtggtgtcacctcgagtgttggaatttgttgtcaaagctttaaactgggcctttggccgagatattgcttatgattttccataagattttgcgtgaggattttgctttattagcaatggtgtggtggtggatttggtttgatagaaatttggttatgtttgggaagacacagtcgaggttggatgtgcttgagcttttggcggcttcttcgttggatgagtttcggatggcgaggttgggaggcagttgtgggattcgaggtgtggttgtgtctggttttttagttggtgttgctaatggaggtgagggagtggctactgtagggtcggaggctgctggtgtggggggtgtggttgggggaggagggggtgggggttgttttggggcctggtgcagctggtgtgggggtgggggttcgtggttttgatggtggggctgctggtgtggggtccaatgttgttgatgtgggtgcgagctctggtgtggttgttgttgtgagggcggacggggatagggttgctgttggtgtggggactaatgtgaatgtaggtgttggtggtgtgggagggggcgtttcgatgggtgctaccggctaccccgggtgcaagggtctttcaccctctctgttgatggagcggttacctcagggagtgggtttgcaagatttggt

SEQ ID NO: 230453 - DNA, 1445 bp, Cannabis indica
catcaataaaatccctaaacccaatcaaatgggtactgttcacacttccctaaccctctcctcttcgcaatttctctggcaaaaccagcgaccactcgagcccctttcaccctgttcaaaactggccatgcaagaccctttcctcctcttcttaatcgggcagtgacccaaccccgacctcctcctctcttcttcgtcttctaattaatcgagaggtggcccaacccgactcctcctctattctccgtcttttgatttcttagaaggtatgatttcttaatcaactaattggttcagccgtttatagaggttatttaagagatatagatatggtgttagtaattttacatgttttaaagcttttgtatcaaattaataacatagagatatttcatttcttacccatttcgttccctccatcttcgattttagcttagctccagcggagcttttttccatcatcaaccatccaatctgatctcaccaccagatttcttgacccctaaaaccaataacgcctaagctcttccgctctcttgtggccatttcctagcgtcgacggcacaggcgaaaactgaaacagagaatactcgatacttaagacgagaagaagaagttgaacttgaagccactactaagcttcttcctcatttctcgacattcatgcttgctacatttctggttagtactgatttcaaattctacttgttttggctgcaaatatatctactaaatgtatggtttgaattgaattgcatcaaatgttacatagtagatttgagatctgagcattttccttcaagtgcgagaaagatgtgtttgttcgtactatcttctaaagcttgtaattgactttttgactgtaggttttcggtttggttgctaagaaaatcaatattgttttagtttgtttcgtatgtgtgtttgtgttttagcaaaaaaggtgtggatagtttggagcttacgctactgttgaatttagattgttctaaatgtatttttagagtttctgtttggtttccaagaaaatgaagtaaaaatcttcccttaatagtctgtcaattgtgttaatatatgtgatctaatagtctcttaattgtgttaatatatgtgatctaatagtctgtcaattaatgtgttttgattaatctctcctttcacacctgaaggaaatctatcacatcatttttttgctgcctatgatgcgctttgtgaagaaggaacgacaacacctttatgcaaggctcttgatgaagttgtagatatatcagtagctggtaaccgttctactcaaattgctatttgattactttctatctgaattactcaaaagaatgcagagtccttatgtatgtaggcatgatagtggcatccatataaatgtagggctaggcatgcatattactgaataaaattgtaatcagtgcttcaacatgtggtggtag

SEQ ID NO: 230454 - DNA, 801 bp, Cannabis indica
acttcaacaaataagtcgaggaaaggaattcttcacaagagacttaatgccctgaagaatattccttaataccaaggatcctgcagcaagtatggacaaaactgaaaaggtctgcaccaagttacaagataataggtaaaggtgaatacaagtttggcgagtacaataagaacatctcggtaagtactaccagtagcccacttgtgcaaaacactactcttcagtagtggttctcgtaacatgtcactgtaggaattcaggaaagagataagtttccataactcttcagtgatggcctatacacgatatgccccgcagaggtagccaaaaattaaagagctatctgaccatcactctttagcacgatatgtcacgtaggggtagccaaaatgtggtttcaaaagcaggctctgatttgtaagcttttattacacaaaaaatatacgttgcacagcaacaacacatatttaagaccaattgatgaatgaaaataatgtttcagttcaatattgtataaaacaattctctaacaagataactgcttaaagttaatctttattttttagtttccacatgcttacaaataggtccctccaagaaatacacaagcaagatctatagcacttggtgatttataagtgactaagagaccgtaaatctgctcgatcacttgggggcaaccgacacccgtgcagcatcaaacaagcacggctaaaacttaaagctaaatttaaaggactttgttaagcaaagaattgaaagctaagtaagtgtgaatggaatactttagattagacataa

SEQ ID NO: 230455 - DNA, 1598 bp, Cannabis indica
aatgagttttatttagggcactaaaacccaacactaatgacatgtttcacccaaagttttcacattgtaaagttgttatctagacaagccgtggacaaaaaggaacttcagaggcacgtacgcgtactaccaaggtctgacgcaggggacaagatgtgatttggtgtcaaagatatgtaatcgttgccctgaccttcgggtatgctatagccaaataagttccagggccatctagctatagtcttccctgattagactaacctgctaccctcctgaatactcataacttttgatcctccttaataacggttaatagtgggtgtctcggaatcctttccgtccttactaatagggagaagcctcgagtaacacatggagtataacatcttccgtgatgcagaagggcagaaggtacatgctaattgtgcatgctctgacatggcacctttccgcaattgccacgtattaggcattcgagaattcagataacatttaccccaagctcctgagactcatgagtattgggagcttgcaacttccttctagatgcttgacttactatcctgacttgctgaccaggtggtggcatgtgaaagatgtctttcacgttacctttggtaaccgaggggtcaatatgttttgtagtactgctgtcaatctgttgaagcttggtgcttgcttagtggagacgtggggctcacgctctgaatgcgcgtttctcgtgggaagtgaatgatggctggacttcaaaagatgctaggtttttggcacgttagtgatgctgccacaaaatgatgagtaatgaatactctactctctttcttcaggtgcattaaatgcaaacctttcgaatcctcaatcgtttgatggtgtaacttttaattgattccatctggaccatatattttaaaaatgcttgaaccgttgccacccatataaataaaagtcttggcgatggaattcacttttccttcttcaccttaagctacaatcccttgcctagagaatttcttcaaacaaaaccttcaacccagaaaccttagcccctactcacctttctaaaccaaaaaacctaatctcctcttctctatctcaccgctatatttctcaacgttcaacacctacctaaacaacacatccactgttagagtaaggcatcattagatcatcaagcgacccgtggaatttcatacgacgacaagtcaactagcattttttccttttaatccgtctacaagtaagtattactagcttttttccttttaatccatctacaagtaagtatttcttccactcaaactgtcggttcctgatttgattgtgaaatgtagtctcgagctcgcagaaattcattatcttgcatgcgtaggatttaagcttgaaaattagggttgttatgtgcgagatttgtctgcatgagctttggcgtaatacctctggagttagggctctactgaggtactttccctttagcttgggttgaaaagaatattttttatctggaatattttgggtctagatgtttaggtcgagcatttttgggtttacactagtttcagaaataatccccctttgctgctttatgtatatattttctt

SEQ ID NO: 230456 - DNA, 1039 bp, Cannabis indica
tatttatgctgacgtggcaatcggtatttgtgcaaataattttcttaaaggtatttttataaataaaatcaattttaggtataatattgaaaagaccccatagaaaaatgcttaaaattaccaatacctaactaacaacatgatatatatataactaaaaaaaaatgttttttggacaaaaaactacgtataagaaaattattatttaaaagaaaatcctaattaattattccatcaaacaaattctaataagttgagtcataaccttatactcatctcactcaaaacttttcttttctttttatttatatatataaaaaaaaatgatttataagaagaaaaattaaaattcccttttaacttaaataaaagtacatgtaccacatcaaaaattgaaatagacattaatattattatttaatgtcaattaagactagagcccctaatgacataaaataattaattaattaaatttgaaataaataaataaaaacaacacattaggacaatgtcaccaagatttccaaccaaaaaaataataaaaaaataaaaatgaaaataaaatttaattgagagagaaagagaaaaaaaaagtagagattaattaaataataattaatttagataataatattaaaataacaaatcagttttttaagtaacaattaattaaattaaaattaaaaaaagacaataaagtctcgttgggacttggggcggtggattaggattagacaattatcaagaacacaaaattaattttaattattttatttaatgaaaaattaattaaaaaataaaaaaggttacttttagagagattttccgcgatcttcgctgctgatcataattatataaagtttagaggaccaaaatataaatataaaaaaaataaataatgattaaatctggaccgtccatgaagatacgcgtatcaatttccaccggccaatctctatgttcttatatatataaacaaaataacttaacttaaatattacaacttgtgatttcttaattaaaccaataaatataatat

SEQ ID NO: 230457 - DNA, 2325 bp, Cannabis indica
tttcatctatattagacatttttttttactaaaattagacaaaaatatttaaatgcaacaatcgtaataattcaaggaaatttttaatgactttaaaagtttaaggagtataatttaatacatgttaaagtttggagtacaaaatttgtaactagcccaaataaaataattggttgaaattataaaagtgtatatcatgtgtgaattatataaagagcattactattaggcatcagtggtgtttagcacttttgcgacatgtcgcgttgcgattggctagcgatactctttaaaagctattatattaaattatatggtacccgatacttagttggaccaatagcaatattaacacatagaagggtactaggcaccactagtgccctttagcatttctattatataaatatgtatatacatgtcattactctatttaatttaccccactcaattaataaaatacttcatccacaaaatttaaaggtagagatattagatagtgtggtgctaaattgcttcttcaatcgatttgtgtagaaagaagataaaccaataaaaatttcctttctcaattttctctctctcccaatctgtgccaactaattaattataatccctcaaacattcctatcaaactcttctctctcaaaactctctctgtctcttctttatccctcttattaaatgaggacacatttatttctttaaaaactcatgtggcatctacacttccttatttttactttaccaattcaacattatcagatttattatttcaaacattaaatttaacagtaaaattttaaaattctgtatgaaacaatcattaatcttatcaaatttaatatacaaaaattttcttgaaaaataattaatataaataaataaatattactcttattataaaataataaatttattctctaatacataatcaactaaattattttgaaaaagagtattatattaaagaattaatttatcaaatcattataatataaagagttcattattttctgtatatttttaaagaaaatttatattttttacggataaaataccacatatttttttgaaaataccacatgttagttccattcatttccattattatcaatctgttaagaatgctgactatattttctaaaatgccatattttattagttcatctcattttatatttaaaaaaacaatttaattactattcaaatacatgttactgtgaagatgagatttccttttgcattgataaatataacatcttcagcaaaatttaggtaaatcatatataaaaatcgcaaccaaccccagttaaccgttaaaggtaacaaacacaaattcatcttttcagcaatcataagattatattttgtttcaagaacaatgttcttgttcttggttttttttttgataaaaaaataaaaaaattttactttctaaatctttttttttgatttaaacgtttatatattacaacatgtttcagctaggactcgaacccaggacctccaacactcacacacccacctatgcccacttgagctagcctcaagtggttttcttactttctaaatcaaatggcgagaacaaagattataccatcaaaaccatattcaaactaccaatctaaaatccaaaattaaactgccaacaaaattaaatatttaaaattttaaattcgatttaaactacattagattcaaagaaatattatacactaaactaattagttaaggcagattcaagaaaaaaaaaaaaaaacaaactcaagaacactcgtatgaaaatatcagatttgaattctgaaattcataacacaaattaaacattcccaagtcacaaactaatctttaaatctaacacagatctgggtttttttttcattaaaaaaaaaaactaccaccttactatacccaaaggttatttttaattatgtggtaaaatattgagatactataatggtatagtatctcaatattttaccatggtacacgtaatgattaaaagacagagaggaagcaaaaagttttgatacagatatttttattctaaacatccatctccatatccttcttccatttttatttattgttaccttccttaattttttttcctttttaattgcgctttttaaattgaaatgacagagactcttctagaaaaaaaaagggaaataaattagaataagaaaaaaatacttctccattttctcatgtgtaccaaccattttttggtgtttcatctcttcatcttttttatttttcttatttgaaaaaaattagaataagagtttctaagctttgacgattttcatttacactacc

SEQ ID NO: 230458 - DNA, 1332 bp, Cannabis indica
agtgacctctgtctcttttcaaaaaagaaaaagataaaaacccacttaacgtcaatgctagtacttatagtatccacaaatttcaaactcatagttctctaaagaatttaagacaatggtgacaaaagatccaggatattgaacaacataaaccaacacgactatggatatggcatcttgacacaaatgaattaaaatgtccaatataagtatagctatctccaaagaacaaggactcgatataatcatatcagaaaagacaaatttcagcattgtataaaaaataatctagttctttgcaagctaatgaaatatgataaatattcaaaatattgaagctattaacaacccaaatgccaagaaatgaaaaccaataagggcgtgtttgctaataaggaatacaaatggaaataagtaaaatgtttttcgcttatacttcaacatttatgccacaataactaaaatgaataaaaaacaaaaagttggataaggtgaggaactggtatacctgaatatgcgaggggcgttgaaaattaagtttcctaagacattcaatcataaaatcactgtaacccacatctctaaaagactttctactgaaaaaatcagaaccagatgagaagtaggttcgtggggttgaatcaggttcgggtgagtcgtatttcaagttccatcctttgttagatgagcccactctagtttcactgcccttcctggtccatttcctcaatggtggtggagattcaacaacatcatcatcatccactggcaatggtggatttttggttggtacttgtactacaagctccttggggcgagtagttctcactctctccactttcaacctgccaaaagatgacctcgaacgtaaaactgcaaccacaccaatggcgaaattggactcagaaaatggaaaagaaagaaaaagaagagaaaatgcaaatagagaaaagaaaagtacctgaaggggattgggatttgtccatgtttgtggtagcgtcgttggaggaagaagaagaagtagaagcatgaattgagggagaatgaaggcggggcccatggctgaggcggtagatagatatggaattgcagtccaacttcaaaagcggagaataagctttcaccagcatcgtttggattatgagcagaaagagagaaagttgcaactcacgacaatgagactcatatagatatagatatagatattttttattattattattcttatggaaatatatatactgtattagcaattctagtataaaacaccacttgcgggttttttttagtcataaatttataggactagatatctgcaatttgtgtagtaac

SEQ ID NO: 230459 - DNA, 2201 bp, Cannabis indica
tttatttagggcataaaacttaacagtcaacactacatcacctgttatttctaatgcttttgatgctttaggtgtagcagatattgcagaaatgctctctgaagaaatacaacagcagccagaaagtttggctcaattggaattgaaaggaggagggggagcacctcctctttccaatggataaaatcttgagttagaacgcccgagggctcaataaccagcacaagcaaaacaatgttaggcaactaatctccattcaacaagctagtttagtgggtctcctcgagacgagagtcaaagccccaaaacttggggctttgtatgtgaacatgttctctggatgttgctttacgaccaacatagcttggcatgtaggtgggcgtattatagttgcttggaaccctctaaggtttgttgttaacatccttagatgctccagccaagtaatccacttctttgttactgttgttgataacaaaagggagttttatgtgacttttgtctatggatttaataaagaggaagaaaggaaaggactctggaatgaattgaagatgtaaatgacgaatgatccttggctaatcttgggtgattttaatgatattctagaaaaggatgagagaattggtgatagagtgagggtctgaattccctcaatgtgtggatttttgccaaattgaagatgtaaaatacacaggtaatttctttacttggagtaataagcaacaaggaggagatagaatttgttccaaaataaatagagtgatggctaattgggcatggatggatctatttcaaaaagtcgaagtattattcctaaatgaagggctttttgaccactcccctgctatactaagtgtttacccgacaattgttacagggaaaacgccttttaagtatttcaaaatgtggcgaagccacccgcaattcaagaagctagtcgaacatgagtggaatcaatcaatttctggaactaaaatgtaccaggttgtgtcgaaaatgaagtccttgaagcaggtttttaagcgaattaataaagaaggttattctaatattcaaaatgttcatctgctggctaagaagcatatggagatctatcagaacaatctgcataaggatcctcttaatgttgttctccttgaagaagaactggaagcccgaaacaaagttcttgaaactcaacaagcatattactcctttatgcagcaaaaaacgaagatcacttggatcaaagaaggagactctaattcattaattttccaccaggcactcaagcagagaagagctcaaaacaatatctactctattgtcaacaaagaaggtattagagtagaaaatcaaactgaagtcactcatgcttttttgtcattctatcaggaattttaggctctaaaattcagaaccgaaagtctgtgaacaaaaatattgtccagcagggagcactaatcactgaagatcacattcacctgctgttgaaagagtattcaggcgatgaggttaaagcctcaacattcagcattcctagtatcaaagctccgggaccggatggttatggaagttctttctaccaggaaaactaggatctgattggggatgatatcaccgctgcagttacttattttctccatacgggtgcattattaaaggagctcaactctactgtgcttacactcatcccaaaagtgaagtgccccaatattgtgagtgatttttgcctcattgcttgctgtaatgttctttacaaaatagcaactaagatgatatgtgctagtttaaaacaaatcctccctgagattgtttctcaaaatcaaggaggttttgttaaagaaagatatattgctcacaatattatgatatgtcaatacctcattaggcactatgggcagaaaacgaacaaggctagctgtatgatcaaactcgatcgtcaaaaggcgtatgatactatggagtggaattttttagaagaaatgctagatgcctttaaattcccaacaaaattcattaaactcgtaatgacttgtgtctccactcctcaattttctttactcttcaatggttctcttcatggattttttgaagctaaaagaggactaaggcagggtgatccaatgtctctgttactatttgtgcttggaatggagtacttaagtcgaatcatgactaaggttggaaggaagacagaatttcagtttcatgataga

SEQ ID NO: 230460 - DNA, 689 bp, Cannabis indica
tacataatatatttgtcggaataaaagttaataggataactctaaacctcttatgggtaaatgttcacttagccacattatgagcaggcataattaaagcaagtataaaacttcttatgagtctttggaactttgcaagacatagaaacaaagataaaataaagatcacatgtaaatatataaagaaagtacaacctgagagagcagagagtacaagtagtgagaacacgtggaggggttcagctggaacaaataaaaaacagtgagtcgtaagtggggcccgctcagttcaaagccaaagtcacaatagtcaataatacagcacagacagaaaagactctttactccctgacaacgccacgtcagcacacacgtgagagtccccatcccattcccacttgtatttttacattaattaattaaatgtgagatttaatctacaaaatagattaattaattaattcatttctatgtttatggttaacctaatctttttgtcgaattaggaaagtgttcagaattgttttcctttctttatttctctttttcttctttttttttttctttttaaaaaaaacatttatgctatataagaccatttcaaataattacactaatttaatgtaaaatccactcaatttcattcaagtaaaggcggaataaatcattaaaacaatataatatataaa

SEQ ID NO: 230461 - DNA, 2064 bp, Cannabis indica
tttattaaaaaaaaaaaatcaattgaattttagtgaccacaaaggacacatttcaccatgacaaataatgtgtaaatatgacaaataagtacacattatattaggcagaaaggaatttttttttttttcatcttttgtaacttatttttaaaattttcctataaaataattcttttgaaagagaaaaccacaattttgtacaaattatatatatatatatgtaattttcacccaaatatttatatgcctattttgccaaaagcagaagctgaagaagtatgctgaaaacaataacacacactaaatgaagaagtaaaaatctttcaaaatgaatgaataaataaagaagtaaaaaaatataagaaaactcggattagatgaccattaattttacaatttatatgtgtgtgcttgaagtgcaaagatatgcaaatcatttcatcaactacttaagggtagctgaagtgatcataggagggtgtatgtgttggaggtgctcggttcgaattccaagttatatatggttctaatatataaacgcttaaataataaaaaaaaataatcatttcatcaatggagcgtcaacagcttccactcattatgattcgaatcttgaaatcgactactaaaattttcatgtgttttttaattatttaggtatttattctacttgttcatggatggctaggtttgacatgatatcttgatgcctataacttcatttagcgtattcttggcatacattaaagatttcaaggtgatattgatattagtgcatcactaagttaattttttaatttctttcataaaaaaatgattcttaattccgatgaagtagttcatcgtcttttggcaattgaacttggttgcacactaggttatgactatagaggtcacatgggtgcaagtatgtcaacctgtgtgcaggggtgacataccaaggtgagaaatatttgacttactacaagtgttacaccttgttcgtggtgaaaatctagcacgatgcttgaaatagaattgcatttggatgaacaaaaccacgcgctccagattaaaaggcaacctgggcatcccataattgtcgttaggaattgcctggggacaaactgttatcttgttgatgaatcctctgaaaacaagtcctccacactgttttgggagtgaaacaagaattatacttgagatggaatttccatttaagtaatgaaaccacgtgtatcgaggcaaaaggtaacatgggcgcccattaggtgttttttccctagacagatttgtttgttctccaaaagcatttgtatcttcgtatttgatgaaaacaaatgaagtatctagaaaacatatcagaagcacctcaagctaacatacgtcaacctggtcgcccatgctaaggaaaaaaagtaacctgggccccacgcctaggttgaaattgcttagaattcttatttttgatgtcaaatcttctttttggtggaaagtgcacatgcaaaactgatttcgtcacattcagatgaattttactcagtgaacttgagttggtgacccaacgcccggaagctgcacacaggcaacatgggtgcccataataggaatatgccccttctgggtatcagttgcataaactcaagtccacacaatgttccctgttggatttaagaaatcggggtgcaaagaagttcccaaaatccaatcgttgtgtgcccaaggaagttggctagaagtcaacctaggcgcctatgcttacttggacaccccctaggtaaggcttgctccaaaatcggttatggagcttgagacttggttgtggcatatttctcatgtattagatcgttgtttctaagctaactgcttacaggtattgacctagaaatcaaaactgatgcaatttagggtacacatgtcaacttaggcgccaaatattgacctaggcgcaagttgactcctgagatgtccaagtgacaccttcatcttctagttctaattttaagtgtcattgcgaacctgattgcttagactgtttgaaggacaaaactcaaaaacgaatttgtggggtctaagtgattatct

SEQ ID NO: 230462 - DNA, 1380 bp, Cannabis indica
aattaattgactaataataaatttacaaaaataaatataaattaatataattattgtatgaaaagacaaatttatcaaaatattaatatccccgtattttacaactacgtactagttatagttgctacaatttcacctgctgtccatacttattatttattatatatgtttgctttcaattattgactttattctattagaaaaaattgtataaaacaaataatttcctcccaaaactatattaggagtgggtgacacgtgcaaagcacatgttttaacattatataaatattgctacggggaacttaaaaagtattgaatctcaattaaataaataatataaaaaattatattacctagttacaatacaccacattagtatagtgtggcaccttactaaactagaaaaatgaaactcaccctaatcgcatgtttggaatgccatgagagaattagaattgggtgtaaattgaaaataattatataatttttttatgtttatctgactacgtaattatattataattgtataattaacagtaattggaaaacctcaattaccctctcaattctcgcaccgcatgagaatttagtgtacgtacattgtataattattggaaaaaatattatactatatattaagtattaaaatttatccggtaaaaaaagtattaaaatttataattttcaagtataattactaattattttatcaaataaaatattaaaaactcataaataattattatcttataatatctaaatatactttctatttaaaatataatataattattactgtattatgtaaaaactaccctactctaataattacactacttatactttcttccaaactcactttaaatttatgaaagaaaattgtaattaaaaagaacaagatattaaatttaagaatattgctattaatcattgtagtgctcatattatataagtggtattttataattaattagtaatattttttaaaattactacgaatttaatattaataattacactattaataatacgatattaatcagactcttttagtatttctctaaatctatatatgatcgatatatagatcagatggagatggatctatgggaatctaattatgcatagtcaaacttcaattttgtatataatattctcactttttttttttagactaatataatattctcatcacttcatttccaccctctactgtatcataattgactttttttttatataattattactatgaatatgtatcatgtgtctcgatatacgtacgttgtcatatacataaattatttatgtataatatatatctatatagatctagtgatctaccattaatatataagaaaagaccaaaaactgaag

SEQ ID NO: 230463 - DNA, 1987 bp, Cannabis indica
cgccaaatagtatccaccacaacaagcatataaaaagacttcatccgcattgatgcccttaatttttaagccccagatgaacttgacccaatcccaaacacggataccagagtgacaccagaaaaataccccatagagaagggagccaaaggtggaaagccaagttgcacttaagaaacaaatgttcagttgattcctcctccatcccacaaattgggcagctaacatcatccacacagaatctcttatcgagaatggccctcagaggcaatgcattagaaaagatactccaccaaagcaccttatgcctctccatgattctacaattccagagcttgttccaaagaggaggggacacctcgcaatgaggggctcttttaaaagcttgaataaggtaggccgatttgcacgagaacctcccattatgatctttggtccatgtccatttctcctttccttggctagatgggttacctcctttcaaaatagcagagatggtatcgttgtcaaaaatacacttcaacttctgtaaatcccatttcccattgactgataaaaggttagacaccaagtgtaaaccctcaggaggtcgcccgttagaaccagggtaaaaggatttgccatgagccacccacggatcatcccaaattcttgtactcgtaccatcagacaccactttacaagctccttctcttaagatctcattcgcttttatcacatttttttaaaaccaggaatctgaatctttgtatttgcaattaagcagcttctttcctctgagatacttggctttcaagatcttacaacaaagagatcgattttcatttaacaagttccatctccacttggccaggaaggcctgattcatctctcactactagaaaaatgggttttagtgactcacattgagtaactctaaaactgtattgtgacacttcaacgcgcatcactaatgagggtgactggaaagacagtttttagtgacacttcacacgtgtcactgaacccttttacattaacattttgcgcgtcactataggcgtataaagtcaaattttgtcagactgaaaaggtatcagtaacacaaataaagtgtcattatatctttctttttcttttctttttttttattttttattaataattttggagatatagtgactcacaaaaagtgccaccacattaaatatttttaataaaaaaaataatatctaattgttttaattaattttttatatataaataattatcattttttcttttttttaaaaattcaatttgttaatttgggcagaataaatcattatttttttaatttatcaaataatgtatttgtttggtgctcaaaattaaaatggaaacaaaatgaaaatctacacaaaaatttattatttgcaccttaaaattcaaaaaaaaaaatacaaaattattataatgcaaaaaaaaaaatcatatatgtacaatatcaagaacaatatgaatatatattaatacaaatgcaaaaaaatccagatctatatacacaatgtggcaacaaatgctaactgtcgcggccacaaacctaatccactatccttggcaacaaatcctaaattgcctcagttcacctccgtagagagaaagaaatagtgagacaaaaaaaaatccctaactgcggtggctggcgagctctactcgaaatgctcactacatctgcgaacacacacaagcccaactctacatatatatatatgtattatattatattataattaattttattccaatttatattattaataaatctgagaaagtgagacaaaacaacacacatagaggattttttcaaaaagaaaaaacacacacatagagggtacctgggacttttgagggcagggattccaaatctttggtggatttgggtggccgatcaccaaagcagagccatctggcctgagtagaagctccacgggacggaaaaataaagagggggaagagaagtgtggtg

SEQ ID NO: 230464 - DNA, 1327 bp, Cannabis indica
gtgcttcaagttcctcatttgacttgtcaggaataacgttggatgctggttcaacagcttcttctattatctcatcattctccaaaacatttatatgcggagattggggtggttggccaccattacttgcattaacttcaggggccccatgtgacgtatcaagactactctccaaagggacacgtgaatccctactagaatcccccatctcctccagtagaatatagcaatcacttaccaaagagcacagaacagggcactcaacaaagacagaaaactaaacaggggagtcacacaaacaggaggttaagaaaaacgaaaaaaatgggataaaagtttaaaaggctggaacttttggttttatcatcaatcaaacagtgaaactaatcaaacagtgggatttcaatggaacagtgaaaaaccaatcgaacagtagaaaagacctagaataaccactgtaatatcattaggataggaggggtttctaggacaggacatgaccgtctagttggaattccaacactctcacttgagagaaaaaattcaatctcatggtactcagagtttgtttactttctatctattgttgatgatttttttttaagaagatttgtgtttgtcttttgatgctccattagttaaaaccaagtattcacacttattacttgtccaaattctaatcctatttaacaatattattattattattattattaagataaagtgattatacaaaataaataaataaataaggtaaatattccaaagcaaaaataaataaattaataaaatcaagaaaattatacaaaattagaaagtggtagtgagtcttgagtcaaacccaattcacacaacattaaaattgattagtttattattcaacattcaaaaccaaatcaaacaaaaggttttttggcccacatttctagactcacaccaaatttttcttcttttctatttttctcaagtcaaattaagtgtgttcacacatgaggggcaatttcgtaatttcactcaaccgtaatgacggagggtagttgacgtgtgcagttgacggtggttcgaaatcggttgagtttctcttttctcgctataacgtcatccgtgaagtgttaaactaccacgtgtccaattcttattggctattaatatttaccttttctagttttggttacctagatgaaacggtgcgttacgacaacgaaaagtggacacgttggcattattttagggtaactttgcttcatttctacgtaaagaaaaaattgattgcatttttattttatttttttagtaataatatttttaattttaatttttttaatca

SEQ ID NO: 230465 - DNA, 1716 bp, Cannabis indica
gcatgtgttttattgaaagctattatttatatgtttaatgccaataattaaattttaaggattaaagttattaaatagtgcaccagtaacttatagcaacataagaaaataattttaagagatgagaaaaatgcaactagagagggatatttgtaaggatttacatagttggggagaatttttgcaacagataaaaattgaggtacctttgatggacaacaatgaaagaagaatagcctcctttggtgatggtggcatcagcatcaacatgattgaaagtgtaaacagatcccttttggcaatgattttctaggccttgattacagtagtggcaatctctacaagagtttacgtatgttccaacaccaacatggtctcctactttgaaacgactaacaccagacccaacagatttcacaaccccaacaatctcatgtctacccaaacccaaaacctcagaatcagatagattcagtaaaaaaactaaaatagtcaaatgaatggaatcaaaatcagatctttattttatttcttacccgggcaccacaggatatttggaatctccatgtttgtttctggtccagactacatccgcataacaaattccacagtgagtaatggttatggagacatcgtcactcccaacagccctgttgtcttgtcagttttaatatattaaaaaaaaaaaaaaaaatggatattgagagagagtgatagaaaacaattgatacctgcgattgaatttgtaaggagaaacaataccagatggatctgtagctgcccaacctaggcattcatgatcatgattggcacaactcatgatgatgactattgtgtttttgattgcagcaagtgggaaaggagcacaatctgatcaatccaagtgtgttgtgccttccttaaatattatgatatttgtccctttcttgttctggtaccttacaatatcatcctatattggtttttattgactctgtcgtgtttacttgcttacctcacaatctctctcattcatattttcaaggctccatccaatgcttattcttgtgttttgtcaaaatgcctttaattttttagatgaatagctagtatttagttttgattgattgacttaattatagtacaatcaaagaatcacaatttcagctctattttattcagtattttcaaaattgacattattagatttagagctttatccatggcattcacattccatttagacatttttctctcaaggaaaaaagggaactaattggcataaattttgtgaaaaactacaaaattgacaaacaaaaacttgaatctttagtcatatgttaatctaaaacaacaaattattttgatgatccaaagtctttggctcatcatatgatataatactgaacttaacatcacaatcaacaaataatcttcaacactccatgtaatatgtatcaactaaaattgattacttcatccatgtcatctggttttctttttccctttactcgaagaaggcttcttgtgttggattttaacttccatatcgctccttatttgcgtaactttcggatcttcaggcaaagtagagagcaagaatttcttgcttgagccaactccagtgctccacagcttcagcattttccttcccctcatccatttcaggagcagcttcatatgtgttttgctattgattacaccaacaccagaatcctgaaataataaacagacgca

SEQ ID NO: 230466 - DNA, 1189 bp, Cannabis indica
ttttgtaaaaaaatgacaaaagttagtataccatgtaaatttccttatttttttcatagacatttacaaagtttaccagttaacataaataaaatctatttctttaacacaaacccactatcaggtataacattataaagaaaatagcgattgataaataaaatatggatataaatgtatttaagtctctaatactcttttatctttaaactttatagaaggcttaatgtcccattagtcacactcaaattgatttaaataagtttgtgttggcctatattttttttttgtgctttttaaaatataggttgtaccatattatgtaaaaaaataaaataaaaatatgaatagtgcagtatcgtgccaacaattttgaaaggtaagctcgatataacttgtaagctttactcgtgctggttcattttttctaaataagtcagcccatttttttacacgggtttaaattcgtgctctacttattcacatttttttttttatataattaatgagataactactaaactatatgtgtttgttatagttttaattatttttatatagttttttaataatattttacaatcatataaaaaaaattattaaaattttaatatttactgataaatacttaaatttttaagttataccctacaaatatattaatatataattttagttttatattatctaatagttttaattacagaattataatattttgtgttatatttgagttttatcatcattttaatttatttataattgatcaacacaaattattattattattattattattattattattattataaggtttttaactgtatttttagactagtttattcagtacttatcgtgttttttgaatttgtcgtgtcgtgtccatatttttttttatgttaagtcgtgttcgtactgttggaatatattttaccaggatctagatttactaataagtatgtttttaacatctttaacatgaacttctaaaacgatataaagtaaacacataaaaggtatgagaaaccttacattggttgcagtagaattaaatgactcattccgcttagatctctaacccttgcatcctttctgtagcagagtatcaccaagatctgagcccgaaactccttctattgtttggattcttcatagtcttacacactatgattaaggactaacttgc

SEQ ID NO: 230467 - DNA, 1903 bp, Cannabis indica
aacttaatttcaataacataatatattttttaatttgccgtggtgtaggaaattcttcatgttcgcatgttggtttgtcacatttgatttttttttccttttgattgtataattcaatttttgtatgacatgcctcacatgacatgtaataaaaacgttagacagtatcagttatttttattgccacttcaattcaaaagtttttttttctacatccaagtcaaatgtgttaaaatagtaggatatcgtaacaaaagttttttaaagtaggtattgtagtagtatttacctcattcagttgtagatttttcgtcaactttgaaatatggatgttattcactatttcgtgtaatccaatagaaaattttggagaagattcatatgtcaagcattttgacaaagaattttgagttcaaagtggaaggaagagatcgttgttttctaatgtgaggaccaaatttatacaatataccttctcttttatatatatttttttatttatagaaaacgattttttatttggataatattacaataagtatcagtagtacgatttttacctatattatattagtgtaatcttaacctattacattaaaaacatatgtatacatacataatgtgtaatatatatacatatccttttctaatctttttacaaagacgaaattaaccgaacatgaaaaataataaaaaaagaacactaaccttagatgatagaaactctgaagtaaataaaatgcgcggtgacaaattgattgtagcaacaatcccaataaacgtaatgaacaaaagaagtgaaaccaatcctacaataatagatcaaagaaacactaatatattaataaacctataacatagatggtggcagaaaataaaagaattgtgagtgatggattaatttttacctgcaaagctaaaacgaattattagtcgatataaaacaaactaatatgaaatatatagcgattgtattcttaatcgtcatctaattagttataaaatatcataaaatatcccactttaatttctaactacatgaaaaataaagtacttttaaaaatttaatataattttataatttttttatattttacaatttaaaatcttagtttttttttttttttgaacaaaaggataattttattcaaaagaacagaacaatacacaacaaaggccggaagggaaaccaaccgccagcaaagagaaaaagaggctaccaactattgattaacctcaacacatattggtctttcttcttttgactagtacaataaagcccaagaactctagccttaacaacactcttaatctctttgctaagtgaagcaactgaattacaaaccatattaaacaacagtcatttctattcttccacagtaaatacaaggcagcagcagtaatggcattcatgattttagaagctaagttagctttagctggaagaacccggtcatgaagttctaagatgtttttcggccaatgcatctgcccagcccatttttccacaaacacaatgagattccttgtgaagatgcattcaaaaaaatagatgattatgggattccggagcatcatcacagaccaaacacagccctgaatgaatgggaaaaaatctgctcaagtgatcacgggtgagcaggttttcatttatgatttgccaaaacatgaacctgtgtttaggaacaatatatttatgccaaacagtagcagcatagggagttctaacagctccaatcaactcattataaaacctgttcactttgaatttattacctttcgccgcctggttcagcatgtttgcattggtcacatttctaatcttcataagcttcttgaagtaccaactcaggtccggttttatcgggcaagaccacacgtcctgattctttaagtaaatgga

SEQ ID NO: 230468 - DNA, 1850 bp, Cannabis indica
tgttgaatctcttggccatgatcaaactcagaacaaaaaaacagagcaagaagaagaacagaggtaaagacagaaagaaaagctgaaaggaaaacaaaggaagattgttgaaacaaagagcaatcttattcaataggcaatgatcgtacatgatttatatagtgactgattacaagctagaagagaaagagaattagttacagcaaggataactaactgtaacagattcatgataacaaactaacggttataactgtcactaactatgctaacaaccatatacccttaacatggagtaatgttcataaagatcatttctaacatttactaatattaaagtagtttcgaagtaatttttgtcggtttatttgaatatcctataagtcttaggaatatctttacagctgttatttaatgctcaataattataacaaaaataagatcaagattggatgttgcagcaatgagtttaagtcgcaattcaattcataacagcaggccaactatttttaagtagcgggcaaatttttatttatattcaaatatataaatgataaaataataatattcatatatcatctaagaaattgctacacatttctatataaatattaataataatcatattcatatatcatcttacaaattattatatatttctacaatactcaatttaatctagaatattctatacatttgtagaaaaacttactctaatttttttagataacggtagaatacttcagagttttctatacttatgaaaaacataataaaatacacatgcatttctaaaaaactttagtctagaattttcttgttatatatgcttaagaaatatgtagaattgtatggaaaaattccttaaactagaaggatctagagcaaacaattctagcacaaaagcttgaaagctggcaactatataaatagccaacaaggattctaaattgtaaccaacatccaaaccaaaaaaacagctacaaactatcaataaaagcttactactttttacaaacaattcttttttctaagccaaactattctcatatactaaatcaacaactactcatcaatattactacttcactactttatcacaaaaaccactaaaaacttattccttcatatccacttattcaaaaactaatacacattaattctcaatcattattggtatcagagctctgtttgatcatcgttgggcataatttgagatcatgaatttcaactccaaccactcttctttacctcttctaatttttcatagaaaaactatgatttttggtctatcgaaatgaggatctattttcgatcacaaaatctatcattccaattttttcctccttacgtggcagtgcttacatgcacaaaattaatgccacgtgacagtacggctcaccaatgagaaggccaagtcaataccttagcaaatgggaaccccgacactcaaacaggcatcaaatgacagaccagcttcctcacaaaagctagatggccacccatggacggccctatgatcggccagcctctggacaacaccatggttggccagcctgcttcctacagaagtctagccggccagggaaaggcatgcatggttctctatgtaattccacaggtgtgcaatctagtttgggctgcaaattaggccctaaaagcctaatagaatagctgaatactatatatgtttaaggacattttggtcttttgtaattaattaattaattatgcaaatatcatgggtttcaagttatatattacggttttaggcttcctatataaaggccttaactctaacctagaaacctaagttcattttaagcttgatactagcctctaagctctaa

SEQ ID NO: 230469 - DNA, 880 bp, Cannabis indica
caatttcctgtgattcgacctcacttgcgtgagtttactacttgattgtgtgtacttgcgtattgtctataaatttcgtaacagcttggtagcttttgtttggtagagagacaccttcagaagaacgcaatacctaaaagtatgttcagagtgaaagtctggaaggctatgtatgtctgaatgttacatttggtagtgtttcccccatcatgagcttcctttagcaaaacctcttctagagcctgatgagtgttaagttgttggtccttagaatgttcactctgactttgtaaaaccccgcaacctcgaccaataaaggaatataaaaggaacagtacaaagaccttaataattggtgtttaacatgttaaggtatttgcatttcccattttttattgccaccaatttttcccattaatatttaaattctatgaatatctgtacataagtttgttgtagagttttcatccctaaaatatataaatatagaaatactaatcacaagtctaccattaattcaaaccaaaagacgactttaaagaagatatataaatatgatgaatttataagcaaaattgaattgacaaaaagtgttctatttttcttccttttctattacatcttcgtagctttttaaatagaatttgctattatgtcccgtataatttacgcagaagacgatgacttggacttggtctaaccctaattaatgtttgtaacaaatattatacataattatatagaagaagagtgctacatctaacttaatgttataatttcttagtcaatctccacgctcgaaaatatacgtcggaatattttttttcaattttttttttcacggcggtgttcgttatgcttacaacatcatctctgtaaa

SEQ ID NO: 230470 - DNA, 1226 bp, Cannabis indica
aagtaatcccacaagaaacacaagtctcaaaaagggcttggccgggtaatcaataagccagccaaggtgaacgatatcaagaatattgggcaaggctacacaagccttggtttcttcctcaaacaaatcccacaaatatctctaattgtatcctacatatgcggatatgattgatcttgtaatgccttaacaataagaacgtcacacactgcgactaaacataaactaatcttgttaaaccggaatcgactatagctgagcgcataaattaaacttttaaaatacagaataaaataataacttgtaattgataaactttacaaacatccaaaagtttacattttattttgggatcccataaaactttttttttacaaaatattacaagttatttatacacgccaacctaagcagcaaaagtggggattgcaacatttttcccatggtagacccaaccatcgtggtctagcttagcctgaacatgtacaacacaccgcaaaaaaccctcgagctcatgactgatcaataacagatttatcctttcctgcacaatagagcacccgtgagccaagacccaacaagacagtatagataaccatatgaatattaattataaatcacataaatattgatgccactgcacctattgtctatttgacatagacctgcgtgttacactcacccgtctatttacaataaggccttacaatggtttatctcggttctgattattaagtctaacctaattatgccttaatcgcataattctttatatcaatatatacattataatattgcattcatattcacttaaattatagaataataactctaacacataaccgctaaacttaggggaataaccttaatctcggtttctcacataacatacacataataacatacatgagccctactacactaaactctatgtgataggttactgtcttatctagtaatctaagtatgtggagatttcaaatccccaggtgttcttgagcaagccccggtaatcctaatcacacattcttgggattttacaaatatgattaatcccaaattcattttcacacatacataatttgaattccatttacagattaacaaatagagcccgaaataagctttctaatgataccaagaacgttcaaaacggagttccaagtcaaaagttatggtaaaaatgagaaaaaaaaaaccctgggaaaacaagggcctcgccgcag

SEQ ID NO: 230471 - DNA, 1762 bp, Cannabis indica
agcagcagctgaatcacaacccataacttttgttgcgattcctgcagtcatcgaactattcagccaccccataagaagttggtcactcacaatccagtgttcgaactctggattgagagtgactccaaaacctggttcattttctgctgtaacaagagcagagacaaactcgggaggacaaggacgagtgccatcacgaatccatcaaggcgatgacctctgattattgttgacaccattgttttccagagaacgtagttcttgcgatcgagttttagaggaaatggtagttgataggagcaggaatagaggagcttgcagcacctgctggagctgtggtggtgacttgtggagtttgagagtgcgacgacattgatgcacttttcttggctctaatacaaagttaaactttacacaaaatgcaaaaatacaaactcagctcaatggaggctgaggggaacattttctatatatactctgatcaataatacaagcaccaataaagaagggacatgtggccctaaagttggaataagggagaccacaataacagaaaacatcacacacacacacgtaactaaacaatgattagcacacattaatcactattaattacagtaaataaaagaagaataaaacatagtatcattcttaaaatccatatgatagtcccaccacttagtgtgaagattgattccgatgttaattttctagaacgatctgattggaagtttgaatctgtagatcctttacatgtatatagtctcttgttctagtaagatatttgagaaaggttttgactgctatctagtaatataattctagatttgataattaaggacaaactattgataggttagattttgatgcattttaggatgtattttaattttttttttagttcagaatgtttattttgtgtggaattacgcttgttttcttcatgtttcaaattttaatggtcaaatacatcatatgggttgaaatgggaagaatcatgttaaatatgatgaatttgatggatttagcatggatttggagttgcaagatacaatgggtaaaaaatttcaagttttgaatgctcaatacgctctgtttgtgataaaaaaaaattaggtctgacatttcaagttaatttttgactatgatgcgttcactttctagaaaagtcttgtgaacaaaagttttagatctttctttcaactttctaaacatcttgaatcgtccaattctgagctttactcagatagttatgaccgtaatataatcagtcgttgcaatagtatttcaaagtcaagaaagctaaactagcgcccccaactcattttcgaagtgctgcagcacgaatgcctttacatagagcagtttttagaattttgccaatgccttagcgccatgggggagtgctgtgacaccctagtccgtgcgaatcatgaaattctgcattttaacatggaaaaagaggtcttttcacacataatcattagggctttattaataaaacaacaccagctgcgattaaagatcattctaagacggcttaaacatatgaaaagaggagtcttgtagatgcacattggagcaagattgacaacctaaatctagttttcttctcttccacatttattttctgtttttaatatttatcaatttttatgtcatggatgttttaactttgattatgaactaaatttatcttcaagtttttcaattaacattcttgaaactctattatgatcttatgtaattttttatttttttg

SEQ ID NO: 230472 - DNA, 981 bp, Cannabis indica
tgtatgcaagactcatgttgccaaatggattaaatccatcagcagctaatcccaatcgaacatttcttggatctcttgcaaacttaggatgctttgcatcaaagtctttccaagcaagaccatcaatcgggtgtcgcatcacccaatcatcttttgatttaccagtatgatgccataacatgcccttcgctgtaatcctgaaactatataatcttttgagtcgaggtgtcaatggaaagtatcgtatcactttgcaaagaactttttttcctatactgttctcagaagtaacccaacagctacttctgcaaactggacaagcctccttagatgcattctcattgtaaaataagcagcaactgcattgacagacattgatagactcgtaactcaaccctaatttcttcaatctcttctttgcctcatagtacgttgatgaaattttattttccttcagaaatgtaaattttatcaaatatgtttttggggattttttctctaactttaagatgcaatagcttcgctaaaaaattgagagacgaaatcaaatcacaaccaagatacaattcagcttcaattttctcaaataagtcatcaaaatattagtttgtggttggtccctcttgtacatcctttgttgtcggaggaaggaagtcttgcagaatagggatcatttcatcctcttcataatccccaacctcttcatcatcaacatcatcctctgactccccatgataagtccacttctcatatcctttcataaaacctcaattaaatacgtgtactctcacattatctaatttcttaaacctattgtttatacatctcacacaatggcatctaattcttccatcagaatctttagattctgacgacatcgctaaaaaagcttgtagaccattttaaaatttaggacaaccgtcagaaatgtaaaaaaaaaaaaacagatttttctgccattaatggcagaaaaatttatat

SEQ ID NO: 230473 - DNA, 591 bp, Cannabis indica
aatgtggccttgaagaccgttgctccaaccaaaaattgcacatgggtttggtgccatacagctggtgctgctttgtgccaacggttgttttttctttcttttttgggtcccatttgcatttggtatcaattagccataaccatagcctgtctttcttaacaactttcattctttatttattgggttctgtaatgtggcccttttttggtcttctcttatcacttttttactattttattatttattaatagttttcttttgtgcttttaaaaaaatatagaaggaaaaaatattagggtaattagcggtaaaattccgttttaattcttagggtatataatgatataagtatttaaagttttaagtttgtaaacggtgtaaatttattgtttatttttagcggcataaatgcttaatatttgtaaaattttaatttttctctagtttcatcaatacagactacgttttgtaatttattaattttagatttaattgatactacatattttatctaaacccaataatctataatgtgttctgtttaagataatacagtttgtactgacaaattagagaaaaattataatttta

SEQ ID NO: 230474 - DNA, 2922 bp, Cannabis indica
atctattggtcgtatcacttgtgatttagaaaacttgagaataattaagaaccctaggctagcaattagaacattaataggaagatgatgaaagttgtttattgaagaacataggggggaagttaagaaccttgattttcccactcttaattttcttgattttatattgcattatttttctttaattttcttgtttcttgaatttttttttactttaacttggattgaatgaaaagaaaaaagtattttgtaattaacacttgaaaattagtcttaggggatcgatatttttatgtactacttgttacgatacatgctcttacgtgagtgattgtaataaaatccataacacataacataatatttaattttatttttgacattgtaaacgatttagaattttttaaaaatttacagtagtcttaaataactacaacatatacaattatgaaaaaaaaaaattaagtaatttttttttatatgcctaaatggataaaaaatctacagaaatgtctctttaagagtatactacttaacaataatatacatttaaatattattaaatatactaaaaaaaaaaaaaacaagttatagtgcaacatgttgattttggcattatatttgatgcacgttggagatggtcttaggttatctccaatcgcgaacactaaaaatttaaatttagtgttatttttcaatctaactgaacatcttaagctttcttgtatatccgattgtctgcaataccttactataattagtggaacgctatagaccacgctaaaattgtttttttaatttttttttttagttttgataattaaataatgattaaataattaatttttatatgtattatttatatttatatataaaaacaataaagaatacactttttaaaaacttttagttttgtaaatggaataaaattgtgttaaaattatacttttttttagttttgcttcaatactaaatttagtttttatcattggagttggccttagatgatgtgagatggatggtaaattaacgacttccgctaacagccagaaaaataaaaagatcaaagcaatatgtcatgtcacataccttagggtgagtgatcaccatttccagagtttcaattttactattcaatcttccttttacagattttcccctaaccgaacgaattatattgtaaaccaaggtaactaataattaaggattgtctgcttagtacacttcaatttggcaccaaactagttaaagctttctatcaataatcaaaacttggagctggagatgtcaattgtcaaatgagcaggggtttattattctgctatcaagggacagaaacaaagtatatactgttttgtgcatgattatttaacataataatgcatgcgaacaacaaacatttagtaaaacttgcataaatttgtacttgttaagagtttcatacacagcattactaaaagaactcactaataagcaaaactatacaagaataagatgtatattttaaatcgtataactataaatctctaaaaccaagagaataaattgcatgcatattatttacatattcaaagttataatagacaaaaaaaaaatagcacataatatgaacaattttatgttttaagttgtaaaagcaaaaatagttgaaattctaataataatcatgttatacttttgatgtttagttgcctttgtgctgttgattatcagagacagagtcatcctcttatgtatacagtatagggtaactatggccaccaataagaatatcttttttgtttttaaattctcttttcattgtatttctttttctaattttcttcaaggtttatagtttgtcccttttaattttaatttcttccttctactccattgctccgtccttttatctggtgtcgttggcacaactccacattaggaggtgttgtcgtaccatttttgtaattagttatctcacaccaccacaaaaatacatgaatttatttatgcggaataggaactcgaagcaaaggtttattctttcttacttcactttcccagttgatgtgaacatgcctataaagatattccacaatccataatgttaaaatggtactctctgcctatggacactggacacttcacaaaccatagtagacaatggactcctttctctgtgacttttgtgcgtttgtcattggatgcctataacatgataaagcttgccaaattcgtactcgtgaagatacgtgtacatacgattccactatcaatcttagtagcacaccaacataattttcctttcagagatggagggacagaaaaagaaaaaaaaaaattaaacaacaccaactttctaatattctttttttattaatggaattaaaagattccaacataaattagaaagtacaacaagaaaaagaaatcaagccaacttcaacatccccaactctatacatgcgcgaggcagtaaaaagttaatagaaacagacatcatctccaccattactttttgtacaacattcaaccatattgagtatttgagcttgaaaacatcttaaagcgcttcagcatctactcaaatccttctatctgcaaggaatgaaagttctgttttttcttaaaaaagaaaaaaagaaaaatcacataagcatggaaaactttatgaactctaatataccaaagtcctattttacttggtacctaaatggtttcacaaaacaatgccttgaagcagagatagcaaaaattattatgaaactatggccatcaaacgctacactgcattgaagaaaatagtcaatacgttcggttgaatgtttcaacctttaacaacctcaattctagaatgatctttctaactatgacttacttagtagtgcctaaacatacttggtatgctgatccttttctatccaacaaaagagaaacaatacc

SEQ ID NO: 230475 - DNA, 1281 bp, Cannabis indica
aaaagttcaaaaaatatgacaaaagcacaaacttgttatccttatccttggtaactggttagctaaacttttttaatttttctcacaaaataatttcttcaaaaaaaaaagttatatttttgtaaacattgtaaaaaaaaaaatcaataaaaatttaccgtaaataggacaagccttcacttgtaaatggatttagattttggttctaagcaaaaatgatgtcaaaatctttttggaatttcatctttgtaaaaatttaatcctaatccaagtgagtcatgactggaattttagtaacaatcctaattacgaaacaaaaaattgtttaatgtttgtttcatcttcaatctatttttatttttgagatgaaacagaaaatccagtaaaaaatgaatattttggctaaaattttcacaatttctttattaatgaaagaataactgatactagagaaatatatatagagaaagaatttcatttatacctccacataattataagtacactatattattaaaaaataaatttaaattattttaaaattactcttactattttttaaaaaaaaattactttttcatatagtttgtgttaaattccttaatgccctttattcaatttttttaattattattattattattattattattattattattattattattattattatagtgtgaaaattaattgtaaatttatagtggtatagatttattagaggtgttaaccaatgaattcaaagaggacatagaacagcaattgttatcactgcaacaattgaagaagtggaaacattagataataggaaatgcatttatatttttaccatattttatatttatttttaatattgaatatttatcattttttttaatttgcagaaatatcataattgagtgacattgtcactttggagtttatactgataaggattctatgatattcataatttgtgcactcttatttatgtaagatgtattatcttatgttataatttagaatggatttatgttgaacttatgttgcaatttaggctggatttatgttgcaattatgttggatttatgttgggttgtaatattttgaactaatatattagctctttaggtgaaaaatcaggttttactcttggattggattggatggatccaatccagtataaaaatattggatcaaaagtattggatggatccgatccaatacagggattcatccattggatggaatcgatccaatccaatgtttcattggatcggttcggttcggttgagccta

SEQ ID NO: 230476 - DNA, 981 bp, Cannabis indica
cgtcggttccttcgcattttaatgcgacggtaggaacttcgtctttgtcttcttcttcgcttcagctctctcagtggaacctcacccatcgccatgtcgttatgctcaatgtagttgcttgcgcggtaatacccccactccattttcgtttccaagagctgttttttaattttaaatgcttgtcaatttaattagaaaaaaggaaaatttaattctggaaactgtgaaaggaaaacccagattgcatatgttcatggtgatgatgatgctaatgccggttttgattgatgatggtaggtggcagtttctgcgacctggctcttctgctcagcaatccccgcgcttttggttggtaacagaatcgtatttttgttcattttgaattatatatttttcatttccacgaatagggaaattaatggtctatttgacattgtggttttagcatagccgaacaagtctttttctgatgatcctgctgtttgtgttctatgatggaataaagagtacactgtgttttggtcactttttgtttactgtgaatacttaggctttcaagagagcagctgaatcacttgagaagctcatggatgtcatgagagaggagcttccagacacaatggctgctgttagactatccggaatggagattagtgaccttacaatggaacttagtgatcttgggttggcttttaaaacacttcatttgtatgctaattgctcatttatctttaactcgatttttcactcactgattgtatataattttggttgttcagccaggaaatcacacagggagttaggagttccactcgagctgtccgggtggctgaggagaggttacgtggcttgacaaacatgacttcaacaggttactgagtttctttgtaccttcttcttgtgctttttttcttccgtttctaaacttatttatttatgctgccgtgagttagtaattggtctggagcaatgaattttact

SEQ ID NO: 230477 - DNA, 1700 bp, Cannabis indica
aaaagtaaagcacgaatttaatctcgaatataaaaatgggttggcctgtttaagaaagatgggtcagcacgagtaaagcacgacataaatctgagtgacacgaaaaatatcggacctacgggtcgtgccgagtcgtgccgagcctaccctttaaaaatattggcacgacacgacacgacacaactcattttttttcatggcacagaacaatatgacctattttttaaaaagcacggataaatacggaccgagcctgcataacacacacacaaacttacagtactactcaaaactatatcaaaatcccatgcaatttaattaatgtgaacaccacccacattgttcatttagcaaaagataataaaaaatactcatatcgttcttacttacttcacactaaattagaaaataaactgcgcttcacgtgtggttgtattttgtttagtgacataaaattatgtaaaacttcaaattttcatattctatataaatctatattgttatctctattttcggcaaggaacacgtaaaatttaggtcaacaccaaaggcccaccaatatgtcccaaggaagacaatttgggccaagcccaagttgtacaggaccttccaagaacgtaccttagctccgtgaccagatggtcttccgccagtgacagtccgtatccagaagcagctccagtaccatgatcctagaaggtcagacatcgtgtttctcaagaccagtccagtttccttttttattcaagcgcacaaaataaggaaataaatgctcctcaaattttgatagaagatcgtatcaagctaaaaggggaaactacctaaataaagatcaagcaattaattcacgattaattcctagaattataggacacaattttgactaattcaatcgcatctaatctgtctagtcaacaaatcatctccttcatgggttggactttacaaaataacccaaattatgcaattaaatgtaatccctccattagtgggaaaaaggaaagctaagtgtaattctcttaacactataaatacccaatgaatccttcagattaagggttaaattctcttgcgatacttgcttaggaaaaatagagaacttacgctcattgtattcccaaaaggcttttctagcttaagttacaaaataacatcgactcatggactaaggctcgttaacgccccaactatgtaaaaactgtttgtgttgttcttactttttctcttttaattatttatttctttagctctaattattcttaattagtttttcaaaaaatctatgtaaatatttttgtgttttcattgagagctgaagaaagcagtgataccatctgaagattaagttcagtaatcattgtactcacccgtaacaaatctagttttcacttcattgatcctaatgccaagacaggagatgcagaagattagaatgaggttacgagctgtcacaaagatcaagttggcaaagatacagatatggacgctcctttatttggagatgatgattcagaagagaacaattctgatggcgatcttcaagagacctcaaaagatgatcctcaagacacatcaaaggataataattatgataagattgttgaaggcagtgctggagacaaggacactcatgatgagtcaaatcccatggtagtcatggccaaaaaattctaattgactaaaagtaggctatctcgtca

SEQ ID NO: 230478 - DNA, 1167 bp, Cannabis indica
tattttaaactaatttttttaaaaaatactaaaaatttaatgatttggaccaatcaagaattatcacgtgacaatttacttaacacttaaaagttaggtatttagagaagttctagaattataacttaaatattattaccgccaaaaattaaacatatgtatttatttgcaactgggaattaaacttaagtatttatgccgcaaattagttttaaaaaaaatcatttatgtaactaagaagcactataacaattttataaaaacgacattgttatcgatctctaatatcaaaactaaatgaatatgaaaatataagtttatggagaaatttgtgagtgagaggaataacatcttcactaataagtaatgggaattaatgataagataatcattcttttatatttgtttacttatattattaaaattaggaaatgaaaaacttgattaaataatggataaaagaaagtgaatactttcccactaattttgtaaggaatgccattaaaggtaatgaattttatttatttttattttactttttaatattaaatatatatagtgacaattttgtcttttataatttgtcttacaaaataactatagtagttcaacttaaaagtaatttagtcaatttaagtattccaattatattttctgataaagtataaatgataaattactattattctatttctaaaaaacattagtaaataatatattacaagtataatttgattatttcttatttattttgttacatttatctataatttttttcaattctaaatactatatagtaaatgtccattaagtagaacgaatgaatatgaaattaacgtgaagaattatattgtatatctattttattttatttgttttgatttttacctctatttttattttctttaagatatacccacttttatagattatatctcaattaaactctttatgttaatataaattatatgctagacttaagtagagagtaagggtatattgggcaacctactcaaaagaaagggtatattttaataaaatgtaatataaagatatttttgattaatggatataaaaaagaggtatttttcaacataattgcaaggtgactgagtgagcgagctggggtttcgtttcgaccctcggaatcgggctgggccttatgtg

SEQ ID NO: 230479 - DNA, 2271 bp, Cannabis indica
gacaagaatacatagtcttattaacttttaggaccacaaaacttcatttctagctctctacaaatattatactaaagaagcaaggatagtcgaaaaataaatggtttgtgctttcagtttcgcccaggcagttgaaaaatttgactctaattaatatgtatgaaattgagtttattaaagtaattctccctacaaaagagagattttttgtgctccaccttcttattctggaaaccctcttataaataatatatctcacaatcctttgccggtagtatattggtactccaagatacttagaaggaaaagtgcttctttagaaacatatatatatatatatatgtggtctgcaaaataccactacaatagatggtaaattttgtctcttgagagaaaaactgtatcatataataaattgacttggaatcgctattacaaaaaaggagagcaccatttgccgcaaagctcaaatgattcaatttcaagtctcttcatatataatccgtgccaagcacaaataaaagataagatattggcttcaaagaaattaaccatatatttctccattaaacatgtggagtcttacggctcaagataagcttaataaaggcactttagaattggaaaacatctagcaattctttaaagaacccacatatgcttttagaatgtcaagcttaatcatacatgttgcacgaaaattctttcttccatggcggactagctagatactgacaaatcataagataattaagaaaatatttttttaaaattattaatttatggttttgaattattattaagaatttttatttatttattaattttttttttatattttatttattatattaattttttttatatttttttataccagcaaccaacggttgcaatccccattcaaaatggggcaaaccaagatcacacttattatcgataaggatggttattaattagctcaacagaattaacaatttctttttcttttaaatttaaaaatgaaacttttgtactttcaaaataactaaagtctgttatatatatatatatattatattattattatatgtatgtataataatttaattaaatggttaattaagtttaaaatatactaaaacaaaccagcgatatttactactatatatataaataagttcacaattttctgagtaaataatattatataggaggaaaaaatatgtgggaacaaataagaagaaagacgaccctgaaatatgaaagatttgaagtgataattaaaagtctaataagttaattatgttgggaaacaatcataacaatctacaacattatttattttcttttgttggagattgttattattttccacatcaacctagctatttccaaaaatattatccattcatcatcaaacctaataaataccaacaaacaactaataatatatttcgtgtatatatatatgtatttgttttgattgatcaagatgatcatgcattttatatatagttgtatataatatatgagcattgctattaagcaccaataatgcttagtaccttcttcacatgtcgcgtttcgattaattagcgatactctctaaaaagctattataaattatatgtgatccgatacttagttggatgctaggcaccaccggtaccctttatcatttctcataatatattgagatgcttaactaaagttggtagtgaataattaacattaattattatatatagtcttaattggttgctcattcaattttggccgttgcgatgattatattaaaaatatgaaaccaagtacgtagatgagtcactcttttgttaagaaaaagtttaacatataataattactgatcatacatgttaagggtatatactagaaaactaagatgttaatgtaaaaaaaaacgactaatatattaattgtataaaaatgataaaagggtagacaaatagaaaaagctaagaaatttaattagacatgagaagtaactaaactgaataaataacacattgcaaaaaaaaaaaaaaaactggaaactaaacttaactagttggtaatgccgttgtgggataattaattcttaaggtttttgcaatactcataacttctttgggttaacttaccatcttgatcgggacaattttgaaccacttttgaaataaactcgcaacacggtttgctaattaccgggcaaattttgccatagaaatctatcatctctgtaatgcatgattctaggttgcaatacttccccgtgtaattttgaggtac

SEQ ID NO: 230480 - DNA, 2228 bp, Cannabis indica
gtgattttaaaaaaccgccaaataaaaaaaattgccaaaccgcccaaatactgcccaacccaacccacgtgcaaccctaagaagtatggctcaaccagttaaggcagctagtcgatcgcatagatgatgttgtagacgaatacattcactatttgcacatgaaacaccacggtcatcatggaaacaaatttctccaatttgtatacagaacatgtcactttgctcaactcataaagtctcgatatgacatagcttccgagattcgagatattaaaaagtccttgcgcgaaattaaggaaagaggccaatcttatgggttaagacctttcgaacaaggatcaagtagtaataaaaatgttgatgcctcctccatgggcactcaattaggctctctttatattgaggaagatgatcatgtgggaattgattccacatcaaacgagctcgtaagaaatttgattgaaggtccaaccatccgtgttgtgatttcaatagtaggagaaggtggaattggtaaaactactcttgctaaaacagcttacgatgatgatgctgtaaaaaggcactttgattgttatgcttggatcactgtgtctcaatcatacaacacgaagaagaccctaaggattatgacaaatcagttatgctccgagataaatcaacctgtgataacaacaaagaagcaatcgatcatttgaggaactacttgaagacaaagaagtatgtcattattttcgatgatgtgtggcaaagagatttttggggagtcattaaacatgcttttcctatcaatgataataaagggaataggatcattattacaactcgtaatacttcagtctcatattctattaaagagagcccttttgacattgtgaaaaagctaaaacctttgtgttgggattcatcttgggagttattttgcaaatgggcatatcattttgagccgtatagatgttgtcctgaacacttatacaatatatcttgtgaaattgtaagaaaataccaaggtttgccacttgttattgtggccatagcaggtttattgtcaacaaaagagaagatcgagtttgaatggcaaaaagttattgataatctcaattatgagtttgaaaacaatccccagcttacaggcattttaacagtgttgtcttttagttatcatgatctgccttatcatctcaaatgttgcttcttatattttggcatgtttccagaagattacttaattttcgaccaaagattatacagaatttggattgctgagggctttattgaatcgaaaagagataaaacgttaaagcaagtagctcaagaatacttgaatgagctcatccacagaaatttagtctcctttcatataatatttggattccaacgatggtgttatgtccatgatttattgtttgagatcatcttaacaaaagtagatgcaatgtgtttttctcacattctcaacacaagtaaggctaaatttaaaggaaggagtcgtcgcctatcagtatttagtaccacaaaagatgttcaagaaattgtcagggattcaaaggttcgttctgtcatttttcataatgtcgatcagttgactgattcttttgtaactggtttattcaaagaattgaaacttctgaagttgttggattttgaaggtgctcctctatatgatatccccaaagaagtgggacatttgtttcatttgaagtacttaaatttgaaaggtacgcatgttaaaaggcttccaaagtccattgggtcactctacaatttataggtctttaatctttttgataccttcattgaggagttaccaatcgagattaacaagctgcaaaatttgcaacaccttttaggatatcgatatataaatggagatgagtgtagtgtgaaatcctacggcagtgtgaaaatacacccagggattggatgcttgaaggagttgcaaacacttacacttgtggaagcataaaatggagttgattttgtaaaagaacttcaaaagtttacaaaattagtgtctttaggaattggaaaagtgactacagaaatgggaaaacctctaacaatctccattggcaaaatgagccaccttgaagagctcttcataacttcttttagggatgaggaaattctagacttcgaaagcatttcatctcctcttcgctctctgcgcttcagcttgcgatatcgattaaaagagttcctaaactggatctcagtgcttcagaatc

SEQ ID NO: 230481 - DNA, 1096 bp, Cannabis indica
tgcaacgactcacttcagaggctatcattgaggtaaccctttagatggtatagtttattgtcgtgatatacaaacttgcaactcttaaacaacactgtctctttaaattataattggacattgcctgaaattcttcaggttagcatcgaggttccttttgcatttcttccagtgcaagccattgaatcaactgggtctcaagtccttgatcaagttctaaagatcatgcttcctcgctttatggcacaggtttgtaaaagtgttaattttttttttttgctgtttcatgcataatatttacgattccatgattgctaacagcagctaatgatgaagcaaagaaagtacagagtaagcttgatttctgtttgaatttttaatcatgggattgtgttgggatgcatataaacaaagtttttgattcatttgcatatttgggttctcttctaatattcaaaagaaaatattgtgcagcttgtaaaagattatcaggcatgggcttctggtgatacctcaaggcagcctttaggaacaggtgagatttaacacaaggaccatcactaggcctcttaaacatgccatttaaaatgcttggtatcaaattatttgtagcatggcccgtgtgtacaagtacatactcatagtagtagtatttatttatttatttattttattatccaagtagataaaattcaagagattgatctaaattattactgtatccaatccaaggtttggtttgggataattcttaatctacgttttttttctctcacgttttttatttttatttaccgaattctcaaacacctacaccactttcatcgacttttttatatatattttttacatggatttacataaccttattgatgaataaatatgaataagtaaaaattagagcatctataagggtgtacaattctaccaaattagtatggagttttcacatggcaaatataccaatttattcactaaattaaacactattaaaggattaaatgtcacaaatggtatagtgattttgccaatattcctaaaatatatttgaactcaccaaagttagtgattaaagaagaagttagtcttatgacta

SEQ ID NO: 230482 - DNA, 1127 bp, Cannabis indica
cctcatctaattttaaaattccctataaccaattaattttagggtttcttacattctttcaatctcatccttgttaaaaaaaaaaaaaaaaaccttctctgataaaaaactactcaacagttatcttattattattattattagtagtagtagtagtaaaagtctaatttattatttctttgtataaatatttaaaagatatgtggggctctacttcggataacaaaaaaattcattggaagaaatggcgatttctttgcaaatcaaagggggatggagtcaatgatagatggatctggcactatgatgattcaagagagatagtggaagtcattttggggcttaaatttgccttcgaagaccgactaaaagatggggattatcttatgcatttgtccacaatttataataaatcagatcttgtgaattttctatgtctcatgtggtttatatggtctgatcgcaataactacattcatgggaaaaaggttaagactcctctccaaatgtggactcaatcagtggcctatttagaccagtttcggaccattacctctgctgcaacactagaagcatgtactcgcaccagtccagcaactgttatcaaatggaagcctcctccagagaatacattcaaactaaatgctgatgcggctttggattcttcgaggagcaaaattggaattggtgttattgttaggaattcagatggttaggtaattgcagcactgtctacactagcaacaggtaatttcaagtcgtaggaaatggaggctaaagcaatgtctgttggtctctcgtgggcacagaaatatcaacttcctatcgactttttggaaactgattgcctaatgcttgtcaatgctttgaatggctgcatttcacaacactcgggattttatgatctgatttctgatgttaaatttcatttgtccaatttctctaatgcttgtgtttctcatattaggagagatgctaacgaagccgctcatggtttggctagacatgcattacagctggaaaatgaatgtatacggttagaagatattctttctaccatcttctctgttgttgtaaacgacattatttgatttataataacagactttttactcaaaaaaaaaaaa

SEQ ID NO: 230483 - DNA, 986 bp, Cannabis indica
catctcagacttgaccgagataaacaagacatgtatgggatacgaaggaatgagctgctggaaggttagataacgagttttttagagcttgcagctcattgaccacatactcatgagtatgttaaaaggctaatggatttgagcaaaagacgatctatctcgaaatattcataaatgacgtgagatgattgaccctaaggaacacaaaagttcaatcctaagtgctatcttgagacctttcttatacaacaaaagcgaggacaacacctcaattagcgtctcgcaaaataagactactaattcctaatattattgaagaatgcgagacatattttgggtatgtcatctcaacaaagaaactgctttcaagataagtacaaaaagcgattaccaacagttaattcatgtatccacaaattgtaaatatgaaacgtgtggattatccacagttcaaaaacgattatcaagataagactaaaacggaatagctgtcattcctaagaatcctataaatagaggcagaacctacgatgtaagggatagacaatttttgggagaaaaaaaaatcttaaaaaattaagtgtagaaaaactcagaggttattactttgtatcgaatatcttgtattcttaaatatatcaagaacttagaaattgtaacgctctaatctatagggacgccacgtgtgtgattttataaaatagtttaatactaatagaataattaattattaaaaaccgtgatattattaaaaattttactaaaataaaactctcaaaacagacattataacgacataaaaaacgcgctctgaaaatccatgttataaaaaattgttactaaagaaatatatacggcaaccatttaaacacaaaattaaaatacacaatagatatagccagcccaaaacaactcctggcaattcgacacgcaggtcggtgatgttaatatgtacattgctatagaaggtagtcacctcatggtag

SEQ ID NO: 230484 - DNA, 1307 bp, Cannabis indica
gaaagctccattaatcattaaaagaaaaagttgcatatatacataatgttatgttgcaattcataatggcaaggcaaaagcatatgtgttggagcaaataagtgtatacataaatgtcagtaaaacatttactctttgatgaagggatacatggagttgagcttttgggaaacaccaagggcatcaagagcaagccaagcatttcgtgaaaggatcaaggctgcacctgtggctctaagcccatttgatttctccaacaccaatgccttaacaccaactctcttcagtgccactgcagtggctaaaccagctattcctgctcccacaataactacatcttccaccacttcttccattttccctctcaccctgttaatctttcttacaaacacatagtggcttattagtataatcaatgtgtatattatatatatatatatatatatatgttggaactggcattcaatacatgccgaaaatatatcccagggccttgtaaaaacagcaaagtccgttccaggaaacaattgaaaagaagacaagattcttgtttgaccctattaatctattattatgttgcacttcaacaaataaaagttaactccaacaaggaaaggattgtaataatactacattatgatacgttaaaaaaaagtattggccaatccaatataataaagtaacgatgactatgctttcaattaacttgcataacgttttgatcgagtgcgtagaaatggtaatatctcatacagtattttaaaaataaaacaaaaaaatttacataaaaaaaaaattaaaaaactaacttatttacaaaaatactcttactctaactattaacatttttactatcaatcaatatcaatatataagaaaagtatatgagacggtcactaacatcctaaaattacgttaattagttttatttcttctctcttcaattctcttaatttaaatttttttaataaatttataaatattaattattcaaaataataataaaattctcaaaaaaattactataaaaaatatcctaaatattaatatttaaatacagttcaattatattcatattcatctccacttttcatttatttttttaaaatttaattttaaaaattaaacacatgagctcggtaaaataatattataatgaatatatattatttaattaatatacttatttaaatatctatgatcctaggttaaatatgatattaagcaattatcttatgctttgtcaatatggccaaagaaaatctcttacaacacttcaaccttcctatttcttcatcgttgttcgt

SEQ ID NO: 230485 - DNA, 1436 bp, Cannabis indica
aaaataaaagttacaaattatctacatgccgaaagcaaacatggtgagtgaaaaaataaaaattctttctctttccctagtaatattgtatgtaacagaattgcttgcactattggtgcttaataaatttttattgctgttatgccgttattgttataataaagtattgtcattgaccaatggtaaagtgttaccaatataaaaatactcatacatattggtaaagtgttactcaataataatactcataatatagttggctcactataatttaaaaataattaatagtgaaaattaaaatataatattatatttagtataatatatttaatgttgggtcaaagtcagccatattgtataaaagttaatataatatatatttattctaattgcaatataaaatgttggagggtgctatatgtatagttagctacactataggagggtgtatacggtataattactttaacttttccacagagtcaatatattggaattattacataactttgtagacttacctaataaacttttaaaaattttgacattagtgaatattttaaattcctatgatcctatgtcacacttatttaacacagtcatgtatatataagtgctggacgggtatactataacgtaataacaataaaaattgcctcttacattattgtttcttagtatcataactcaccagaactaactcgatcgcttatgttatagtcaaagaagtccaggttggaaatttattttgaattcgatctgctatatatggtttccaatttatgattatttttccaatttatgacctatttacatcttttggaagtagtgtagctatgagcccatgggggctgctttttataacttcttttctgtatgctttaccctcatcatggcacagtggttaaaggaaacttccattgatttgcattaaataaaatcaccaaacaattaataataatataattagagcatgtctaatctataatagagcatgcataagactacgaccatttataattttgagtgtatttaataataactacacatatacatagagtaatagatacactataaaattgcacacacagtaatatataataaattttagtcatttaactttttaggtagaaatatatcacttttaattatatgatggagattaactacacatctttaaatttgtaaaaagtttgtataattcgagtgtgttccaatcatttctcaatttaatttcatacttaaagacgtagacaagggatgaaaaaagtttccaaactgaaaaagaaaaattacataataaaaggcatgtacaaaaaagaaatactacagtaatttggtaaatagatgaagaaaaattgcctttactttagaattgaaaattagattcattggagttaaactgtcatcaattcattacgtaaaaaaaacggaaa

SEQ ID NO: 230486 - DNA, 656 bp, Cannabis indica
aggcgaggttgtggttttggctatctttaatggtggaggaggacatttgggtatttctagggctttttgattgtcatgtttcagaactttcctccaattttggcttccgacgctgagaaattgatttcatcacaaagttcaccttttagttcaagccaaatttcaaatcaaatgggtgggaatttcatgttcaatgagaaaaaggccgtggagagtttgcagaagcaagagatttctttcaaattgattacttaaattttaggtaaagtctatattgatgataatacagcgtctagacagcgaagaagtttaaggtgggttacctactgctcatatctaatttacatgcgatataatttttattttctatttccttaatttgatctaattagaacaatgttattgtgtgtttgaatctagtgttgggttttgtgtcctaaataaaacccatttcaagataattagattactaattaataaagatgaaaaatcgcgttgtatgttacatggttcacatgatttgtttcatgattatgtttaatgtataaattctattaagtccaaaacatacataaatatatatttgttcatgattaatttatcttcatcacagtagaatataatcatgattatatgttcaaaagtttaattcccat

SEQ ID NO: 230487 - DNA, 1230 bp, Cannabis indica
ttttgatattatttttttttctaattttttattagtttatcattattttttaatgaaaatattgattgagatatctaaactagaaacattaattaaacaattttttcgttagaaaaattattgactatattttcatgtttttcatctatatgtaaaaagtgtggttacttattgatattatccaacaaaaattattgatattattttgattaaaatatataaatttaactctttattttattgtttattaaaatataatttatattataatttaaaagtgttaataaaattagataaataattttttatatagtaaatataaatttgaattaaaggtttaatcaatcaattaattagtttttttaatatattcattcattattttgcttaaaatatttaaatttaatttttttttattttattattaaaaaataaataatataattatgtaaaagtgttcattaaattagctagataggtatagatactttttcttagtgcaaatttaaactaaattttatatatttaaaataggggctttttctattttatattttatgtttaaattttattaattttatatatttaaactaaattttatctgatggaattgaattaatttaatttttatttattatttgaattaattattaagtaaaaatagcatgcaatgaaagtaaattttatcaataaaagtaaatataggtgcaatcttctgcctagtatgtatgtatatttatatctagttatttatggagataatatatgcatgcatgcaattgtgttatgccatccttttatttcatgtacagtacagtaagtagtcatgttttggataattagaatgtgtataaatatatatatttatatacgttgtaacaaaaccaagcatatgtgaatcttttaaaaacaaaacttaattaagtgagatactattttgaacttctgatccatgctagctattaagggccgaagcttatcataataaatatataagctcctacacggatttatatttgccttaactatcaattaatatattaccatattttccatctggtgaatgaattatgtaaaagaaaattgttcagaaattaatacacaatataccttgaataaacaaaaactagaaatacccaaagcatccaatgtgtatataaatatatatacttctgtaaatgttcaagtatatttatacaccagtatgtgatatatatatatatatagaga

SEQ ID NO: 230488 - DNA, 1564 bp, Cannabis indica
ttgtatgagccatgccttgcacagttttctatttgatcatagggcatgatcgcctacttttttgtgatgtacataggcttgttataggcgtttggtgagactagacttgtctctagcttgctaatgatttcatagctcataatgcagccgtcaaataatatatgggacatcatgaaatcaagaaattatagatttaaacccttgagcacatcttttaagagtaatgtgtatgatgttcttccccatgacattaaatgcacgtatagtaacttaacatcaagcagtgcaccatgctttgtctgtccctccatctcttctctaggttgagttcactcatagagaaggagagacaaaattgttatcctcctagtggaccctctcggagatgaccaataatatgcaattctcacaaattatcactccgaaagttgtctaatatggcatgtcccgtagtgtgggtctcattgccacttgactcactcctaatcagccatgaattttgggagaaattctataggcaacaacgctcttaattacgtagaatgttttatatgccaaatatagatgcattatgaattatttattgttttatttaaaataatcaatgatcctctacagatggtcaacaagtaggaacaaatttatcatttgaccttttgatgatttttattgttacaacgcttagctcatatgactttttttttatatgaacaactcatatgtttataaagactaaattatatcattaaatttaaagaaacatctatataaattatttttattttttactttattcttacttctcatattggtaacacattattattattattattattattattattgttatatataatattatattatatgtaatatatacgtatattatataatttttagagagaaatcaatatattaatttaattagtatatatgtgcatatacattaaaacattaaaagatttttatttaattgttaagtacaacaaattagtaaaacggaagagggtttcactgctatacttttattaggattgtacatgtaacacgggtgtcgaatatgccaaataattaatgttggattctcaatatctcttgaattataatgtaaaataatttataattagatttgacgttgaacatattgcttatatatatagacaggatgagatgatgaatgtaccaatggacaaacaaaagagtactcgtgtatgagtctttctttgtcagctaataataagcttaaacatccaaaattaagccacaactctctctctctctctctctccatacatatcttcttatttctccagcaatactttgctctctatccatggcggagggttttgaactttttcatgtaccccaaaggtagtgagaacagaaaataaactccaatattctgcaccattactcttccaaaccagtcctactcctactactcctcgctcacacaaccttcactctccacttttcccccaaaccgacgccgtccttttagttttctacaactgaccaaactctcattaccgtcttctcatcgccatgcaacgcccaccaa

SEQ ID NO: 230489 - DNA, 931 bp, Cannabis indica
ctctctctctctctctctctctctctctctctctctctctctctctctctctctctctctctctctctctctctctctctctctctctctctctctctctctctaagggcttgagtttatcagactcggtgttcgacgagttctaagttcgtggttgataatgggctttggatctaaacttttttttatttatttgaatttttatgggcagcaatgagcttgtctactcaaatctcgtcggcagtggaaaaacattccaagctccagcacgatcaaggagagggagaatgagagagaaatctagtattttgaggttctcaagcattggcaaaacggaccagtggcgtggctgtcgtgagggttggggtggctaccatgagggttggagtggctggtggtgggaatcgacatgtggttggagatgaagatgaaaaagaaaaaaataataataatttttaaataatttatttatttatttatttttattataatttttttttaaaattaaaattataatttagaccattaataatttggcacgtgacaattttgaataagtaaacggatctgttcaagttggaactaacagacttacaaaacattcaactttgaggactattgccgctattttttgaagttggaaattaatctgtaccaaggtaaacttttagaagacttttgccgcaaatatccctttaataattctttgtaaaattaatttcaaaaaaaaaactttgtaaaataacctcatacactatagacaactggtccaatttttcaaataagtggttgaaatgtaatgctaaagaggtgatagcatcttgtgaagtgtaataccgctcttagtataatttaatatcgagtcccacttattttattttaataaagattataaaaaactattaactaattataggacgccacctcatag

SEQ ID NO: 230490 - DNA, 2248 bp, Cannabis indica
atgtacatgcaaaaggctataatgttctaatggccatactctaactatccatacaatgccaacatcccctggcaaaaatttccaaaattaccctatagttaggaatgtaactctacaggcaccattttaccattttgcatatttcagatattctagacctatcttgatctaagtatttctatcctagatacaaaatacaaagagtcaacaaagtgttgggatacttacttggtatatgagtagaaaatgaaagattgttagggaaatatgcccaaaagttgtgtacctagtcaatcacacgatcgaagcgcacatcaaaatccttgttgggctaggtgtggaataattcaaggtttaatggctctacatttggaaaacgggttgagtgaaggtttataaaatattgaatcaagcaatcaaaaacttcttgtattcaccactacaagcgattgcaaagttaagggtttttctaaaatgtggggctctagtttagagtttgaaggcagaggtgttgaaaagtttgaagtactgaaaaaagagaaagtgggtttgatgaatctatttattctttggctaaatcctttcaatttgaaataaaaggtccagatcctctctccaaaaagtacaatttggttcgacggatggaaagttgaaaagatggaatttaaaacatgcttagggcatttatttttcatcatttcccacctcgagttccacatccattgaagaatggtcatttcaatcaacctgccatcattacaacttcttcttaaagatgcacccctacacgcgcatgttatcaacgaacacattaaaggcacaacatgcatgccatgacgtggcaacaatggttcttggtcctataatgatgatagctcaaggaatacatcactgatcccaacaatcaccacgtgtcgtaaacaagtatccaagaggtagaagcagacaccaattaagctctcacaatttgaagagtcttagaagcttgcaggtaaattttatctgtgtttttgagcaggtcacacgtggcataaaagtggagacatagtctcataatctcactaattaaaatccctcagtaaaacacaatgatagagaagtttcattgatccaggaacaggtcaatactgagagatatgcagaggtccaccttgccttattttacttcccaaacactgaagacatattaccaattcagaacccggagtggcccaaactcaatgtctacacaaacgatacccagacaggtactcgaagggcctatcacagacacttacaacccaaaagggtcgtaaacgtctaccttgtatacaaacaccaatcacccaacgatgattatgctttttttgcacaggatcagatcttgtccccttcgccaggacatggtagtgcgcgcacctcacacacctttttgccagatgcttattccaataattcacgttttcaaggtttaaccttttggcgatatgcaaccattacgtacagtggtcccctattgttaagctgcttcaacgcatgagcacaaatcttttcaagaggcccaacaatcagctcttttttgcatgtgttttacccttttagtgggctttttgtagaaaccctaagcgattcatggtaatgtccatacacgcccttagcctataaatatccttctattttcatacaaagaagggatcacaacctagatcaccgaagctctactaatagcattctaagctttcctcttattcaagagacaatcagaataccgagttagggtttcatgctaaaacactataaaatcattaaacacgccctttgaggctaatagtctaactcgtgaactaaggttaattaacacctgaaccacgtaaaaatatccatctcatttatttctgcattttattatttcttaagctcttaaatatttattttccaaatatattggtaaaaaataataataaaagaaaggcttttactgacacatttttgcaccgacgacaaaacaaatcctaaacttgcaaacctaagactttttttgatgcataagtgcgtcagtataggtctatcctaccaaaatccatttggcaagtaaagattttgccggcgcattgttgtcccggcaaaacctttactcgccaaataaaaaaacggacaaaacttttgtcggcacatatatgtgtcgataaaatatattttacccgtcgaatgacggatttaggatcctagtttagaccgacgttagatttttctcagcacaatatggcgc

SEQ ID NO: 230491 - DNA, 920 bp, Cannabis indica
tcttcagttattttaaaataacctatgtcttcggttattttaaaataactaaagataaaggtctctatgagctatcatgtcttcgtttatttccaaataatcgaagatctaggtctgcaaattttctcgttctttcccgtcctacttttcttcgatttttatattttgtatcgttaaaaatcaagtatatagactatatttctagtagtgctgacgttaaaatcccttacaaacctttcagaaagcccaattttctactagtgagggagtgatccctctttcatttggacaatatctatgatctttctcttgcactcttcatggattccaccaaaataaatataagattttttttttattacagaacttttgaaaagcttcaaacacattttcacataatcctcattccttttgtagaaaataataagaacatcagcaaaacaaaaattaattagtcttaaattcttacaaagaggatgataaacaattttttttttgttaaaataatgagccaacaatttaaatagacaccatatcggaacaaataaaagaggagaacactagaaaaaaaatagctaacaaatttctatttgtaaattggactgcatgagacgtaagaatgacatcatcatgacagtaatcacgcgccaaaaattagtcaaacgaaggaggactcacgcgggaaacagttgtgttgtggattagtccgtgtttaacaattttgacattttctattaaaaaaaaaaagcaattttgataaaaacaaaagattaaaaaaattttgaaaaacataaaaataaaaaagtaataaaaaattgaaattccatgctattatttagaattaaattaaaattattcaataacttaattatctttttttttcttctacggaaattagtactatatatatactgaaagaa

SEQ ID NO: 230492 - DNA, 749 bp, Cannabis indica
taattatttcagttatccaatttctttatatgttcaattaattttacactttatacacaatttatatatatgtttcaagtttttacctaaaatgtctaacgtaagatgcatggactactcatggccaattaattttaaaaatggaattctatgcacgttaccatacaccttaccatacactcacacgttcaacttaaattatggtgctgcaattttagttgcattttttttatttggaacaaagcaatctacttgaggattaataccacaaatttttccacatttaatttctaaattaatcccaatgtgtaagagagaaaaaagaagtgctaattttagagttgaagtatacttaccattcaaatttatagtatagttaatttagtaataatctgttggaaattgctggtgctataatttgtatcaggactataaaacaaatgaaatccaaaagcaacagtaattcattcttcattatttctttctaaaacaaaaacaaaactcctgaagattacaaaaatggatctcaaacgaaacacgattgatgcaatcatagctttgctagtatttttgatgatctcagtctccgtcaattctctcacatttgatgtgaccaaatatggtggaaaacaaaattctgatatctctcaggtaattaaccacacatattttcttcatatatgtataaagaatgagttacatttgaaacaaatacctataatatacatgttgtttgtttatataatatt

SEQ ID NO: 230493 - DNA, 1308 bp, Cannabis indica
aattatcaaataatatattatcatttatttattaataataaaactaattaaagtttcccaattaataaatatactcttcaaattctatattatttagcattttttggtagatcatatttaaatgtggtatgtattaaataaatcgtattataatatttgaacaaaaatttttattgtattatttattatcgtcataaattttaacgaatcgtattaatacataagaaattatccgtgttataatatttttagaaatagtctgaggccaagaactgggttcgagtggtccaaaaggccttagtcagctgatctgaggtttggataaacatagcaaatatagtattttatcaaagatagtagattttacataatctattaatataaatcaccactaaatataatattgaattaaataatagtgtatcaaacggatgccttaattttgtattgaggttatagtaaaatgcatcaaatcaatatgcatgatgcataatgtatcgttatatttagaggtagacagcattcgatatccaatcgaattgaactgaattcattcaatctaatttaattataaaaaattagatatccaattacaattagatttgattggatgttaaaagttgaattttaattggattgattatattggatgtcaatctcaaagtccaattaaaaactgatctaatacaattatatttatatatgttaaaaaattatttttatatttatttatataatgaaaaacattaaaaaaaatataatatatattaattatatttttattggattttcttttgtgttgaatttgtaacacttaattgttttatgtatttattttcatgatgtttttgttttattttattatttagaaatattattgttttaattatttgaaatttttaattgcattatattgtaacgattgtatgtttataaatgattaaacttatataaagggtggaatttaatttttacttttttttttatttttattaatatttaaatataggtgtgtaattagatatccaatttaattagtaattggattgaattgaattttgaagtctaattagattagatcggatgataatttttcaaatctaattattaattgtaatgaattatcgaatgagaaaaaaaaaagttggattagagcgaatagccactcctaattatattaattggatgcgtcaatatactaataacatgtcattttcttatggtactttaaacttgagcctttttcattttgaccgcaaaaattaaaaaaattttatttaaaaatataatttagaattatatatggtg

SEQ ID NO: 230494 - DNA, 857 bp, Cannabis indica
gaggtaaatttaattaattgattaataaaaatagtatttttcaacttaccccgttatttaagggggttttacaaaaatactatttttttataaaataaccgtaaaacaacctaaaaaacaaccgtgaaaacttaacacagtacacagtataaaacttacacagtattataaaaaaagaactttttaaaaaaaatctgccccacagtaaaaaaaaaaaagtaaatagttggaaattttagtgtggtgtaaaaatctcattatttaataaagatcttaaaataacaaataaattaatgtttttacggattatgtaaatagtggtataagtatttaaaatgttaaatttgtaagtgatataaactcagtatttatttttagcggcgtagatacttaatatttgtaaaattatactctaactttctcattatatactttgttattgttttaaacaaggtacatataaagttcatattctaaattattaggtctataaaaaagatatagtatcaattacttttaaatgttctagactaaatttaaatggagtctttactgacgaaattggagaaaaattaatattttacaaatattgggtacttatgacactaaaaataaacattaaatttatgtcatttacaaacttaaaactttgtgtacttatatcgttaattattctatatttttatttttaatttttacttttttaatgatttttgttctttacgtattatttttacgttgcagaaatattgtataatattgtggcaaaatgaaaacaatattattttttctcgaaaaaatcaacatccatatttataaagaaaaaaatttgtaaaaaaatataaacatggaaagaa

SEQ ID NO: 230495 - DNA, 745 bp, Cannabis indica
tgtaaaagagagtgcaaaaaagagtttccctagcactcctcttaatgaaatcaataaaaaacttagagcatttaactgtaataattatggttttaaaactagaatatacatatattatatattgaggcagattcggagcgagcatctattccttcgctcctgctctgaacccgactcgggtatgaatatttcaatcaatattccatacttgtcctgaccccaaaattcaacccccactctattaggggtggatatcctaacccacgaatataattgtcatccctaactgctagagtagtatagggtcgtctatagtttttataagacttaggacaatttaaaaaatgagtttttatttgaaaatgaaattcgaataagtttttttatgtttttctagataaaaaaattaggaagcctgtgttaggaaacactgttgtaaagaccgcatatggttaataccttgaattattaaataattagggtttatgtatgagatgttattatcattaataaaatacaattatgggaatttaattgagttcatttatgtttttatgttattatgctatttaattacccaattcctgtgttgtgttcggaagctgtggagagcgatgttgggcctttagagagtcgtattgtatataatttagaatactatcggggtattattgttaggtattagaggtgttgtgaattggacgggatttgtaaatgtctaaaatgcccttggtattgtttaacc

SEQ ID NO: 230496 - DNA, 944 bp, Cannabis indica
aaaatactctcatattatatttcattaaaatctactcacttttgtgggttgcctaatataccctcaccctccacttgtagcacatgatttacattaacctaagggctataatggggacatcatatataaaagtgggtatatcttaaaggatatgaaaatgaaggtaaaaattaaaattgataaagtaaagtgggtatacaatgcaatttcctcaagtaaaccactacccctcttatttaatttaatttaaaaaatatatatataaaaacaaaaaaaaatgaatgaaaaagataaaatataagattttaaaagatatttacaaaaatatggcataaataatatccatacaattgaagacaaaactaaaaaacaatatgtgtcgtttcaggctagacaggacacgcatttacaacacctgtacaggcatctagggctagataggatctaatctgatttaattgaaccaaatcaacaaaatccaatctaattacaaaaaaatgaatatccaattataattgaactagattagatttcaaaagttggatgtctatttgaattggaacgattattggatgttgatctcaaaaatcaattcaattcagttacaattaatatatattaaaatattatttatatataataaaaaatattaaaaaatatttattataattttttaaacggtctcttatgtaccaatacatttaggtattattcggtaatcattaaaaaaacaatttttttgattaattaatacaaaaatcatgaagaaagtataagactttgttaagtaaaatttaaaaaagacaaaaaacaaaatgattcccgaacaggcctttagctaattacttttacctaaaaaataatttaactccacctaaaactaaacaaatagagatgtggagctcatttgtaaaattcctctgcctgcattgccagaaactgat

SEQ ID NO: 230497 - DNA, 1768 bp, Cannabis indica
ttctcatcatgcattggaatggtctttccttccatttcaaaatggaattgtcattccaccaaaatagtggaaagaccattccattggaatgacattccaacactttaatatgcaaccaaacaaaagaatagaatggagattatttcttttccataccattccatttcattacctccaacaaatcgccaccttagtatttgctcaactcagagatgagggtggctaattcactatataggcacagttgtaaattctagaatggaaaatacatttacagggaaaatgattttgcatagaaatacacggagaatattctaacaattttctagcaatagtacaatttgttatataagggaccacaaccttcaacggtacaataacaacaaggaagggagattaattaggtgagattaacacaaattttagctcatttcttaacactcctcctcgaactaagaggagttccaaccactccaagtttgtcacttaggaaatggaatctgtgatgagtaaggctcttgagtaagcaatttacaatccagtcttaagaaggcacacatctcacttcaagttatttctttaggactttgtctctcacaaaattcatatctaattcaatgtgcttagttctagaatgatatataggattagagacaagagcactagcttccatgttatcacactagctgataggaacattatgcaatgaaaattttaaaacaatttagcaaagcttgtatccatggaatttgtgctgcctcatgagcaagtgcgcgatacttagattcaaatttcgaatgtgactctacaacttgctttttaatggatcaagatgcaagtgtgtcacctaagtaaacacaatagccaggagcactttttcgatcatctggacaacaggcccagtctccatccgagtatccaacaatgtctagctaatatgaatatttgatgtgtaggctgtgattgattgttccttttaaataccttagtattctttttgctgcagaccagtgagttgttgtaggagcttcaagatattgactcaacttatttagtgcaaaggagagatctggccgagtatgaatcaaatactgtaagcctcctatgatactcgtgtactctataggttgttaaagtaactcaccatcagattttgataaagattttccaacagtcacaggagtggagcaaggtttgagatgtagcatccctattctggtgagtaactccttaatatacttaacaagactgagaagagccatgctttatcccagtaaacctcaattccaaggaaataatttagaaacctcaagtcttctaaagaaaacattgtgtttagattggtcgtgaatgtttgtaacttgctcgagtcattccctattatgattatatcgtctacatatataagcaccataataattaaattaggtgctttgtagaagaaaatggaagaattagactttgaattctgaaaaattccagcctatgagaatagactttagtcgaacataccatgcccgaggagcttgtttttagcaatataacgacttgttcaatttacacacataatcaagtttggcttgatcaataaaaccttttggttggctcatgttcacagcttcctcaagctttccattaaggaaagtattgctaatatccaattgcctaatgttccatgatcttgagacaacaatagtgagaacaattcaaaccattgagggtttgatgaccagactaaaggtttcactaaaatcaatgcctggccttt

SEQ ID NO: 230498 - DNA, 769 bp, Cannabis indica
tttgggctcttattattaatcacctaataataatttctctgagttttttcattcttcaaataatggtttctgctgaagttgctcgaacttttgttggtatattaggtaataattatgtgttaattattattattattataaactactcataattcatcacttttattttctctaattacctactttttttttaatgacaacaactattatttttattaactagatttttttattattattattgtggcacaattaatgagatttgtttaactacaaagtaaatatatttactacaccaattaattaagttaaatatatatgtatatgaattttattacagaaatcttcataattttttgcttattaattaatttgtttataataatattaataaactgatattgtgattcatttgcatgcatgcaggaaacatcattacactctttttcttcttgtccccaatgtacgtaaacttattattaattatcaattattaattattatactttaattttctggttccaattttaattattcttaaaaactgggatcgatttagaaataaaataaatataaaaatataatttatattctcagagaaataaactccagtttcatatatttaaaattgattagtaacaaaacttagttgaattagaaaagatcatacttttgatttaattagacttcatacaaatattaagaccaataactatatatcatcactaactatacgagtgaaaacaacaaaaaactattcatcaaccca

SEQ ID NO: 230499 - DNA, 1342 bp, Cannabis indica
aattttcataatataaggtaccctttaagtattattggtaatgtaaggtaccaaatatatattttaataaaacatgaggtactgattgtgtatattcccataaaaaaaatatagatgaaacaaagtagaagaaaagtatcgctagagattaaacttaaaatggcagttagaagaaaatggaagaatacgtgtcaggatttagtatgaaaatacaattgaatttacgaagcagctgagataggggctttaaagtaaattaagctggaggggaataagagacttattacttataagataagatgtttgcttaggatgtgttcttccatataactattttttttatttatttaatttattaaattaatagaaattttgctctttctttttttagccaagttaatcaaaaaatcttggattcgtggttttgcatttgcattgttgttattacgtacatctaaaactggatggatgagttataatattggagaaattataatcgacactaatagagcaggggctgtctcaagctagtgagggatctagggcaaaattaaaaaacgagactttttttataattaattttaatataatatcaatttaaaatttaattaattaagagtatttttaataaaatattaaatttataatgcactattatcgaaaacgtgatgtgttaatacttttcttccgtattaatcacaattaatactaagatccatacatacaatttagtcatctagacggtgatttcaacaaaccgacaaaaattattgggcgggttaaaattttttttttttttcattagacgggttacaattagatatttgcaacccgatatttatattgagttggtaaaaatacactataacccgaccaaaccgatgaacacttctaggaaataagagcatgtttggtttattggaatgaatattgtaatggaataaaagttaccattacaatgtttggtttgtgtttttaacctttgtaatagaatttcattgtaattggtattacaccaaaacctttgtaatagaattccattgtaatgggtattacaccaatttcatgaatactcattatactcctacaccacatgaatgaatgaggattacaatcactactaaataataaaaagataattttaccctttctctttctttataaataataactaaagcaaaagtatttttgtcaattcaatttcgattacaatgttcattataaaataaactaaatatagtaatagtaattcctattactattatcattacattctattactacagtaaaacctctatccaacgaatacacttagtaaattatattctaattgagagattat

SEQ ID NO: 230500 - DNA, 929 bp, Cannabis indica
aaaaacaagatacaccttgttaatataagtatagtaccaatcaattcatttaagttctttgcaactgtgtagtctcatacgtacacagtattaaaatcatcacacttaaccttctccatgatctccaacatatatacagtactttaaatcataaactgacttgactagctaaaatatgacattacatgttccttgttgttgttagacagtactattataagatgatgtgctataataccaaggtatcaagtttaataagatgatgtcctataataccaaggtgtcaagtcaactataagatgatgtaatattatactaaaagagtactctttagcatttattaatatattgaggttcaactaaatgttcttcgatctccctttcaccttgaatcatgcaaatttgattttcttaattgtgtcttttttttttttttgaaaaggttataatgtttgtgtcttctaaactcttaaatttcaacgaaatttgaagcaaataatgacttaaaaaataagcgtatacttaatattgattgatggtacatgatatgtataatgtattatgcccaagttgcctctagtctaatattttgtctattttgcattgaagcatgtaattttcagttttgaatatttgtactcactactgaacaaaatggtggactcacatttcatctttgactattcctaacggataaaatcctatctcaacaaagtaggacctttcatttgatattaataaaagagcattgttattgagtatcagtggtgtccagcactttttataggtagcgtcctatgattagttagtgatattgtttaaaagttattttttttaaagttatatagaacccgatacaataattacaccaatagcggtatgacaccaaagaatgtgctaggcactaatggtgccttttagcaattctc

SEQ ID NO: 230501 - DNA, 2328 bp, Cannabis indica
caatctctacaaaccggttctctctttttcaatccaagcttacaattgaagacatcaaagattctctagatacttcaaattgtaacctttagggtccgtgttaggggaattagttattctgttattgagtgtttgtttaaatcagttagttgttacagttggctctaactgatttctgctatcattattttgttctccttcatgtaatcattggctatataatgccaacactcattttcattcaatgataagattttcctttgtttcaatcttctcttttcttgcctttctctctctttcttcatctttctcttcgtctctgtttttcctctgttttctggtaattgttgtttgcttgagtgttcatcaatggcaaagagattcaacatgcctgtgtaacaatcttaattattattcattataattatacatacgattgacattattattatatattttacacatatatatatattatatatgtaggtatcaatccatggataaagtacatatttttaaacgcaaattggttttaaaccaaatggtattccaatataggcatgtcaaaaagatccatttagttggatcgggttggagctccgacccgacggttcacgtctgattcgaaacattcagatacttattagatcttggatcaaatccgctccaccccgcctaatttttttctggatcagatctgatctgatccgacccgattacaatttatttaaagaaaaaaaaaccttaattcaagactcggatctcttgggacctggaatcggactcggacccaaacccggactggacctgggacacggacccaaacccagaccgggaccaggacccggacccaggacccaaacccgaaccctaaccctgaccctgacccgaaaccgaatccaggaccctaatccaatacattgatatccaggtgggcaagtattttgaggggagcaatttgtttgaccaccacattgtgacaaactttccttattcaaaattatatttttaatagtcccaatcttttcatcttgaccttaattatttctgattctgattgatgatctgatgagtagtgaagtagtggattaatattattgagagttctctcacctgaaattgcaaaagtaatagatggaagaaacatcatgatcataatcatcatgaacattacaccaattttattagtactcttctccatattcatatataatatatcgatggatcacacttgtatgtactagtaagttattagaacattgctattagaaattagtggtgcttagcaccttctcgacatgtcatgttataattggctagcgatactccctaaaagctattatattaaattatatgggacccgataattagtttgactaataacaatacacataggaaggtgctaggcaccactagtaccctttaatatttctcaagttattatatgtatgagttactataataataacaatatttatagcacttatagtagtagtactatagttcaattgaatattataatatgctcatattaatattaattacggtgattttttcaagacattatattaatgaattctactagggctcttatcttataaaaatatcatacggttacctaatctcatatgttatttcctaggatataaaatatcgagtagtaataaataacattaatagtactaagtattttttagacgtgtcactttttaattggttagtaatactctctaaaagttattataattaaattatatgagacccaatattttataccaagaaggccaatactagacactattagtattttttaatatttttcttatcaaaaatattaattagtaattcaaagctcctccatatataaatatttttttttggtaaatcagctatttttattaagcatataccaattacaaactccaatcaaacttacaacatgcacgaacataattaaaaaaaaaaaaatcagaaatatcaaattagcataaacgatgaaataattttttcaggtaaatgcaataatattatcaattggataaataataaatgtccattatcatttatcataacaagatggaaaagtgttaactggcacttaaagtttcaagtaatatagtatattattattagtgtatttatcatttaaattatataagaaaaatattaaattattatattattcaaattgactaatagtatatatatatatatttatatggaacgaggtttcaatgggttacatttttattgtaaccatcatacatttttttaagccattggattactatttaaatggttgtgattaatttggaaattaaataaaaa

SEQ ID NO: 230502 - DNA, 1461 bp, Cannabis indica
gggcataaaacccaacacgtgttggcatagaaccatggtggatgttggcagcaacatggatgacactttctgcaattggctactggttttattcagtcgagacaggcagggagagatggaggaagcggctgtggttagttggtcaatttggcgtgcccgtaacgattttttttttgcaacaaaagagccatactactgcaaatgtggttgcttcagcaagaattctgcttgatcaataccaatccgctcaagaaagaaagggtatttctttgtctctgttaattgatggggaccgtgtggttgagcgttggactacaccttctataaataagatccaggttaatgttgatggtgctttctttgagcaagaaggtagatttggctttggttgtgtggctcgcgactataggtaacttggtggaagctttattatgggaaagatagggcgagtgcaacctgaaatagctgaaattgttggcgtaaaagaagctttaagctggattgaccgtcatttgtggggacaagtaattttggaaactaatattttagtttgtgttcaagctgtgcaaagccaaatcactatgtcatcttcttttggccttttagttcatgatgttcgtgctcttctcttatctttaaacaatgttgagttgtgttttgtcaaacgatctggaaataagctggctcattccttagccagagattcttgtttctctatagctcgtgcgcttcagttggaggattgttcctctgaagtgcgttctattgttattaacgattatacttgttaataaagttgttgaattttattcaaaaaaaatcgaattttttgtgcaatttgtatttagatttttattttttaaatcttaaatctaattatcataataaaattcattgattttttttagttaattttagatattagtagattttgaatttgaaaatggataatatctaatttttttgcttaattggttatcttattttttaaaatttgattattctatcttatttttaaatataaggtcagatattttatattttatattatttaattaattttataaaatgacattatttgaaatttaaaataaggtatattttattaaaataatctagaaaattttaaaaatctaaccagatattttgacaactttctaatttttattattttatttaaattaaattacaaaattagataaatgatatttattatcattttattttaataaacatttaattttatttcttttcaaaataacataaattttgaaaagttagttggcattttttaatagatatttaggtttcttaaaatctaattttttcaaatttatatgtttaattttaaaatttattatttaatttaattttattatttttgaaaagattatttatgtatttatcgaaaaataatttaattatttaattaatttaaattaaataaatcatatatctatc

SEQ ID NO: 230503 - DNA, 1135 bp, Cannabis indica
attaagtatctgggtgttaatctaaggccaaccaaataaaagatctcagattgtgtttgtattcttgacaaggttaataagaaccttcataattgggctactgggaacctttcttttgctaggcgtgctcaactaatccactctgttctcttgggaatcagaaacttttggatgaatctcttcatcctccctcaaaaggtgacgactgcaattgacaagagttgtagagattttctctggagggttaatggaaatagaagtaaattccatcttccttcttgcgaaaaaatctatctcccaaaaaagtttggtggaataggtttttgagaagggaagaaatgacaaattgctcttatggctaagaatatattggttatctctgaaaaacaagataacatttgggttaaatggatcaactccatctacctcaaaggctgtgatttttggcagctgccttttaaggcagacgacagttggtacttcaagaagattttgagactcagggattcaattgattgggatgctcttgatagtgcaagtcagaatggtaaattcaaagctaatttttttttacaatcctcttatatctactggaaaaattgattatgctcctaagatttggcacaagttgattgttcccaagcacaagtttatttgttggcaggccattaacaaccaactcttaacaataactgtcctgtttgtgagtctcatttagaaactcacgaacacattttcttttagttttgtttagccaaaaaggtgatgctagatgtaaatacttggtttggttattcttgctggccaagtagttctgagcagtggaagatttggtgtgagaaaccaatgaattgtttgcaagataggttgatgaatgttgtaatggctgctgtcattgattttctttagcaaaataggaactgttgttgttttaaaagctactgctggttttattagtagggaaattaagtatggtgtcaaatattgatttctcagcattttcttgaacaggttaaaggggagggatatgtatatccaaaatgtaattaagggcttgtagtttccttttgagcggttgtgttcggcaactgccttttgtttgtgttttgaataaaataattacattttttaacaa

SEQ ID NO: 230504 - DNA, 1772 bp, Cannabis indica
ttctattatttgttttagtgtgattacaagcgaatcccaacaccctatacttcaccaatcttctaattaacatttataaaagtagttgatctagttacacatcaagttaaacacacaattatttttatttttccaaacccaatacagaattccagctaagacagcattataaatctgaaattttaagtcataagcagcgttttgaatccaatcttggaactcgacgatattccttggccagttaaaccccaaagcagttgctaacataccgcagcaccaactttgtgaagtggcagtccataaatagatggttatgtgtctccttttcctgatcacaaactaggcaaagattggattgaataggaagaattctatccaaattgtccagttgcaaattacaagcttgccaatagataaacttgtgctttagaatgataagcctatgccaaatagccttaacatatccaacttcctgattatataccagagaagcatagtaaagtttagcccgaaacttcttatgcttaacacaattcaacaattcatcttctctggtgtgtcccttattttcaaaatcttcttgaaataccagcttatactttaatttttagggacattccaaatgttaaaatttttaaggtaaatggtactcacccatctaacccaagacaatcttttttacaagagatagcccaactatatttggccatcatggccatgttccatttctttccttcataaaagctgattccccctaatttcttaagaatgcaagtcttttcccaatagggaagatgaagcttactcttattacctttgacaccccaaaggaaatcacgacaacatttgtctatagccaaagtgattttcttaggtaatatgaataagctcatccagaagtttctattgtcaagaaggacagaatggattagttgagctctccctgcaaaagaaagattcctactggccctgcaattcaattttctgattaggctatccaatataactccacaatcagaagctttccatctagtaggtctaagatgaacccttatattttaaaggaaaagaaccctcttgcatttgaactaacctcagaatttgaagcttggctcgtccttcactcctccaaaatagatgtgcgatttggagttgttaatagagactagaggagtcacaaaacttaataaacaccctcttgccctctttaccgagctaaggctgccctagatcatcagcaaagcacaagttgataagacccagctgcttacaatggggatggaaattaaagcccttattctttgaagtctaagccaaaagccttccatgatcagaacaaataaaggagaaataaagagaaataagccttgtaagaatgaccaaataaagtatattctaattgaaagattataattaaatagaattattaaaaaaaattaaattactaaaaaatatcaatgtaataataaaataatagaattatttttgagtaaatataatatttatacatatattaatttagaataaaattattaattttacctaaataaatttacaaaatatatgtatatattttattaaaatgtaattattattattatatagaagtatattttgttaatagggaacttaaaaattatatattcttatttataatgagctcaatgagtgtgatacaatgaagacaacgactttaaatgattcaagaaaagttaggtgagatacggtgataataatgagtgtgatacaatgaagacaacgactttaaataa

SEQ ID NO: 230505 - DNA, 808 bp, Cannabis indica
cataaacaatcactgaaacagtaaaattgaatgaaattaaacaaaagtccttaaatttaacaatctcaatagtttggggagaatttttaacgaccaaaaaagttcagggggcacgatttactgcatgtcaaagttcaggaggaaaaattactaattagccttctataattgattagcgtttttcacctaacaccactataagataacaccctataattagttaagaatttttataatttttattaaagtaaaataaatataaccgatattgaatagtaccaatattgatattatgatgacctttagccattctaagtcattattgttgctgtattaaacattatcaagtcttatcaatacaatttaatatcctatattacatactttaaatttaaaactagggtaaaaaaataccaagtacttgtgttaaggctctaatctcatgggtagaaagaaatcacaggagattaatagcaatccttgtaataaataccacatgatgttggtctcatatataatagggtagttgtccgagtgagtacagagtacgtgcctacgtggtctacctaaaacaataaaataataacaaacaacaacaataatgataatgataataataataataatgaacgtattaaatgatcagaacagattatattaagttgaagagaatcacgtgcatgtcatatatctatttaatcaaacctcctcactaggtgatgatcattaattcttaattagcaattggtcaacggatcattgtcaataagtggctaataaactaaataactcccaccctcggtgaatg

SEQ ID NO: 230506 - DNA, 658 bp, Cannabis indica
ccaaaaatgtaaatataatggttgcttttttaataattacataaaaaaagaatataaatataaatataacagttacaaacacaagccgtcttagctcagccggtagagcgcgtggcttttaaccacgtggtcgtgggttcgattcccacagacggcgttgatttttgtattgtttatttagtttgttttcctttcatatttaatattaatagcacaaactttttgttagctctacaacttataaggcatattttgacacatctgaaaaaaaaaaattaaccatgcaaaataataatattaataataatatatatttttttcttttacaatttacaaataattaaattcaaataggcaaggtatcatcctatttatggaatataattaataagggaaacttttataaatattttttaaattaatatcaaattttaataaatgtagcttgattgcgtagtagcttagaacactcttgagtgtttctttgtctttatatacttgtcatttttcaacttctaggtgaaatttatctgtcatgagctttgcattgttgatatcaacttttgaatctattttttatagttgtttttcaacttttctaccatttcttcagcaacaagatttgcatagtcaacaatgtcgaattggttgttgtcac

SEQ ID NO: 230507 - DNA, 1359 bp, Cannabis indica
aaggagactatccatggcagccagtaagcccgatttcaggtatcaccccttaagcaaaagtctcaaaattataaatctctgctttgctgatgatttgatattgtttagtaagggtaatatacagtcgattcaggttctcaaggatattttgaatgaatttcatgccacatcgggcctagctatcaacactaataaatcccaaatttatttgggaggggttggaagtaaggccaaacatgaaattctgagagagataaaccttcatgaaggaaaattttcgttaaaatatttgggagtcccgttgagaccaacaaaatagaaagtggaagattgtaatgtgatccttaagaaaatcaagcaaaggctccacagttgggagagtagacatctgtcctttgtaggaagatcgcaacttattcattttgtcttacttggactccgtaattactggatgagcatcttcatactccctcaaagtataacaaaggagattgaaaaactttgcagaggttttctttggggttggaatggaaataggagtaagcttcatgtcgctagttgggaaaaggtctgtcgtccgaagaactttggtggtttggggttcaaggatggtgccaattggaatcaagcggttcttgcaaaatatatttgggccatttcaaacaaaagtgattctctttgggtgaaatggatcaacaatatatatctaaagaactcatctatatggacctatgatttaaagcttgactcgagttggtattggcggaagcttgccatgtgagagacaaatttgacaagttggacattcaaactgcaggggcttcgggtaagttcaaacctcatctcttgtacaatagtaaattgtctcaggttccattcatttacaacaggagtgtgtggagtttgataaatgttccgaagcataggtttatcttgtggcaagctgtaaatgatcagctattaacaaggaacaaaatgctacaatttcgggtcttgctggacaatgttgagtgcccggtttgtactgatcagcatcttttctttgagtgtaatctctcctataaggttgcagatcaggtgcaaaagtggctgggagttgggggctggcagaaggagtttcaggcttggaaaaactggttggtaatcaacagcaaaaacaataatagcaaaatttgtactgctgtcatggcagccacggtttacaggctgtggttaaacagaaataattgtatttttaatggttacttgagcacaatcacatgtattgtacaagatattaaaaaaatcatgtattatagattaacaatagctaaaagagggagcttgaatagacatgagaggaacttcatagagcattta

SEQ ID NO: 230508 - DNA, 1629 bp, Cannabis indica
tcgtccgagtatacacctcgacattatgttgttcgatgtccttataagcatctcgcacatgttaacgacaccatcgtcgccgttaagacaaacttggcgtattttactcaccaacgatgacacttcttcttctcgtattgattggaaggagagaacccttttggagcttagcatttcctggacgcagagcttcctagcttgacgccagttgttgccgtaagaagcaaagacgatgtcttttccaccgtagaaaaggacgtctgaagctctggtattgaaccggtcagagaaaacaacgtcatggtttttggcgatttcttttaccatgtctggagacgaaacgaccacagtcgggacgctgccaaagtgtaagagcataagtgggccgtacttttgagagaggtctctaagggaacggtcaacgtgttctccgatctggtgaaggttaccaattatgggcaatctcggcggagatggtggtaagttgaccggttttgtgcggaaaaagcttttgcgaatcaggaacataaaagaaagaagaagagtaataagtgagagaaatattggtaagtcttgccatgacagatagacgtagttatccctttccatttttgtagcttaggcagaaggtatcatttgaaatatggcctgaatttcaagtatatttatgggaaaaagttgaagtgagtaaatgaaccatctttactaatcttttatatcattatcccactgtacttgataagaataagattgcatttgtataactgtattagtgatgtacatttttttctttaagaaaaagaatacctgaaattgaaatacacgcacatacatacaatctaactcctacacatacaaattaaaaacaataatattattaaaattctaatattactagattttaaatttttgtcatgctggcctcctgagaaccttacaatctaaagtccacatgtggacatgaaatatttcctgtatgaaccacttgggatcgatatctgatttgtgtggctctctttagactagcggtctttggattttggatctattactttttttgctaaaataaaagtaaaatatccaacccgaatttgaactttttctatagttaaaagaattttttttttattaatatataaactgaatcattggaacaagcacgtaagtgataggagatatcttgacagtcactaggataaaactgaataatgtcaactgttgttgtaaatactagctgctactaaataataaaagaagaacaatattacccaatgaaaatttttgattgagtcgtgaactagatcgctttctttaacacgtgtacgacgctacttagaaatttgcaaacagtcgaaaattagtgatcattcccaaaataaaacaatccatgttgtactctgtatcggaaacactgttgcgaatcgtcgaatacactctctatatatgatatcacagatagagtttttaagagaaaactattatttgtttttttgggattgaaaaaattgtattctatcctatcactttaattgcattatatagataaatggaactgaaaaaaattgtattctcctattacttcaaatcgcattatatagataaatggaactgaaaaaataaacatgaaga

SEQ ID NO: 230509 - DNA, 819 bp, Cannabis indica
taatcatcctaggaataggtgagttttaatattacattatttttttattaaaaataattgtaacacttgatattaaattatactgataataatattgtttcaattcacatataatctgcattgtagttacaacatacttcttatatgctttcaaatttaagatgaaaaaattatttcaaatttttcaaaaattttacaaaatatttacagtgactacaataaacaccgttatgtatagaaattaatttgggtattaatttttctaagtattgtttatttatattgtatacatttattttgtaggtatttggagaataaagaaaatccaaagaaagaaagagcttcacatgtgggctagatgtgcaatgaatgaattggttaagcataccacttcttacaaattctatgacaacactggattagatcctcacaagaaaactcatgatcatggagaagaagagtctctaattcctaatattgacccgaactctattgtttctgattcagaaaagaaatttattacttatccaaccttgaaatccagtcaaaaactaaagctgaaatcataagacgggtaagcaagtacttaaacactaaatatacttagagtcgggtttggactaggtaggctagttctgtgctaaggacccacctagtccaagggccttaaaaagtattttccctttaaaagtaaatatttttgggaaatttacatggtatactaacttttgccatttttttacaaaaatactgccaggcggtattttttacttttttactgtatttttttataagtttcatactgcagtaaactgtgtt

SEQ ID NO: 230510 - DNA, 1336 bp, Cannabis indica
cttttaactaaattataaccttaatttcttctataatgaaaaatttcattgaatatgcttatatctttacccatatctaaaaaaatctcaaataattcgatgcaaatttacccttagtttattttagagtattgctattagacaccagtggtgcctaacactttctcgacatgtcacgttacaattggttagcgatacttcctaaaagctattatattaaactatatggaacccgatacttagttggagcaatagcaatattaattcatagaagggtgctagacaccactggtgccctttagcatttctatttattctaatatacccattctacccccttccaattaaaaaaaatccatctctatctctctttctctctctttagattttaagagaaaccccattaagcccttagttcctttttcgtcatcgtcgtcatattagttttatagtactaaatcagctaagcagcgaaagagtttgattgtgactatcattgtaccatatgcccacaccatatgtattcttgactcgaaatttagccaactaacagcaaagtcttattaattattaattatcctcataaatttgataaattataactttccatgtgaatggttacattaactttctttagctttatcttaaagttcatttcttgaacatatcattgtaagtcatcactagtatcatccaaataataataaaatagattcattgaaatcctcccactatgataagatactgtgattctatgttcaagaactttagtggtatctaatctattactattgtaggagataacggaacatatacaagatcaagaacaaatatattctattaatttgctagtcataaaatggtttacacttaatctatttagaaaaagaatttcaacatttatgatgaatttgagtagaatattatatctatatctaatcaaaaatgtgtgttacagagattttgtggtagtaagttttgaatataatttaaagtttattgtaaaagatctttaaactacatatatcaattacttctccacccatatcacatcagatattttattaaataaaatcataataattgcttaaggattaataattattcataaacattgtatttaggttcaagtgtttatgtggtattatctctttgcatagattatcttattaataagaatattaacatgatttataccataaatattgtatctataataactataaaatacataagtattgttatacctaaatttcgaccagcaataaaaaactaacacgtgtatcaaggctaaaatatgaaccagttcaaatcacatattattaaatgcacatta

SEQ ID NO: 230511 - DNA, 1368 bp, Cannabis indica
ctcaaagatcttggaagtttacatttcttcccaggccttgaaatagctttacgtaacaaaggcatatctgtcacacaaaggccattcactttaccactattacaagaaactggctgcctaggcatcaaaccagtatcaactcccatggagctgaataacacgcttaacaatgagataggaaaactcctagctaacccaacacaatatagaagtctaattggcaaactcatatgcttcaccataactatacctgccattacttttttagtgaacaaattgagtcaatatcttcaagctccaagagaatcaaacctccaagcagtcaattgcatactgtaatatcaaaaaggcacacctggacaaggactcttcttctatgcatccacacacctgatccaatacaccttcaagcctttgtagatgcagagtgggaatcatgcttggacactaagcaatccatcttaggttattgtgtcttccttgaccagtctctcatctcctgaatgtccaaaaaataacaaacagtatctcgctcttttgctgaagtagaatacagaacaatgatcaatgcagcttgtgaagtaacttggctccattccatacttcatgacttcgacatccaaacaaggcttccatccacatttttctacgacaacaatgcaacaatacacatttcaaagaactccgtctaccatgagcgcacaaaatatgtagaaatcgactgtgacttctacgagagaaagtcaataatggcaccatcaaaatgaaccatgttccttccaagtccaacatagctgatatcctcaccaagcctctatctctaactcactttcacaacattgtgtccaagatgaatgttaagaatctatatattccatcttgagggggcctactaaacttaagtggacagttagttatgttagttatagaaagttagtatttagttagttgtttggtacgaccacctctacaatgtatataaacccctttactattgcaattgtaatctcagttcactcataattcaatatcaataagattcttccttgttttctttttcaaaaaactaatagaaatttttgatatgatatatacatatatggatgacaggtctaaaaaataaaaataaaaaacaaatactaatagagaatgataataataataaaaaaaattgattaaatatacatgcttagtatctttctcggtacatatcgttattggtataattaagtatcgggtcccatataatttaagaaaatatcttttagagaatatcgctaaccaattattgagcaccacctataaaaagtattgagcactacaaatatccaataacaatctcaaagagtaaatagctgacttatataa

SEQ ID NO: 230512 - DNA, 891 bp, Cannabis indica
tttgttctgaaggtctttctgctgcttttaggctcggggagaaatactttgggtttaaggggatatctatatctcgcaacgctccccctgtttctcatctctttcttgccgatgattttctcattttttccacggcttcccagcaagcatgcagatctattagggaggcttttgatatttataaactggcaactggctaggaggttaactactttaaattgtctgcactttttttgcctaagcatgttggatttcttttatggcaccttaaggatggaacctaagccctttattagtaattatcttggtgttcctctgttctttgaccaatccaagaagattaatttcaattttctcttagatagggtttcttcatatctcaatgtttggaaccataaaattttttctagagcagataaagaggttctttcaaaagttgttatccaagccattcctccctatgcaatgtcatgattaagaatccctgtttgtcaaaaaattgaaagtcttatggctaactttttgtaagggtcaattgtgaaaaatactaaaacacactgaaaaaatcgattttttctttgtaattcaaaatttttggggggtttaggctttcgatcactcattagttttaaccaagtcatgttagccaaactagcttggagaattctctctaaccctcagtcactcttagcatccattttaaaaggaaagtattttaaaaataatttcattcttggggcatcttaaggacattctccttcttatacctggagaagtttactttggggaaaagatcttcttaaaaagggccttgtgtggaaaattggtaatgggtgtactattacgacgatagaggatttttggattacaaataataaaactattcactat

SEQ ID NO: 230513 - DNA, 1103 bp, Cannabis indica
cgaagttaataaattaaaaaacacttttaagatgaaaagtcatttaaatataaatatgcatatcactgtctataggccaaaacttccaattttgagatttatttcttctttgtattgcatttaaagaaaaagaaaggatttaatgtgtttgttttgtttgttagtttgaaaacaggatgtgtttgctttgatttcaaaaactttgtggtgtactgtacacctcagagtacacagcacatcactcaatttcttccaattttttctggggtcccctttctcctattaattgtgcaacttgttgaatctagtatggtcaatcctatccttatcccctattaattgttctcatttatccagttttacaaaatactaaatttacaatcaacccttatcctctaaattatgaataacaatccattcaattaccaaatccccaaatcggattccaattggtcaaatttgggttaactgttaacgatttagtgttttaccataattttgcacatgaaagtgaaactccaataaaagtgaatgcataaatcaataagcatccaaagccaaatattgaaggaaaaatctacaaaaatttgagatctttctgattcattcatttcaaatgtacaaaatatttacataaaacacaacattccctttatcatattcatccaagattttcctttacacgcattccatctactcctcctgagctaactcggtcaagccccgagtcgactcaaccttctttacaattcagttgagtcatcgagtcaacaagcttctctatacttacatatcatatacatcagccgatttagatcgattcgatctcgcttctaaagccatcgattcagctctgtccccaacagttcaagtacataactttctggattgactcatcggcttgcctgattcgatcttcacagttcccaatcaagccaaacagacctaatcccgccactccagcgagcgatagcattccggtggattctcctgcggaagaggatgaggcggtagaggaggaagaaaacaacctctgccggttcagttgcagagatcgaaggcacggtttcaattttgcttggtccttccggccttgtacggcg

SEQ ID NO: 230514 - DNA, 1211 bp, Cannabis indica
atggctttgtttgtatttgtattgcagtagaagtaggataataaaactctgaacctattctcaccatatttcttaatctctcagtgacaaggtgttttaaagaaggatgttgtcccaatgatgacaagaagctacaattaggacagtaatcattaagcaagtgcacatattgtttacaagtaataatagtaaaagtagagtatccttcctacgagaactgtagttaagtaccaaacaattcaatttctaattcaatctggtggcaataatttaccaataagttttaaaaataaaaataaaaactaaaatcaaaaaagcaaataaaaataaagaaactaaataacaatgactaaacttaggtcaattaatttcaattgtataaatttcctatggtctaatacagttttagttcctatttcaacttctatttgatagtggattaactatttcaatctatattcttgctaggatctacagaatataaattgtatggtaaagtcctacacttttatgataaattagtcatacaatttgcatcaaacatgaaaatcctaaatgctacatagaccatacaggtactcttgtaccatatcaaaatctatgtctatttttactagagaataatcaacactcactttttaaattttgcattaaaatcataactataattggtaattagacattaaaagaattaagcacaaataaaatagatgcacataaaaaattggggaagaactaaattacaataaaacaaaaaaaaaaaatcaaataatctccattgacaccctaataaaatatttagctactcattgtcatcctcaaaaattgataacaataactaattaagaacatgaaaagtaaagaagaagaaagatcttgtcgaaaaataatgatgatagtctcttaagccgctttctgcctctattttttatctcccaaagtttatgctctcgaaagtgtcaaaagtcccctttaatctcaaaattagtgtctaaaaaccttaattttttgcaaaacaccatagcgggttgcgacattgaaggatgcatgttgtggtccgtgtgtagaaagcatgtacaagaccttcgaagttaagtagagcatgccgcagcactagccctccatgtcgcgactcctgaaggctctttttaggtagtgagctctaagtgttccaatgcctcaacataagattccaatattgaggcctacct

SEQ ID NO: 230515 - DNA, 843 bp, Cannabis indica
taagagacattacacaaggcaataggacggagatcactcatagagcttggagacttctttttagggaccaacactagatttgtatcattcaagtggcaaggaaaagtgcccgaggcaaagaaattacaagtagcattaatcaaatctgacccaacaatatgccagtgcttctgaaaaaaaaaaaccaagccccattccatcaggtcccgaggccttgtctggatgcatttggaaaagagtcagtcgaacttcatcactagtaaccggcttcagcaactcagtgttctgggcagtagtaatcgagcaattaacaccgttcacaacctggttccaatcaacattcccagcagaataaatgttggtaaaataatcaactattacctcttcgagaccattgttccaagcagtccaaacaccggagctatttttaagatattggatgttattgctgcgtttgcggttgctggccattgcgtgaaaaaattttgagtttttatccccgctatgaagccaaaattgctttgaccgttgcttccaatataactcttgttgggctagaatctcaaaatattattttgttcataaagtcttaatgatgattgaaattgtccctagttattgtctaggctaataagctatacttgggttttggttcttgagaatgaggatgtaaaaccagtcttatgttcgctataattttagtgtgagtttataattaagtggatcctatttttatgagttatctcaagcgagttttatatctctcaaactctttcaattaggagtggcaaaacaagttttgacaagacacacaaataggaacacgacacgactcgcttaata

SEQ ID NO: 230516 - DNA, 770 bp, Cannabis indica
atatgtaattaaatgtgttcattattatttggctactagatcttattacgatttaatatagtgcttcatcatgttaagaaaataaaagataaaaatttggatttctcactgtgtacaatctatgtgttgcactaaaaagaaaaatcacatttaaaaaaaattaatattttttcttttaattaattaaataataaaaaagtccccataaaataattataatttttaattaagtaaatataaatatcttttataataattaattaagctctgcggtagaataaaaatcttgatttaactttcgattttagataaatacctaattatattttaattcaaagtcaaaattaagtttgttcttaattaattaatgagtaatttatacttatgtttaactccggtttcagataaatacttaagtttatttttttacagtaataatacaattatatatatttttggaactttcgtaagtatcaaatcaatatcaacattttattttcttattaatatatttaaatgaatttttaagtaaaaaataaaatttaatgacctgaactaattatggattgtcatatagtcattgacttgacatttaaaggtcagatacctactgaatttaataatataatttttaagtattattatcgttaaaaattaaacttaattaaggctaattagcaatttttccccccgaactttgacatgtactaaatcatgctccctgaacttttttggccgttaaaaattccccctgaactattaagattgtt

SEQ ID NO: 230517 - DNA, 806 bp, Cannabis indica
atgattggacgcatgggacaaaaatctgatcctaacgtaaaaaaaaaaaaaaaaataaatcgtcacttggtgacctgacttgtatcgaaggtagacgtctgcaacactccaaggtggtcaacatctgcattaggcccttcgagtactcgtttgggtattagctaggcagacttccatgtttggacccctccaagtccaggagagtccaaacgccttccaagtccaggaagctaaggcaaggccaagtgagctttcgtatatcttctcattattgacttgttcatagttccaaattattaggctgatccctttctttatgtcataagtttagaaacacagaaaacaaaaatatagtatgaattgaagaaaatgagtcaaaggttgttgaatgtgctggtgttataagattacacgaggaaaagagaaaatgagtcaaaggttgctgaatgtgctggtgttataagattacacgaggaaaagagacaaaagacgaatatgaaaaatcactttacatagtcctttgtggataaaaatttaagttcaacgccgcagatgctggattagaaaaaagattactgttgagataatttgtgcaatgtgttgtaggaagcaatggcatattaatgttttgatggatgttgcagtaaatttccaatatcaaatcaacccaaaggcttgaatttactgttactttgttgtacttttaggaaaaattattgatcaaacaattagttcaattgttcacaacaaataaaactgttaatttaccagattgcgtgacaattttaatcaagtaaatcgtttct

SEQ ID NO: 230518 - DNA, 1020 bp, Cannabis indica
actctaaatttatgggagttactatatgtatattaaataaaaaattaaatataaataaaaatcatcttcatttattataacttctaagtaatacattattgagtaagttgcagagaccatgagcctagaaaaattattaatacaagtataaattttttttgtgttcatctaacttgcatattagtgcgactagtgtccatatcgacgagcactggtcagatattatcttagatattgcaggaaccatgagcctatgaaatctaagctctcaatatataaaaataaaatttacgggaattacctcatatatactatttcttaacattttttttttcaaatttatagttggagttgctctggtgattgctccaatagtttctatgggttgctatacagattttgattacaatttaggttatttcgttagttgctatatgtgaattttcgtaataaaaaaaaaaaaaaatactttgaggtgtagaattaaaaaaaaaaccctaaaatttaacgaataaactatttaactaattaattcctcattacgtacgtatgagataagttttcgcatgcccacttactaccatcggacccactatgactcatatgaggttgtcaagaaactatcaaaaaataccccacgtaataaacaacataaatgatatgatgaaaatttcggggcatgataaaattagacaaacactcttcttattactggcagttggtttggatttctgtgacgcatttgtagattttcttaggtttggatcgatacatgaggaactcaacgcaatgaatgaattcttcttacataaggtgcccaatttgaaaaaagtctcccagttaagatttatttctctttagaatatggtctacaagattatctcgaaatcattgcaaatagaattagactgatcctttcccaattaatttgtcctacttaggcagcctttgttctagagtagaacatttaggataacaatgtattagtttaaaagatcatccattatttaagcttatacg

SEQ ID NO: 230519 - DNA, 1881 bp, Cannabis indica
aatttcggtggtcaaagtcaagcctaagttagatattgtgtactataaacggttgcctagtccaacttcctaaattgggccactcactatctacttctagtttttttcttcttccaacacaatgacaattttgtccctcactcctttttttttttttttttaaagcatttaataaatagtgttcaatgccaaagtcaattttgtgtacttttattagtgaagcactactacggttagagctcattcattcttgaagtggcaacgttacttcttcaaacttgtaattatatgattttatgtttgaatttgcatgtcttattatgtaatgattcattccgtaggtaccattcatgaaataaatatttattaattcttaaaaaaaaaagtagtacctagatttttagataaagactaagaaagtgtttggaaatagtgaaataatgagtttaattttccaactagaataacgagtctcgtaattaattgacacatgtaccaatttttaacagaaaaatgatgacatgtcaaacattaccaatccgtttgggttattcttgcaagacaaaaatatgcaagaatgtgcaatcgagacatagtctagtcacacactatgcatgacatatgagtaaagacggcacatccaatcaacatccaatctgcacaaatacagattttagattttccaatccaattcaatctgcacaaatacgaatattcgcactatacgaattgaattgagtcaggctttggcataattgttgcgaaaaagaaaatgcccaaaaataagtttagaaaaatttaagaataaaagaatgatctcgcaaatagtaggaataacgggacttacgagatttctaaaaatttgtataagcacaagggtaaagtcatgtcatccaaaagaactagtctttgagctctttcttgttgggaagatagattatgatcttgcacacgtcaaaatgtgttctgagatagaaaaggccccataacaattctgcctcgctggagtcactttgagtgtgtatagacagctgatctcgtaaggcgagtgaccttcccatcccatcatgtgatactataattgtaggaatttattttatcacggtctagatttactaacatgtatgtttgattaacagcctaaatatgaattctctaatacaatgaaattaaacacataagagtttagaaaatcttacattgatgcagcgaaataataatgaatccttccactcagatctctaacccttgttcttttctatcgcagagtaataacaagatctgagcctgaatattcttctctccttcgagttggttaccactgtcttccgcactatgattgagtacttgacttgctatgtgtgggcatggtactctatcactatggctcgaattggtgaacaacaatcaataaggtgcaaaatcactatagaaaggagtctctcatctactagttgtcagagaatgaaaactaggtttaggttggttgaattagattgttgaatgagaatgagagcatcatgttccttgtaaagtatttcaactagaatttaagatttaattatataaattaaaaaagaataaaataatgggtaaaaatacactaagtggccggccacaccaatgggcctcaatagttataattttaccactttatttcaaccacttatccttcttttaataataccatattttccaatttcgatcctgtaaatatcaaaactatttatttaataattataattaattatcaaataaaattaccatttatttaatttattaattagacttaacaaagtcacctaattaacaaataaaccctcaaaccttttttcttcacaattaagccattgcttagtgaaaattcataaataagacata

SEQ ID NO: 230520 - DNA, 1162 bp, Cannabis indica
gtctgtattggtggtgtagggtcctgtgagtttagtcctaataacttgtctgtcttatgtgtttcttagtgttatttttgtagcaacatttgcttcaatcccaagttggcctatgtttcaattatgtttatgtattgtattcagaaagcttgctttcttaggtacaaattttcatattttgtttacaatgaaaatagaattacaagttgcactttttttttttgatatatgcatcatgagcttcatgaatgcttagccaatcagtgaatgggtcagttggtattagtttagatatatgtcaaaagaataaatgtgtcttagcttcctgtcatcatgacatgaatccagtctctcaaacttattgctgtttgaaaagcttgtgtactaatgttagaatttaggataatccatctcaaaaccaattagcaaggaggggatgagctcatttatcttatatatgacattttatttctacacattagcaatgtgggattaactctaataactaacaaagtaactatattgtatgataaaatactaacgtaacagaatttaaaattttacttcataaagtttttgctagaaagtagggtttttctcttagggcatgatcctctttgtgtataactttgatacatagttttaggatatgttgaagtttggtcttttcatatattcagctgaaagccttactaatatgtatcgatgggcagttggccaattcatccgtagagtatgatcctctttatgatgcagagaagggtttcaaagttattccctcatcatttcatgacatcagtgacattaaatttcaggacaactggggtagtgtctggtaagacaattagatgtgtctcatttccaaattcagataccaatttctttttgttatcttaacattgtccctaaatgttttacagggttgaccttggtacagtagataattttgccattgatgcacttttcaactgcttgacagtcttgagttcagagtaagtaaaataacatttccattttatctaccacttagatctttgctcatggatttcggacaaaaactaaagatctttgcttatgtattgtttatgaagttatcttttactacatgcaaacacttgattcgtaattgtcttgtttttcattctggctgacagatatatag

SEQ ID NO: 230521 - DNA, 1661 bp, Cannabis indica
ataacaaatagtctgtattaacttgtattataatatttacaaaaaatccggggttaaccccaatctctggcttggcgtcggtgttgggtcaagtttattgaaaatatattataactttacacaacttattaatacaagtcagtaccaaacatattattatattgaataatacaatacaatataatataccaaacgagcctttaattaatcatgctatagtggagccttaataaattgtccctagttgagagtgatataaagtaaaataacttataattattacatacggagcaaaaatgccaacataagtgtttaaacgtaatccgaattagtggtaacaaatccactacgtctctcacaacttggaactcatgggcaaaattttgtcccaaagagtcgataatatcatcaagaaaaatatttttaatccaagtgaagctattccctaataccacgacatttttcaatgtgcctccctcttggttttctttcactacattcacatacatagttgctggacaatgaggcatgtagaacactgttggcttgttcacctttcttttacctttctcatcattctccaacacttgaaaacccatatccctcaaagcttgattctctacataagtgagatttggatcaaatatttttatgttatcactaatccaatcaactttttccttcaacaaaagtgccaagcttagttgcaaccttgatttttctctatgtttgatgctcccaatacaatatatcaccatatctatcttgctatcattggaagagctcacaagattttcaagacgaagtgaaatattttcattattttgaatttgatcccaaaaattgtcgaaaaatggcatggtctccagttcattcttactaagttgcacaagctcctgtattgttggttcctgttccttatttacacaaataagtgatatatgagagataaaattaattaattaaaatatatacaggcaatacaagaagtataaaatcattggactatacttataaccacataatactacaaataaaattatttttagtcacaaaaaacttgtgattaaagtaaaagagttgtgacttaaaggtcagtgactaaaagtattaaaaaaaaaaaatcacaatttattgtgactaaatgtgtttttagtcataatacttattgtgattaaaaataaattagtgacaatttgtatgtaaatatatactaaattatagtcacaatggagcaagtaatacttgattgataggtggaggcccagagaagaagtggagacgatccagaaaggccatgtctgacataacagcaagggcaacaacaagagggacgaaatatgaccatttcttccacttataattagcagagacaactggtaaattagcattctgttgggtcgtccctgatcttcttcggctaccaactatagccatctctactcttctcaaatgttttaaaaaaaagaaatatcaaatataaaagcagaagaagctagaagaggttgtgaagagaaattgaaaaatggatagtttatttatacaagtaattaataacttgagaggtggagacgtagtggaattaacaaaaatatgaatattatccaaataaagagttagtgtattgcaaccatcacgtactctttccttaatttgtttca

SEQ ID NO: 230522 - DNA, 1479 bp, Cannabis indica
cataaaatgcatttcagaattcaataataacagcataaataattatttaaatatctataaataattttccataattaaacataattaaatgctaatttccaaattaaactaagcggtctttacagcccatgtttctcttttttatgttcttattgatgatatttctcttttattgtccttctttcctggagtttcaatttcgcatgtaaagcgtgatgctaataaagcagcacatgaattagtgaaatatgctctttgattggataataattgttcttggttgggggaaattccttctccaatccactctgttattgttttggattctattcaataataataatagtgtttcctacaaaaaaaaaaaaaaagaagaaaacaaaatgattacatttcaaaaaaaaaaacaaaagttgattgaaaaaaaaaatcataaacaaaaaaacattaaacctgaaaacaaaaacataacctatgacgtcaaccttcaaggagaaagaccatcgatttcatcttctctggagaagaccaccatcgattccatgtactgccaacatcctcccttcctaaattgttctcaacgaaaaatttaaactgaccccaaattcttatggatatataccccacaataaaacagattattatcacagacacaaaatccaagcccagaataattggacagcgaaaaggaataaaaaaatggggcaacaattcaatacggtaacacttgaacattcgatctgggttcttcaccgtttttgaggtacgaagcgcgacttcttgtggtggttcgcaatcacatactcatcgctccatttttctcagcctgctatggtcatggtcgaagaagatggaacctcaaacgtaccgtggtcggagaagatggaatgatcgatgttcatggtctgagaaggtggagtcgcccaattgttatttattgtatctcacttgttgtctcattgtatctcacttatttgtatcatcgtatctcacccgttgtcatcattatatcacatcacttgttattaccgtagttcacttgtagtcgtcactactgtatttctcaaatctatatattaatcttagatttcatctcgaattttaaatatttttttaacatttttaagatattagagaaaatttattatttgttatgttattattaattaataagttctttttacaaaaaagttattattatttttaaataacttaattgaaaaaatgtaataaaaatgtgatattttagttgtgagaatgctaaaggcaaccctccttgcttgtatcgataccactattagtgtaattaagtagttggtctcatattacttaaaaaaaaaaaagaatttaatggagtattgctaaccaatcgtagggtgccacctataattggtgttgggcaccactagtgcccaatagtaatgctctttagttataattaaagttatcactttaagtgtacatattgcgtaatctgta

SEQ ID NO: 230523 - DNA, 1703 bp, Cannabis indica
gttaaaagagggtgattcgaataatagctatttccataaaacttctacaaccagaaaaaggaacaatcagattatccaattgcgtaatgaggcggatcagtggtgttcttgggactctggtcttccagaggtggtgtttcattattttcaagagatcttttagaccgcaggcgcatcatgtagtgaagttgttgactgtgtggaaccgattgtaccagactatgttaatttagagttatgccagccaattacagatgaggaggtgaagaaagtgttatttcaaatgcaccccgacaagagtctaggccttgacgaaatgaccccagcattttatcaaaagtgttggaacattgtgggtggtgatgttattaactgtgttcgtaagttctttgtgagtggaagcttcgagaatggttgtggtgaggctaatattattttgatcccgaagaagaagaatgcggaaaggatgtctgatctctgacctatatagccttgtgtagtgtggtgtataaaattattaccaaggtcatggtgaatagaatgaagcctttcatggacactatcatctcggctaatcaaagcgccttcattctgggtcatttaatttctgacaatattttggtctcctttgaaatattgcactatctaaaaaggaaaagaaaaggcaaagaaggctacatggctcttaagttggatatgagtaaagcgtatgaccgtgtggagtggagtttttaggatgctatgcttaggaaactgggctttgcaagctattgggttcaactgattcttagttgtgtgtcatcggctagttacaatgtcatccatggtatccacgagatcggtcctattgttccaactagaggtattcgccagggagatcctctgtcaccatacttatttattctgtgtgctgaaggcctcacggccctccttcgtaagtatgaaaatcggggttggttgcatggttgcaaagtggctaatggggctccccgcatctcacacatactttttgcagatgatagttacttgtattgcaaggctacctacgaggaagcacaccgaatcaaagaggtacttcaaaagtttgaattggcgtctggtcagaaagtgaattttgccaagtcatcaattttctttggtgccaattctggcgaggacattaaagacaaccttgcggcgttgttaggcatgaatatagctccggagggtagcttatacctgggtctcccaagttccatggggcgtaataagactgcggcgttgggttatctgaaagaaaattaagaaagcatcttcaagcttggagtacaaagtttctctctcgggcgggcaaggagatcctaataaaaactgtggcacaagctcttccaagtttatgccatgagtgtgtttttgttacctactgagattactagagatatggagagtatgatggctaagtattggtggcaatcctcaaataactcatctttaggtattcgttggatatcttggaaacgactttgtggtcataaggataagggaggaatgggatttaggaattcgcgagattttaatcttgctttgttgggtaagcaagggtggcgtcctttgattaatcctgactctcttgtagcacgtgtgtttaaagctagatacttcccccatgtctcgttcttaaatgctactattggttcgaatccaagctttgtgtggagaagtat

SEQ ID NO: 230524 - DNA, 944 bp, Cannabis indica
ctttatttttaactattcattccgttaacaagcattgttatcaggaattttaatgtgtccaacacaatattgatgttgatgcaattttttgtcaacctgaccttagaaggtggttaaaagaaaggaactggattgagagtagtggttacactgtaaaataaataagagacaataattttacccaaattctagaccatgacaaatatgtaatattcataacttgaatagtcaaagattacattttgacatttgttgaaaaagagcacttagaaagatccttgatttatataacaaaattacatatttaaaattaaaggaacaactcttataattatatagaaaatattagctagtaactaaaataagaccacttatcatattaaacgaacaatgatattgccacagttatgtagtaaccaaataaatagatttaataagtccataaaacaaaataatatctagcatccattattcttcaatcctaaccagtacatagctaattaagtcattcaggccatctaatattcaagtttaattacaaaataagttttcaatgaaaatttaataactagaataagactcaactaataacattcttcttcaacggtacaatcctcatccactagcattaaattgagttcttgaaatggaagaaaataaggggtgagcttataaagtacagtaggaaaataacaaatattaaaagatccttagtttaataaaacccctccttggatagattttggaaataaaaagtatctcataattattgtcatgtataaacaaaaagagggtacgaccttaattatcacataatcaaactttatatgcatatcacacaatctattggaccccctagctctaaatacgagtcatacaaaatgacatcataaactaggtcgtcacgcctgaaaaccattgaaatactagggctcaaattcaat

SEQ ID NO: 230525 - DNA, 3432 bp, Cannabis indica
gcctttttcatggttaagggaaatgttaggctttttaattatactcatttttcattggtataatttgtaagttatcgattattagagctaaactctcttcgagcctggggtaaagtatacttctaaatcttccatagggtgcagccattatcatggtttctacatatacaagaatcgtaccttggacttcatgatacatgagaaatcatagaaagcgccgtagacatcagccattgtattcgttctatcaattactttagccgtaagacctagaaaacacaagcaaagtgaaatcagcatcagggactcatgattcttgacaagaaaatacaagcatggccaaacaatattatattagtaccagtagagcattttcccattctaccaaaacataaataaaatatatgcttgtgagaagagtattaaagaaaacttttaaaagtgttagatcccatgtttattagggtgagagagagaatagcaaataaaagggttatatggggtcttcgtattaattgtaatattagggagggaatacatagtatacatagcatgttaagaagaatttagagggttatgcgtaggcctctcaaatgcctaggatattgtctctgtacttctctgttctaatatcaacctatacacaagtcttctctatttttctgctattgttcttattttggctactgttctgttgtgattgagattaattgcgatcaaaaggatagtcgggtcttatcaaaatggtaacaaatgttataagactggcattacagaaacacaacagacagggatgggttctgacaatctttatgaaaattctagccagaagtactgctcctaattctaaaattctacatacattaagtgcgaagaaagcatagaaagcttaggccttaagttgtcatatcaaagtatgatgtgcactttttctttccaaataacacacattctgtattaacatgaaaaccatttcaacttctgatgatgcacaacaggacatactgtgctgagatacctcacaatatctcaacccggaagggtatggagattgtggagcaagctgctcagttggatattattattaccaacaagttggctaggttgtgcagccaggaggatgaatgagcatttatgctttcatttttgttcatttactttgtgagatttacccttgggaactttttgttgaaggtactttgttcttaattttgcggtttgttttagaatctggtttcttgtattgcttgctcaaatccttaggggctgtttggaattgattaatatgttaggaagggaaaggtaatcttgatgattacccagttttttatgaagttttaaattttttaaactctttaagtaatatcttctcttttgccattttctatttcaactatgctttcctttttctactatatatttgtctcacctaacacattctctataaaaagaaattcatgtgcaaagactgaaatcttaccgcgcctcatcttcactacacctctgaagacctcgatgttgttgtagcacaaagatagcgtgccaatcgacatgacctacgcatatgtaacaaaggtaatgataagtttcaaatttctgaaaaacaaaatttcttgatccatgacaagtacatgattattcgtgaaaccagaggtaaaaacaacgaaaataataaaatcaagttggtaacaaatcacttaaacactgtcagtcacccacattcaaatgatatagattaaagagtatcgttgtcttgttaagattaactttgaccaaaaatttgttcaaatgagcattttgtacagttcggaaaatactaatttggtattattgaaactacagagatgaatgtgggcatatttaagcaaaccacgaggtaaaatacctactttattttcatctataccgaaccattctagaaatttattcaagtttaagaagtaagaactgtatataatcactggatcaaattcaaattagttaatagttgttctatgcaacatgttaagctataaattgttgtgaatcagacaagattaaacgaagatcttattaaagagcagcccctacctgagggatagcacaaaaccgaaatatagaggggtcccgtaaagcagccatgtatttcaagcaatcttctgcatgtattatagcattagtgaccatgtcatttaagcattgcactgctttcactgaattttcctcatatttcaagtcctgaagaagagattgtaacagaatccaattcagatagttgttttccagtagtaaaaggggcgttagaaaaaactaaaacaggggcgaatcacacattttgattatgaattgacaggatgatcatccaaagtccaaatcacggtcaaagaagaaagttattaacagaatgaagattgtaaaagagatgcacctcaagtttgttaacatatttactccaaatctggcgcggccaaaacatgcgtgactttggtatctcattgatatcctccagataatctcgaataatatttattttctgttgtaatcgcatacagttcaacagcattaggatcagattccagaaatagttgaaactgggaatcaactgtactttttttttctcatataatatgatatacctgaagaaataagcccattgaattcgaaaggtaatcatcagctggatcttccaaaccagcagcatggaaaagcttggagagccctataccaacaagtcctgctacatagtggcaatattcatcatagtcatcaactgtttctacctgcaaaatgagattaaaagcatgggaatcaaatcacatggaagtgaaaactgcagcttgctttactttattctgactagttttaccctaggcaattgaattttatgtttttttcaaacttttattgggttttttgaacagcatacttcttattaagggacgttatgttttaattcttatgaatctatacatactaaatttctaatttttcataattttatgttttttttttttgtgaatttcgttcaaaacttggctcgaaccaatttaaaacctatgttttgatttgattgaggtccaaaatagatttcaaatgcaccccaaaacaattagttaccaacctccttgcagataaactttgccattccttcacccattctcttcgtaatatcttcaattacctccttataactgcaaaattgaagtacttgatgaatcgacatgtaattaaatgcacaattacaagaaaaatttcaagcattttatttgtaattatctccagagactgagaaatgtgatatgaaacagtaattaactgatgcacatatcataataagtacatttgcttttgtacttaataatttacataagaaaaaataagaacaaaccttcattaagttccagaaatgcagttgaaacgtgatgaaactggtccatgagaactttgtactcc

SEQ ID NO: 230526 - DNA, 1237 bp, Cannabis indica
ttcttcttcttcttcattttttttcccagaaatcaaaccccccacccccacgaaccccaaccaaaaatcgaatcccaatccaaaaatcgaaccacaagcaccataccaccaccattatcaccttcacacaacaatcaacaaattttatcaaatctaaaaaaaaaatattatttaccaaaaataaggctaacacacccctaatcaaatctttgttctaagtaaaaaaaatatttgaaaaaaataaataactttcctagatctgaaaaccacaatgcccacaacgcggtggattaaacgattcaaggagcagagttttttgatccttcttcttctccttggcaatcttcaatggcacggggtggtgttgagattcaaggtgaaagaggagcggagttggtgttgaagggagtgaggagaagaggttgtaaccatcgccgtagttatggagagcaagaaagagggtctgggcggaggcgtctaggcgaagtggttcgtttgggctaccatcgacatttgcagaggagaaaggagaagatgtcgacgtttacagaggagagacgaagaagagttcagacggttgaggttggacagtcggggatgggtggcttgggctgaatgattggggttcgattttttggggggtttgacttctgggaaaaaacgaagaagaagaaagatagaaaaaaaaaaaaaaaaaaagaaaaaatattaactattttaattttattttattttaaaaattttaaactattttttaatatataaattattaatattaggtggactaataaaaatttgtcatgtgtacacttgtgtatactgtggcagtccactttggcacttaacaaaccaaaatggatggaaggactaaaaagcaaaacgattgtcaagtccagacaatataactataactttttgagttaggggttaaaccgtaacaaacacaaaagtataagaagtctagcagcaaattacccttctctatatgtaatattattatattaaggttttttagtatatatttttcttttccaaaataaattattaataattatctatggacccctagatccacaaaataaaattatgccacatgtgacctcaagctaatcccaagtagctagggcaatgcccgatactttacttttagagttcaatagatgtattagtaaggtaaatgtacgtatgttttttttttaaaatagcaaaatcgctaaatataataaaaattaaaaaa

SEQ ID NO: 230527 - DNA, 2014 bp, Cannabis indica
tataccctaaatcctaaaccctaaactctaatatatcttaaaccctaaaccctaaaccctaaatccaaaacacttaaccctaaaccttaatcctgtttatttttttttttgcatttctaacgaaaagtgtcacctaatttttaggctttattataaaccgtcgggaatactagtttttcttgacagtttaaatagttgcttaatttttcaatgacaccaagcaaaaaaaatccttttggggaccgttgcaaattcatctttttgtagtagtgacaacagatgcaacaagtctagcaacaacagttggccagcctgatgtgagcatcccaatggatccaattggcaggcctacacctctagcagtagatccaccatttgcacctcccacaaaatgaaggacctaggggtgatagcctcctataacgataattggacctcaagccaattctatgatggagaaataggcctaggggtgggcgagccagcaattggcgagcctcacctagacctaggagaagaccttgacatagttagactcatggaagttgtaggttgtgcaggcctaactgaagaaccatgagctattgattatgatgtattcactcagtagagatgtaaattcttgagatggatggatgaccaagagtacatccatcgatttcaccaggcagaattagattgctgcaatcgggaggctaacgatctaataagacaatttaattagagaaccgacaaaagaggccaagatctccataagggatccacttcgaggaagattgctgtcaagttcctcaagaactaggacatatcttccctcgcataagggaggatagacctttgctcaaaggtcaaatagcgagaaaagccagatcccagtgaccagcagcttggggggtcaaccaaggatccttggcttagaagcaatccccactgtgcaaccacaggccgaccagccattagtaggagtaccccatggccaaccaaggtataacacttcctcccttagagcagcgaggtacataaacattgatcttcgactgaagataaccgagattgcgcagaaacacgcaaaatggcaattcaagaaatgaaactgatcacttcaggaatctagatccacataactccaaaaattggtgcaatctacccataatcaacacacaacccacatcagtcgactgaggagtcacatgctgccagatcctggacgatgctggtttggccaaccatggacgcatcacgagcaaccaaaccctaccctttgtaggcctagccagccatggaggagtactaggaagccaaaccctgcccaatgcgggtctggttgaccaagcacaataacaaggcataagctttactggcctaggccaactcatgtacaagggaatggcctgctagggtctgtagggcatggttgatcttcacaatacactctcccaaagtatggctagccaacctctatctcttgagaatcaacatcctccccaaggaggaccagtcaatcaagtccccacaacaacagatccttctgtacaagcatagttagaccaactaaaggacatgctccatggcatggttggcacgaagcctttagacctcgaacatgattggtctaggggatcatcattcttggcatatataaatgccttacctctaccaaagttcaagatgctggtatggaagatgtagactggatgggaggacccgttagctcacattaaatacttcgagatgtaactcaacttctagaaggtcataagtgatgtgtgttgttgcatattcccagctacactgtcagagacggcccaatagtggtactttaagctcaccctaaggagattcaactcctgggctgagttctcacgagaattctacaaatagttctcatcctcgagacttgtaccatgacagttggaagatcttgtcgaagtcaaacaacaacaaggggaacatttaaaagactatattcagagatttatggtaaaatatttccaacagtatgtttcattaacat

SEQ ID NO: 230528 - DNA, 1651 bp, Cannabis indica
aaatgagtacttgtttgtttgactaggaagaaaccatacgtatatttaaaaataaaaaatatatacggtgaaattcaaaataaataatgacaaagaatgaagaaaagatgaagaaaaaaaaggaaagataaagaagggcgaaatttgtatttttcttttattagccttatttatctttaattactactttcttaatttataaccaatttcttactgctaaaatacccggatcttgaatcaactagatcaaacgatacaaaaatgaaataactaatattatgtagtatatttcctgaattcattattatttgctatttttttggtttttattttggtagtaactatcaagaatgaaaaaaagctagttagctattttactcttagttgaatctgttagaaagttagacagtaagattacatagttactagtttgtaactaattcatgccgtgctggtagacccagtattgtacaataattgattcaatacacagaatttagttcattatttctccttttattttctaatatggtattagagccacgttcaaagtgaaactctttcttttttcttctccttctttgttctttttctttgctcgcgttcatggcccgtgaaggtgttcaaactccaagcacttcagatcatgttgatggatcaaatgattcaaattgattctcaatcttggaacctaatactcgatctttttctgatgatccacgaaatccttactttctttctaatagtgatcatcctggagtaagtcttgttctcaaaatcccgactgattatagttcgtggaggtgcacgatgatggtgacactaattgcaagaaacaagatgaagtttgtagatggaaaattacatgaactagatgctcaagatgagaattatgagctctagtgtcaatgcaatagtgtagtgatctcgtgggttattcatgccatgtcaagtgggagacagtgtcctatacctggataatgcactcgacatttggtcagaacttcaagaaagatttcatcagaaaatgctccataagttttagaagctaagagagctatgcaagcactgaatcaaggtccaaattatgtcactactttacaagattgaaatacctatgggatatgatttaaaaattcagaccacaacctgctggtagttgtggtgctatgaaaattatttaagaataacaggatcaataaagcctacgcttttgtgatccaagaggaaagacaaagagggatttgatctgttcaaacaaaattggacaagcccgcatcctcttccacaagaaattttactaatgatgtactacgagtgctgtaaatttgtgtgtcgtgttggcacgacccgtatttatccgtgttttttaaaaaataggtcgtgtcgtgccacagaaaaatatgggtcatgccatgtcatgctaatatttttaaaaagttggcccgacacgacctgtagacacgatatttttgtgtcgtgctttgctcgtgtcagtctatatttcttaatcaggctaggccgtttttattttcgtactttactttttcatattttttttacaattactaaattgtatgtatattttaaagctttagtcatatttatataacttttaaataatattttatagataataaaaaaaattatt

SEQ ID NO: 230529 - DNA, 1175 bp, Cannabis indica
agaccaccacccatggggtcaactggatcgaatttgacaacttggaaactttagtgaagggaatcacaactcctaagttgtttgaatttaaaattgatacaaaatggcactcaccgctctctaaataaatcaaagctcttcccattattctgaggttcaagaacccttcctggcatcaatacaacaagaaaaagatctactgtcttacatccactacttcgaagtgcaaattgatctgcaaggtatgagagataacttcaggtgcaaaatattccctgcgacactgacaggcctagctcaacagtggtaccttaagctctctcctagataaatcgactcatggaaagatctagtggatgcttttcgtaactagttcactccttcccgacaatgctagattgattcgaatgatttggtgtatatcaaacaacaagaagatgagtccctcaaggactacattcaacgggtcttagaagcagccgctaagaccaaaagtcttagcgaggatgcgagggttatggcacttgaagctggactcaaggagatgattcctctatggtctaactttcatctcaaggcagtatacatcatgaatgacttcttagatagagtaaatggatttatcaaacttgaagaagccgtcacgtgagccaaggtctcaaagggtggcaagaagaagtcatcaaacactgaagtccttgctactgaggcacatggcaatgcgaagaagggaggctcaaacagaggaaagaaaaccaacaatagtggtaagaaaggcaactcctctagtggaaagaagcctaagactgggggcaggaccttacgagagtatgagcctcacttcaccacctactccatctcttggccccaagaaaggagatctatacggctacacagtgaatatcttagtatcacaaacctcttcccttcaaagagatagggaagaggcacatgaaatttttttatctctaccacaacaattatcgttatgacactaataagtgtaatcgggtgtgagatgagattgaatttctcattagatagaaatatgctgctcttcagcaatatgtacgacctgaagctccaattgggagtaatgcacctctcatgcatgcaccagttgcaggcaggctaaagatcgtgattggaggcctgggatattacaactatcccct

SEQ ID NO: 230530 - DNA, 660 bp, Cannabis indica
ccatttttgtagtagtgcaagcacctcaagttttgtttgagagcttcaattgtgaattggcaaaaccagaagattgcagtaatgtccatctccaaatggggagcttcaactcccctctttgctgaagctcaagcccttctagctgctctcaattggtgttatgcaatgaagctttcctcagtcgtgttgagttagattgtttgcaactagtcaccaaggttcagagttcttggaaggacaactcaactttatacaaccttgttcacctagttcgggaatctctgtctctcttccctaatgcatccttataccacatcccaagaagtaacaatcaagaagcccattacaacgccaggaatgcattaaggcttgatttggattcggtttggaggatatagcttctccactttgctctaaaactattttttcctttgtttctctacaaaacagttacttcaaaaaaaaaaaaaaaaaaaaaaaacccaagtatgaagtaagtatagtaagagaaatgttaaaagtactcttaggttgtgtttggttcacttgaatggacaatggaatggacttgtcattccttaagagggcccaatcaaatgtttggtttttttattaaagtttgaaagcccattccaatggaattataaatcacttaaacta

SEQ ID NO: 230531 - DNA, 1376 bp, Cannabis indica
acacatgagctctcttccaattcctttcaagttctctttttctattttcatccacaatgataatttatgtctatgcgaattgtttactttttctttgatgttcttcatcgacaggaatgaattgggctaatatttacaattcaatgtgttggggatatgggattgattttcatttgagttttcatttttggagttgtaggaatgtattaagtgaggagaaagcatccttttttgagttttgttttacagaattataattgcagcttgtgaaattcatgacagtacattttcttgacccatgtatatgcattcataatcatgtatatgtattatacatttaaacaagcataatgtagtgtttcatatgtaatggggattgtgtattgcggaatagaaaaagtggagaagatttcattgatctgaaagtgaatgaattgaattacagagtgcttgaactacagagtatatatacagctagaacccaactgacttaacagacccaaccgacttaagtaaccaacgcccagtaagaataggaaaccgttaatacagttaaagaagataagtaaggcaaggactaactctaactataactaacagcactacacagaacactacagaaccaatactgcagtaaaatgcagtaaagtaataaagtaattcttaacatcccccctcaaggtggactgtatatatcatatacagacatcttgacagtatgagtgttgagtgtagtggatggtaaaggcttggtgaaggcatcggccagttgtaagttgctggaaacaggtatcaaccgaatggtggagttgttgattctgtcgcgaacgaagtgacaatctagctcgatatgtttggtgcgctcatggaaggtaggattgttggcaatatggattgtagactgattatcgcaatagatgaacgctggtttatcttgtggaatatggaagtcttgaagtagatattggagccaagtaatctcactagttgttgcagcgagtgctctatatttagcttcagcagaactcttggaaatggtgagttgttttttagtcttccaagatatgagacaatcaccgaggaagatgcaaaaaccggtggtggagcgtcttgtaatggcgcaagaagcccaattcgagtctaagaaacctcaaagatggagagcatgaattgttgggatatagcaatccttggcctgggctacccttgagataacgaaggagatgtgatacggcttgcatatgtggcgtccttggtgaagacataaattggtcttaatatgttaacaacataggtaatatcgggtctagacaaagttagataaaggagtttcccaattaattgccggtattcagaggggttggttaaaggttctc

SEQ ID NO: 230532 - DNA, 583 bp, Cannabis indica
ccacgcgcggtgacgattttgccgaccaacgagtgtagagagagaaaaagctgttgtttttgaaagaaagaaagaaatgtgagaaggattagttcgatctttggcttcctctcatccctcggtggggctgcctcagccaccacaccgtccctcgccacacgtgtgttgtggaaaattttgcctccaccatctcaagtgaaaagaaatatgaaataaagaagacgttaggaaggtaaggaaaccccaacattctgaatcatttggagaagaagatgaaagggtaagggtttagttactcgatggtgctgaagttggtaattagttcggggagatttgggttgtttgaggtttcaatggaggcttgtgttcagaaagcttgcccaagactattgattgattggggtgaggtgtaaagtcctttttgacaatttagatgctaaaatagtttttattttatggtgagatttctttgcattcataaccgattttctcacctttattattcgatttttattgctcttttctatcttaggaaagaataattttcagctggacttttattttatggaaacttcttgtaaga

SEQ ID NO: 230533 - DNA, 1142 bp, Cannabis indica
gaagaaaaatgaacatttattaatgttatttttaagtggattttagagtgttttttaaaaatatgaaaatttaacatagaaactactaaaaaaatcacgtaaaaacccaaattataaattttttttaaaaaaattataaataatgtatggataattcttcaaaatttttattagcaaaataatattatatggtcgtagaaatgagcatgaattaaattgtgtgacgataaacgattattatgtttgtaaatcgaccaataaattaagtaaaaaattattttgtaaattttaatatttcgtgttagttaagcaaatttcactaagttatttcaaacgtgtaaaactgtaaattcttggaggacgacaactttcctattaagaagaaaaaggaaaaaaaggaccaaacgacaatgcatatggaaacaacagtaaacccaaatgcagtacgacaatggatataatattaaaaaatatataatatatatttaaaaggcttcaacatggaccagaaataaatgagagattcagaaaaaaataaaaaataaagtttatgtttacgtttacgtttaaaaatagaaagctattgtatttccgtagatccaaaaaaaagacgttttggtattcgtctcaagtctcaacctcaattcattttgagtaaacaaggcaatgaaaaccaaattgaagaacaattaagagactaaagaagagattgatcaatgagtaaccttccatttcgagtctgagaagataatcccctgataaagcaggccggagaaaagacgtttttcctgttttaaacaatcactaaagttaggagttaggagaactgaaaaacaagtatgagatgtaatcaaattaagaagagttgcgaagagaactcgcttttttcgcaccttaatagtttaacactcagcattatttcttattcgtagaaagagagagagagagagaggcctcttcggttggacgacgtaataaaacccactctttctctctctctctctctcagcatataatatataacaagaagagagagaaagtcaagacaagacacccaatagcaacagatatatgatagtctgttatttggatccttcgaaatactgaaaatagaacaacctcactcattctaattcactagt

SEQ ID NO: 230534 - DNA, 669 bp, Cannabis indica
atttaaattaatataaaataatgtgtgaaaaaaatttaaatgtattaagagtaattttaaaagttattttaagtttatttatttttaaataataatgtgtacttctcattttatggggtgtaaataaaactcctcttcaataaaacgtataaccttttaatggatttccatctatatcccttttttttttattgttattatgcttcttttatttattttttttttttagggtaagggtctttatttattcttttgctcacaaaatgataaataaatagggaaattttaaaaaaatttgtaaaaattgtactaaaaacatgataaaagtaggaatacatatttttcctatagtgataggactctctggggacccgccccaaataggaaggaaatttccaatctaaagggaaacggggcggggacgggaaattattttttgtctccgaatgttaaacgaggaggggacgggggatggacacttcctgctcaaacagggacccgcgtagtattttattatatatttctaataaatatttttataattttataattttatgttttatattttttttagtatattagtatcattttttatgaatttttatgttgtgtttttgaataataatcagtttattaaatagtaattaaatgtgtaatattttaattttt

SEQ ID NO: 230535 - DNA, 3249 bp, Cannabis indica
aagtgataaaattataaatacaacggttagtgtgaacacaacatcataaggtcgtctcaaacttgaccgagatagacatgacatgaatagagtgcaaaaggatgaaccactagaaatggtagataacgagttctttaagagcttgcagctcattgatccacatattcatgagtatgttgaaagactaaaagaattgaggaaagtatgacccatctcgaaatgttcatagacgacgcaaaaagattgaagggacacgaaagatacaatcttaaagggtgtctcaagatttgtcataaatggcaaaagtgaggaaaaacatctcaagtagcgtttcacagaatacgtccagtcattcccaaatataatttaagaatgcgagccataatttgagtatattatcttaacaaagaaactactttctgataaggacaaaaagcagttatcagtagttaattcatttatctcacatgttgtaaatatgaaacgtgagggttgtccacattttataaatggttacctaaataagatcaaaagagaataactgtcactcctaaaaatctcataaatagggatggaacctatggtgcaggggatggacaatcttttgggaggaataactttgacagattatgtataggaaatatccagaattactatcatgtatccagaaacactaaaaaagaataatcagaatcaatactgactcgtggagtatgtagagtttgactaaaaaatcacataaaaattcattttgtcttatttatatttggttatatgtaatattttaattttatttataagacttcattattgtttccaaatttctatgttaataatttgatgctttcattaagagcctttgtcataaccaaacttccttgtcatggaaaacactcaacataatgaactagtggtggaagaagagacggtgcgcatctaccgagaaaagagccctagggatcacaacctcaaaataggccaaactaaggaaggggtcctactaaaaggaactccgaaagaggtgaccttgaggaagaaattccaaaaataacagagtcagttgcatatgaccctacgagttatgtcccaattatgtgattcagattgtctcttaaatcatgtacgtgtcccaacctattgaagactagttcacctagaggccttcttgtttggtcgttatcaacagttgattggttcgatatatttgtttgaggatagaaattatattaaccatttccccaagataatgggttggaaaaacttgcttgtctaccgtgtggcccacaatttgatcctgtggcctcggattggacgacccattatcttgggtctgttgagtatagttggccagacgttcttctggcccatactgcggtttgtttgggatataggtttctttccctctattcagatcttgtatgagtggagtatcttccactgaaaactgtctagttaacatataagcccgtctaatcagcacggtttcctgcctggagcgattatcaatctttgcttattgggctctcatgatcttcatttgttgatccacccactcctagaattggcatttttactgttcaaattccaaattcacaactgctcgagtatcctcctgatcatggtgaagagtgttggtatgttcttgcatcttctctaaggcatctcgcagattacacagcttagtatcatcaccgatcactgttcgaggttttccaataggtggatctctagtacatggcccaatctctcccttatgattacctatggttctagtttcttgtgtgctcatagtaaacccagccaaaggggttgttaccccctgtcctactgatggtggaactcgtggtggtaggcaggtgcttggatcaggagtttccaccattagattactctgattagcaagactttgcacattaggatctgtagccatcaaatcaattgtttcagtagtttgggaccttctagtagttacaactatctttggatgatttagagaggatcaaagcaataaatagtgttctttttgctctcaatgaaagcaccaaaatgttgacctcacttttagccaatgacgccgagtcaattaaagtgatgagaatgattagaaataattatatgtaatttagcaataagaacacaaagatttatagaggttcagccccgtgattatggtaatagcctactcccttttttgttgtattactttggagaattaataagtcacaaggagctggccaggtgagtttgttaagaattctctggaaaatctgaaaattcttacagcataagagctcttctagaaaatatgatttcggatccctctgtaggaatggctccactatttataggaaaaattacttcaatttagttttccaaaataattagcaataaaaagagaaacttagttagtttcctattttacatttacaacgtgtagaaatctcactgaaatagggatttaatttgaagatataaataaatagtatccctaaaactgcctcaatcgcattcactttgtccggattgaaagttgctcgaacaatttcattcaccatgtacggatgttttatactaatcttcagatgagttgtttctggataataaatcactctggacgacatattgaggaatgtatggcccgtccaggtcacaaaatgttctccacatgtcaccctatgcataaattgagataacaaactcccaacaggaatacaatttctttttatttttttaatttcttttttttttatttatgttgaccaattaaattgtgtcatgtgtacattgtattcatgtagaatatattgtctacacataaatagtccaacgtgacaattaacaacaaaaaatgaatggaaataaaaaactgctaatagaacacaggttttgaagttttaccgtcaaaaaatagatttggagagttgattgctaacagggtaaaacttttaggagtttttctacaatttactctttatgtaacgccctaatttatagggacgccatgtgtgtgattttataaactagtttaatagtaatagaataattaactattaaaaagtgtgataatattaaaaacttgactaaaataaaatactaaaaacggacattataacggcataaaaagtgtgttccaaagatccctgttataaaaaattttgctaaaaaaatatatattacaaccacttaaacacaaaattaaaatacacaacagatacaaccagcccaaaacaactcatggcaactcggcac

SEQ ID NO: 230536 - DNA, 2091 bp, Cannabis indica
ctgacagcatagtcatcaatatacatacattatgtcagattgacgacggcctccgcggatatttttaagaagtaatcatttttccatttgcttcgtgaataagaaaaaagatggataaagtatttcatccaaatacgtacctggttcttgttggcatcaaccacaactgaattggataattttgatagcacatcattggttttattcttcacaccaacctataatacattgcagtaacctttagatatcacaaagaatgaaggcaacagtagcagtagtagtagcagaactataactttattttccttttcttaaggaggtagcactacaattatttgttcctaatctagacataagtgagccgataaaggtccccttcaaaattaatcttgaccatgaattggtgacaacattcaactacaagcctgttaaacctaaataaaccaaaagcatacactagattatataaatgattgtatggaaatcctaatatccaacatttatgatttaacaactcacaatgtaagggacgggtgcatccaaaaagtctagcatgtcgtttggcaaaacctgggatattaagagcatggtttaagtcaaataatagttaaaagaccaagcatattactaaagaattacctgctcagtgctcagaaaaagtaacaaaaactaaataaagtttaccggcactagtaggctttgccaccgataaggacggatcagaggaataattgacaatactatagcagataagataccctgtatgcatcacaatacaaaagttgtcaggtttcccataaaaagctgaaataactgagacaaatgaaatgaaatgaaatgaagtgaaagactaagacggaatacttctaataggaaataaagaaagagtgaagcagtaaaaaatatgatctaagcagtatcactaacatctaatatgatacactagcttaatgcccatttcaaacctgtctcaaatcatcaaacaatggatgtgtgtgtgactagaattgtacttgatcaactataagacattttacacaagcgcaactatgattctgatgacctagcttgcagttactttgaatcccaaaaaaatatgctatacacttctcagtgcgtaacacaaccctatgtcagcaaggctaataaatccaaacttcagaacaatatggcaagtccattgaaaccttatatatttataaaacaatggtgtaactcagtaggggaaatgagacgaaccaaattggaacagatcaccacaatattcttctccagaagtgcgccagcgaacaaagttaatatctgcaaagtgcaatgagaatcaataacctaatttatattagagagagagagagagatagaatccatactattagaaaaaaagtaaacacttaaattcaatcaacctgcacgcaccttaaaaatctagaccatactattaaaataaacacataaattcaaccaaactgcatgcaccttaaaaatctagaaaattaaatctaagagaatcatttactgaaagaaaggtaagtctgaatatagatttggaaactaacgttatcaagtcgtaaagagccacatatgcatgcaactgcccatgtagacaaagcaattgcttcctcctcaaccaagagtgctgtatgtgcctgacaaaacaaacaatgcaatcaagtttagattaaggaaatttttataaagaatcatatgacaaaaatatagtctgaaacaaatcttccagggacagaaatcggtaaagactaatttcgttattataatctacctcagcaagttctaaacttgtagtgcatgacctcaaatcaatagttgaaccaccgatatgtatgactgtttcttctaatctatgatattccaagggatgcaaatgatccaaggggtgaaatcgaagagttgaaccctttgcagggcaacgcagctgataatactcacatatgatttgtagtgatccatgattatttgcctggaaattgattgaagaagggaatgtaaaactacaacttaaagcacaaaataaagttctaagtgcttaatagccaaaacatctcatataaaagaaacctaccttagcccatt

SEQ ID NO: 230537 - DNA, 2456 bp, Cannabis indica
ttattattattattaaattaattggttttttgattagaatagcaaaaatattttcaaaaaacatgtttattaaattgttttattaaaaaattaagcatcaaaattttaattttttagaaatatccatgttattaaatctatacaataaaaaaaaaagaaaaaaaaaaaaaagagggttgactggtgaaatagccaactcactcggagtctaataaacgccaaaataatcaatggctgtgaattatgaacagtgaaatagaattaagaacacaataattttataaagattcggtcattttgataatggtaatagcctactccaatcttagttgtatttatgtggagataatactatacagattactggtgttaaaccaagtaaattctaactatagcttttaaggtgttacagagaagaaaaaagaagagagagatgatcacacgagcaaggctagctctcctttactctcgagcagcttgctgagtttctacaatggtccattgttcatggaactaactttgaaactcctccagcttcttttccaatgactttcgcaaattatgttgcaagttagcaacattttccttcagatgctcaatctcaaggttcagcttgtcctccttgcctaggcctgtgcctgcctactactcgcctaggtccacatgcgtctcatgtggtgggatgcattctgcagcaacaatactggtgcttgttgacggcctaggaggtagtcttgaggcaggggctctcgacacaccaccagagggggtgccaaaagagtctcgaccgacactagcagatctcgtagtgaccatcttcataagagttattagttcttgagcttatgaattcctttcgaaacatagcacccagcaaaatactaaaaactctaaggcaaccaaaggactcgagtggtagctctcaatgaaaatatcaaaatattgacgttgaaaaatggcaactctgtatattctaataagcaataggaaaaataattagagagaaaagaaagtaaaagagacaccacaatttatagtagatcattccccttatcacaattgtaatggagctacgtctactttgagcgtttattattcacgatatcttaaattacgtataagaaaattagctaaggagagctctcactcacaagttctaaagagagaaacaagtgagttttagagagagaaattatgaccttatggagagatttcaaagattaaaaaatgagctagaggcctcttatttataggaatggaggtccaataaaataataatgaaacattaagaaattgggaatatttcatttggagtaattttgaccattaattttgatccaatggttgagatgcttatatttgaattcgaatggtgattttcggtttttagcttatttcgttgaaaatcacacttcaatttggagtgattttcgaattgaaaacttcatatttgagatcttactattatatatgcatagaaaaaacttgaagcgagatttccaaagcacttggaatcacgccaaacagagttgtaacgagtgaaataagtctgttttactaatggataattcagtagcctgtggccaggttgatactcttgcgattaatatattgtttgatgtcaacttgggtgctggtaacttggaaaattgtgtcgaaatcatagtttgcaaagtctatgtgatattattacatcacttaactaatttcttgattttggtgtagcccttcaccagttcttggagatttcactcatttgcaaattgtgtgtcaatttgcgactagcttgccgatattctaccttagcgtaaggtgaaaaatcaatacataaatttgaaaatctacaattgctacaccttgtttgtgatggagaaatagcatagattcctcggcataattgaatttagataattgaaaccaccagcgtctggttggatgtatacctgggcgctagatgctccttttgggactctttgagagtcttcttggtactttgatgatgaatttgtttgaacatgagggcttctccctcgtttgggtcaaaatgcacaaaattcccaaaatggaattggcatttgtgtaacgaaaccatgcgcgttagcttgaatgtcaacctggctgctgaagctagtccccatgtcaacctaggtgctagctagggattttggctaccagattgtctcgtttgttgttcgaaagcacttgtatctttgttgttgatgaaaatggagaaaatgctcaaaaaaaaaaacaccttcggaaaactcgtcagaagcacccccagtctaacaatatttcaacctaggtgccggtagtcgaggcatgtccacctgggtgatgggtctagattgaagatgcttggaactcatctttttgatgcttgatcttctttctggtggaaagtactcacgtagattcaattttatcaaattcgcacgggcgttactcgggaaact

SEQ ID NO: 230538 - DNA, 809 bp, Cannabis indica
cctaataaaaaattattataagacaaagaaagagccaaaattgatgaaggaataccttcatgtaagggctaactaaatacataagccaaataaattaaaaatggtaccaaaaaattctcatattatttttggtaaatacaaaaattacttcaactcctaggcaagaaaccctacactagtgaagtagtactatcctcaaatatttcctcaaacatcctcttccttgccatttttgcctgcaatagtaatataatccatttttagagagatatgatgagaaatctccaattaataatcccttaaatttgctagaaaaatatatatagaaacaaacaagtctcaaaagaatcaaaagttgagtaaaaatacataccttttcattccaattggtacatattgctatcaaagaaagcaaaaatgcttgtaagaaagaaccaattataattccaatccaaaggccttttcctcttaaatcaaaccgaaaacccaatgctgcagcaaccggaattcccaccaaatagtatgctccaagattcacatatgcccccaaatcttgccatccacaccctctagcaatgcctggtttaagatgagattaatcatgagtgactcgagattcgagaatgttatcactattgatcgatcgatcgaacaaggaagaaagaactagggaaaaaatacctgaaagagtagcatgtaaactgtcgaatatgacagatagacaaactagaggagccatgttcatggcataatccacaacttctttgtcattggtaaagaagtaaccgaaagcttttcggccagcaaat

SEQ ID NO: 230539 - DNA, 2297 bp, Cannabis indica
cttttacacctcgtgcttacttgactgaatatgaaactactactgattctcataacaccactgcctttcctgacttttggtgatgatctatcatggtttgttgatactggggcaacaaatcatatcaccaacaacctagagactcttgaatcgtcaaatgtttatgctggatccgaagctcttgctgttgctgatggtaagaaaattcatatctcacacattggatacacctctttaccttcatctgttaattgtccattaaagttaaattctgtcttgcaaataccttcaattaaaaagaatttaatcagtgtttctaaactaactgaggacaactatgtgtttcttgaattccataaaaactggtgctttgttaaggacaaagacactggacaggtactgctccgagggaagcttaaagatgggttataccagttggcagatgcctcctcttcatcctcttcaactactctccaatacaatcttgtgtctagtcagtttgttgactctgaatgtgtctgtaatcaaacatgttccaagtataataatcctggaacaaattgtactttctcctcaatcaataaaacatctattgtttctgattgttctaccctcaatcctgctctttatcatgtttccacaaacaaagatgttaatacttggcattgcactcttggacaccctgctataaacactttaatcaaactattgccccatctccctcacactggatcgattaaagatttgactttttgtagtgcttgtcaacttggtaaaagtcacaccttgccctttccctcatctgaaactaaaaccagtcaacctcttgccttgatacacacagacctatggggcccctcccatgttgattctaagcagggatataaatactatgtacactttcttgatgattacagtcgatacacttggatctttccacttactctcaaatctcaagcccttgaagtgtttctaaagtggaaaagtttagtggaaaaacaaattaatcttcccattaaatctgtccaagcagattggggaggggagtacagaccattcaagaggtttctagaggatcaaggtattcactttcaacacccttctccaaagactcatgagcaaaatggcaaggcagaaagaaaacacaggcatattacggaaactggcctaaccctcctagcacaatctggtttggatttgtcttattggtggtatgcttttagctctgctgttttcaccatcaatagattaccaacaagagtcttagaatatctctcaccatatgagactctcttccatacaaaaccagattacaacatcctaaggtcttttggatgtgcttgtttcccccatttaaggccttacaacagatacaaaatggagtatagatctcaataatgccttttcttgggttattcctcacatcataaaggctatctctgtgaaagtcctgaaggccgactttacattgctcgaaatgttatttttaatgagcaactttatcctgcaaaaggctcctctactatgtctcaggtacaatcaaatatttcacctacttctacttatactactttttctcctatgtctgtacctctgcatactgaccacacttttgttgcttctggtcctgctatatcaactactcctgctgcacctgagtcctcactacccactatcccacatagtcctcctcaggatttacaccagccaccaaataacacctgttctgccccacaaataaccttgtctctctcccaaaataatcctcaacagttacctactggtttatctcaaaccagtgaagtccaaccatcattaacccaaacacttgcacctgagccaaatgcaccatcaacgactgtcttgcctaatccctctgtcccatcccacactactagaagccactccatgaaaactagatcccaaagtggcattaccaaaccaaaatcataccttgctactaaacaccctctccctgaatcccttattcccacagaaccaaaaaatctcaaagaggctcgtagtaatcctaaatggctggctgctatgaactccgagattcatgctctcactcaccaaaaaaatggactctggttccctatacaacagatatgcaggtcattacaaataaatgggttcatcgtgtcaagctaaactctgatggaagtttggacaagtgtaaatcaagacttgttgctcgtggttatcttcaaacttaaggcatagattatgctgacaccttcagtccagttgttaaaccaatcactgttagagttgttctttcacttgctgtcaac

SEQ ID NO: 230540 - DNA, 622 bp, Cannabis indica
acagtctctctttccacactaattggttatgatgatgccaaatggaccaacataacataacaaccttaatatcaactctacctgactccaatacctcaatcttacttcaaaccaacctagaaaaatcatggagttcgcacccacgataggaactcgagacccgcgccagtaattctaggcaaacgtgcaccatattagaatgtgtagagtcgtctccagtgcaccattacacacaaggcaactagaatcaaccggcacataatgaacaaccagctggaacttagttggcagattatttgaacaagctctccaaagaaagtttagcacattcgggggaactttaattttctacagtttctttcaaagtccatcttgatcatggctagaccaatttccttgcagagtttgtaacacattataagcggatttaacaaaaaacatactcgacctttcttttgcccagaaacacgagctatgggaagtgttactaatcagaaatttcagaaccaaacttgcatctcgatctgaaagtacatcatcgaggatctccccatccctatctgcaccattcgctattataagagtattaccttagtttaaaaccaacgcaggtgagtagact

SEQ ID NO: 230541 - DNA, 1630 bp, Cannabis indica
tagatttttctttctttttttgaaaattttggaatatagattgaatggtgaaggataactagtcaaaattcaaatattctagtatatgtttacacactttaagagtttcgaaagattagcttattgcattttcatagaaataattgtgtttgaaattgcttttcatttttattttaatcttaattgtgtttataatttttttttgcacattttggtacttgctgataacatgaccagctaaggttgtcgtattttcacatcttccagtttgtctttcttttcctttctaataattgtataaataataattatttcatgtatatctaatcaaatattccgtgtgagtggttgaagttaagcaaaagtgttattagtggatgttgaatgttaatatttgttaatttacacgtaccaaaaaggttttttattcacctcaattatttacacaattatagtaccaaaaaggaaaacaaagtaaccccatactagaaattattcttttcaattcttatttccttttttaatcaattatacatatatatggggagagataaagaataaaaaaaaaaaaaagtacaccattcatgtgagtgtggtagtattgctagtggcaccccttttcattatgttccctttttatgatttttattttacttatcaagagaaaaaaattataaatatgtaaatttgttaaagcaatgtatagtgttagactcacttagagatgagccagcccacttaccaatatttatatatttaatatatacgatctgcaagtatatatttgatggcatgtgttgttttgtggtaatttattttgatattttccttccaaccgttaaatgaatctcactaagaaccaaaccatcaataactggatatagctgtctcaaagatctataatattccatcatataatatgcatataaaaattataaccatcataaatctaactctccaaattaaatcacttaactttattttttatttttattttttgtaaggatttccaataagatcaaattgcttagtatatccttttatatccttctggaaatcagtgggaggttgcagccttattaagaaacatgtagatcaagatctctctagcaggatgttgatcccgtctttgatcttctgtgcccatttcagtttgttgttcatccttagtggtgttttggactttgtttttgtctaaatcttgctatctctctcattgcatttaattcagtctcattttctctgttttttatttattgcttactagacaatgaatctgcgcttcgcgcggtttttgtaataactaaaaaataaatgtaaattgtatacaataaaaaacaagaaaaatttattttaataaattatatgactgcaaaattttcatgggagtcttgttttctggtacccatcacgaaagaactccacagataaacatttttgacctagggtaattttaagatgggtgacctcctagaaagttttcatgggaagcgtgcgagtgaggacaaagcatgctggaaacactcgttttggtttgtagggctagtcgtcagtccatgaaccagtcagagtggcgtacccagttatgaaagccataaacccatgggggaaggcccaataaaggcttgaa

SEQ ID NO: 230542 - DNA, 876 bp, Cannabis indica
ctctctctctctctctctaacccgaccctctctccctctctaaaccctctttcttttcaatttgatttggagagattttcttggaaaattgcttggatttggagcttgacagttgtagaactttgagcttacccttggattgagtttgaggtagcttcctatgactttaatctttgttttatttctgaatttaagtgttgtaaaagcatgagttagtgatgatgttcttgagattgaatgtataaaagaattggagttagttttgatggatttgagtatgtttatgcttgaatccttgatgtgctatttgattgagctctagatggaattttaggatttattttcatgtcttgaatttagattattggtagtgtttgcagctggaaaatatgtggttgaataggttgaagttcttgttgattgagcttgaatgttgtcagtttaaagcttgatttgtgcttgttatcttgactgaaattatgagattaatattggattttgatgcatgagcatgtatgttaaaccccctatatgattattacaatatctatttggagatatgaagctttaattttgatttgtatgggttttgattggattaggagctgaaatttgaagtgtttgttgctggttttctgggtttggaacccaggtgccgcggcatggcctggtcatgccgcggcctgcccctttttgtgaaacctgggaattggtcccaggtgtcgcggcatggcttttgcatgtcgcggctcgccctcgagtttttgggcagattcaagtgcaaactttgaaaatccataactttgtgatccgaactccgatttgggagttctagataccgttggaaagatcatcccgagctctatgtgattatct

SEQ ID NO: 230543 - DNA, 1276 bp, Cannabis indica
aagataatcaaatggtggctttccgatctactttagatcaatgctgtttaaaagaattgcccttcaatggagatgattttacatggtcaaaaagcagaaaaaatccttctgcactaaaagaacggctcgattggtgttttgtcaattcggtgtggttagataatttaactcctccaactgtgtctcatgaggactactatggttcggaccatagagcactttctgttgtgctcaatttctctaatcaccaaactgttgaaaggagaaagtcaagatttcggtttgaaaggatgtggttaaattcccctgagtgttctcgactaatagctgattcttggatggcaaatgggatagatgggaactgtattgataatttgacagctagtttggccgattgtgctaagaatttgcagcagtggcacaacaacacttttggccatatgaagagggatattaaagatgctcaaactcgggttcagcaattacataacactcctacgcaaggcagtgatttttctcaaaatatcacctcggctgaagccattttggatgagcttttggctaatgaggaacaatactggcagcagcgttcaagggtggaatggctcacttcgggtgatcggaatactaaattttttcatgcaaaagcttcttcaaggaaatccaacaattatatcagaagtatacaagatgatcatggtcagacttggcattctaaggatgatattacctctgttataacaaactattttgaaactctttttaaggcttcagaggaggatcattgggctctaaatcatgtcctctctaccattccaaccacaattacagaggctcataatgactttctccttcatgacttcactaaggaggatgttttttctgctttaaaatctatgggagccgataagagtcctggtatggatgatatgtctactatgttttatcaacacaactgggaggttgttggttctttggttacacaagtcattttgaatgtcttaaatcatggagccaacccagcagctatcaataagactctaattactctcattccaaaaatgaagaaaccgaaaacaatgaaggactataggccaattagtctttgtaatatcatttacaagttggtttctaagatgattgcccttcgactaaagcatgtgctaccaaatgttatctcccagactcaaagtgctttcctgcccaatagacaaattacagataatgttttagtggcatttgaaatagtgcatagtctgaagcatagaacaagagg

SEQ ID NO: 230544 - DNA, 1291 bp, Cannabis indica
agggcagcaacaacttcttctggagtgaaaggtgcagtaagtgacatgttcattgtaggaggtattgtttcaggtattgcatttagtatagtctggagggattcaggttggacaccatctgttgcaaataaggaagaataaaacgaacatatcacttgggtcaagtcgtctttgctgtttacagtaatgccttgatcattgatgagtgatttaatagtgtttttggcctgccgtgaagatgcatgagcgtggaaaaatttagtattttgatctccacattgtaaccaatccactcgcgatctttgatgccaatattcttcctcttgtgcaagcaactcatccaagatagcttcagtatttttaagctgagaaactgtagcattggttttgtctgttgcattatttagtgcagcaacagattgttgcagctgagagatagccttcttcatcttcccaaatttcctagtttgccattgttgtaaagcattcgtgcaagaggagagattgttcaggaaagcattaacactgccagaacagtcaggtgaccagttggatcgaataatgacagctgcctcttcctccttcagccacattttctcaaatctgaagcgtgtttttcttgctggttttgcatgagtagagttcaaaagcaacacatccacagcaattgctctgtgatccgaagcaaactaatccaaatgggatgttactaaaggttggaaagatgagttccaactatcattagtaaaacaccaatccaatcgctcatgaatggtatccactttgtgtctccctttaatccaagtaaaagggtctccagtaaagggcaattcattgagattacacatatccaaaacagttctgaaatcttccatctgtcattcacaacgcctattacctccctttttattgtgcttataaagaatttcattaaaatccccaatgacaacccaaggaagcaaaggagcaacatctttcaatcttttgagaagagtccaagtgtgtacacgatgagcaacattaggggcaccatagaaagcagtaaagtgagaactaggaccattgtggaaagccaaataacaataaaaaacatttgcattgaaactattcaaagttacatcaacatcatccttccataacaacatcaaaccaccacctaaaccaactctagggacttctagaccatactaaaatgtaaaagactataaaagcgagaaatagaattacaaggtaatttagtttccataataaaaagtacagtggggatttgctctttaacaagcaaacgaag

SEQ ID NO: 230545 - DNA, 987 bp, Cannabis indica
ctggagaggtgcattacccccagttggagctccaagtcgtacatactactcaaaagtagcatgcttctgtctgatcaggaattctatctcatctcgctattgattacactcatttgtatcatgaccgtaatttttgtgatagtgacaaaatttattcatatccctcttccctaattatttgaaaggaagaggtttgtggtacaacaccattgactgagtggtcgtatagatctcttctcttggggccaagagtatataataggttttgaagtgaggttcatactctcgcatgggcttgcctttagttttggctttctattcgccaggggagtttccttgtttccctctgttgttagctctttttcctctatttgaacctctctttccccattaccctccactccagtgtcaggttttggggagcctattgatttcttctttttatttttcgagccttagctcgagtgatagcttcttcaaacttgataaagccacctgctccatcaaagaagtcattcatagtgtaaactgacttgagactaaggtcaaacaacaaaggactgatctccttgagcccgactacaagtttcacaacccttgcatcctcgctaagtatttttttcttagcggctgcctttaagaatcgttaaacatagtccttaaggggttcatcttcttattaatttaagtctaccaaattgttgggttcaatttggcgctatcgagaaggagcgaattgattgccaaaaacatccactagatctttccatgaatcgattaatctagggaagcttacggtgccactcctgagccaagcttgtcagtgtggcagggaaaattctgcactggatgtcatctcctagtccttacagatgggtctgcacttcaaagtaatgaatgtgagacaacgagtcttctttccctgtgtattggtgtcaggaaggattcttgaactttagagggattcgtagagctttgattcaatct

SEQ ID NO: 230546 - DNA, 1563 bp, Cannabis indica
tagaacactttctacaataaataatacatatacatgaatttagtaaaaacaataaaatataagtaccatttttagaaatattaaaatcattagattttaatcaaatgacctataaaagagaaattttagttctatacataatttagctaattaattaaaaagatatgtgtttttatacaatataaaaaatatacaactcaaactccacttttattaaaaaatgaaaacacatacaactaatttgaactctatttttgatactctagattattatgtgttttatgaacatttgttataactaaatgttgattatggttacaagttttgtcattcggaagggaagctgtgaatccagaaagtagatatgtgaatgttggtgtgaatttggaaagtcttgtgtggaagactttgtagaattcggaaggtgtatccagataagcttgtatcgctatgaaattaaatcgtcttcccgaatagcttgtcattagtctgaagacgcacatccagatagcttagtgttagtgttggttgttcatccgggaaggagcacttgtatgagtccagaagctatgtgagtaatagctcccgaatggttcgtactgaaagcgcaccttcaagctgacgtggattattgtgtgatgagctggatcatttaaggcggtgtaaatgtgtcacgatattttcgaagctaatttaagcaacaatgtaaatctacaaatagctatcaatttttgtaatcagagagagaatgagaccattattgtttgagtgtaaatcatgatagtgtgtaaggttgagagagagaatctaaactagagagagaaattttttctcgtaatctcttagagtttgtgaaaattcttgtaaccttgtaaacactgatattaataaagatatgactgttgctgttccgacatatgtagagcattgtacatgattcgaatttgttaaacctgatgttattcttttctattttactacttaattcgttacttaaattctgagatctcttgatttattgtttcttgattgtgctgcgtgtttattaatttaatatactaaatcgtaagtcattaattgtttccatttcgacactaaaataaaaaattttataccaaaaaaaattgaatggtgtggtattatattttagtaggatcttcaaatagaaaggtggaatgtgaacctagacggataggtggtctgatataagaaaaggaataaattttgaatattgacagttgtccttttggtttttatgtatttcttttacaaagttcatcttagttacacttatatatgtatatataaaagcattatatatcaaaggataatttggagaaccatatatatttgtgtggaatggaatatataatgtatgggaaaaaaggacacgtaagtaaacaatatttgatgatgagtagatcctatcctttatataatatggccataaactgatgattcatttgacctgaaattatgtccaggttcaatcttttgtccccttcttctgaggctgtaaattctttcggaattggctactataaatatttgtggtaattggcc

SEQ ID NO: 230547 - DNA, 938 bp, Cannabis indica
taaaagtcacatttagctaaaaaaaaataaattatgttgtaattaaaggtaacgattttttatagtgtgtgtaatttgaatgtgtaatccgtaaatagagtcagccgccaaaaaaaaaaagttttataattttattttagaaatatcatatatatatatatatatatttatatatatgattctattttaccttagggatactactacaatattattactcatatatatataaaagtattgatggattaatcttatactacttaccaactcttcttctgaaatattgtaatgtagaaatcgatctccccaaatacatggatgataattttttgttggtcgaacaattttatgtattttctcattttttgatgatgccaatattatttggttggacattatatatgttatgattaagaaaatatatgagactttactaattataatagctaattgatgaactaccaaaatggtgtacatatatatagtctaggaatgagtttattaagagtgatatatatggtcacccattattttctaaaatatttagttatatattttaatatttattaatagctacttgattggaccacgtgaatctgccattcatgattatatattaatttttctaattaataatattatcattatttttagtgttatgacatttttataataataataataataaatgtgtacgttctaattcggacaaatagattaattaaaaaaattgtaatgttagaaagttgaatgttttcctacgtattataattcgatcaaactcttattatatgttttggggaataattatctattcacaagttgctcaccagacaactattcatatatattatcttttatttatggaatatacaaatatttggattatggtgtagtggttggctaattaatattatataatcataatagttatactt

SEQ ID NO: 230548 - DNA, 1473 bp, Cannabis indica
gcactaataccattatatgacatcatctatcaaaaaaatattataagacatcatcatgttatagcattactgtgtagtttttagctcaaaaagcaaaaataaattggattaaatatggtgatgaaaatttctcttttttcatacatcattgagaacccaaagagctcaaagtagaattaattccataagggataagggaggaatgtggattgatactaagagagaatccaacaagctattcaaatgtattatcaaaatttgttaggatcaaatatgacccaacggaatgaaagtgtctccattgatcatagctaatggttcgaataaccatgtgcttatcctccattaaccttatactagccaagaagtgaagaatgcattctttaccattcctggtatgaaagttctgggtccagatcactacaaaaaactgctacatttagtgacaacgttttagtcacaacataaatttttgtgactaaatatcacttttagtcacaacaaaaagttacttgtgactaaaatatagtatttggtttcaagttgttactaatttagttttagtcacaataaacattgtgactaaaaacgcatttagtcacaacaaatcgtcatttttgtgagtaatacttttagccacggacattttagtcacaacacaataataataatttataattagacacaactattttttatctttagtcacaaatttgttctgactaaaaataagattttttgtaatggatgaatttgagagctctttttatcaagacaattgggagttagttggagatgaaattgtgacaacagtagtgctaaaatttttttaatacaaggagaattctaaaagaaatcaatgctacaactattatactcatccctaaagtcaaatgctcagatagtatgaaaaacttcagaccaagatcttgttgtaatgtgatatataaggaagctaccaaagttatttgttcgtgacttaggcaggttctttctagatttgatagctgaaaaccaagctggatttgtacatgggcgttacatagctggatttgataatatcatggtctgtcaagatattgtaagattatatggaagaaagagttgtaagccgagttaaatgatcaaaattaatttgaagaaagcgtatgacactataaaatggggatttattgaagagatgctcaatgcatttcagttcccacgatattaagcttatcatggtatgtattactacccaaaaattttctttattacttaatggagaaattcatggactctttgagtcaacaaggaatttaaggcaaggagatcatatatctactctcttatttgttctaggaatagaatatttatctagaataatgagagagataggttctaggcgaaggatttaaataccatgatagatgtactactttaaagttgaatcataaagaattaatataatattataataaaaatataataaag

SEQ ID NO: 230549 - DNA, 2033 bp, Cannabis indica
gcatgtcgagctgatagaacctagacacgcaagtctatattggtttatcgaggccattggatcgtagggaccaaatcgcatcatagagagttgatctctatgctttcgcagaaataaagagaggatactcgcatatgtactgacacatgcgagttggatccatcctgtataatgtgagttaaagttatgcgattcgacttaggtcgtactcgcagtatctcgctggttttatcctgggcgaggttaaaacatcgagtagtctctcatggacaattcagctttcattggaaatctgaatacacgtgtcctttaaataggagtctggtctcgagtttctaggtgagagaaatctcactataacacaagaatgcataaatttttttgctccactaatattaatagaaaacgtacaaatgtatttttactttctaattaaacgagacatatacttcccaataacttaacttttcctatttatatcaaatgagaagtatgagtacaatatgattatacatccatatattatattaaaaaatattataattaatgagaaaatattatatatatatatgttaaatttgaataacttaataaattatttatacaatttcttaaggtgagagagaggaacacatgttatatattgcatgtactataaagtaattatatataaaatgagttttgaagaattctaggggagccatggcccttgtgagctaacacaacctttgtctcaggtggctcggtccatgattgataatggagtctcgtcaaatattcttttcaagacaatatatgaaaatatgggatttcttctcaaggacctagtcccctgaacacaactagtatatggcttctcaggatagagcatcgcttcattgttgggacacacccgtatcccccttacagtagggaaggctctgaccaccaacataatgatggctcaattgctgataattgatgcaccctcaacctttaacgtcatgataaatcgaccaactctgtatgccataaaagctaaaacatcaatctaccatctttgcctaaagttttcaactaagaatgggatcaaatgcctggaaggagaccaaaggtcagtacgccaatgctacaacattgtcttaacaaagaaaaataaagaagaccatatcgaccaaggctaaaaggtcaaacaaagcattgatatatcggagtttgcccaaggcaaggacgattaaatggatccttactttagacaccctagtacaggtatcagaccagtggaggaattaggagaagtagagatcgatcccattatgccgaccaggaaaattaaactagggtgaggtttgttgcatgaaataaaatttgatttgatcaaatttttaagagaaaacctggactttttttcttggttgcatgaagacatggtcgggatcaacccatcagtgatttcccacactttaaacattgatcccaatgtacgaccagtgcaacaaaaatggagattgttggataaagaaagggcttgggcactcaaggaggaagtggaaaagctctgagaaaacatgttcataatagaagctttctacctcatctggttgtccaaccccaatatagtgccaaatcccaataaaaaatggcgagcatgcattaacttcaccgacctcaacaaggtatgtccaaaggactgttttccacttccaaggatcgacaagttggtagatgctactgttggtcatgagatcttaagctttatggatgcctactcggggtacaattagatataaatgcatccaccagaccaagagcagacaagtttttgaagagatggtcttagtgttacaaatttatgtcgttcagattgaagaatgctagagctacctaccagcagttggttaattagatgttcaagaatgaaattgggcataacatggatgtatattttgatgacatgctcattaaatcgaaaagggcttgtggcatatagagaacgtggatgaatgcttcaaaaaacttatcaaatacaacatgaagctcaaccctcttaagtg

SEQ ID NO: 230550 - DNA, 801 bp, Cannabis indica
cactaaaaacaataacttaataaaacatatggaaaattccaaataatatcactatcttgccaattaaacaaactttaaccctagagataaaatggtcataactataaacccgaggtatcccataacaacaaatactaactaaacttctcgatatcaccaacaattaataccgttgtgacatttttcgccaccagtcgggtttccatagttaccgaatctgaaaatatttttatttcataaatagcatgtacattacccacgaatttcaataaaatattcataattaataaattacgcttatttattcaattacattaaaatctctagttaccacgtaattagattaataagatcataatcttacctattaaactatttattaaaacatattttataaaatatacctgaattatttataattaaatttttgagatattacataggtattaccggtgtcttttagtatttttcattattttataggtaagaatataatatgatttcatgaggcaaaaattaaaatataagttaaaaatataaattgaaacgtctattgattattgagaaatgctaaggtgtcaagtacaagtgacgtactggcagtgtaatttattattggactccacacattttgattaaataaataatatgagaaatcactagatacttataaggagctaaatcattatgttattaggcatgttaatgtacctaataaaatattggttgtgtaggaaatatacttatgatgtgtcctcactgtttacacatgagaaagagaatattgttattagatgtggt

SEQ ID NO: 230551 - DNA, 1303 bp, Cannabis indica
cgggttacaattgacatcaacaagcctcttaaacaacgtatgaaactgattaaaaaagatggtacttggatctggactacattcaagtatgaacatgtccctatattttgtttcatttgtggtctcattggccactcggatagattttgtccccggagatttgattccaattttgatcaaaatgttaagccttatggggaatggatgaaagctgctactaggaaaaagaactacctcataggtgcacaatggttgcgttcaggccgtgatgaggatgacagtgcggtggctggtaggggactgtccagaagcacggaggaggcgatggatattaattatccaattagaattcaatctgatggagataattctggtgtcaatgggggcggtaatcaagctcctaattgtggagtaaatcaagggaagacaaccatggcccttaatgaaagtcaagacaatgaagatgtacagttggaagatcaaaatgatgattctgtaattattttagataataagaggaggcgtactaataaggaaaatatgaaggagattgaagaagctgatagtaatatggggggattggaaaatttgaatgatgtgccaaaaaacgatttttaggtgggccttggtgttcaggcctaccaatcattatgagcatattttcttggaattgccatgggcttgggaacccatgggctattcaattcttgaaggatttagttatccaaaagcagcccaaagttgtttttctttgtgagatgttatcccgaactgaagtgctggaaagagtgcgtgtgtcgttgggttttgggggagttttttcagttgatgcaagagggaaaagtggaggtgtagctttgttgtggagggatagtgatgatatcaaagtactgggttatggggtgaaatatatagatgctgaagtcattaagaaggatgggaattgttggcgtcttactcggctatacggtgagccaaaccgaagcctccgtcggaatacctgggatcaaattcgcactcttatggctttgtatgcacttccttggtgcattattggtgaccttaataatgttatctttcaatcggacaagaggggtggtaatccttatccaacttggctgattgatggctttggtaatatgttggaagagtgtaatttgattgatatggatttgtgtggatatccatatacttgggagaagggttggggtactaatgcttggattgaagtgcgaatcgaccgggctttagtctctccaagttggcttcatttttttccatcagctaagttaattaacttaga

SEQ ID NO: 230552 - DNA, 1070 bp, Cannabis indica
aatgtgtcttggatcaagattcaaatcttctgctctcctttcactcttctcacattcgtttgagtagttttgttcctaaatcatccatttcaattttctccaagcaatcatttctccccttactagcgtggacaagactgatgggatgaaggatagcaaacaaagcaagctagctagcaaagattgatccatttgttgttggggacttttccgggatgggagtccttcatatcatatgaggactcatctttgaaactcgaaggagtacatgcgtccgactctgttcattgagggttgagtaagcaagagcctaaaagcgacgaaattcaaaggtccaacaatatttcaagaaaatttttaacatatgtaaaaacgtgtttgtagctgtctctagggtttttatattctacaaataaaatctaaagagcagccaaacgaattcatgatcttttctagacttattcttaccttttccatatttgtatgaagagagtttcttgtgagaaaacttagagtgttctactagattttaatttatgttttattgttcttttactgttcttagaatagagtgaagagctttatttaacaatagaataactctttgggaaaagacttgtcgaagacatacttgggagaaagtaagaacgatttcagagatcagactagcaaaataaattacataggattgcagcaaaattttagattgagtctaaacttgtttaagttaaattgtatttataatttttaagactttactaatggatttctttctgtgggcgtgaccccgtggagtagtcgtgttcgaaagaagactaataacacataattctcttgtgtctagttttaaattatgcacaatttatttggtttctattctattattgcaagttgttacaaatacatttttaattacagtttttaaagaaatatattatttatgtaataacataaccatttttcaagcacgaacataataccacatttttataccccaaattacaacacaaactaaaactattgctaattgcagtaacaatctgctgtgtcaaagcacagttgaagtcaca

SEQ ID NO: 230553 - DNA, 1117 bp, Cannabis indica
atttaaaattgattgtcgcaaaatcttttataacataattcagccataaatcattttcattgacttctaattgttaaaattactcgttttattctaacatattattttattttttattcacataagattcaatattttttcttaaattaaaaaatatttagtaattttatttttaaaactttcgaaactacttgattttattccttaaaataaatcccttggtaaaaattatactctaaaatataacagttagataattaggctcactaggttcattttctttttctgttagattcagtttcttttaccattataaattagtattttaatcccctaaattttaactaatacaaaattttgcaggaaattttcaaaaatatatatcttttatgtttaatttataattttacagtctaaaatttttaattacaaaaatatacttataaagttttaaaattacaaaaatgtactttactcagcaaaaggaaaaaaaataacgagaacttaacctcacgacaactataaattaattgtaaataaactataaaataataaaaaataaccagataaataacctcataacaactataaataaattataaaataaacaaaaaaaaaacagttatatatttactaaagagatagtatggtgtaaataaaaaagttcaaagagtaaaaataaaaaattgtccgtgttgatgtatttttattagtttttttttttttttcaaattattggtctattttgtaaatttttaaaatttttcacattttattaaaaatataatttcaaaaattataatgttctattaattttgaaaaaaaaaagtaataacaattattaaaaaatctgacaaaatattaaattatttaaaaatattacatttacttaaaaaaacctaaattattccttaaaattttcagtctttattttatttttaaatcataacttaagaaatcaaactaaaattattgaaaattcaataaataatttaaacaagttaaaattttgtgaagaaaaaattaagcttatttatatttataaactcatatcttacaaaataaagaaaaaaaattcaataaataatttttatctatatttttttttagaaaaaaa

SEQ ID NO: 230554 - DNA, 1069 bp, Cannabis indica
tctcaacttctgtaaaaagcaatattaccaacacattccctagctattgaatataatatcaaaatgtttttcttaacgaaattatagcaatataattgataagtagataatccaaaagggaatagaaccatttgagtgataaactaatgaaatatcaatgatgaaaagtaaaacagaaaaattaccagcattaactaaaaatttcacagatggcccattaggacactttgacatccatagataaaggtccttttgtttcctgcactgaaattgaaaataccaaaaaggtacaaaatgagctagcaaatatttgcaagtaaccaaaactttgtccttgatgctcttatcaaaaagctcacatatatactcataaagattattacaaacaaaaaaatttggaagagtgctaattacaacctcctaatcaacttccttgcggaaatatcttttttcaaaataaaaaattcatagtaatattagttatagttataatatcatccccgtaaatttttaaaagttccaaataatttacagtactaaaaacaaaatttctgatattccagtggaccaaggtgtttaaaaccttcgaacttattttcaaaactgtaatctattcgaaattttttaaaaatttatagggatggtggtgtaactataacttatgatagcacactttcaaatttagagccaaatttataaagtatcatatatactcatgtaaaggcacggtctttcaactccaatcaaatatactcataaaatacaaaccaaaaactcaaatgaaaacacatgggttgatcagttaacaaaatttcacctcaaaaaagagacaggaagaacaatttttgagctcaacaagctcattaagcgccgcacccttactttgcttagactcaaccttgttatctttcttacaatgaggcaaaagtgagacaatattcaacatcaaatgacgatacctataatcataaaaaatagttcatcactaacaaaatccccaatttgaaaacaaaaaaaaaagcaggttaagaaatttgattgattatttttacaaacctgtaattaattc

SEQ ID NO: 230555 - DNA, 1499 bp, Cannabis indica
tactctctctctctctctccctctccctctctctctcatgtctcaatctcaaccattggaaaaaaatcactttagtgaggctgacttgacttcaaaacacttgaagattgtcatttgttgttacagccaaaacatcatcagacggttaaggatagggttttaattaacaacaaactctaatggagtgggactattcacttctcacaataatataagctcataacccaagaagaacatcatggaatgtgaaacacaagaaacccccatactttactttccactccttattataaatatgtacttttctttaatttctctcactttgtaaagttgaaagcaactaacaccctgtccctttcttcgccacccattttttttttattatttattttctttagtattacttttacacattactcaattctcaacacaacaaacacaccacaagtctaaaagaagaaaggaaagaagttattgggaagataatagtcactctttatgatccctcaacttgctatttttctcaaatttctcttcacttgaatacgttacattattcataataatattcttcacttttttttctctctcaacagtttggcctataggagaaggcttaacttccctctcctactcctcctttagagaaactaaaactgttttgtttgtcagagaaccaaaaatggcttataataataagttcaaaacttttttccttgctttggttatcttataatctgcttctgcatagtacttgagtactggctattttttacagactataaaagagtttcttctgcgattggatagtgtgatttaattggtctcttcttccttacttgctctcggttttctggggttctctcaggtacccatgattccattttcccttttgacacatttcattttattttcatttattagttgtttaattctctttaaggttgtggtttttgtatctatataattagtcttttacatatgaataattattattatataagaagattgcataatctttagtttcactttgtctatttttgctgtcgttggaatgatttcatcaaaaaaaaaaaaaaaaaaaagcagataatttcaactaaagttgaagttgtttacaacagtgacaattctaagaacccaaatcacatgtggggttgactgggcactaataacagtactcagtagtagccactagaaactttatcttcaaccaaagatatataaaagagtatcagtaataggattttttatttatttatttttttttcgaaaaagaaaaaaaaaagaattgcatcaagaggattatgatttgtacatgatggagtccaaacccagatgggttcaaggaactttgataggaaaataatgttttgaagaataaatgataaatagtaatcatttttaaggttagtaattttatttttaaaaggaaaaaattggtggattgagattgggtgctgctgactcccatgacgagacaaaacgcacgtatcata

SEQ ID NO: 230556 - DNA, 938 bp, Cannabis indica
gatttggatgtgttcatgttggtgtatgtgttatttgatgaatgtatgtgatttacaaaaaatttccatgaaataatttattttgttctgaaaatatttatttggattccttatggaaaattaagcaaattttgtttttagggtaactcgattccgataaaaattgaggaagttatggtgttttgaaaattggggtccattgagtgtcaagggtcgagcatcgcatgcacaggcactcggacaagatgaggctgtgcgcgcgaatgcttcaaacaaatcttgtctgaactcggtcagctcgacatctcggacaggggacacacgtgcacatcaccctgctagtagggtcttctgcatgtggatcagcccactaaacccctcgtacgcgcgcgtaaatggctgcttgcagccacctagtgcgcacatgggtgatttttcacccaaaatccgatttttgggtgacttttcacccaatttcagatttttcaattttcgaacctaatttcaaaaataaaatattatttttcaatatttaaacttaaatatcaaaattttaaattaataatatttaatttttcaatatttaaacttaaatatcaaaattttaaattcacttttattatcattatcagaaaaaagctaggcgtgcgttccagctgctccgtcttccatggcgaggaagaagcgggttggacgaaagtcagcttctagggctcagtcggtagatcccccttcaatccaagaacgagagattggcgagaatcaaagcgatcagtttacagattgtttggagaatgaacctgacctacaggttgatgagatctgtagtccgcagatgcaggggaagtcgattgggggttttgttgattttgaatgtagttcagtgaagcagggggtatcgaaggagggaactgtagtgataggcagtggccagaaga

SEQ ID NO: 230557 - DNA, 1762 bp, Cannabis indica
attttattatattaattatatatagaaggatggaagagtttattccatccgaaaaagtttaaattgtataattgtctaaaaagtttaaactttaaagcgtctaatataattgtatatgtttttccgtagtattaaattgcaacataacataagaaaacaatatacatttttaaaattagacaacaaagtctcaatattagataaaataactctcaactcattattataaataataaaggctcgtttggtaagagtttttttttgacgcggtgatcaaaatcacacatgattaacaaagcatcaatccacaatcggcggcgacaccaccttgaaccaggatagctcatcgtctaaccgaagagcatgttttgccaaaccatgtgctgcagaattcgcatcctgagccacatgggacaaaactgcccccagaagtttagacaataaagttatgacatcctcaaagtagaacccccagctcactaaagaagacccttcctttgtttacagctgtgaccagagacaaagaataaaaaaaaacctctttaaatatggattccgcatggaagagcccaattaataagtccaaccaaaagagccaaggtctccgtttgtaatccagaaatactacctgaaaacataaaaaaccagaaaacaagctataagtaaaaactatagacggaaaccaacgagcaatgcaacccaaataaacgagaaaccaatacaaagaaaagacaaaggaaaaactaaccaaagggataaccctttggctagtgaaagaaacgaaaatacacaataaaatatttttctcaaaaggggcaaatcatataaggcttgacacatcatagcctgatataactgcgttaaaaaattaaactaccaatggctaactaatctatctaaaaacgcatatccacattatatgaaataccaccaagtctactcaatcactaagctagagcatattttaaaaacttgtaactccaacctcgcccttttaacaattaaaatataatagcccctaggtcatctgaaacatgtaaatccagacctagtactgttcaaacataaaatcaccccatgtttaacgtgttgaaatatgttcaaaactttaagctagaacatttaaaggcttatccaaatcgaaaaaaattgccttaaaattaaagaactatctaacctttgagagtcttgcatactgctaacctcagccttttatcttctgaaaagataatagcccctaagcctactgaatttgtattattcaatactgctacatcaaccataagtattgtatggctttgttcttcttgagatctctaggtgaactttcgattattcctattatttaaaagtaaaaggctactaatcttggctccatcacatgcagatccgcccatatggcccaagcacaaataataattttttcgaacaattccctttctaccacttcagaagcatatagtatcaaatttttgaaattaattactcgttttgtaagagttgtattgtattaattattaagataatttttttaatacaatgtaagttgtatatacataacaaattgtccgtattagactgtattatataatatttacaaaggattcagggtcaactccaatctccgacccaaatctagagatcgggattcggacttgacttgggacccagacccggaccagaccctggaccccaaacctaggacctggactcgaaccctagacctggacctgactcaaagttggtgttgggtcgagtttat

SEQ ID NO: 230558 - DNA, 1356 bp, Cannabis indica
ttaaagttttaaaaatttaaagaaaattaataatttaaaatttaagaatattaagcatgaacataatagttgttgttctctattattgatggtagatatggatgattctctttttaatttttgtcgccttagctgagaaaatattgaaatatttgtattttatactttttattttttctgaatctgcatatacattttcttgttgataatttctttttgacattttagataaattggtggtgttcctacaaaagtaattttgatttttttaaaaaaaaaaattatgttgtaatatgaaataagtaatttgtttgtataaaaaaattaaattatactacgtaccataaaatattttatcaactgaattgcataacatgatgttaaacaataaaatatttcttatgctatttccttgtatcttttcttactttatttgtgtacgtgacatgtgtcccttaatgggtttttactttactatatatttgcttgtactgtgtactattttcttaaggaatagcaatacatttttcattccttctgacatggtatcagagccaaaaggctccctatggcatcaatagaatgtactagctctaccccaccaatggaagatgaaaatactcaaaacccccttcaaaaccctactatcaccaatacacaaaaccctaacatcaccgccgcccaaccaacctcttcttctcctctgcattttttgacagctgctacttctccttctttacccccaaactttccttcattcaaccaaaccatatcagtaaaattagatgactctaactgccttgtttggaggatgtaaatgcagaacattatcattgcaaatggccttgaaggatacattgatggcactgtggtttgtccattataatattcagatcccacttcaaatcaagttgatccagccttcactacttggcacaggtataatcggcttctcatgagctggttatacacgctcggtcaaatcgtttgcttcaccactgcagcagaaattctctcttgaacggacgtactctgcagcttcattcgcacggagctccgatttcataacagccttgcaaaacctcaagaaagatggcctcactgcttcggcctacctgcaaaagctcaagacactttgcaatacactcgcatcagtcggagaaccaatatcctcacaagaacatcttacttatctcttgaatggactcggacaagagtataacgcttttgttactccaattttagcaagaccagtgaagcccaccattgaagaggttcatgctcttcttctaagctatgaagctcgtcttgagcgacaaaatgctgttgcatctcttaactgttgggttttatgcc

SEQ ID NO: 230559 - DNA, 1239 bp, Cannabis indica
agatggcttgactactggactgaatgtatcaaaataatcaactccttcagtttgttgaaaccccttggctactagccttgctttaagtctttccaccgatccatcactgtttaacttggttcgaaatagccatttgttttgaacaacctgcatgccatcaatatatggtactaggatccaagttttgtttcggattagagcataaaattcattgttcattgctgagttccattttggatcagctaaggcctttttgacagacctaggctcaagatagtgatgattggaactcgagagtattgcagcaagtatttttggcttgtgaattccagacttagatctggtttgcattggatgttgggaagcagtggtagtagggagatttgagagagcagtggtggtgtgacatgtggaggtgggaaggttgtttgtagtgtgttggttggactgagttggagagggaacaatgttgcagctgttggtaggttcagggatttctgtggacctgttagtgggtagacagggagcaattgagggtgtgggagtacaaatgagatcacaatgtgtggttgtggtgggcactgggatattaggcatgtgtacaccagtagagggactggtttgagtaacagtgggtggtttaggtggaaataattgctgatatgggaaattggtctcatcaaagttgacacttcttgcgatatagatcctacccgagggatgtaaacatctatatcccttgtggtgtggactatatccaagaaacacacacatagaggttttaaattcaaatttgtgccgattgtagggtcttagaaaagggaagcatgcacatccaaaacttttaagaaaattgtagtcaggcttttggtgaaacagagtttcataaggtgaaataaatttgttcctttggataggtaatcgattgattaagtaagttgcagaaacaaaagaatcccaccagtgagagaggggcatttgagcttgtgcaagcatggtaagtcccatttctgtgacatgccgatgcttacgttcagctcggccttgttgttgatgtgtgtgagggcaggggtgtctaaacacagctcctagatgttcaagaatgggttttaggggtctatattccccaccccagtctgcttgtagacttttgatagggacaccaaattgtctttcaacatacttgttgaaatattggaagacagaggtggtatcagactttgtttttagaggaaagat

SEQ ID NO: 230560 - DNA, 1092 bp, Cannabis indica
tattttttaaaaagtaattttttattttggctcctaaaatgagtgggccctaggcgcgggcctagcctgcctaaacttagggtcagccctgcttctattggtgatatggttgttagaattattatcatggactaatataattataagtataatactatatttacaatcattacctatgtgcctattttcactacaaaaagtaagacttttgtcaatgcatttttattctggcaaaagttaatattgtgctagcaaaacaaaatttatttttgccagtaaatttttgcgaattcatgttagtattgaaacttttaccaatgaaaaacaaaaagcgttggcaacaatgacttttcccagtgtgtaaatgtgctggtaaaagctaaattttttccagcgtaaatgtgcattgggaaaagtcttacttttaccaacgcattaacgcgctgtaaaaagtcttacttttgccaacaaaaatgtacgctcggaaaaaatctaacttttgctaacaaaaatatacattggaaaaagtcttacttttaccagcatataaatgcgctagtaaaattttgtaatttaatttaatttttaattaatattatttaatttaaaaatttatcaattatttattaaaaaaattaaaaaaaataaaacagattaaaacataattttaaattgttgtaattatatatgtttatgtgtttaatgattttgtaataataataataattactccattcattactacaaattaacatcacttcatcaatatgtataattaattgtgtaccttttttttctctttttttttccatacgtttaataataataataataattactccatccattattacaaattgacactacttcataattataaagagataattagatgaaaaaaattaaaataaaattaattaaatcaacaaaattgagagaatgaaaatttcataaaaaaaactcatttaagttgcaacatgactttctttatactttactttttatatatatatataaatatatatatatatatatactagtatcggctaaaataaaacagtaaatgagatcatgacacttttttgtggaagt

SEQ ID NO: 230561 - DNA, 2590 bp, Cannabis indica
catacgtttggactcacgttaacgtaccaaaataaaaattgtttattatatgtaattagtttcacgtgtcatcacttaaatttagggttcattaattacaattaaattggattagatattaaaagttagattctaattaaattagatcgattatagtatgtaataaatctcaaaatctaattaaaaactgactcaatctaattatatttatatatactaaaaactatttatatttatttatatataataaaaataaatattttacttatatattaaaaaaaattaacacttgattattttgtatatttattttttataatattttattttattttttatttgaaaatattgttattttttttatcaagaaggaacaaacttcattaattaatcacaagcaattacaatcaaatctaagcaacaaaaacaagcttagaccaaccgaaccccttatttacaacataattgctctatgtacattttctcaagtctatctattttcctcttttttgctatatttaacctatacaaagaagcttgtttaatctcctacactatcttatacaccaggcaagaatagttgctaaaaatacaattgttcatgttaatccataagttgtaaatcatagcagctatgattaccatatgaatcctgtgcagcttgttccttattttgtcaagaatcaaccaatttttccagctatgatactcaaccgacatttcttttttcccagccaacccccgatctgctctagcaccatttgagagtagctgcaacccaaaaaacagatgttggtttgtctcggttgtagaatattgttatttttagttattttaaatttttagttgtattatatttggtaaagatgatatttttacagagtattaaacttaaatataaaaggttatattaagttcttatatattcttttaataattttaagttaatattaaattaaatgtgtaattagatatttaattaattttgaaaaaaaatgtaacagcttctattattattaaataaaaaagttcattcaccgttatgtaatggatttttcctgaaactataactcatgcgttggtggaacgtggctttgctgaaagctgttgggctaacgtggatataaggtaagatgatattgggataagttgagtagattatctaatatacttttatctttatcttctatttaagtgtagcacatggtttatattaatctaaggagtataatagggacatagtttataaaagtatgttttaaaaaatatggaaataaaggtaaaaataaaaacaaaacaaaaaatggatatacaatgtaatttttactataaaaattggtatatatatgttgggctatatgaaaggcccggaacgataaaagttttctttggttctctagatatggtcgagcattggatcaagcccgaaccaattgtaaaaatgttcaagataaatattgatgcaactatttttaatttagcaaggagttttgagtttgcagacaattcataatcatgattcatgaggggatattagagagaggctcagtgtgtattggttgctgccgaataggggtggtttcggcgactgcggctgaagttgtcggggtcaaaaaagctttgagttggtcaaaagtttggtgttcttgaatcgaattgtgagattatggttaatgcaataaaaattattcattgttttgctcgaacttcttattatctccctgatcatatatttgttgagaatgcaaataaagttttacatttgcttaatataggaaagatcatgaatatataagaatggacatatcttcgttagtatgaggctttttaaaaaagtattcaaacaaaaaactgtgaagacttagacttaaagtgaacaatatcatacttaaaaacgatagtctctgagttgttatttctcttttagtagttgattgtttcttgactaatgaaaacctctcttttcattaagaaaaaatgataggaattcctagtactttggtaaaaaaatgtgacttgtgagaaagaaccaagaaacaataatatgtgtacgtaacaccgcgtagatgggaatgggagagcacaacaatttcccttataattccatttccactacctctcttttgatggtatatctaatctaatctatctacatgggaatatattaattcaataacattaataatattacttgaacacttggattggaatattatgatacctcaaagtccttttcaacccaacttcgaaaacgaattaaattggagacattcaacgtatacctttgtcctctttatataattatttattttagggtgatttactctctaaaaagatattttggtatattttctaattgttttggtatttaaaagaatttttaattcaatttttttgatggtagttatttaagactacttttaaattttttaaaaaattaaataatttacaatgttaaaaataatattaggtgattctataatgtacacctttaaaatagatgtactgatgcacccttaacttgtttcgacatctagaagaattttttagtctcattttttttcgtattcatgtacgttatatctattta

SEQ ID NO: 230562 - DNA, 1251 bp, Cannabis indica
atcagctcctagaattcgtaaagaggcaaagatataactaaacattaaattaataaagtataacaataacatgattgtaattagatcaaattatatatggaaaatggtgtttttataaaaataattaaaaaaaaccaaattattggttttatccatttcaattttcttgtgatttttttttttttcataactttaatttgtattattatgttaatggtactagtatatgtagttaatccattacatatagaattccttataaagaaaggcttaaactaataattaagccgactcttatgtacattgacgaactcactagtactaatgtgagcgctatagtttcactaacaaaaatattgtcttttaaaaattaaatgttaatttttaatatgataattatagaccaaaatagtaaaaaaatcttcacaaactaaataaatctcgtaaaagtaatttaataataaataagctcccataaataaaaattccaggtctatcactacgtacagatatattatttaggtcgcttatgctaatatgatcacacataaaactatatattttataattacaatgattgagaagtcaagaaaaagtaaaatactcatactcatattctattctaaatgaagaagttcatcaaaactaattatttgatcgacagttttgtcttccaaactcagagcatcattgatggggtctttaattctctccatagtctgagccatatgagtgttgaacatgtcaagtttctctttacatttcttcaattcagcttctaagtctgtaatcctcccctgtaatttttctttgatgtctttttcatatctaattgcctcaaaacagaaaaaaatgattcatgatcttttgtacaaatttcataagaaacatcatatttgtgaatctatttcctgcaatggcatttagatagaaaaaccaatcctgcacatttcatcacaaaccatacaaaatgtggtagcgaagacgctctttattccaggtgtccaatccgagacactttcaccaaagagatctgattctgtgtattggtggagcaaagtgtttaagatgtgagccaatgtgagtggtactttgtatcctttaatatcaaccactttttgcctcaagtacttctcatccaatttcaacccttctttaggtctataaagtagaagctcagcgaagaaattctggtaatcgtttgaagtaaaagaaggaaagtgattgatttgataaatcttttcaattgat

SEQ ID NO: 230563 - DNA, 3074 bp, Cannabis indica
actctttggagaagaaaatcaaagctagcctttttcgaacgaccaaagcactggggaacccctagatatttgctaataaaaggtccttgctccagatgtagggaatcaaagaaatatgacctgacagatggaggggtatttggagaaaaaaggatggaggatttagagtagttcacgctttgacccgtggctagattgtacaatgtgagagcttccttaagggcatcacaataagagggggaggcgatggtaaaaaggagggtgtcatcggcaaaaagaaggtgggaaatggaaggggctgtacgagcaatagaaattcctttgaaaaaacccctttgctcttgaagacgaagggcagcagcaaggccttcagaacacaacagaaaaagatacggagataagggatctccttgtctaatgccacgagaaggaaggatagggtccgagacttggccattgatattgaagcagactgttacggaagagatacagtgatgaattagattgataaattttggtggaaaactaagcttacgaagaatggccaaaagaaagtcccattccacacggtcaaaagctttctccatgtcaagcttgagccctgcccaaccaagtttcccctgttttctatgattaatagcatggaccacctcctgggcaatgaagatgttgtccaatataatgcgctcagacaaaaaagcactttgtgcggaggaaatgagactaccaagaacaagctttaatcggttagaaagaatcttagccacaattttatagagagtcgaacaaaggctaataggacgaaagtctttgagagtggaggcattagattttttaggaaccaaaacaataagagtctcattaatggcagagagatcaacaggattgttaaggacattcaaaataactgtagttagatcattgccaataacattccaatacttttgatagaaagccggattcaggccatcaagccccggggctttgtcaccagagagctgaaagagagcttgttttatctcattagcctcaaaaggggaatcaagaaaatgaatttgctgagtatccagagatttatcgagggctgagagaagaagattggtagccccccatcagagtgctgcgtttgaaacaaattcccataataactacaaacttcattacaaatctcctcaaaagaagtaaccagtctgccatcactacacttaagtttgcggatgtgattctttttcttcctcacagtagctttattatgaaaataacgagtgtttttatccccagcttgaagccagtgaattttacacctttgcttccaaagaattttcatttttataaagaagtgaatccagctgggactgaagagcagtcacctgcttgacattatcactggaaagaggcaaattagagttaatattattgattagatctttctaaaagcacgaattctagtaaagttaaactttggaagccttcattccaagtccgaatatcattcacacaggcctgctgcttttgaagaaaaccattgagggaaagaaggtctctggaagaggaagaatgaagccaacttgacttgacagtatcaaagaaagaaggctcagtgagccagaagttttcgaacataaaacctttgtgcttagggggggccatactatcatcctcaagaacaactctaagaactctatgatccgaactatagaagcccaaatgataaagagtagtcttaggaaaagtttgcatccaactatgactaacaatcccccaatccaacctttcacagatagtaccatgcttccaagtgaatttggagccaatcgggtttaggggaaaaagagagaatttacaaagaaaacgctgaaaattcaccatagcataacttggaggggaagcattacttgatctatcactaagagatagataatcattgaaatcacctaaaataatccatggcagtaaaggtgcattatcatgaagcctatctaaaagagtccaagattgaggtttgtcatgtacataaggtgagccataataacaagaaacatgagtacttatattatcattaaaagttataatacaatcaacatgattagatgaggagttcaaaatattaacaactacatcagaattccaaaaaactaaaagacccccacctaaacctgatctcgggacctcaaaaacataatcaaaagagagactgcggcataaaatatctccacggccagcagcacatttggtctccatcacaaaaagaaaagtaggtttatacttctgcacaaaaagggagagattacggaatgctcgggagctccccaatccacgagcattccaacacaaaagactcatttttctgggcggggttgctccgcaacacccgcctgttccatggaatcattgagggcagaggaaacttcagcaatagtgggtccagctcgagcacgcttgagaatacttctaagagagtcaccaaccacaacagtttggggaaggaaggcggctctcttagcaccaacaaccgctttgcctttggctttttcagagagtctgggaaagttcccttcagtatgagtaacctcatggatgcactcactagccactatagcagcttgctgagaaaatgaggaaggcaaatcacagagtaccgaagaagggttttcaccacccatagtgaagccagcctgagtgggaggaggggacaattgagtggtatagggagaagcaggcctaggatcagctcccaaagatccaggatcagccatggttccaaaagcaacagaggatccagtgctaatctcttcagtagtgaggaattggctcacggcagcagcaagggattggtccacgtttttcttggttaggaatagcttcatcaatgggaaatgagttggataagtcaaaaggatttcttttgaatgtggatttggcaggagccttaagaggaattttgtaaggtagaggggtgggagagcagtgatcatcgcatttcttgaggtaagtgatacacttggtgagtgtgtgatcgaacattccacagtgataacaaatgttgggcagattttcatatttgaagttcaacc

SEQ ID NO: 230564 - DNA, 1235 bp, Cannabis indica
atgttaaaaattaggttaaagaagttataagtggtcctaaataagtataacgtatacaaatataaatttttttaattaaaaaattattgtgtatactaaaacaaataaaaaatctaccgaaacatcatttaaagggccgggtgtagtgtagatttatcttatactatatattaaatttgtgtgtaaaataattacttgaaaatatatatgccaagaaagtataccagaatattgtttttcttaaaactcctaacagcatttgaaaaatagtatggctactaatagtctaacaaatactaagattaactttcaatttgtttgataacgttcaccgtacatggtagcaactatatataccattgttatgatttagagcaattaaacccacgttgcatgttcttaacatataaaaacgagaagggtctaaatgcaaatccagatctataatttattataacacctatctatcataataattatagcactaataaataattaaaagttacctttggctctgatgtttgttaagtagatgagactcaaccccttgcagctagaactaaccaaaatcattgcaccaccactcttatttatatcatatatataatatctatcttttattcctcacaaactttttctttaaatctaaatttgtcggatttcgttttctttaaccccatttcagtatccaaaaacaataccaataattattcataaaagaaaaaagtgaggaaaaaaaaaatatagtagtacttaaaattaagtaaaaaaatgatcgaatttaatttcgaaaaattgaaaaaaaaaaaacatataagaaaaaaaaattaggaaagttacactttgggtccagtatactgtcatggtgatggtgaaatgatttagaggtgatgctgtgttgtaagggttaagtttggtaataattttacttattattggatgttattgcactttattgggtaccctttttccttttctcttttctcttttctcttttcttctttctttttcttttgttttcttatagtacccattttatccttcctttcttatcatgcgatcaattgaagcaatttataaatttataaattatgtatatccttaattcttgaaagtgacaaaacgagcctagcataacactgatgtgggaagcatgacacaacatgtaaaattgagttaattatttatttatactaaaaccatttttatataaggtatattatatttcgataaaa

SEQ ID NO: 230565 - DNA, 1174 bp, Cannabis indica
caaaagtaaatgttgggtcggcatagcatttaaaattaacctaaattgaaatggtgtgttttttgtaacacttttgttagagcgcatttgtgccggaaaaagtattcacacctaccaacctctcacgtagaaattttcctaccttgaaaaagttaaatttccccgctaaaaacaaatttcttttctcgggcacacttttgccagcgcaaatatgcgccggcaaaagttttccccccaaaagtttagttaggcggtgaaaatcccccaaaatatttttactttttgtcagcgcatgattgcaccgacaaaagttaatgaaccattgggaaatattcgcgccatgaggcggttcatttcacttgttttgctagcccaactcatgaattacgccagtattaagaacttttaccgacacattattacgctggtaaaagtgcaagatgaattttttcaattttaaggtaagcagctttccccggcaatttttaccgacacatttggccaaatgcgccagcaaaagtgcgatttattgtagtgaaaacttatttgaagttttaataagtaaaaacaataaaaagaaaaaattaaagtaggaaaagtataaatgtaaaaatttccttgtcaaagtataaatgtaaaatttgaaacaaaaaaaaaaaagttaagtatttagtataaatttccttaaatttcattaggttaatattatgggtgcacatgagctgagttagctaggttaaaagtattttaatgggtcaacctaatgattgcagtttgaataagctataaatcattcaattttttttattgtacaacccaactctattagtataataatataaggggtgagttgtcctcatcaattcagtattgatgactatccattcttattggtgtcaaatcatgattcttccaaagaaagttgtgaatgagatataatctatatgtagaagttttttgtggaatggaagccatgctctctcaggttcagcggcagttgcatggagctctatttgtctacctaaaatcggctggaggactaagtttcaggaggtacctcagattggaatctagcagccatgttcaaatatggttgggccattgcaaaaaaagaagacaacttataggtgaaatgggtgcataatgtgtacatcaaggaggaaaattggtggtc

SEQ ID NO: 230566 - DNA, 870 bp, Cannabis indica
atttatcacactctttcgcgtttaaaccatccacggcccaaattaataactaatatatacttttaagattcctattcctattattattattattattattataatatgatattttaagatatttataatcacattctttttcactaatagcaaattaatatatcttttttttattcaaaaaaaaaaatatatcttttttttatttatttattaaaaaaaagatattcacactttttagatatttctttatctaaaaggatataattttaatattttaaatttcaaaataattagttacggttattatttcaaatacaaaaccatttataaaatcataataggaataggaatcttaaaaatgtatattataaatactacttcattataatcaatcaatactaattttttataattaacaaaggtatgttttattaggtagctttggttacttaattattaattttaattattagaatattgaattaatttaatttatttttgtgtgttactacaaattttttttacttttatttagtcacaacaaaacttgtaactaaaagtaaaaaagttgtgactaattattgattaccattcttatgttgtgactaaaaggtccgtggctaaatgtattagtcacaaaaattataatttgttgtgactaaatataattttaatcatattacttgttgtgactaaaagtaaattagtgacaatttgtatctaaatactatgttttagtcttttttgttgtgaccaaaaatcatatttagttataaaaattttatgttattattaaataattgtcactaaagtaactattttttgtaatgtgtagataaatattaatgaagatgggaaagaaggaagata

SEQ ID NO: 230567 - DNA, 534 bp, Cannabis indica
ttagttgatctttcatctctcttatcttctcatcagtaactcttgtgactgagtgtgtacgttgcgatcatggtgagcttccttattatgtagcaaatctctcgtctctttcatccttgcttcagttatttcacgcaactgagagttaaattgcccctgcagacaatgccagtggagtgagtttttatttagctgaaaatacgaacgtttgccaatcttactataatcagagtcagagtcatgtcaaatttataagccccagcatagagggatattatgattaccgaatctacatcaagaatcattggaagaaccaagaaactttttaaagcttttcttacagtgttattagggatctctgatcaatatctcaagtgactaacacaattatcaccagcccgttattctgtaagtatttcagattatttatatgacaagtccacaactcaatatcaaggagtaattcattatataacaagttgacacctcaaccgtgttctttactctagaaaattttgattgccccctcaattt

SEQ ID NO: 230568 - DNA, 1229 bp, Cannabis indica
ggtcgtaaatgaagagaaaggtgtgaactagatccaggcaggtgctcttgagagaagttggataaggaactcattattttattttattctacactctaataaagttcacaggccatccctcccaagttgtagatcactcaaatgtgtgaattagaattccttacacgattagtgcagttggttggttttttttttttgtttaaatgattagtgcagttggttattatatgattgacaaattctggatcttgaaattgaccatagcaaaagcatcagctattcacacgatacatattccttgtagaagagaaaacaaacatccaaagataaaaacaagccctttatacatatacaaatacttattatagacgtccttttttaagattataaatatggacatatgtttatctagcctaaacagtttatttagaaaaaactagctaattaaacttagttcaatttctcatacactgacgcattgagatacctgggaaaatgtccattgaaaaactttatgggcatccccttttctctttctatctcgttctcttcattcattagctacagttctaaggacatcaatatcctatcccaattaagggtaactatatactcccctccaagttaatgtatttgtcatcttaaaaaagagccgatggaacagaattagcagtaccggatatgctataatgtgctttacatacaacttggtttttacttgaaaatattcaaacatattagattagtaataatgagtggctgaaaggggttcacatgcaaaatgaagctaagtgtttctttcttttttcggataaaaacatttcattggagcaacacatcaaacaccaaagctgaaaattatgcaggttgtagaaaccagaatcttttactacaagaaaattaacccatttctgtttaaaattaagagcaccacctgagtccaacaaaaccaaaatcatgctgaaattcctccgtaatcaatctcaaaccctagtgaacagtattttttcaattttcatcttttttaaaataaacaaacagaagcataagaaaaactgggttcaacaaaaaaatatatcttcaaaaccaaaaacacgaacaaaagaaaaacgtgggttacgtaccctttatcgggggcgtcccaggaggcgggtcggattcagggggagagggaggaggttggccgggtttcgtagcccggagagaaaaagacagagactgacgacggt

SEQ ID NO: 230569 - DNA, 609 bp, Cannabis indica
gtgtcttttaacacttctattctcagtttataatttcttatttttatcttttgtaaatcttttttaacatatttattattaggcacaagaactagtagctcctaatatcaccatcacatcacattttacaaatggttaataatgttttataataattaattataaataaatcaaatcttcatataaaattagagatagaaattaatattgtggggaattaggggagggaatcccttggcttaacggttaataggataatgtatatatagtaaaataaatatttgtgaaaatattagtttgatttaaatttaaaaagtttttcaattatttaaaattattacatttttttttattttactttaatgaatatctaatgagtttctcataagcaatagttattctcctatccaaattagacggggatggaaggcataaataaatagcaggaagaggaaggaaatttcattgtccgtacattaattgtagcgatatgattctctcttttttaaaacagaaaaatagcaatatgatactttagtcgtacaaactacaaagtagtgcatgtggacttctttcacataatcatataagtggttaataactatttag

SEQ ID NO: 230570 - DNA, 1719 bp, Cannabis indica
ttttcggtctaactttaacatctattaaattatactttttaaattttttgggcctttaaaaatttctcctgaactattgacattgttagatttaagaacttttgtctaattttattcaattttactatttctgtgattatttatgtattaaatcatgttctctagactttgatatctaccaaatcatgcccttcaaattttgatatgtactaaatcatgcaccttgaactttcattcatgttaaattatttttactttaaataagacaaaagtgatccttaaatctaacaatctcaatagttaggaggaatttttaacggacaaaaaaaattcaaaaagcataatttagtaaatgttaaggaaaaaaaaatactaagtagccgtacaattttatttaaagcattgtcatgattcttttttttttttttagtaagaaaagcgtattatataaatgataaagggttacacctctcggtcattacataaaatgtttgaagggatgttagaaattggaatatccccaaatattttgtaggtgaaagctcattttgccacattataggcaacgaaattacaagacctactaatattcaaaaacagacaactgccgaaagaagaaagactactgttacaaaaagagacatagttttcaataacccaagggatctccttcccattgagcgcattggtgactactctcgaggccgccgcttccccagagagtgcatcagagaagcctaggttagatgtttggacccaaatcacttttacgagatggttcctggcaacaactgctatacacatgttatcaagccccactttaacatcgcagtttagtttgagccagtcctgaggtagaggggactagctgatctcttccaggcaaggagcagggggagggaaaataggatcatataaatctgcaaaaaacatcgaacagagtcagtaatcattttcacatctaaagtaagttattatgaaccttctcattgcaaattcgccaaatggtatcaaccaccagagatgcatagaggaaaatctcatctgctgcaacccccttgtgtctcaaatcccaaataaactttacccaatcccacatacgaataccactatcgctgaccaggtaaattccccaaggagacgatctccaggcatggagagccacctcacaattaaggaataagtgttccatagtttcttcctctctcccacacaatgggcatcttagatcatcaatatgaaatctttttcggatcacagacctgatagggagggcgcttgaaagaatgcaccaccacataaccttgtgccgttccaacactttactgttccagagtttattccatagagcaggagctacctcacacctggggctctctccaaagcctgagtaaggtaagcggatttgcaggaaaaccgaccactcctatccagagtccacacccacttatctttacctacttcaggggggtccccactttttagaattgcagcaacagtctcccgatcaaaaaggttattcaatttgaagatattccaacaaccatttgaatacatcaactccatcactaaactgtgacccccagcagagtgaccattttggcttgggccgaaatgtctttaaatgatggatccaagggtcctcccaaattcgagtatcccttccgtccgccactaatttgtacgcacctttcaataggatagccttggttttgacca

SEQ ID NO: 230571 - DNA, 1348 bp, Cannabis indica
gggttcaagtcccggcaacggaaatctttttagtgtattttgcttttgattaacgacaagtgtaaataatgtcgtatgaagcaaaatagttaaaattcaggaaacgacagcgtttcttaaaaacgacattcagaaaatatcgatattaaagtaccaatatagttttttttttttaaaccattgaaactagctcaatctcaatgggaaagaaggggtgagaaaaaagcagagggtaattccaaaacccttcaatggtcatagaggggtggaagaaaagggagagtatagatttgaacccaaaactcttaaattattaatgattaggtattatgattatattacatttttttcttgaatatacttatttagctattttcaataaaaaaaaaaaaaatatttggtaccttgtatttttaatactacttaattggtaccatatatttttaaattgtacaacatacttagtatcctaaagtaaaatttaatcaatatagttttataaatttaactaaacagttctcagttacatgtaattaaataattaaatttgaattcagaatctataaaattttagactgttgattgtattgataaaaatttatcaaaaaaaaaattgaatttaaagtaccaaatatgtatgattttaaaatacaaagtactaaataaactttattaaagatacagagtattaaacttgtatttagataaaacacaatgtactaaatgtgtatacactgttttttatggaatgaaatgatgtgtagttgtgtacacaaaatatatataaaattgtagacaataagttttattagatggaagaaacacctctactttttgtataatggtattttttaatctaccctaataagtttaccttaaaaaaaaataataagaaatttttatgcataacaaaagattaataaaatgacaaaattaatttattaaacaagtaaaatgtgacactaattaagatgagaagtaagatattttctcgtaaaaggacttgacaatttctttctttacttttaagtgttattttcattgtctaaagtgacctatttttcaaaagaaacattcaacaaatagaaacattagtctaataacatcaacatcaccagtggagatagtctattaataaacattgctaattaatacaaaatcgtagctattagtaaattaaaatttaaaatgatagcttccaaaaaagaaaataaattatcaaaattaatgatttattgttttcaaatatatttaaattaagcaaaaataaaaaataaaaaaggatctgtagtataaagtaaatttattaatttaaaatcattaagcacaaatccgttgtagtctagtt

SEQ ID NO: 230572 - DNA, 1406 bp, Cannabis indica
aatacaactaaacaaaaaaataaaataaaaattattctaattttattatatttcattacattctctttaaccaaacgctacttaataaattttggattaaaaatgaattactattgtaccattgttataatgtagtattttacaaaattattgaaaaaacaataatttttcaaaataagattctcagcacataatcgcatgaccctatctcataggttaaatagacaagtctatgttgtaacaaaagtgaaactcatgttttttgtttcctaaaaagttaattaacaaactatacttttttttaatgtaaaacattaataaatatattttgtacataagttattatattaaacctaaataataaaagagatcttaaccacggggttaaattgacatgtataagtaacaaaagtaaaaactcaatttttttttcttttccaaatttttcaaatagtacaaccatcttatcttatgtggttatgatggttgttttgtttgcaacttggcatgagatttaattgcatagccaaacacatctctatctatctctatctttatctccatcatttttacctttctaataattattttctttctaaaatacccaaaatcaaaactaactagaattttctttcttttttttttttttagtttttataacgtaaaaaaaaaaaaaaaaaaatttagtcacttcatgttgtatacgtggcaaaaaagaaagaaaaaaactaacaataagcactttttacttatcaattttcattatttattattaactcataattaccattaccaaaacataaactaatacaattaatatcaaaaactaattaactatcactttttttttacaaagagatccctctttcttatttttgtatatatatattaaaaaaaagggacaaaatttacagcagtttgaaaaaagaaactccataagaagctcttcaaaaaaaaaaatgttaattagaaaaaaaaaaaaaaaaagtaggcaaagaaaaaaaagccctcattcaaaactgccgtaaaaaagtggtaaaattgtaaatctacccaaaaaaaagtaaaaataaaaataaaaaaaagacaccagcacatctataatctcggctggcgaggatggaacgatcgtgaccgtcggatttaccgatgagaaaaccaagagacgagatcggcaccgacgcgccgttggcgcgtgagagacacggtctcatcataatgagcatcaagaagaggagaacggcataaagggcaattgaaattgagatgttcaagccaaccatcaaagcaattcttgtggaacacgtggcgacacgagagcttacgtacctgttccccagctcttaaggtggacatgcacaccacacaatcatcggagtttgaggcggcttcggcttcggcttcgg

SEQ ID NO: 230573 - DNA, 979 bp, Cannabis indica
tttattgtttctcatgctaagagaaatattaatcaaactgctcatagattagtaaaatacgctatgtagttggatgaaaatatttgttggataaagaaatttcctatttaagtttattttttttttttttgtataattcctattttagtttatctgttgttgttgtaaatgacttttaatttaaaataacagtgaatcttctacaaaaaaaaaaaaatatatatacaaaaaattaaagataaaataatgatacaaatactttctaattatacactacaattaaattaaatgtgattcccactcaaaatatacagtaaacattatacattttctctgagttttttattcaatttgtgcggaaatataatattttgtcaaaagattttatgagaaaaaattaaaaaaaaaaaagaaaaaataagaaaaatagtataaggtaaatgattaccttaagaaggtaactagttaccataaactatttttccatattttttaaattttttatttaattttaaatttttctcgtaaaatattttttgaaaaagaaactatctttttgtaaattttgcccaaaaatataaaaacatagaaataaaaaaatctctaaatatataatcagtgatcataatgatcaatttgttgagccaattctatggtgagtttgttggcacgatcatcatggcctcctgcaaatgtatacactcgaaatgcaaactcgaaagccctccaaagcaatttactatttgatttcattctttcgcttgttcttttattctcttcacccaccttattataagcttctctccctctcctacaaatgaaatatctaattatactacaaaacaaatcaaagtttattttatttctttttcgactttgggaatattagtaaaaccttaagtaaccatcgatggttctttaaggttttactttgtaattcaaagttcgtatcgtattattattagtcccaaaagaattg

SEQ ID NO: 230574 - DNA, 730 bp, Cannabis indica
atcctagcacgtaacaaacaatcgaaggcttccagaacatcacttcgtcttctatatcttccatcatgattttcaccttacatctttgcacagattgcttaaaagaagattcaagattacgcacaattgaactagatcgcagcacaagagaaatcgaagacatatctggctgaatttcactgttacattgctcattcgcacggagaaattacacaaagtcttgtcttacttcatcttgcttctagatcgactccaaagaggatttgggagataatggaggctggaaaacatcaacaagagcatgattgtctccattgatttcttcctcatccaacatctccaatggagctattccattagcttcatcaatcaaattagctctaattgcatcagattcaggattcgagcctttctttttcagattcttagtagcagatctagctttccaatgaatttttgatcttgttttagccatggcaccaacttctcaactgcaagagcaagaacgagcgagaaaactcccatcaaaatattaattgtatatacaattttttaaaaaatatataaatatgtgtgaattaaattagatcgattacttttacatgtcaatcaacatccaatctgcaaaactacagattttaaattttccaatcatccgatctacaacaagtgcagacatccgcactttgcggattggattgaattaaatattttatgaacacccctagtt

SEQ ID NO: 230575 - DNA, 1901 bp, Cannabis indica
agatacacaatcacaaaaaacatatataactaattacttggaaggaaattatcctaaccgttggacactggctaatatattatgttgaatgattcttaatctgaagtaaaatattgttgcaaacattacaccctaaactacagtgtaagtagtgggccaagtagcagcaagcaaatttgtacagttaatttaattattaaacaagacaaatatgggactgtcaaagccatagctgaaattgtcaatctacagaacatggttgttaatgataaagcacgtatctgcaaaatgcatactaactgaggatcaccacaaaagaaaagaggaaatcaatttctaaaatgcataaaaatcatcctccaatcacacttgcgattaatttttgtttatatcaaaaatcaaacaaatcttactctgacagataggtatcaagaattgaagtgagcttcttcccaaatctagtaacatgaccaagttgtacaccctcctcgagtgccagccagtactgtatcattgtttaagcaagtaattaccctcccaaaagtttaaataccaaattaactttctttaaagtcatggaaaagatgtaaatgcatgaaaaaatggtacctcatttcctgaaaaactagagaacttctcattggcaatttcttcacagcgcacagtagccaccataacctgtgaagaattaattattaaaatttgcctcttccaaaggtcaatatttatgtatatggctatacaatatgaagtgcatcaagcttgctctcatctgttaagcgcccaaacattatcttgtccaatgcctataaaataaaagtgtacacttaaatatccgatcgaggtatctaatccaaattatacagacatcttccatacacattatatatgtaaatacatgtatacacacatttacaaacttcacttttaattttaagcacaaatttctaattagataaccccaatctcagacacagtttgttcatctgataaataattcacaatcatctaacatacaaacaaagctctaattcaaaatcaaacaatttacatataaaatatatgagtgcatgtaaactagtattaaagtcatatatataactgtatctgcgagtgtgtgtgtgtgattatagataaacaaacaaatatcagagcattagtaataaaatgagaaagaagacgtacatcagaggagttgctaatgacctctctcaggaaaatctccttattactggagaaagtgttgataataagactgagaagctgattaatctcagccttgaatgcaaaggtctctacgtctcccatttgaacgttcatcattgagtgattgtgattgaccttcttgaaatcctaagtaaaacagagtaaatattggaaatggagaaaatgaaaacaaagaatcaaagtcgactgaacaattgctacataattaaagaaataagaaaacatcaagtaagaccatgggatgaaatatatatatataaaattcaaataaaattattaaaataaattaattgaagagatctccaaatcaaatgttaatgaatgtatcaaaaaaataataaaataccctagattaaaagtaaaagaagggtttcaatctccggaagaagcaaaaggtcctcttccacttcatctcgtctaagttgtggtcgcaacgtgagattagaacaatatatatggagaatgaaatattgaaagagaaagtagaactccaatttcatttttccttccgcaaactatagagctccagtttcagtgggtagattaatcgatataggttagggaaaagtgcataaagggaggagcatgttaatcgtaaggaacagttatacaatggttaacgtttgaagttattgtttaattttttgggtttaattattgggtttatttgttaa

SEQ ID NO: 230576 - DNA, 1838 bp, Cannabis indica
tttttttacgtactttttacgtacaaattataatataatatgtatcccgccagtttttcgaaaaaattataatatttgcggtgaaaacttcttttaaacattttaagattagttacacatatgaccctaataaaaaaaaacaaaaatatttatcttacgattttatgtcagttgtactcttttttgacctatcaagtgtcaattcagaaacatgtgaccatatattttgatacgtattctaatagtatgtcacctcgtgtctctaagctgacacttaacaatcaaaaatagtacgactgcaataaaattgtaagacaatatatttttgccgcaatttttgttttattatggttatatgtataacaattacaaatgttaatttacaaagtgaaatataaaatttaaatagtaaatacaacttattatttgaatttatgcataatatataaaataaaattagtttataatttttctatatacaaaaattaatgctcctaagaatcttcctatgaaaatatgtctatatattgtaatacaataatcataagaagaagaagaaccttagttggaagggggtaactgcagcctcagttaagaaggaaaagcgaaaagcctatctgaaatcttagttctacagataggacactctgaacaagctaatgaacaagatttacatactgcaaaacgaaaggataaatatgattagttttaatttaatgttaaaagtgaaatcaagcaagtaggattcataggaatgatgatgactgcttacaacaaaaatggcgacacggcaaaagaattgcagcggtcggggattcaaaacatactttacacatgtgagaattggcatctccattccccatttgtttcagctccttttccttcatctcttgcattcgagcctgaaaacaacatacatcttgagtttgagataccttaacactttttcgagaactttttagtttcttgatcaacaagtgcattttccttgtggatttaaaattatgcaaggaatgaaatcaaggaaaagaagtgataccttgaggcgagcgacaaggggttcttccttgggaatctcatcagctggtttaatagtaacttcaacaatttctctctctttagggacagtagcactgtcgaagtcatttgttttcccgccattaatagtttcagaaggatcactctgcctctcatcgccattcatatcatggacggctgcagcctctttttttaactttgccacaagcacccacatgtttgctaaatcattttccaaggcttcctctcttctctttgcctcttcaacctttttcctatactcttcctcgatgtattccttttcagtaagggcagcttcaagagccgcctctcgttgttttcttgcttgaagttccaacttcatatcctctgcatcaagaatcaatgactcaaagtcatcaccccccatgctagaataatcattggcacgaccagaaggcctcactttcctcccaggtctatttccatcactgaacttgcggttagcaccattaacgttatgcaaaacagcacttctagaatttgctagttcccgggctgccaacaattctttttccagctttgcattctgcaatgattgctttgtcacttcaccagccaaattcttcagctcaactgcagcagcagaggccaactccttagcgtaagaagcttcttcagctagcttttgattctgaacacgcaatccactgttctcctctgaaagctgaacgtgctcaagctttagtttttcattctcaatctcctgagaacacaaaccagaatgaaatttagctccaaataagcatagcagaaagcca

SEQ ID NO: 230577 - DNA, 849 bp, Cannabis indica
ataaaaatataatttttttattaaaaattgtgccttatataattatcccttaaaaaattatatgggtgcatgtggccaaactaatcaatgttaatgctttatttattttgaaggaattgttactgtgtctttgtctttgataactattgtaagtgttattgttaggttgaaaaaaagaagacaaacacgatgagaaaaatgccaaaatctatctaatatagcatacaagtgaaacaaaatgtgacagtagtgagggtagacttttcttactttccaccattaatgttgatactcatagacctacacaagattttgatactccatataatggatgtatatgacatgaataatagtccaagtattttttttagtgaaatttgtcaaactcacataattaactttatgtgagtgtaaatttatagtcgtttgtgattataatagttatttatggtgtcacaatctaatttattattatttatgtgattatataaaattatgttactagtaaatttttttgtaaaattattttggtaataaaaaatttcataaaattatttattttacaaaacattctcccacataaaattttatttacattcatttattattttgaagaaattaataatttcatttgatgataagtttaaaaccagattatgttttttttgaataaaaaacagattatgtacatttaataataaaccatacttttctattctataatttataataagtggttttaacggttatattgaggggtaataagtaggagtgttcatcaaactgcccaaaccgctcaaactacccgcaccgcaccacaccgcaaaaaaaatgtagtttgaaattctt

SEQ ID NO: 230578 - DNA, 793 bp, Cannabis indica
ttttattttattttttttctgctactcacgttcccaacaggaaactattggtcttctacatgcctattttgcaggctgtgttactagctactacatatttaaagagaagggcatgctataacctatataaggttcatttggacacacctcattccaacattaccaccttcacactctctctctctctccaaattcttcttgaagaaaaaagaaaaaatgagctcttcacttcccttaggaacccgacgccaccaagttcccaaatcttaggattttttcttcgttttaacaatccaagctttccacagggatcctcaatggacttcattagtgggtatctttcaaaacccattctcttcttgttttcttggatcttcaattattatgttcaagctttttcaagctttttacgttcttgattctcacgttagattgtaataattttcgtattatgatctgcatgatagctttaggatgcataatgtatgatttcttgatgaaaaagatttgattttgagattcattatgattcttcactctttgagtcataaagaacacgtttaagtccttgaaaaacatatttttttatcccttgcacaccctagccggcctatagggtcttgtttgtgacttggcctgccaatgatgctacatatgagagctggctagttctagggtttaatctagaaccctagagttcttgcatgggtcagggacccttgccaggacatagttgtgccttgaaaccctagttggcccaaggcttcaaccctaaggctatgtttggtaggaa

SEQ ID NO: 230579 - DNA, 858 bp, Cannabis indica
aaatttaaaaataatttttaaaagagatatttgactatccatgcttaaatgtattgcatgatctaattatataccaccttattaaatatcaaataaaatatgctatttcttttttagtaccaaacatacccctcaagaataaaactaaatccttcccctctattccctctctcattctcgtctctctctctctctctgcaaagtcacacacaagcaccctttgtcggagcaccatttgctagagcaccctttgtcgaagtccatcaacttagcttgataaccaagtgtgtaggagtaacccaaacttccttacctacagaggcgaaactatgttgatctatgctggggccatggcccccctaacttaactttgtggtttatttgtaattaaatatatatggtattctcattaccctcttcagccagtgatgtattctcattatggtggaagcaattttggggtttaaaaatatccaggaaaattttacattttgcgtggaggggttttcatgaaatcttgcctacacgtaacgggttgaacaaaagaaatatagtctctaacaatgcatatgagctatgtggttttggaggagagaccaatgctcatggtattttctggtgtccctttgcacaagaaatttggaagctactggattttaaagttctacatgaagtgagagagttaatttattttaaaaaatgtgatactatatgtttctgaggtggtagaaagggaattgtatgaaaaaattatgattaatgctcgggccatatggacggagagaaagaaaattactcatggtcaacaattaagacaaccacaacaaattgttaattggattgacagttattatgaaa

SEQ ID NO: 230580 - DNA, 882 bp, Cannabis indica
acaatcaattaatacatcttatattacctttttagtaaggcatctgtatgctccataaaagaatctaaggctaatagaatctaattataataaattaaaccaatttttgtctattggagcaacttgcttaggcataacacatgttatttttattttgacttgccattttgtttcttgaacaatcacattctgactcacaacttttgctttccaaatcttattgtttctagctttctagatttggtacaccaaagctgcaataacagcagttagtacttccttcctaaacttgctcattttggaccgatttatccaccttagaatcccatgtagtcactattgtagctctccatctaagccagcttttaatctggctaagacaggtttgagataagaggcattcaaagaacacatgagagactgtttctacaagtccattgcaaaaaaacacaactcggctcttctacaatgttgaatctatagaacatttccatggttttaaacctattttgaacagcaatccataacagaaaactgtgctttggagtgtttaacctgaactagacttcttcgcaccagtgatagtgttcgtgggacttggttagcagcttataaatataggaagtttgacatgtttctgttgtgaattgaattgaatcgaatccaatacttatttcactttatctttgagctcaactaacttcctcaaataccaactgctttatgttggggctttgtactccaaccaatttttatttttaatgtacacattatgctttcacttgactcacttgttgtctttttttttttgttgcaagtgaccatatatttttgattacaacaactcggttctattcacggatgtttataaagcctattcca

SEQ ID NO: 230581 - DNA, 567 bp, Cannabis indica
attttttttaaaaaaaaataactttaaaaattgtccacttagtcaaatatcacattaaattaaagacattttttagaacaaaattaaaaactttctaagtaaaaatttaaaaaaaaaaatgccatggggtcattgtatgtattaagccacacttcactgaaaattgatcttggaagaccacattgtatatatggcaagacaacttcaataggcatccccaattaaaaatgctctaaatgccaaataataatgctgtaatttttaatattttgctccaatacacaattgtaaaacttaatacaaaatttaatattttaattgaaagtacaaaaaaattaataattttatcattaattttgttatttttattatgtaaaacaataaaaataagaatataaataattactataattaaatgctatagctaaaaaatactaaggtcaacttcaatgtaaaaactaaatttagtgtttaacaaacactaagaaagtactttttcacccctcacttccacatatgtcaaataggtttatgttgcgatattttttgcacacgcaagtgtacgta

SEQ ID NO: 230582 - DNA, 929 bp, Cannabis indica
attgttggccatgagaaagtggagaaaatcattccgagcatcgtctctaaccttatcctgcctctgaatcatcctcagtgaagtatcaggagacaaaagtcgaaactcgtgtcgatcctttccctcgttgagtcgatcctcccccggcatttcctcctcatccgtgacttccaggggttcaatttcatcgattcgcctcaacgcatcagcaagatcgatatcagtattaccattactagctttctttcttgagattttagcagcagatttcgattttccatggttcttggaccttgttttagccatagcaccagcctcccagctgcaagagcgaaaaaccagagaaaatctaggtttgtacttttctccttgaactatgtaattagctagccctaaattactattttctttacattaaaatgttatttgtatatataatttttttaattttgttataaatatgtgtggattggattgaatcggttacttttacatgtcaatcaaaatccaatccgcacaagtgcggatatctgcactttgcggattggattgaattggatcgtgcggattggatcggctattttatgaacacccctagctcttccttgaataacataaaatagtagcttggtgacagtctcaaggcttatattaataggttcaacatcaaagcggccaaggtcaagaatgttgatgatagtgggggactcatggcacttggagcaggcataactcatctgtctttactatcagatagcctctaaggaagaggtgcccccaccatcgacgaatttatgaagagggcccaaaagtatgtaaacattgaggaggccagaatagccaataacctacctcttccctcagcacaacctgctccagttaataccacaatgaattccacaaatccaaaggcaacaactaccaaccac

SEQ ID NO: 230583 - DNA, 574 bp, Cannabis indica
ataatggtgattctctcataatttttgtagcattttggcttaagaggagaaataagggatccttttacaatgagggtgttactctattttataggaaaatgcacccatgggccttaattagcaagaacccatttaattaaggagtgtaataaataagcttttaccctttaaatgaagttgcgagaatgttaaataatatgcatcctaccgttgggcctaattagggtggtaggtgaatgctaatatgatctatagtataagtgacagtttataaccgttgccacctatacccaagcatagatgacagttttaaactgctgggaatgctaaattggcgatagtttcgaacaatcacctattctacctattttgggacgataaaataggcaacaattatagaaaccaacaggaatattttaaccgactgttaaaactgtctggttaaaccaatttttttagtagttgctaatactttttaacatggaaaaaaggaatgtcaaaatgggaatgggagtgtgtatcccaaaggtacatcctttctttgtaagggtcagacctttggtaaaggtctaac

SEQ ID NO: 230584 - DNA, 1222 bp, Cannabis indica
ttaattcagataaaaaatatgtcgagaaatattacaaaaagcattgtaatttatcatggaatatatcaacaattatatcgcgacacatcgctgtttgtcgaaaaaggtcattttggacttccccaaacactacgtctaaatatatcgataaacattgcaaacaatattgatataaatggcaaaaattatcaaaaaaaaagacacaaaactacagtatgtcgcaacatacaacacgacacatcattaaacttcatccctgacctctaacacactcttttatcgttaaatgtcgctaacaacatcattaaagattgctaaacttgcaaaaaaatatccaagaaaacacagaatcgctgcatttcgtgtttcagtgacaaaaatggtacataaagataaggatatgtgtagggaaatatgtaaactgtatttggctgtgtagggtaatatgtaatcatattctcgttaattaaattacactgtttagttgagtacaggaatcttatatattattttaaataattaaaattaaatatttttattatatctatttaatgttaattatatataaaaataaaataattatttattaaaaaaatatatttattaattagtaaatattaaattttattgtattttttattatttaaaattaacatttctacatattttatcactatgttatttatttttgttcactatgtcatttatttccaccatccgtataaaatttatgtataataaatatatttatatatattattgctaataatataaaaataattcagttaaaaaaaatcgatctcacagactaatatatatatatcgtaatattttatttataataatgataatattattggtatgtaaatttattaattcaaaaatgctattcaaattaatataatgaaggtaataattcaattctaccctttttaaggtatcaacattactcttctcaagagtagttatattacttggggaataacattccaaggctaaactcttaaaacaaacaagttaatgtttcacattaccattcccttgatagcattataactcattccaaatagcccctaaaagtttggtttaaggttgtccaaccaactctacagtaatgtaaggtggtcgaacaacagtagctctagtgacgggtaacgggtggttcgattggtagagggtgggtgtgtgtggggtatgagtttccgagagagagagagagaga

SEQ ID NO: 230585 - DNA, 1241 bp, Cannabis indica
ttcaaattaattaaataaggaaacgccaaaatttgtgaagacaataattgttgagacaaaagttgtctagacaacacttccttcctaaataagacaaggtaggcgcctatctccctatgagttttatctttttagtttaattaatataatcagataaatattttaattcaaaaagtagtttaagatattttaaagtagttaatatattctctcaagtgattgagagatttcttcataaatatcagtaatcgaattcggttatagatattatttaaatgattaaattaatatgcatttaaatactataaatagaagcctaatttgagaaataaaataataattttcaacaactattttcaaaatacccaaggagaaaaaattatattctctctcaaatatttcttgctcatgtgttgagaattcaacaagaacaaattatatactttatcctaatagcccacattatttcttgtgtgtggtggattaatttggaagactacgatgtgaattttaatcaactaaaatgatacaacatatgagaagttttgaggatacattgatagtcatgaagaggtatatattcttatcttatattttatgctttgatttaatgtatatccctgatagtcatcaaaaggtatatattcttatcttctattttatgctttgatttaatgtatgcacatttggagattcattgagttatggtacaatgataatcatataatatgaactctttcgttacatacctaatttagtaccataaaaccaatagatgcagataaggagtcaatgtcgaagaaccctagggttttcattcctttacttatggccaatttttgcaatgtgtttataagtattgtgcgccttacaaacttacctcatatgatacctcttaaaatgatgtaattattctcgggccttagtgacatacaccattatcttctctccttgagcctagtattccccaaagatttggttcaccattagttgggaatcaatgtgcattttgatattcacagctcccacttctcgagctagcctttaagtggctaagaaagattcgtgctctacctcattgttggatgtttcaaaatttgaaggtaaggaactttttaattggtgtccttgaggagataacaggatgatttcacctccggatcaattttcactggatgctccttccgaaaaaaatttccatacagatgttggtagatgacttttttccagagacttagtta

SEQ ID NO: 230586 - DNA, 1342 bp, Cannabis indica
gggaaacttccctaaagattatatttttacttatgtttgtattaatggctttaatatgtgtaaaaacaaagataaagataggaagagaaggcaatgaaatgatggttttggttggttgcttcttaccttttgcagagttacaaaataatgaaagttaaaagcgtttttcttttcagagatcatattatccaagtttgctttttttgcaagagaaaaagaaagtagtgaggaatgtgttgtgagctatattaaagagtagagattagtagtgagttacctttactcacaaggcagagacaaagagacataagaggaaactacggagtatttgctctaataattgtctttttactaaaaaattaacttacaaatgtttgttttgatagaacaatttagctaaatctattctgtcagcttgaaacttggctcattggtaggcaatttttggctccattagttactcaaggcggttgtgtgttctcttttaggctatatttggtataaggaaaaagacaaaagcaccaagttgattctatttgagagaaaataaattttaatattggaccttcttctctaccaaacataaccttaattgagtggttactaagatgtttttgtggagatcaaaaggtaaggtttttataaaaatgaaggttttgatatacaatagaaacccttataaggtttttagaagagggaaagcaatggttgcataggttttgaggattaattcatactagttcctaggtacatgttggatcatcttatgagttatgaccaataatctccattcttctccctcctctttctccaacaaaaatgtacatttggtatgtcaaaacatatataccaagaaagaaaaagtttgtggttaagtggtatgtatttgtaccatgtattgggtatcccctaagcttgaagccatactatacccatcagggtcggccttgaaggtagacgagttaggcgtgcgtttcaggcattaatttttttcttttttacattttacgaaaaatttacaagtaaataatttaaatggtaatcaaaattcacataataattcacatacaatcattaaagcaagacaaactgtaaattttttaaaaaaatatataaatgtaataaataaataaggatgagaatgtgaatttggaatgttaatcaatgcaggaccataaaccccaatataaatgcgaagcagaggatcagtcgatcagaacagggtagatccaacggtcttaaatcatccacgtgttctagatctccgccatagcctagtctcaacacaataagccccgaatcccccaccccctctcttgagtcctctctctctctctctctc

SEQ ID NO: 230587 - DNA, 1848 bp, Cannabis indica
aagggtgttttattgttgaagctcagggtagaagtgggggtttggcattattgtggaaaattgaggaagaagtggtaattgattctttctctgcaaaccatattgattgctttgttcattttgagggttatcctaaatttcgatttactgtttttatggggagccgaataggagtcttaggaagaattcttgggagttgttacgcactctacatgatcggtttcaagaagcttggtgtattatgggggattttaacaacattttgcacaattctgaaaagaagggaggaagagcttatccgacttggcttttggatggatttcaagacacggttcgccactgtggtttgtgtgaccttgatttgcttgggcacaaatttacttgggaaaaaagtagagatactcctgcgtggatagaggctagactagaccgggcgatggtgaactttatgtggttgactcggtatcgtgaagcaaaactattcaatctggcggtctctccctcagatcattctccactgttcttggatatgttacaacatgttaaaccggctggagtgaatttttttcgtttcgaaaattattggactcggttggaggagtgtgagtcgattattagagatagctggaatcgttcgggagcgttgcaaatgcaacaaaaactctatcaatgcggccaggatttaaaagcttggggaagtagtgttgctgggaatttttcagcaagaattaagcaatgtaacaatgatcttaaattgctcaaaggtcgttgtgatactgaggggaaacaacggtatttggacaccaaacttcagctttttgaaactctaaaccagaaagaaatctattggcgccaacgttcgaagcagctatggctcaaagatggtgatcgaaatagtaagtttttccattcaaaagcttcttctcgcaaacgtaataataatattatttgtttaaaagatgatatgggagagttgaaatattgggacgctggcttgggtgagttaatgcttgattattattcaaaaatgttttcggccgaacctggtaattgggaagaagtgttgagttgtgttgttcccaaggttgatgaagagcaaaataatttcttagttagacccgttgaaactcaagaagtcaaagatgcattattccaaatgcatccgaataagtctccggggccggatggaatgaatccaaaattttttcaaaagtattggcacattgttggggcggacgtggtagcttgtgttcagatttttttcatgactaaggaaatgcctgtggggttgaatgataccaatattgtactgattcccaagaagaaaaagcctaatgacatgagtgaattaaggcctatctccttgtgtaatgttgttgcaaaagtgatcaccaaagtgctagctaacagattgaaaggattactccctgggattatttctttgaatcaaagtgcgttcattcctggaagattgattacagataacattatggtttcgtatgaggttcttcattaccttaagcggaaacaggctgggagggatggttgtatggctttgaagttggacttgagtaaagcatatgatcgagtggattggaattttttgacggctatgttatctcgattggggtttagtgaaaaatgggttcggcttgtttatgggtgcctatcttcggttcaatataatatagtgagtagtggatatactattggacctattataccaacccgggggcttcgtcaaggcgatcctatttcgccgtatctgtttcttatttgtgcggaaggattgtcagctcttattcaacgttatgaggaaaggaagcttattcatgggtgtaaagtggc

SEQ ID NO: 230588 - DNA, 1123 bp, Cannabis indica
ttattaggagaaaataaataccgggtttgaacggtgttatggtttttgaccattttacccctacgcttgaatttgcttaagtaagtggcaagggtatttggtaattagttatgtgggacatgtggctaagtaattaggtgacacctagcctttttctttcagcctaaactaaactaagtgggaattattcattttgtgaaataaaagaaaaaaaagaaaaaaaagctgaaaatcaaagaaacactctctctttcccttctctctcttcgaacctagcaagaaccatgggaattgttgctgaatttctcattttagcaagggattcaagttggattcaagctaaggtaacccctagaacatttacttgttgtttttcaagctttggttttagtttgggtgtgtgattttgagatttaggggctgttagggtttgatttgtgtgtggttcgaattctaagcttaaattgagttgattttaagttcttgatgctgtatttgatgattgttgtggtggatgatcaagttgagtttgaaaactcaaacttgagtcatcaatggcatattttgattcagagtgtttttctggtttctattgctcagaatatattgtgtaagctcattataggtgttctagaacgtttggtagcttttggacatgttttgaacatgttatgaattttttggagaaacttagtgcaaacggttaaccagtttgctgggacctgtaaaaccggttaaccggttttggtagattccccgaacaactcatttcctcgattcgtgtccatttcaatgccttgttttggtgattccctgtttcctatgatattctagttcatattagtaataacagaatcataagttgtaggtttggggttcccggattagggttttgacatgtgattacccggttatgttatgtgattagggcatttatccagcacgagacgttccgttcaggttggccgacacacttgaatttggaaaagaggtaagcatagcgtataatatgtgatatgaatatgcgaatgtatgtatgtgtcaatgtatatgcatgcttatatggttagttcactaccatcacttgtatggaaaaatgatacagagtgcattaatatagtgt

SEQ ID NO: 230589 - DNA, 755 bp, Cannabis indica
aaaaaaaaaaaacttataaaaatccaaaaaaaaatacagtatcacaatacatatagtgatcaaattaaactaaatccattaaacaaattcttaactcacaattttttttttcaaaaaataacaaaaatctaacaattcactaagggagtgggtcgacagtggggggaatggcggtggtcgggggctctgggtcgttgaatggtcaaatggtcgttggtggctctagttttgtatgtttaataaatgttagttttaaattacacaggttaaaacaaccactataatgaaagaatcatgaacaataatagtcttacctcccattgaaatagtgaaatttgaaaaagaaaaaaggatggcagttggctaagaaaaaaaaatatcacaaatgcagaaaaatatggagagttggggcacaacaagagaacatacaagagaagtcatcaaaaatgaaaagaagtagaacaactaaaaattaacaatggaacaacacgagaaaaattgaacatatattggagcataggatactgaagaaaataacttacacacaattttcattatattcctattacataatatttgaaaaaatgtgataaggaaatgaaaaaaaaaacaacaataaaataacattaaaataataataaaacaataataaaataaaccagtaacagacaagggtaagttggagaaagaggatggacttgaaagtacggtagagatgaagttaacgcttggagaccaaaaagacggaagatatg

SEQ ID NO: 230590 - DNA, 1322 bp, Cannabis indica
atacacattcataataatacattgcaaataatattttaatacacaaataatttaaattatacagttcaacattaaaaaaaaaactacttaattttcttaccttagaaattccaagaattagagtaattgcaaagtatagaccgtcaagaatataatcgagaacaacccttaatagcgtgaccaataattacttgaatccttgtcttatatttgaaatctccacaagccactaatgaatgaggatgcctcttgactcaattttgtattcaagtcactctctccttcaagccttataaacactcttggttactcactataattcctaattcaccataacattttgttttatttatcattctttctccagcaaagtcctaagtcgcctcacccctgtacccttatatatagatatctagtcaaacttatcaaccctcaataacactttggtttaaatttgaaaatcctaaaatatctctaatctatctaggctaagcatgcttttcaactaacgcatattcattcaactccttacactcatatcataatgaattccctattttatctctttttaaatttccaccgtaatacacaaatatctcataatttactccactatcaccaacaaacataaaccatgacttaaattaataatttatattaaactatcacatatatttaggcaacactataatttaaaataaaaattagctttcaaccacaacaacaacaacaacaacaacaataataataataataatatttgtgataaaacaacacaacaatgatcataataataataataataaggtacttgacacgtattaagaaaagaaaccaatttctataaatcaaccatccttattttacctttactaatttttaatctaaattgaaaataacagctatcataatttggccaacaataaaaattcaatattatctttcttttcttaaattactcacaatataatacacaaaacaatctataaattcttttaattattagtacttaaataatgtccaatacttgaatggactcttctataaggcctacctaaatgagttactccactcgtaagaataccagtttaattattttttttaattttaatttgacaactaatacaattttatttttctttagataagtagccaccaaattaaactctaataattatccctactcaccacccataacaataaatagatatttctttttcatacaattaatctatccataaatctttaaatactatttttttaaaccgggtttgacattctaccctccttaaaagaaatttcgtcctcgaaatttaactttc

SEQ ID NO: 230591 - DNA, 1320 bp, Cannabis indica
atgtctttaaccttatttctcccgccaaatttaacattctcaaaaaatattgtagttcccgtctcaaaaatatttatgactgtgggatcataaaacttgtagtcctagatcgctcagaataatcaataaagtagctgctaactattttggagtccaatttcttttcatgtggcctataaggtcggttggacattcccaaatgtggaaatactttagactaggcttcggacttgtccaaagctcataaggtatctttgcaactactttagttggtactctatttagaatgtaagttgatgttttcaatgcttctccccagaaggacttagataagttagaatgagcaatcatgctccttaccatatccttaagagtcctatttaattcttcagcaatatcattcatgctaggtgatcctcccatggtatactgtgggaaaataccacatttctctaagaatttagcaaacggtcatggacgttattcacctgggtcatcatatctaccgtagtactcaccacccgattagattcgacattaattcttaatccttttgttaagttgattctcaacttcagctttgtaactttgaacacgtccacaaattaagatttttcatgaataagatataggtacccataacctgagcaatcgtctatgaatgatataaaatattattgaccattccaagatgtcgtagggaatggcccacaaatataagtatgaatcaattccaagacttttgaagctctattagaacctagtctcttagttttggtctgttttttcttgatgcaatctacacaaacattaaaatctgtgaagttaagaaactttaaaatatcatcagatacaaaacgctcaattctatattttgagatatgacgcgtttatgccataatgacgtttttctttatttaatttgtgttcagtgcctcgtgattccacatggaaggttttattataagatgcaattatttctagcaaataaagattgtcataagcattcaaataacttgttccaataacatttgaatttaaatacaaagtaaactgattgtttctaaataaacaacaatgtccaaaatagtccaacaaagaaataaaaactaaattctgtctaaaagacgacataacgaaagtttctttcaaattcgaataaaaatcaattctcaataacaatctaaaatgcccaattgcttcaatttctatcgattgtctatcacccacaaagatgtgtccttcaccatcacttgactttcggtagctcaagcaaccctaggggtgccgaaacgggttcgacatggcacacgaacacga

SEQ ID NO: 230592 - DNA, 1488 bp, Cannabis indica
tccttttaaaagtagggacataagaaaatattattcaatacaatttgaacactaaactataattcaagaataaataacgtcaacttcaacataagtgtccactttaagctttgactccctttcacttggcttcctgagatcccttagcccctggttgtgcttgcttctttccatattttccttatcctttgttgggcttgagttgagaaacatagtgagaaaattcattcttctacttttacaacttgctttcctcagacacacactcagaaattaggttactaatacttcatgtcttattataagtgtcggaggttatcttgataaggctaaaaagaggcaggaagtgcatgaagagcacaataaataatgtaagagtcagggagaggaatattatgatctttcaacttggactgaacattcacaattttcaaaataaaatatcgcactccttttgattcatcatacttaatggttatcatttcatccataagatgtctagcttcagtgtttttaccagttgcatatggctttctataacattgaaaaactcattagcatttgtggtgtttggcaaacaactaaataaatgttcaggaatggaacttttaatttatagcgatgaggctaagacatgtttacttttcccaatgtgcatgaagacttttcttggcaacagtattgagattagtaagatcaatagatttttcttctcgcaggcataagtccaaattcattatgcctaaagtaattatcacatctcgttttcatgccttaaagttggtgcattcaaaatttggatggaaacgtttattgttgttcacagaaaagagaccaaaaatttaaaacttgattaagctatatgagccaagcaattaaaaaatattgtagagtcaacttgtctttatatactcccttttgggatgagaatataacacacacatgatctacctttatgaagttaccaataaagaaaaaatacatatcaattaagaatttattacatttggacaaataaatttcttaaacaatatatattaattagagccaaaaaaaaaaaaataaacactactacaaaaagtacaattcttgtcaatttttaagtgtcatttaaagaatttgcgtcggtttagaaaactgacgtatataccgtagtcgcaaatagttttttattagagtcgtttgttaaaggacgcaaaaaacaattatattcactacaacatttatggttattagaggcggaggattccgctggtaataatccccaagtccgctggtaaaagttaatagcggcggggtccaccggtaatgcttggtcgctaaaaatgggtattagcagcggactgaaacctccaccgctaataatagtgtcaaacacataaactgacattattagtagcggcagactaatccgcctctaatgcttttttgtttttttcattacatgttaatataataaaaattaaaattaaaattaaaaatattact

SEQ ID NO: 230593 - DNA, 2861 bp, Cannabis indica
agctttccttttcccccattacagccccataagaacctaatttttacacaagatttaatctctttactcatagttctagctatcttacatttcatctcaaaaatacaacaatttatattagtccaaacagtgtacaaagtcaccaaaactactgtattgagcgctttctcttacaagctgttggaagacctcgataaccactctctgacgtcggaaggccagtcaaaaaagccacaccatctttttatctctttgatcactctacgggtgaaacagcacttaacaaacaggtgatggtgtgtctccttttccaagcaacagaccggacagagatcaattgttatggagataaacttgctgatgttgtctctagttagcagctggtcattcacaatttgccatccaatgaacctatgctttggaagaaccattctatcctaaatatttctagcatagtcaacagtgtgagcttggatatacgagtaataaaacaattttgaactgaatttatctctcattatagctgcaataattccagtttcattaacagttgaccgaagatacacaagtatcacaaactcttctatacaaaaactaatagaagatacacaacaatgataaagtacattggttaaaactacattttctaagaatttagaataaaaatatacattgaagattctttcaccataaacaccactattaattttcaattcaatgcgacttagaacagagtttagcttaccattttgcgtaaccatgaaacaccactggagaggaccaacatcgctgaaagtttcttccaacttatttaccaagtaaaaaatataatacaaattagcgaaaatctagctcgattaagcattcaatactaactaatccctaaaatacagcttagaattcctaattttgtatatatacaaattatttcaagtattttgcaatggtttcttgcgaaacaaaaatagataaatcacatagctaagatcaaaatttttgggaaaattgcattcactgctcgaattaacacaaaaaacagagaaaacaattccaaattttgactccacacgagaaatacaccccttaccttttcgacaacgctcaagaaaagatgaaaagcttctttcactcattggtaactcagatccaagcaaaataaaattaaaaaaacaattaaaaaattatgaagcgagaactcacttcctaccaaacagatctaaccagtacaaaaaaaaagtttgtaaagactaaccccacatggtgtcaaatggcaaaaaagagaggtctggatgagagagaggttgaacatgtgcaatgccgactttggagagaagaacaaatgtatggtgccaactttggaaagaagaacaaagaaatagaggagagagattgactatgggtaagaggcgcacagagagagaggaatgacggggggagatgaggaccactcgtcgtcgattaatggaacatgaggttaaaatttctagagctatctagtttggagaagagaatgaatagtggtagctgatttcacaagttaggtttagaggaaataggccatttcatgagtcatactggaccattataaactgacgttgaacatcaataaatttttaagtttctttccttgtcgattatgttattagtgtgtaatataccacagacacagataatgtttccttagtgttaattctaaacacttgcataaatacatggcctactattcacgtcggtcaatgaaatgaatattagagttgaccgatgtgaatagtgtaatttgtagtagtgttggttgtgacaaatgcggtaggtgtgcttcttagaatttctcggatgcttgacatccatgggttaagggatggaaaaattagacggacggtccgtgggttatgaaaaactagatgaatggtcaaaagagaaccagaattggataagaagaacctagcgcatcaggatatttttcaacatgggcgctacgtacttcatttccaagctattaggttttcattttgatacttctatggttcttgacttgaggacgagaacttctaccctgttttagaccattccagattcaatggtcgaattagatttggcatttgagtgattgaaacctacacaccaagttgattgtcaacctgggcactgggctcagcactaggtcaacctaggcactaggccctatttctagggcctcaagattgtagtttgctccatgagttttcttgaatcatcattatttctgatgacagaaaaaattcccataacatttttttaagaacttggttagaaacagcccaagttgacaatatgtaaacctttgtgcttggctgagtgccaggtgtcaacctagacgctggttcccagttttggccctccgaaagattcgttcgatctttaaaaatagttgaatcttaatctttgcaaaaaaagaaaaacagagatgctaggaggagtctcaaaaaacatcattgaaattttccaaggttgacaaaatatcaacctgggggctaggcgagccacaaatgttaacctgggcactgggccttgcttctagcacctaagaagtgttgtttcttctcctaaaagtacttgcttccccattttaatgaagacatagaagatgtaaaatttggatagtcaatttgatacttgaaagaagcccaaatagacaagttgtcaacttgggcgctaggtgcctgggcaccagtgctctggatggtcaaaaatgaacttgcttcgaatctaattctaatacctcaaatatgtctgtgttatcactactacaattattggtattcgcaacaatcctaaaagtgattttttacgggaccgttactaaaataattaagcaactattt

SEQ ID NO: 230594 - DNA, 1012 bp, Cannabis indica
caattgagcaatgttctcacactttaccactacaagaaaaggatgcttaatcgcccggataaagtaaatggaactcgccggcattgtttcgctgatgacattttgtgccggcaatggttcgtcggcatatcatcttttgtcagcaaattcaatagatgcgttggcaaaagtatttacaccagtcaattaaattgtcggcatatgtttatcgttagcagttcagtgccagttgaggtggcctggtcgatgttttaccagtgagttaatgcgctgtcaaaacttttggcgcatattctctaatttgctggctaagttttgtcggtgcattaactcgccggcaaaactgtttaatattaaaaaattaaacaattttgccaacgagttaatgcgctcaaaaaatatttaatattaaaaaattaaatattttagtcggcgcatttaaactgcgacaaaagtatctttttttaaaaaaatgtaaatatttataatatataattaaaattaaaattaaaattcaactagcaataataataaaaaaaaatataatatcaaatatattataaactcaaaatttatattataattacaaaattacataaaatgccgtaaactaaataaaagtatttttaattcataacaataatttaatgtacactgcacactaaaaaagaactacaaatccactgcagcatcattttcatcaccgggatggacagtctgtgaggaggacccaacagcatagctaggacgctgaaatggtagaatcggtggaatcggaagaattgcgggcatgtgaaatcctcgaatggcattggccaattggattatttattgttgaaacgcactcatgatttgattttgagtctgcatcatttgttgttgccactcgttccgtgcttcctactcttccacccttcgctttagtgcctcatattcctcttcagtgactgtgggctgcccggagggacctgccctgggagttgctcttgttgcccctgtcttacctctcggc

SEQ ID NO: 230595 - DNA, 2069 bp, Cannabis indica
ccctgtctttactctatttcttgttcactaatatggtatcagttgctataatccaagaaccataatctccaccaagcttccactgcctacaacaatggtgcgcacgagagccaatttctctgctacctccactgatctcaacaccaatcaagtggacgatgctcatccaaattctgctcctccaacatctcaaaactcggcagacattccacctcgagtccctgttccagttgttgctactcaccatgtccatggtgatcaaccgacttatgaggatgtacgaagtccctactacctcagcactgtagatcacccagaactagccctcgtcactccgatcttaatagatcgaaactttcaaccttggactcgagacttcaagcttttcataggtgcacgtaacaaaatgcccttccttgatggtacgcttccaaaaccacctcccaatgatccattatacagttcttgaattcgttgtaatcaaatggtccaatcttggatccttcactcagtttctcctgaaattaagagcagtatcatgtatcttgatactgctgcagaaatgtggactgaacttaacaataggttcaatcaaggtaatggtccacgtatctttgagcttaatgaaagccttactttccttcatcaaggagatgactccgtcagtacttacttcacaaaacggactgccatttgggatgaaattcatcaacttcacccaaagataccttgcacttgtgttgctgctgcaagaactcaagaatatcacaatcacgatcaagtgctgcaattcctcaagggtctcaatgaatcttatcatgttgttcgagatcaagtattacttcttgatccttgtccacaattgaataaagttttctctatgattgttcattaagaatgccaaagaacccttggcaatctaaatattacccccttactgcagctgcatcgtcgtctacaccttctacacccaaccccgatcctaatcctgcaaccaatttcactacaaaaaataaaaagatgcgccacctattccaatagccaaaaaccaggccatctttgagataatgctattttctcattggttttcccctggatatggcaatcggagaaccacagacactgctgccaaaggcaaaagcaggtctgattccaccaacactacttagtaatgttaagtcattatatctatgtatcattttcttattggtatatttaaactattttttttaaaatactaaaaatttaatgacttggaccaatcaaagattgccacgtagcaatttacttaacatttaatagctaggtacctacagaagttctagaattataacttaagcattattactgccaaaaattaagcttatgtatttatttacaactgagagttaaacttaggtatttatgccgcaaattagtcattttgttatttaattaaatttggaaaattatttaagttgaaattttttgttattttagaacaacttaaattagatattttcaaggaatttattttattatattttatatattttgaaattatatatttttttgaactttattctaaaaattaaattaaagttgaaaattaatttttaattaattttggaccaacttaaattaagtaatttttattatgaaaatgtatagattaaaataagtgattaattaaaaatacatgttaaataatgagctttaatcaaagagacactcaatctcaattgttggttctatatagttcttgttttagtgagattcatccataatagatggacgttcattagcaattcaaagtcgtagaatctcgaaagataagtattattgtaagtattttattctcagtaacgaccatccaaatagtggctgcgaaaagtaagacttataaggtattaaacaatggtagaaactcatgaaataggaatgaccttgactctcgactaaaatgaagcaacgtcggattctctttttgattgaataaaaggttgctagaatgtttccattttagatgagttgactactctattcaatggatgatatctttgactctcgactaaaacgaagcactgtat

SEQ ID NO: 230596 - DNA, 5004 bp, Cannabis indica
aaattacagtatttttgtaaatttcccttttttttgagcccctgggttaggtgggccctaggcacaggcctagcccgcctaagcccagggtcgggcttgagtaccagtagtgtcttttaataattctctaattataaatataaaatcatactatttattgtgatgtaaattttacatttatattgtcgtctaaatttagatcatttttttgttatgtgatacttttagaacactctcaatagtttttttattctattttttaaaatgcctaaatttttaacttgagatcggcctaagtgacgccatataattagttagcaatatttactaaaagttaaaagttatgaaaaactcaatacttaactgaaatataagaatgaagatggtgatagatataatattgtcttttagcattttttttattttattattttatccttttataaaataaaaagaacaaaaaaagcattctttttgagttccccaaaatcgaccatggctagactcttcctaatctgcaacccaacctcactccctctaactctctctcctcacacttccaacccctttcctctcagacccatttccacaacagcttcattcacctcctctcacttccccaatttgccggcggcgctcagattctccggtgacccattgaaaaccagaggtagagaactgagtgtggtcactcgtgcaggtcccagcacaggaagctttgttcttgctttctttttgcctttgtccctcattctcatcactgtctttacttcaatcagaatctctgataaactcgatagagactttcttgaagaggtatttcatttcatttcattgcttttcttttcttttattttgtctttgaactgtttgataaaagtactgagtgaaatagttttgttagcactggtgagataactcaataggtttcgtttggtactattagtattaaattgtattgttttacttgcatttatttttgcaagctcaaattttcacaataaaacttttcaaattattaaagtgttagtaaattgaaagtgtcatttacttaattaccatcataaattgtatatgtgtacactgtgtttgacacgttaatatgggtacatttaatattattattttaaaattaaataaaattataaataataatattgacaattgtacacatatacaagaaagagtgtacacataaagtagaatgacaattggaatgatttagctgcaaaatttgaaatataatatataacctaatttaatataattatactataatatgatcaccaaacgagttgtaaaagtgtgcaaacaaagatgagttagtttgagtaatcaaatcgattgttgaacttcaggataaacagtcagctcagcaacaggtattggtgagattttctattatttgaaaatcaatgatattaatcataatgaaaatattttgtcaattatttaaatagtgactatcaataaaaaattaattagaattagaattaatatttcacttataacctattaaactggattataaaatattattaggctacactaaaaaaaataattatatagaattactgaaagttatgaataagtgaaatttattgatttgctgaataaatgaatttgaaaattttcgatgtatttttcaggttgctcttaatgaagctattagacagtcagaggaagatgaaggtgaagaagatattgaactatcttcaaataataatgtgactccttcacgtacgcgtaatcgacccattagagaagtttagattattgttcttcataatatacattttcatcttactttctaatcaaatttattgtaaattaggtccattaaagtattgaactatcgagttatataccttttattttagttttgagattataaaacaaaaaatttcaaactagataaacttttggattaatatcaaattttctcatatacataattaatctcgagcccatgaaagtgcattctaataagaatctcaaactatttcatatttttatagttatttgatgtgggataatattatccaatatttagttttatttattttgtttaaattttgacttattatctaaatatgtgtggatttagttgaacagccaatactgattagtccaatttattttgtgtgtaaatatatggtctagtgagtgaagaagaaacgttgcattaagagcaactctaaccatgctttctaaactcgttttttttagctaaaatagggagtgtaacttaaaaaaataagctcctaagtatataaaaaaataactctctataacagataatgatagaaatctttctaaatgtaggaaactccttatttcttttattaaatttttttaatagtattttaatcaaaaactttattactttttcattattttataaaaggattctcttctaaggccattgctaatcgaaacacattgcttaaaatgacatgtaatttcttaaccttaaataaaacaaacaccattcaattccagctaaaaaaaaatttacagcatattccaaacttcacacaaaggaaaaatttccattgaacatgaaggctctctaaccattagaaataacaaatcaagtcttttatattatagtatgtgcaagtaaattaaagaatgaaatacaagctacattattgtccactcattacccttctaactgaaaaacataaacagttagtgcaaatttatggggctggggatggatggctccataccgcccccttcggtgctttacaagacagagaacagagccatagataacaaagcttcaatcaagcaatgcataattataagttagaattgctaaatattttgacaaaacaatgagtacttgttctctctccttcattgaccacaagtgtaggtggtgacccttgttttattatttcccctccaacttgtttgagcttcttctcctccaaacctcgagtttctatagccaccgaccctattagagaaatcctcgttccacacttcgcggctattgccacttcttctaattccgaaccctttgttctgagtactataagggttccaatgtttcctacccctcgtttctcgccctttgtgttgccatccgtattggctagagctacaaacccaaggatcatcattatttcccatattactcgactcatgcttattcaagccccaaaccttgttccaagaaccccatccgctattttggctagaactggcaaacccctgattaccacggtcccaaggattttcattttggttagaactctggatttccatcaagtcctgtccccatgatttcttcgcttgatctccccacgagttctccttctttgtatctttctcagtaatgtttgattgccaagatttcccattaccgtctatattcatcgggacacctgcactattattcttccactggttccagccatcttctttactagtctcggcattgttagattcccaaggatttacattaccaccatcaggagcagaagttgagcttttactcttcatatcttctttcttacactgattttcattctcttgcctcacatcatcaggattaaaaaacgttcgctccaattccttcatcagttcagaatcaataaccgggttccaatctacttcatctatgtaactgtccgggtcaggcattggtatatcacaatcaaagccattcaactctgcccaaaaccgtttcttcgcattatcaaacgcttctttcacagcagaatcgttccaatcgacaacattagtatagtaagacatgaaatccttggtatttactatctttctccatggtaccgatccaatcttatagcagaatttcttctcccaagcaggcacattatcttccaaaaaccaaatcaacaaaacaaaaattcaaactttatgtacttcaaaataatcaaaatcaagttaagaaacacaatacacaaatacacttcacaatagtattcaaaccataataacctaactcaaaatcaaaacttgatgaaaaatattcaagtcaagctaagaaacacaatacataaggttcttgttcttcaattagtatatatacaactttgatcaaaattttgatttatacccttcttttgtgatgcttagaccgagaacaacaccatgcaattcattctaattatagataccaaacaaagacatgaacattagtattatacaaattaagccaatattcaaacttctacttcttatacatccaattgattattcattcatgagttcactttgttataaaattagaacactaattaaaccaaaattcaaactttatgtacaaatacacttgacaataagtattcaaaccaaatcaaaatcaaaacttgatgaaaaatattcaaatcaagctaagaaacacaacacatagggttcttgttctaaaatcagtgtctatacaactttgaatcaaaattttaatttatacccttcttctttagtaatgcttagaccaagaacaacaacatgcaattcaatctaattatagataccaaacaaagacatcaacatcaaatcttaaacaaacaacaacaattccaaaaagggctaaaaacaacacattaccaagttaacccaaaagacccataattacattaaccattaacaattcgaaacaaaacccaaatcataaaaagatacaaaatttcaaacatggggagacagattgttggttaccgatgatgggttttgaatcgtaggtgacatgcggcggcgtccatggtttttgatgacggaaagttctacgaggaagacgatcgttccatttgcccatttgggtggaatcgagagtgttattggttgggagaacagagatatatagggtgtgaatgagttgaatcgaatggagaagagggttgtactttttctttggtgaatagagaaagaaggatttatacttgtatcgctctcagtctcaaagagatgagaaactataaagactcaagctttttattaatttatttatttattatttttgtaaaaaaa

SEQ ID NO: 230597 - DNA, 865 bp, Cannabis indica
tatgaagctcgtaaatctctgttttgtgaatgatttaatcatcttttgtgaagacactttatgtaacaattctgaataaaactttcaataatttctgcttgatttcaggccttaaagctaatataagcaaatcaaacatttgttttgaaggtattggagttgttgagaaagttgatttactttaaggagattgattatgggatggtaaattctctttaagtactttagtatttttatgagaccaacaaaatagaaaactaagaattgtgaggtaatcatttcaaagaacaaaatgcggctttatacttaggcaagcaagcatttgtcgtttgttaatcgggttcaactaattcattcagttcttggtttgaagaattattagatgggtatttttatcttacctcaaagtgttatgaaggaagtagaaaagctttgtgaatggtttttatggggtcacaatgaaactcttagcaagttgcatcttgcttttgagaaaaagttgcctttcaaaagtgaatgatgaaatcagcttcagagatagctccaactccaagtagaatagaaccattttggcaaaattcatttgggctatttcaaaaaaataagatctcctttgagtgaaatgggttcataacttgtatttaaaagacaaaatttgcacaagctttacaatattgaagattttaaacatgaaagatgttttagctgcttgatatatggcgaaattcaaaggcttgaaggcagtatggtgtcgccttagcttgtcaaaatacagatttgttttgtgacaagcgactcattcctatctcctaacaattttattaggtgtaatctgaaaattgatttctcatgtttgtactatttg

SEQ ID NO: 230598 - DNA, 3472 bp, Cannabis indica
attttcttgttagagagcaatccccatatgtacttttttaatggaaagtaaattaggtctgaatgttatttctcgctttcatcaagttttaaatttcaatattagacttgaagtccctagattaggtttaggaaggggtttgatgttgctttgaaaagacgatgtagatgtaactcttttaaattttaatgcaaatgtctttgattgttatattgactttacaaataacacaagatggcactttactgctctttatggagcccccactgttcagcaaagaatccacacgtagactctattgaaaagactcaaagatgtcgcacctctatctccatggctagttataggtgatttcaataaaatcctatcaaataacaataaattgggtggtgctttgcacaatgaaacacaaatggaacactttagacatgctcttgacatatgccacttgaatgaacagccttatgagggagaccccttcactttggtaaaaggaagacacacggtggacactatcaaagaaaggttagattggtgctttgccaacgaccatttgaactcgatgtttgatcttatcactactcaacatttgaactactacagttctaatcatagagctttattggttaatgttaacttagaagatggtgtcattcagcagcaacaaagacggaataggttcaaattcgagcaagtatggatacaacatgaagaggcagcgaacataatatagcaacaatggctgactacagtctcgggcactgtcattgatagctttttggacaaattgaaggcttgtgcttcttccttacaacaatgacacacctttaaatttggtaatttgaagaaacaaatctcacatatgcagtaacaagtcacaagattaaataatgctactgctaaaactgcacctatcatagaagaacataaaaaaatctgagaacatccctaatgatcttttggcacaagaagagatgtattggcagcaaagatctcgtgagaattggcttcaaagtggtgattaaaatactaattttttccatgctcatgcttcatcgcgcaaggcaaggaaaaaatttattttctcttggataacaacgagactaaagttactttgaaggatggtatgactaccattattatagagtttatcgctgatcttttctcaacttctatgtttgacttggaggctttggaattagttacagaatcaattccaagtaccattacagtagaaattaatgagttcctcaccaaaccttttttttacagaagaagttctaataacattgaagtccatgagccttgacgaaagccccaatagtgatggcatgtctgctatgttctaccagaattattggcacattgttggttccatggttacgaagttattttaggtgtcttgatgatggatatagtatggattcaatcaacacgtcaatcatcacactaattccaaagatcaaatcaccctgtggtatgactgattttcgtccaattagcttgtgtaatgtaatttacaagctcatctcaaagctgttggtgataagattcaaggaagctctcccgctggcaatctctgaatcacaaagcacctttctttcaaattgactcataaccgataacattcttgtagcttttgaacttgtgcaacatatctaacataagacaaggggcgctaaaagtagatcacacttacagatgaggaacaaaccgtttttgaatttgattttggagattcaattgacactgaattggtgattgatcgcgttgtgtatgcacatattttaactactaaaaaagtatggctttcaacactgcagcgataaatgactgaacattagaatggtagattttttatgaaaatttctgtggatggagatatgttcatgctcacttaaggggtgaaggagacaagtaaagagtcttgaaccgagaaccattcaattttcagaatcatcacattgtgctttacacgccaaatgtttgtcaaaatgtctcttctgcctttatgagtaaaaccatgaagttggttgaggctcttgggaacatcataggagaatttattaaagtttttgaagacccactttttgaagatggggtccattcttgtgtattcgagtgaagatagatgttaccaaacctttaatgcgagcaagaatgatcacattgtttcaagtacgtgacaaatttttggttgaattcagatacgaaaggctacttgaatattgcatagagtgtggtagattgggccatcctttcaataaatgtagcatttttcttgaaaaacttgataacagactggagcttgaacttgaatataggcctatgattaaaggtgctgcacttccaacatctaactacgatcgatatggaactaattttgcaaaagggaatgcttggcctcttctcactcacttggtaagaacatcactaacttcgacaattccatcactcagtagacgcactcaaccacaaccaacaattctgtttcaaggagaatcctctcaacatagcagcgaagaaggaagaatacttcatagttctggttttaactcaaaccaggtgatgttgaaacaatttcaaatgtggaaattcctactggtttggacactgatacatcaattagtcagtgttcagaaatgaacatgcatgctaataacacaacaaatgttaaccaaactccaaaaggtaaagaaatcaagattccacctgttacttttgcaccagcaaatagcacataccaggatcatgctcccagtttctctagctcaaaggctgctattcaactaattgatgtatctggtttaaactcaaataagggggtgctggaacaaatatcaaaagtggaaattccgtttcatatcaattaaactcataaaagccaagatgtcaagttaacccctgccacttttacaccaatttaaaggctgctcaattacctatcgctgctattggtgcattaccaaatagtgaaccagatatacacaatgatctatccagcatttatatgcctatgtcgggtcttggaagttcctctaatacaattgctacctatcctcctttacctgagaatcttatggcaaaaataaattgtgctctgaatatgtcacttaccaacaactttgtccgtaccatttgttattgtttctaccaaaatggagaaacaagggaaggacaattgttctcctaacagaaacccaaagagataaccagaaagaatttcacttagaggcactctcaaaagatgcaggggtactcatccagccatgtttgttttgatcttatcagttgaaggaaatccaatccgggaagtttctattgctatggattcggctgatttctttgaaaatgcagcagaggctgatgttcagccccgcaatcaaccatgaaaattgtcagttggaaagcacgcaaattggggaatcgaagtgcattctgtcatctcaattttcttgttagagagcaatcc

SEQ ID NO: 230599 - DNA, 1134 bp, Cannabis indica
aaaaatcaaatctctcctttcacaaacaaggctatcacatttttttgaaagaaaaagtggtaatattaaaccaaatcaactgttaactgttatagaaacacttaaaaatttaggacaagcatcagtccaaacatgaatttttgacgaactagtaatagatttagctagtgtgtggatcacatcatttgcaacatgcgaaatggcacaacatgaaccaccaccaaccgcagctaaaagacagataatctcctcaataacatgtttgaattcaaaattagaatcaagattattaacccaattacaaacgatagtcgcatccgtctccaccctccctacattgatacccaaatttgaagcccaaaggagaccaaaacgaagagccaacaactctgccatgaccacacgaaattcactgacacaaccaatcgaccatgtaaagcatgtaaagcctctcccaagcatgactgtcgcatcaattgacaacaccaacaccctgagttcaaaaggaacccacctgcgaccagcaccagcgaccaccctcgacctcgactcccaacaactaggctccatcagctcaccccgaaccatcctccctctttcccccattcgctgctgcacaccaaaaaaaccagcaacgcaaaactcatctaaagccacatccgccaagtcaacaatgacattcaaccttgattgtttttcctgaacaacatcgagttctgatcataccaatccaccaccacaccatagctaccatggcaaagttatcacgatccaggacgttaaaaagccacatttggagctctgaaaatgggccatttctacactgccagttgcccccacaccctcaatcgatgccaaaccagaatcaaaggagaacaatacattaattcgtgtttcggggtttcaacctcctcccctacacctctcacacactggctgaacaagtattttttgcctactaagctaagaattcgttggaagggcacgataaaacatccgccacaaaaagattttgactttctggtggcacccgtaaattccacaggccattccaccatgtggttaaattcattgaagaacaacccttctcctcactcaccaattctaagggcagagcatatccacttcttactg

SEQ ID NO: 230600 - DNA, 1012 bp, Cannabis indica
cccatgggtaggggaccttttggattattggtgtgcaaaatttctaagtgaatttcagcaagttaatgggatagtgcgggaaggagataattaaactagataaagatatgtggataccgccaatagagggattgataattatcaatgttgatgcgggtcatcgaatggaggatagattagaaacaactggtattgagatttgaggcaataatgaaataatgaagatgttcaatttgcccctgccaaagttctgtcgataactacttcacctttaattgctaaattgtatgctataagagaagggatccgtacaagattatacaacgtcgcttgccaaggtttcgaattgagtctgattgtcttcatgttgtacaacttattttggacaaaaaagaggagtgtcgagatgttgatggattgttatatgaaattagtctcttactccaacattcggttgttattaaaattaagtatatatggtgaatgtaatcaagttgttcatttattagtcaattatactttgatgaacaaaattaacactaagtgggtagtagagttattcagctaaacatgctatttcttttgagttagttttttttattaatagttttcatttttttttaagaaaaatatatattaatattataatttatataattaattatacaacatttttatttatcaaaatatatagtacacacattaatattattatttatttatttatttttgcaatgaggtaatattacaaattctaatttttttttttttgaaatggttacaatttttaatttagatgaatagtatattctttcaaatatatattagttattttttaaaagaaatatacatacacttattagttatttagttaaaaaaactatatataattaatttttattatgcttatttcaaaaaaaaaaaagactaatttttataataatatagtttaacatggatgcaaatatcatttctcacagtctcacacgtcattaatatttatttttttttt

SEQ ID NO: 230601 - DNA, 560 bp, Cannabis indica
agggataaggtatggataattgactctggatgttccttccacatttgcccagataagagtcaattttctaattatcaatccagaaatagtggcactgtcaagttaggtgacaatcatttttgttccatacaaggaattagaaaaattaagttacagatcgataatggaaacatggtagagctgaagcaagtaagacatgttccagaacttaagagaaacttaaattctgttgcaatacttgatcatgaaaggttcaaagtcaagattgaaaagggactgttaaaggtgatgaaagggtcagaaaaggtcatggaagctaccattgacaatggtatctatgggctacaaggatgtatcaaaagggaccaagcaaattcagtcatgaaaatttttgatagtgtcactcttaaatggaacaggaggcttggacatataagccatggtggcctgaaagttttgagtaaaatggaggtatttagtaaagatcaaatcgaggagttagatctatgtgaacaatgcattatgggaaaggctaccaaagcaaagtttggagttggaaa

SEQ ID NO: 230602 - DNA, 1231 bp, Cannabis indica
tatgcttcggcacatgggttttgcaaataaaatcgtcagactttttatggcttgtgttacaacggcaagatacaaaatctctcatgctggtcaagaatttggcaatataattcctcatctggccttcgtcaaagggatccattgtcatcttatttacttctcatttgtatggagggtttttcagctcttttaagagattatgaaagtaagagtctgctccaaggaatcaaagtagctcgaaatgccccaacaattaaccacatgttctttgctgatgacagctacatcttttgtctagctgaggtggaggaggccaataacatgttggatctatggcaaattttcgagaaagcctcggctcagaagattaattttgacaaatcttttattttttacagccataatatgggtgctgaaacttgtgatgaaatatatgggatgcttaatatacatgaagcggatgatcatatcccataccttgggctgtctaatattattggtagaaagaagacagttattatgggctacctcaaggataaagtgcagcagcgtgtgcaaggatgggaaagtaaatttttgtcaaaagcgggaaaggagatattaatcaagacaatagcacaagctctttcaaattatgctatgagtgtgttccaactcccattagaaacttgcaaagaattagagagtacaatgtgtaaattttggtggcgatcatcttctaaaaaagatagaggtattcattggatgagttgggagaagttatgctgtccaaaaacaaaaggagggttgggtttctgtaacttgtatgatttcaatatggcgctattgggaaaacaaagatggagattattgacaaggccggattctttggttagcaaggtgtacagctcaagatactactctaatggttcttttttaagtgctaagttgggggaaatccaagctacatttggaaaagcatctttgaagctcatgagcttatcaagaaaggggctgcagtccgagttggccaaggtaattcagtacaagttgttaatgtgccatggcttccatgtgtggaggatccttatgttcatactgtaactgcctctttacaaggcaaaacagtttcctgcttaatgactattgatcaagctcaatgggatgaggatctaataaaagatattttcattgatagagatgtgaaccttattctcactacacctttggctcccaatgaaccagacatttg

SEQ ID NO: 230603 - DNA, 1081 bp, Cannabis indica
cagggcattcctaacactgtcgtcctgcctgtaaccaatgttcaaacaaccattggagatgacaccgaaatccaaaacctccgtgctgctctttgagttatgcaaggtcataccaacaccctgcatcatgatcaggaggaactccgtgccacgataaatcttacatttgaagagaagaggcacatgtttgctgattggagggatgaagaaatggaaacattgagggctcagcaagcagccattgacgaccgaacccggtaggccactgtgttaatacaaaaagcctattaggctaccagacaacaacctgtaaccgtcattcccctgggcaaggcagatgaagatccagcgatgaacacctctctgagtataaatggtcagccgtccaaccggtcacaggttccacctgtgggccaagtggtacgcgggcagactttgtgtagcaattcatcaagtgaattcatcctaataattcaaacgaagttaatggtggttgccagctaattagccaaaccaaccagtcactgaaacagccaggtgtttctatatttaatcgattgggaatggttcatgatctcagagatgatctgaacagaaggagagggttggacaaccagcatgacgtgactggtcggccaagaggctgaaaaagttaatccagccgtgcatgcacagttggatgaaccaaaaaatatgtttcaaggcctggctggtcataggaacaatgacctcaagttggaccgagcaggtggatcccctttctccacagtgattaatgtcttagaattgccccacaagtttaagatgccaaccttgaaaatgtccactaggaacgaagatcccttaccccacctcaagtttttcaaaatacaaatggacctgcaacgagcacgaggagatgtatgtgttaagttttgtgccttaaataaaacccatttcaatataatcagatttacttattaataaagatcagaaataacattttatggtgcatggttcacataatttatttcatgattatatatataatatatgaattctatttaagtccagaacatatgaatttgttaaagattatagt

SEQ ID NO: 230604 - DNA, 989 bp, Cannabis indica
cttatcttgtttgaatactgctctttttggtgttgtttaaatttttccgacaacatttgatgttgtctatgagaaacgtttatctaagactttgggaggagaattaaaatggctactgaatagacaaacatgaacaccaacaccgaaaccatcgacattggcactatcaatatatgttcctattactggtggaaggaccacccagttgatgctgtgatgggaagagtggggcgtactgccacaatccccctcaatctatttcctttatttttcaggccatgttggagaaactttaacacctacgaccattatgggccattttctaccaataacacccgcccaagcttccgacgatattattcaattaacaactacacaatacatgatcatgcaggagaaaatgcaagcattacaggtagaaatcacaagaagatatcaaactcgtgcacgacgtccaccacgagcaccaagagcacaagcaataacccactacgtctcaccagtagtctatctcactgctagaagatagcttcaacaaataaatttcaaagcttacctcagttattatgaaactgatggtgggggcaacaaaaacaaaactaaggcaaccactgagctagtctttcagcattccacctacctgtctcccaacagcaacatgcattggttgtatctttgatcaaccaaagaatgaactgctcatcagtgaggtttaaattgctaacatgatagtggaaaaggtgattattaacaatggagcatcatcaaataacttgctcaaatagaccctaaaaagaatgggtttgtccctggaagattctagagccatccaagcaacttatgtatggtttcagcgaagtcgacatcactccctgtggtgaaatcagattaccactaacagttgaaattacatcgtggcagaacaccacgatgactacctgttgggttttatgccctaaataaaactctttaaaatctgattagttatc

SEQ ID NO: 230605 - DNA, 1933 bp, Cannabis indica
tatatctcctaacaaaattgggataaaattgaaccacaagatcatgattaaagataaattcacagaattgcaatttaaatacaaatagaaaatagagcatttcgtaaaagaaaaaaaatagtgaattgaattttttcttagagcatctccaaccatactccttggttaaaataaggaatgtgtcttaaaaaaaaataactttaaccatgaaaaaatagctgtaatagaaaatagatatggagtattttaaatgtaggtaactccttactattttgctaaatttttttaatattgttttagaaaagacattgaattgcatttaaatcctttgaagtataagaaataatatttttatagtgattcttccctcatacaaataactaaacatttaatttttttaaaaaaaaataacataaacatttgattgacttaaaaaatatatacttaccaaattagaggggccatgtcacccaaacatttacagaattttttaaaatataaattttttttttagaaaaatatgtttaattgtacattaattttatttagtcctcttattttatttggccccaccctcctattttacactattcacatgcatgtcaaaagccaaaaagctcacaactaatttaaatgagacccatcatgtgagttgtgaaacttgttgtgatgttgttgatttaatttaaaaaatgttagccaaacacatgtggtgtttgtgtttgtttggttcaacacatttaataaataatttagtatttttcttagtaaattgggataccttattaccttatagtaaaattatatataaaatttaattaataagtgtaattagagtaaatcattcaagacaataaatcagaaaatacacaattaatataaaacatacaattaataaaataacgagaattttgtgcaaaataatacgtagttcgactatctagctgatgaaaaataattaacacaaattaaagtatgtttatttttaaagagaaaaatagtagtgattcgttttacaacaagttgcttactaatcataattctttatttattttaaagtaacaaaattcatttttaaacaacttaatttggcagtgtttggggaaggtgtctccttcctaatccttaaagttcaagacttggttttattttattttattttaaaaaatctttcaactttgaagtgaccccataataaaaggaagggcatgcactactgaactggttcacaaaatgtgtaccttttgcattcttgtcaatatggtaacataattgaaaatttgagtttgaagggggtgcaaaagtttaattttgatttgttatgtaattagctttgttagagtctatcaaaattattcaaaaaatcaatttatctcacgaaacaattattactttttcaaataatggtcttcatatatttagagatgatagttttgctttggtaattcacaatttcaagtctcaacatctatttgttacctattaacacaacttcaatcatctcatgaccctccatgtcataagcattgaattatttggcttgataataaatgaataataataaacaacaatatctctaaattattaaagcatttgtattaaaagtacacaaaccaaaacgacattggttacttcattaatatttattaaattacaagaaaaatattaaaggagtgttattggtgcaatttaatattaagttttacacattttaatttaataagttataagaaatcgttaaccaatcagaactatgacattagtaaagtgttgaacttcataatagcaatgctctaaaaaaaattatagagaattgatattttttcagaaattatattgcagaaatagtttttttttttaaaaaaaatctaactcctaatatctttttttccgctaagaatctactaatacataatttggggaatttagtcag

SEQ ID NO: 230606 - DNA, 1114 bp, Cannabis indica
agagagtgctaatgtactttttagcaattctcctatatcaatttgtctttttcaccttaatttataccctaggactctcatctcactcctcccaatttgtgtacgttcaagttccaaaagctcaaaaagccaaaccccttttcttaactatccacatctctacatctctctttgtttaatttctagcctctatagggcataggcagtgctaattacatgtagctatataggtagggttagggtaccaccactcaacgagccactattcacatatatatatatgtctttactataggtcttaatattgcggctgcccgtgcaacagttgactttgttatatgtgtatatataattaaaaaaacatttttatttttactaacatatgcaaaactaattaattagataatgtattttatatatataagcattaattttaattattatatatgagaatgagaagagtgtggagatcgaatatatgtgcatgggccaatcatgcatggagatcgaaaaagaggaggtaggcgtgcgagagaaaattaaggctagctgcatgcattcttttcgaaaaaaaatacatctgtaatattgtagcagtgatattattattattattattaaagaataattagtaccccaaatgataagagaaatgctaagacttagctttttttggtaaaacttttattgcaaattaacagaacattttatactttttttttttgaaagaaagaacattttatacttagattacaattcaaggcacaactagtatttaaattattgaaccaatcaatatcaaatgataagaataatactagctttctctctttgaaaatgagaaagctttgtacaaaattatttttgaattctatttaacgtaaatagcggcataagtacttaaagtttagagtttataaacggcataagcttaataatttgttttagcggcataagtacccaatgtttataaaactgtaatttttgtctattttcgtcaatacaagttccgttttaaatttatatattgaaaaaagatttaaaagcaaatgatactacatatttctgtccaaactaaataatctagaatctgagtcttatatgtgccctgttt

SEQ ID NO: 230607 - DNA, 1253 bp, Cannabis indica
aaaaaaaaaaaaaactacttcaaatttctattacattttataatgtaccttatataaaacctcattatactcaatttgccaaagaaaatccacaatgttatgatataatgaaacatttacaagagattcatctctcatttgtactaacttaattttttatagacatttaaaaaaaggagattcaaacttagatattctctttatgagaaaaagtgtaaaattattacactataccttgacaacaacaaaaaaagtaaattggattgtaaatgtttattattattagaaatccatgttttaatagtaatttttaaatcacatttaacaaatatgttttgaatgctactagtttcccattttgtattttgcatcatattttggccaatgaattttaatcctcagaagatggtattttctgaagttatttctctaaaaaagtagtaatttttaattattattattattattattattattattatttggtatcttttagttaaaaactatatttatgattatctctttgctaaaattttatttatcaatcacacaaaaaattgttgcactcacattatagtcaaaagaataccatgtccaaaaactatgaactgatttttgtctaaatagtcaattttgtcatattattaaacaaaaatagaataacaaacaaaaatctctttctctactcgtctattggtgttttaacttttaaataatttgtgtaatattaaaggctaaatacttatgtcataactttgataatttactattcattaatcaataattaaattatacttttatttaactccaatttaaaataaaatggaaaaattaacactcgattaattaataatttcgataaaaatatattttattcaatatcgacattataaaagttttactatatttgatattatgtgttttattaagttacaattaggtgcattatcttttcagtaatactcattcattactaaactagctactaaatccactctaaactcaaatttaaacatatatttttaaaataagatcaaactagctactaaaggcattgagtttagctcagtttgacagtcactagttccgtgatctataaaggaaaataccgtgtaagctgtgcaatcccacatcgcttggggaacgtcaagtgtagatgattatgaaactgtataagtatgggactacacagttgaagagagcttaaatgaatcgattgatactgcctatatcaacaaggtgcatcttgtttt

SEQ ID NO: 230608 - DNA, 1668 bp, Cannabis indica
tatttgtttcctgatgtttcagattgacgctaagttgcatctgcccttgctgcttttgtgtgactattttagtggagtttgcgttagtgctaatcaaggcaccattttccgtcatggaatggtttacatctaagatcccgtgttaattaactaagattgtagtatttagaatgtaaaatctaatatatttttacagatatatgttcattgattaataaaatgaattcgattggtgatttattcaaattcttctattgattcattttgagctatataacctatattaattttgatggacgaagcaatcatgatgattttatgttatatccgatattacttttgtgttaatttcccaaagacgtacgtttgttacgatcgaagtggatgaaacatgaaagatgaaaagggaagttcaagcaaataaataagcgtggcgagattatattagcatcgaggggcaattattgaaaacattttattggattcacccatttttagaaggattgtaatttaattttttcttaggagccacgaagagtggccatctcttctctccctttctctcttattcttaccaacagaaattcatcactccttttattcctctcctttccatccatttctaccctctaccaaagatagtattagtctcactagagtattccatcaaatgaaataagcctacaaagcccatgatgaaaacatatcattttaagggttttttcaataaatagctatttttgtattaattttataatttcaatcctaactttttcaatataaaatatcaaccaaattacaacagtataaaaatagaagaagcaaaacatctactcaaattgtatcagtaaaaaataaattataaattataaaaaaataataataataataataataattggcttctcccacggtttcgaagggttcccggtttcagggattggtgcttccacctccaccatggacgaactgctggagaaaaccaataatcttcaggtcactgatgaagatgattgggaaatagacaagagtctattgattacgattgcaaagttcaacctgagggggcgtttatgcactaatactgagcatagcaggggatttctgaagagagtgctgggaggaatatggcggttgaaggagacgaaatggaatatcaagatcaaagagaaattcgattcaggtcttttcttaacttttactttcgcctctaagtcgatttaaaacagagtctatctaaaatgccatggtatttatctaacggattgttgattttggggaaaatggaaaattctaatgagtcttggaaaaatgatttgaccaacttcccgatttggggaaaggccatgggagtaccgatcgatttcttgactaagaataacacagtgagaatggctaataaagcaggggaggttattcaagtccagaattcagatgtatcaagaatggtggcagatgggttctttcgatttcgggtatggatgtcaattactaaactagtgtgtcctggtttacccttgccgtactcaggaaagaaaatatggattgctttcaaatatgatgaattgcaatttatgtgctttaaatgtgggagaattgagcatggttttaaagatagcaacaaaaaaccaatcaagattactatggatgagaatgaagaggtagctg

SEQ ID NO: 230609 - DNA, 787 bp, Cannabis indica
agttgcgtgcgaaggagagtaagtcgggggggggggggagaggcctttttctcccagggatggttctattttgcacagatttatgtttgatacgggtggagtagaccttgggttttatggttgcaaattcacttggaagaataagagaagctctgggggtctcatcaaggaacgattggatagagctattgttcaatctgattggctgaattcctttcctagagggggtgtgcgaaatctgcctatcctctcctctgaccatggacctatcctatttgactctattatggaaaggtctcgtggacattcaccttttaaattttatgaagcgtggctaaaagaaagtagttgcatcgaaactattcttcaagcctggacctcctctgccccttcatcgatcaatgggaatctgcctaggagatttgaggcaatccgaattgctcttcaaaggtggaaaagggaagtttttggtgattgtgacaagaaattaaaggctttggagtctaaacatttagacttacaatccagggaggtggattctggttgctcaaaagatgaagatgaagtcgaaaaggaaattgtcgatttatgggagaaacgggagcttgtttggcgacaaagatctagggagatttggctatcccatggcgatcgtaactcaaagtttttttcaatcgtctactctggttagatggaaacgtaatttcatttggtctcttaaggatgatcatggctctttagtcttcagagagcgggaaaaaggtgacatatgttggaaattatttta

SEQ ID NO: 230610 - DNA, 1437 bp, Cannabis indica
aatcttgcacaatatgaccaaatgcaaatagagttggcattaaggtctgttataaaaattaccaaatctatttcctcaacattattgaaattacctcttccaccaaaattctgattttagctagaggtaaaatcattgtcgcgtataaaattcttgttagtgagttgaccttgtcattgtagtattatagagtttccatgaccagcaagttgatgttgcctgaaccttctaaagtcaagattagctagcttctacaataggatcagattcacatgtggttagatttgcactgagatcaaattctttgctcgacttctcgattcttgattttgaagctaagagcaagacatcaactttccccactgtgtaaatctctatcctggtatttaaggatatgacaaacgtattatactcactcaaaagccctttcaatatcacaaccacatgatcctgatcgttcaagacttctccaattcatgtaagaagatcaactgtttgttttacttttaacaaataatcgttgaggtttagaatccattctttaagttttgcaacttagtccgaaatttcaagatctttgaggagacttgtaatgtgaagtatttttccaatgagctctagatttcttgtgaagtgttgcagccaaccattcctatcaaaagactctttgtcatggaggagagtaaccacaaaacgaggagctggtcttgaaactcccacttagaatcagttggatttaccatgtttagctcacgatccccattattcaagaatttagctagaggaggttctttgatgtatttcagaagccaacttcctctgacggcagcaagaactttctgattccataagagaaaatttttatcattcaatctaatgaagatattgcgattaaaaatcacaggttcttgatttgtgtgtggtctgatttgagcttgaggtccgttggtttccagaatcaaattgttacctataaccatgttagcaaccagaggtagaacaagctctgataccatattgaagtggtcttgccattaatgaacatgaaaataacgaatagagaagtaaaggagagaagaagagagagagagaggagagagagagagagagttgtaattaaaaaaaaaaactaaaaagaaaaccaaaagaaagaaaaattatttttttatttataattattttttattttttaatttttaaaataattttttacgtggattaataaaattgtaccatgtatatactgtgtctacgtagatgtacacgtggacaatctaacatgacacttaacacctaaaatagatgaaaatattaaattcctaacagaacacaggtattgaaggttttaccgccaaaatttgagttttgagggttaagtgcaagcaaagtgaaactattaggggttttgccacaattaactctatataaaatggttac

SEQ ID NO: 230611 - DNA, 799 bp, Cannabis indica
agagagagagagagattgcgttaatttctctttttctgggtagagttcattgagtgagtcattgattttgttttgtgcagtacgtacagtcagggagagagaaagagcaatcgttttcatcggacggctaaaaagtgaggccgaataatcatgtggtcacatcgtaaagggttggacagtatctctttttcttttttattattttctacgtgatcgttgggggccatctcttttatatcaccaatagtaactctacagtctacatacatacaatatttgtatttatcattttgacaaattctatataataatccaccccaaatataaatatactgtggtgtgtacactctataccttaaattggaataaaatatactgcttctaatttatttgttgtattctactatgtatatactaaaaaaatgacaaacagaattttttttataaagtactccattattgagcttcatataatataataataataatacttttttccttgataataaccacaataataatttttaaaaaaaaaattactacttactttttgagtaatattgttattttttgaacaagttgtcaattacaggaaaaacattatagtgttaagagcatcaccaaggaggcatcaaatttggtgatgcagtagaattagccctccaacgtaacatcaaattttacactaaattgctgtgtgtgctacagtgcacggcatatatgccgtgcactgttcacacggcattactttttttttttttttttttttttataactaatttttgtatatgtctatatt

SEQ ID NO: 230612 - DNA, 863 bp, Cannabis indica
aatgtagggtcaccaatttcatgtcatcattgattttggtcttcacgcctgctccaatcatccgttcgacgtagttcttgacgctctattcaagttgttgattgatgttagtcaatgaactgacctccatgtaaaaatcttcgcatccacaaatttcttctgaaatatggattgtagatccttccagttttggatagagcgaatggcaacttattccaccagccctctatgaatttggaacaaagttaaagagaagcaaaaacacttccaatcatcacttgcttgcgtcacttgcatcaacttgctctacttgggcaagtgggccctaggatccatcttgccctcgtatgattttatttgtggcattctaaaattttttggcaactgagcctctataactcttcttacgcatggatctggatcctcatcttcctagttggatacaactccactttgttttcggaccaaacattacatgagttttgttaaagcaactatttgatcctctaattttctagtgtgttcatctgggagctcacgttcatgaattctgtcattaatgtagttccttaaatcgcctccacgaggccttactttctcacctttcgatttttcctgttttgcattccagcggtccttgaggtccatttttgacatgcatctttcgggtccaaattctccacaggaatgctatggttaacagaatctttagggtggtttttccatcctcaaacgttaggctcttgtacctgagtacatggtccatcgtttcgcgtgactttgccccacaaattgatcgatcggcctagccttaggccttgagcattcttttttatccactggggttggtcagttgctctcat

SEQ ID NO: 230613 - DNA, 682 bp, Cannabis indica
ttgagtaagccttattttatatgaaatcttattttggtaccgttcaagtgttcttatatgaaatcttatttgagtaagccttattttatatgtgtgagtccataataaggcttacacacctgaacatgcattatataattacaagttatatcatgtatttaatttacatttgcttcgaataataagtttgatggtatcaaaatgcattgcattgattatgtaagtctattctcataaatgaaatcggtcaaaagtgaccagtgaggaaatttcattattaaattctaacttctaagacaagaccaagttatactatttagttgtatataactgatcataaactcaatagtttaccccaatttagagccattgaatctctcctgctatagtaagaaaaagaaaaagactacgttttccaccataacctacactaatatatatatatatatatcatattaaagaaaatctaattaactcttagaatagggtagggaaataatttgcaaaaagaataaaagatcctctattgtattgactgatgctcatgacctatgcatgtcagtggtcattcaagctagctatatatatactcaaataaataccatatattgcatggtttcaaatttgaatgcgttaataagaaaagaaaaaaccattgtaaacatagaaaaagatcaaacaa

SEQ ID NO: 230614 - DNA, 1054 bp, Cannabis indica
ccttggcacctttggatttggatgccctctgggttggagctccactgcaggcaccaccttttcagagaggttgataaatgtctcgggtagactcttctctttggacggtttcttgtcgcctcttggtcgtttgggtggaggggtctgacccgagctatctcctaaccttttcttcagggcctgaaacaccttctgatacttacatatgaaaaaaacaagaaagttaaaggcaaatatgatataaggaacgtcagaagatgaacaaatgaaagttaaaataccttgcatgtaggcgaaagcattctcctaaacaagaagggatggaggttcatcgtctgaagagtcttcttgttcctgctctatcaaaacgacctttcccttattctgatagaacgttcagctggtgcctgattacttggaggagccttcttcctctttttactcgatttttcctgttcaattacatcctcctggtcgggctttaccttatttgccttcttcactgcccttggcatgaaatcggctaagtagagtttatacttaacgaaattggcctcaatggccaggagagtgatgttccatgcagtgtctggcagttgaagaattttttgtggttcccgtcagccacttctccttgaactgagaaaaatagaagtatcccaatctgttttgcttggaacttgacttcagattaaagagccagctggtgtcatgtggggacggctcaccccatccttaagaggcataaatgatgaacagggcggataagtatttgatgcccttaagagtaaattgggttaagctaaggtggtaatagtctgcgatcctcctgaagtacggaagcaaggctaacatagcacctttcttggtgtggatgcccaactaggcgcagtaaacttcccttggactagttgccaactggttgggggagggaaagaagcatttgacatcccctaagtaaccatgcttgagcgaattcttcatctttgccctggtcaccacagagggaggagaaacccaccaatctcttagtgtgccttgcctcctcaagaaa

SEQ ID NO: 230615 - DNA, 2123 bp, Cannabis indica
atgctatatattacactttgaatagagaaaaactaactctaactactaactgaaagttacagctagcaatcacagcttagccaacaatcataacagaaaataggcagtaactcactaattgtctcaacaagcccctcaaactcaagattgtagcatcttcaatttttattttatctctaaatacattcaactttacactagaaattgcattttttagtctacctgcaatttgaccaattaaaagttttaagtttgtaagcagaataaatctaatatttatttttagcagcataagtactcaatgtttgtaaaactgtaattgttctctaattttgttagtacagactctgttattgtcttaaacatgatacatataaggctcgaattctagatcattgggtctagatagaaacatgtagtattagttacttctaaatattcttttaataaattcaaaacggagtttgtactgacaaaactggaagaaaaatacagttttacaaacattgggtacttatgccgctaaaaataaatattaaatttatgccgcttacaaacttaaaactttgggtgcttatgccgctatttaccctaaatattaacaatttgggtggataataaaataaaaatgtcacttggaacatatttgttactatttaaaatagtttatttgaaaaatttatagtaaaccctaaaaagattgttttggtatattttttatttgttttggcatttagtgaagttttttagtttattttttttttctatatattgtacttatttaaggcaatctgtaaatttttcaaaaaatattaaataatttacagtgctaaaaataaaactcgaacaattatttacgacgcatataagaaaaagagttacgtgggcgtgcaacaaaatagtttaatttttttttatacgataaactattcataagtttttaataaattacaagtatttttaaataattacaacgtatacaatcattaagaaaaagattaaaaacttttctgaatgcggaaaaaaaaaaaagtttaccattagaacccttttaagagatatactatatagaattgccgtattttattttataactatataaactgatatttttaatatctatgagcgtctgtattgaaaatattaaaagacattattatatctagcaccactataatgctctcgaacataaatttttatcaatccagatttcgaacaaacagatggagttagttaagagtggttaataatttttgtaattattattgaattaaaatatattttatattaaataacatcaataatcatacaaaatattttaagaaaattcaatagtgctctttcaaaggcgtgcaccactcttaaaatagagtttaaacaatctgttgcaaggattaatttttttaattttatttaaatgcttatgaaataaattgtttgagcagctttttatattgtaaattattttatattttataggatatcttaaataactataacgtataaatcatagaataaatgccaaaacaataaaggatacatagtgaacacttttttaggggtgcatatatcttatgatgatattgaacattattagtgtccaaataacatttctcttttaattattgcagaattaatgttctatgtgtataaattcttgtagtctctgtatgctgataattaaaattggagcaagtataaaataaaaggtaaccaggagtgtgtgaaaaagtgtcccatatagaaaggccccttccctcttctttcactgctccttcatactgaaataaaaagtaaccatgtacaccaatcatattttgttcaaggcgaattgagaaaactatacattttacaccagtagtaatgttatttcaacttttgatgagcaaagccacaatcacaataaacaaaattaaaaaataaaaaatgtgaaacatatctctcccactaagcaatatatactccaaaaattgtccactacacacactcttcagaaacttttctaattaattcattattttgataagaggcaaattgctatattcctatttaattaaatccactatcccaaatataatctttttggttttgacaaaccattcggatagatactaacaaataac

SEQ ID NO: 230616 - DNA, 1720 bp, Cannabis indica
caaaaatcgaaaataaaaaagaagaagaagaagaagaagaaaagctaggctatctaatgaaaaatgtaaagcaataaaagtggaaaacttgaaaaaatttagcttttaatatcatttaaataaaagaaaaaaaaactgctaaataatgggaaagagctgaagaggaggaagaaaaagaaaaaatgagaagaagaagaagaagaaatggaaaaagaaaaatatagagattggtgttatacttaatatttcaactttttaattttttttttaaaaaagaaaaagtttcaaaattgttactgatgtgagaaaaccaatatgtatatttttttcaaattgataagaaaagcccttgacatgataaatgacaaaatacaatataaataaaatcgttttacacattacatagtatacagtataaaatggatacattatttttacaaaaataccgtgtactagtataaatatgataattttgaaaaaaatagtatatagtataaatacccctatatatttagaataaatcttagtatatatattaggaataaattttagtatgtatatatattaggaataaattttgtatttaagttttattctttgtaaaactgtcacatattatttagaaaaataataatggggtttaattccctatctttttttttttattattatttgaacaaatggggtttagttccatatttttattctctaatttttatcttaataagaattcttatgaagcttatatatacacgtcttgtgtattgtatatacatatcataaaaatacctttctcatttttgacttggtatcagagctagccacctcctaaccctaatcgtttttttttctccttcttcaccatgtctgacgcctcaaatgaatcaacaaatatttcaaccaaatctaccattgttccagtcacatataccactgtttcagtcaaaggcattctttctaactgtcactctgtccaaatcaccaccatttgcttgaatggtaataacttccttagacggtcacaatcggtacagatgtacatgcgtggtcatggaaaaatagggtacttaacaggtgagaagaagaagaagccagtagaggatgatcagacatacgggacctgggaagttgagaattaattagtgatgacgtggtttgtgaattccatggaggaggagatcagttctaactatatgtgctaccctacagaaggccctttggagattgttgtttagatgtattctgatttggagagccaatctcaattgtttgagttgaatctcaaacttcgtgagatacgacaaggggaagactctattacaaaatattttaattctgtaaaaaagatttggcaagaccttgatctctttgacacatatgaatggcaattaattgaagatggaaaacaccacaaaagaactattgagaagactcaaatttataagttcttggctggactcaatatagagtttgatgaggtgaaggggagaataattggtcgaaatccttacctcctattggtgaggttttcttggaggtcagattagaggagtctcgaaggagtgtgatgttaggaaaaaaggttcttcgaactattgtggaaggctcatctttggctactatgggagaaggttatggcagaaacaccaattattcacccaaatctaatgagaagccttgggtgtggtgtgacttctacaataaaccttgtcatacctgt

SEQ ID NO: 230617 - DNA, 1260 bp, Cannabis indica
tcgttgattctaacatcaaagaaggcatttgagcggttgaagtctttgtatgttgctgggaagaagtacaatcggacaaactttgggccgggggtgactggtatcatgtagttgaattgggaatatgatagtcgtgctgtctcataaggtactggatcctcaccacttattctgttcgccgcttggagggtgactgaagctttgtttgagccttctaataaggagaaatatttggagtctatgtctccagtccagctccgctgttgatattctgccatgactttcccggaagagccacagtcgatggttatgttgtccacagggttgtaccgaagagactgtccgtaactaatttgaatgaaatagaagacgaagaggacgatcttcatgagcgtatccattggggaacgtactctgtagatatttgttactggttgtgttgaaagttatatcattaattatagagtaatagaaatgacaatcagctagctatataaaaattatgatatataattgaaaattcgaaagaacgttttgtaaatttttttattatttttgtaagattttttttcatacgcgtcatcaacttattcgaatatgttttagtagtgcttgataacttttctttggtttctatatgttgtgtggatgataatgattgtattagtcacaaaccaaggtcaagtcatcaccgcgcgagatattgtataaaagtttttgaggtttggacagaaattcacttctatatacatgtgggtgtggctgaggggtgaagttgtaaatgaaacaagatgatggctttgccatgtaggattgactttgaaattcaaaagtcttcgtcaactgatacattatgaaaaaatgaaaagagaaaattatcacttataccaaaaagctaatgaggattcctattccacaccttaattaaaatgtccaacaccacattaggagtgataatttgtattcgtgagttatgttcttgtgctgtcgagtgttaggtcttaccaagaacatgtcatatttaaatttgtctcgtttattaattaattatgtcaaaaactaaaaatctaaactcaatccgtttctatatgggttcctaactttgacatgtaccaaattattatgctccctgaacttttttggccgttaaaaattccccctgaactattaagattgttagatttaagaacttttgtccaatttttgtaaaaaaaaaatttaacacggatgaaagtttggggacatgatttagtacatatt

SEQ ID NO: 230618 - DNA, 1031 bp, Cannabis indica
ttttacgtgattatttattgttcatatatctagaaccttatttgattaaagttaagattataagattaattaatttgtgatttcttcctatacacataataataatctcacctagtaactaataatatttttttctttaatttttaattatataactttcaaaataaacgtctatttttgtttatatatatataagatgaacacactatatatacgtactatatatattatcttcattccaaaaagatgaaattaaagttttttttataatgttaccaatgcaataaaagttgattaatatttataggagtggtaacaattcttcatatcatgaaactcgaaggtaggttaatttagctaataattatatatatataagtaattaattaagaaggtatatgagatgtccatttcagagaagagaagagacgatatcatcatcatcatcatcaccgttatttgttgtactttggtttggtatatacaaaaaatatatattggatatgtaaaatcaattttggcgtatgatcgtacttctgtccccaataaaatagtcatcctaatcttcccaaacacctacataatatacatatacactactcaactccactccttaattgtaatgaggtccccttatatataaatatacattaacaaaataatgaattaattattagctgtacgtacgagttgtggtccaatcaaactcataactttttggaccacttttgtagtcggtccaattttcttcttcttcttttttattttccataagtcaagttacatgcatattcatatattgacttaattatatattatagattgaaaattagattgcaacttatatagctaattttgataatttgaacagagtgatagtacatgactttgctaagctccattcataagagtgcggttcgatcggtaaggaacacatatcactgtagaatttgagactaaaaaattattataaacctcttttaatttgtcatttttttaacaattgtaaatttgtgactaaagtttgtaag

SEQ ID NO: 230619 - DNA, 968 bp, Cannabis indica
tttgctttatttcttgttttctgtttttttttcctgtatatgttggatcattggttttatatgtttgaacattgccatcggctaagctagcgtttgggctttctaggttgtattttacagaggatcgttcctcaacatcttggtatcatttgaattgtatagtcaatccattgttatatctaaataaagctaattagtatttttgtccccgaaattttgatatgtaccaaattattctcactgaactttgaagaccgttaaaatttactataaactattaagattgttggatttaaggacttttgtctaattttagtaaaaaaagtctaacataacatggatgaaagttcaggggggcataattttagacatgtcaaagttcgagaggcataatttagtagatattaaagtccgaggagcatgatttagttcatagacaatcatcgaattagttaaattgaatgaaattggacaaaagttcttaaatccaacaatctcaatagttcaggaggaaactttaactggcacaaaagttcaggagacgtgatttggtatatgtcaaagttcaaggggtaaaaatcctaattagcctctaaataatgacctatttgtagttacattagcctaattttctcgatatatttaaaatattaccatgaaatttgataataaaaatagtgataagagtatagggagacttacttggtgggaatgttatattcagggtacttgtcttttaacaatttagcaagttcatatatagtagcatcatgtgaagaggcaatatagcggccctcagctttcgggttctcatataagaaaatatgagcattgcataggtcatccaagtgaacgaattgtccttgctttataatgaagtaatgagattcatttcctgattttgattaattgtttaattaattaacatcaatgaaattaatggtgtaattaataaagataaaaaaaac

SEQ ID NO: 230620 - DNA, 888 bp, Cannabis indica
caaaatcatacctctcatcacaacatattcccatattcctctcccaacccaatgttggaaaattcatggctgataacccacgtaatggtattgatctcataatcccatttccattccaaggctcatcagctcaaattgtaggaattactaaagattattacatagagacttttgcttataacttaccattttcaccaacaaaattaccttttggtctttaccctaacccattaactccacctcaactaagtctaggaacaattgttgaaaaagttgtaggacctttgtccactggctcactccggttagcttcaaaaacagatgttaaagccacaccgcatgttcgattcaactatttttctcatccaactgacctctcgcggtgtgttagcgcgatgaggaagtttagtgaattgttgaagactaagtcattggatgaatttaaatatactgatttgaatggtgttagagatttcatgttcttggggcctcctttgccaactaaccctaattcaaataattcatcgatggaagattattgtcgaagctcagttacaaccttttggcattatcatggcggatgcttggtagggaaggttgtggatggagaatttaaagttattggaactgattcacttcgagttgttgatgcttcaacgtttattatgtcccctgggacaaaccctcaggctaccctaatgatgattggtcggtaagtcaaagcaaatatagtttacaaaatatatctatttttttttacaatacatattataattattatagtattagtcttatatctatttttttaaaaaaaaattctaaacaatttatattttaaaaaatattatttaaacatttatttgcacatgtatttttatttttattttt

SEQ ID NO: 230621 - DNA, 773 bp, Cannabis indica
aattttaaaagaggaaaaaaaaaatttgggcccctcagctgggtgggccctaggcacaggctagcccgcctatgcccagggccgggcctggggctaaccaactgcggttgtatccttttgaggaagtggtgcgggcttttgtgagggctcgcccagttttcccttgcccttatccttatgaggatttgaggtctcagcctctatttgcttctaggcatgttcctcggtcaccacttccaccgcgggttcaccatcgaattctgtcaaatccctaaacttactttgcatacgcttcatcatcttttacatttatgcactgagtcttttctgttcatctaacttcgcctgagttgcctctaagtctttggtgactcgcaataggttttggtcatggtcatagtgatatccaactttgtaatatacccatctctaacatagtcatcaccttcaccttcttcatctcctccttcgaggtattggccatcatcacggtagtcacacacgttctcagtatcctcccctcagttctagcgcgggtcgtacctgttgggaatattttaccaggatctaaatttactaacaagtatgttgattaacatcctaaatatgaatatctctaaaacaataaaattaaacacataagattttagaaaaccttacattggttgcagcggaatataatgaattcctttctgccgcagagtattatcaagatctgaggctgcatctctttctctcctttgggtttggttaccaccgtcttactcactatg

SEQ ID NO: 230622 - DNA, 1760 bp, Cannabis indica
atttgatattgtgttgtttgagatgaagcttttttgtttcgttaatggtagatttttttcttttttttttgaagaataattcaagttctaattttgatattttataatcgaagggaagtaaatttaaaggttcaattttgatatttgtgttcgacgcattgttcaaaggacttattaatcccgtaatcagaggaggaatatggtgtatttcatgtattgagatcaatagtggtatgagattattttggttttacggtaaaaatgctgatgtgtcacgttaatacaagaacattaaattaatcaatgtcaattatgttattaaaatgtatattacgtatactaataaaaatttccctatatatgtatgctatgttttgagatgtatatatttattatgtaatttaataattaatacgtatcttttaatttgcagcatataaatataaatatatatatatatatatatatatatatatactatgtaacatgttggatagcattattagtaaaactttgacgttgaatgggtctgctgttaattttctaaaagttacatgtaattaagtacgataaaagggacttgccaattttcagtaagtacgataagaaagaaatatatattatatcgatatatattataagaaggaaatatattatatttgctagccataattactctaccaacgccatatatatacatactttgtataataatagtaatgatacgcatgtatacgtgtgacctatcatgtacaataataataacaaaaatatattaatacatgtggcaatgtcaatggatgatccatgtattttatggaaaatatgttggcttgaattataatctatggatacactcttttaacttcaattttgacaaccacttgaggttatgggtgggtgcgtgagtgttggaggtcctagattcgagtctcaaataaaatatgttgtaatatataaaggtttaaataaataaataaaaaaaaaaataacttcaattttgacaaaattcgtaacgttccaacaaaacaaaaggagtagaaaattcccatggcttccgcgtacgcgaaaaatgtcccctatggcttttggattttttagaaaaattttagccactttttttagttttcgttttttatttaaaaaccgaagttgttgttcccactttttttttttcatttgaaatttaataattctgattttaattatatatatgttttattttattaatatatttaaattaaatataaataaaaattaacctttataaataaaaattaaattgacaattgttttattaagaaatcaaattgatagttaaataataacattcacaacattacattactctaagtaatttttattatacttgtaacattcacaaattactctaagtcgagttatctaaaaaagaaaaaaactcttaagtcttctattatcgtaaatgtgcaaaattagtttttttttaactattcttgctgtaatggtaatgtatttttttttctcattgtagaccaaatgctccaaactgtaaaaataacatgtaaatattattatattaaatagtttgttaatataacattaagataattaataaaaatttacttttccgctatttatgaaatatttgtgtgtattttaaaaaactacatcctaacaacctttgatattttctagaaatggttagtatggtattattgtccgcaatgttttggtatgcgctgatttaaaaaattatattattagattcaattaattaa

SEQ ID NO: 230623 - DNA, 1134 bp, Cannabis indica
aaaatatttttaattattttttaaaatatttatcattaatattatgtagaccaataaaattttactacgtgtatacttgtacatagagtgatagtctactttggcacttagtaagccaaagtggacgaaatgagtacaaaacaaaacgatttagcaaattaggaaactaaatccccaaaatattagtataaagaattgatcgtatcaaactttaaaattcaaaaaatttaaccacaaattacccacaataaaataagttgaccatataacaaatattgagtccatgactcttaattaaatcaattagaatttccaataatataacctaaaaattccaacaaggtggactaaagaaagcacttaatcaatattatattcccttttttttgaaaaccaaaagtacttctacctagtagtaaagttttataatttttaagatatttttcaaccctcaaaaagaattgtcacacgaaaaaaccaaatatgtcttctattaaaacatggatttaacaaacctactcaatgaagcagacaaagtaaaaattacatttttacctaattaagtaatgatgagaaagagagaataagagaggttgaatattagttttatttgttttttttttaataaaatgttaaataagagtatttctaatgaagaaataaattagtgatctaaaacttaaatcgttcatttataaaaaaaaaaatatactttaatagtgtgtcaaaagacgatacaaatttattttatagttaatattgtattaaatttggcacaatatttaatgtgatgaaaaatttacataactataaatgtattatttttctatttactttaaattatttatattattatattagtatatatttagttataacataaaaatatggactatttatattattttatataattatattaatgataaagttattattttctttatattttattaaaaatataataaaataataaattttacatcaaattttaccataatgcattgaaatacaatactaaaaattgatacaaatatatcataatattatttttttttaataaatataacccaatttttacatagcacaatgtcattttttttttgaatcaaagtgattttattcaaaagcttt

SEQ ID NO: 230624 - DNA, 913 bp, Cannabis indica
gcattgttactttagcatcctacacacatattataaaaacattaaaataaagagaagataaagggaaaataaaattgtagtcaaaatgttttagctaaataccaaacttatcatgttttttattttaaaaaataataataataaaaatgatgtgattattggtgtactttctgttttcacccttctatgatgaattagacatttacaaatataacttatatatagaaaagcacaaaacacataaataacataactaaaaagtttattagttaatggaagtttagtttacctgcacaaatttggcgaagccagaaacaagtggtgatccattatacaaggcaatagaagccccattaaggagtgaagcatagaccagccaaggacccaccatccaaccaagattagtgggccaaacaatgacatcacctttcctaatgtccaaatggctccacccatctgcagctgcttttaaaggagttgcttgggtccatggaattgcctttggctcccctataccaaaacaatattgtcttccatcaaaagtgtttagattgatgaacaaaactaattaaggatattaagggggctcgtgagattttttaacggtctttgattttgagaatgtgttctttttcataccaagcatcattatttactgaattaccttttagtttgcgctcttacaagtttagttgtaggcatgttttgtttaaggatgaatagcggcataagtactcaaagttttacggttgtaagcggcataaattcaatgtttatttttagcggtacccaatatttgtaaaactgtaatttttctttaattttatcagtatagactcttttattgtcttaaacagaagatatataatgcctaaattgttgatcattaagtctacataaaaatatgtaatat

SEQ ID NO: 230625 - DNA, 1862 bp, Cannabis indica
aagggttagagatctgagtgggacgagacatatattccgctgcacctaatgtaagatttttgatacttttatgtgtttaattttccatcgttttagaaattcatatttaggttgttaaatcaacatagttgtgagtagatctaagttccttgtaaaataacatccaacacgcttgtgggctaaccaattaatcagtttaggtttgcggaatgagccattaattgatttggagacttaaaaaatctgcatgtcatctatctataaatgtgaatagcattacatgttaacctttcaattaatggcattggcattgcgctcttaccagttgctactgctatgattgagtaatttttgctatgaatattgtgaaagatcactggcctaattgaataagaaatcagtgaatgaatgattgtttagttgtatatgttgatattaggattagagggttagttaaagttgttaagaggttgttattttgttattttgcctgattaaacataactaattcttgattagttatgtggaccattttacccctcttgatggatatatattcttggtgtaacttttccaattgtaatttgacttttccattttaataaaatagagcttcatctcttttctctctgtaagaacctgttcaggtttcactcctcatatggtatcagacgaacatcttgctcaagtttcaatggctaggccctccactcgctcgcaagacggtattccgccgcccacagcagagaagaccacatcagaatcaaatcccgattccacttccgcaccagtcgtcaacccttccatggcacctcgtcgacctccaacttctagagctcgtccttctcaggaagaagatcctgtcgaaccagatgtgttctcccctgttcaacccgctcctcaacctgctccctctaatcgcaaaccctctctcgatcgattggctcatgaagatgtctcaagccctttctttctcagcacagccaatcacccagggcttgttctcgtctccactgtgctcaacggtgcaaattaccaatcttggaagagaggcataacaatggcgttgaatgccaagaacaaatctgctttcatcgatggaacccttgctcggctggcctctggtaatcccttactcaattcttggaatagatgtaataacatggtaatgtgttggttgataaactctgtgtcccctgagattgcacagagcatcatgtactttgatcttgccaccgatatgtggcatgatcttcaagaaagattcaatgagggaaatggccctagaatctttcagctgcaaacgcaactcacccgtttgcagcaaggtgatcaatctgtcacctcatatttcacaaagctcaagtctatatgggatgagcttaaggaatttcaaccgaataccacttgttcttgtggtgcaatgaaaatatttcttgactattataatcaaaatcaagttctacaatttctaacgggtctcaatgagtcttactcttcggttcgggctcaaatccttctcaatgaaccaattccaaatctttctcgggttttcgccatgattgttcaagaagaaagacaaagaacccttggttcctcatcctcggatttgtcctccatggctgcctcagcccgtccatcatcatctactaatcccaaccggacaaagaaatcaagaccctcttgcacaaattgtggcaaaccggggcactatgttgacaagtgttacttccttcatggttttcccccgggatatggagataaaaagaaatctgagaaaggcaagactgttgccaatagttttactgccccccccccccaccgagaccagtcacaccaccattgacctcaccactcaaatg

SEQ ID NO: 230626 - DNA, 1529 bp, Cannabis indica
ttagcaactcccaaagaggatggtggaatggggtttagacacctccatgactttaaccttgccatgctcgccaaacaaggttggcggttgctttgtaagcctaattcccttgctggccgtgtatacaaagcaaggtattttcctaattctgactttcttttgtctgaacttgggaacaatccaagttatgtgtggagaagtatatggggcgccaaagacttagttcggcttggtgctcttcgtgttatcggagatggtaagagtactaaaattcttgatcatccttggcttccatcatcaaataacaaatttgtcacttctactcatcccgggcttcacacacacactgtaagttctcttttccaacccgagttgatgtgttgggatgctgaagtagtaagggacttattttccccacaagaagcctcattaatccttgatatcccgctgagttcctctgctagacccgactgttggtcttggacagccgataatactggtaatttttcagttaaaagcgcctatctcctccttcaaagacaaaaaccagtcactccaaggccaaataactctggtttttggcataaattttggcacttgaaaatacctccgaaagtgttgaactttctatggcgagctataacaggtactcttccaacatgtgtgaatctcgtcacgaaacatgtcccaatatcgtctcaatgtcccgtctgttctactgctgcagaaacgatcacgcatgccctgctatcttgtaactttgcagaagcttgctggtctagcttcggttggcctgtcatggtggattctttttcatcttttggctcctggtttgaacaactacagcacacgggtgacactgattttgtttgtagagcagctaccttgtgttgggcattgtggaaagctagaaacaaagttgtgtggaataaacataagcctactgtcaaagaagttatcaccaattcttccattactcttgaacattggaggaaagctcaagataaaaatgctctcttaacactatcattcaacaatagtgatgaaggggctgagctttggacaccacctacaacaaacaacctcaagattaatgtcgatgcggcactttatccacaacacaacagtttcggctatggtatagtggcaaggaatcatttaggcagtttcatagaggccaaaacaaactactgcaacggtagtcaccctgctgaagtgattgaagctttggggatcaaggaagcgctcagttggataaagaacaagtcatggaaaaatgctgagcttgaaaccgatagccttctttgtgtgcaagcaatacgaagcaaccaaaagatgtcttctacttttggcattgttatagaagaatgtcgtttattattagctttactacatgatgttaaattacgttttgtcaaacgatcagcaaatcgagctgcccatgcaatcgctaggcactctcgatttatttctggtagttgcattctagaacacgatatctggcctgatttaagggatatcttgttttc

SEQ ID NO: 230627 - DNA, 1735 bp, Cannabis indica
aaaaattatatatgaatataatatgcattgctcaataatcttccttatatgcatcttgaatagcatagaaggtttgtaaaaaggtaagaacaagtgcaacaaaggcaccaatgaccgaaacaagtgcccaagggtggttgaaatagtcacgcttaagtattcttcgatacttatgccgacgttgtttacagtaatcatttactttactcgtaagacaatagtaatagttttccttaacataagtatcaatgtagagtctgttgaagaatttggtagcatcatcaacattcaaccagttatcaattaccttattcttctcaagtacttgaatatcagcattagtgtcgatgagattatccaacagaacagcataacatgtgattatgggcttgtaattgggacaacattgctccaaacttatgaggtttcgaaacattgtttctgtggtttcttgaataagaagtggtggaattgacacaacacctcttcttgggataaatgaaatgtctaatattgactctgaattgctagcctcgaatttgatgccagagtctctcagacctgtagctgtgcgtatatgctgccaatcatgattggtatcttttccaattaccttggaattccaaatcaatgagtttctcaacagatcaagaatgtgttttgtttgttgtatccggtgatcatcattagaaagattcaaacgaaatggtttcttttttataaggctaggaaagaactctaaggccaattcaacaaggcttttcttatctgtggattgagattttgtgagatcaaacagagtgttgagaacaaaccaaggtatttggttctctagcaaaatgagatcatggtgtagaaattggagtagacaagacatggtgaatattgggtcatctttgtcaatgagatcagattggtatgaattcttacgaaacaactctatgatgaaacaaccatcaaggagtaacatctctacgaactcagtagtgctcatatcagttggccccgcataatagccatgagctttgttctgaatctcattaatggctttgcttagtttcctaatccacattggatcgaaaggagcttcagtatttgaaatgggattattattattattatgtgaaagacgagatagaagatcaagcaagtacttttgtttgatcctctctgttggttgaagatgaggttttttatggtggaaaggaccaatggcaaaggcatttggttcgtatgcatttttagtatgccttgagagaatggttgggactttgaatatgcaaaaattagatgacatgactagattacccgacaacctattttctaagctacttgacattgcttcaatatctatagcaacttcattgtcctccattgttggtgatgccatgttggttggtttctattaatcttcaacaaaacaaaacaaaatcacataataaaaatttggttagtaatgcaacaaaacttgctatactcttttaaagcaataatgaaaaaagaaaactacttaccaaaattaatgatcttcttatgtggaacaggggatttaatttatgtggatttatgtatacctaattgcttctactaatgtgtaaagataatatggtgtttatatatactaaatagggatatagatctttcatttctttatgtatatatattttataatcaagacattgcttcaatttcagtgattctagttcactttactactataactattactgtttat

SEQ ID NO: 230628 - DNA, 1600 bp, Cannabis indica
ttaaaaaccgcctctaaagggggtttttgtagtagtgtgtctctgttcatgcttttactttacaagattgtaaattcattagccaaagaaaaaacaactatatgcatccgaaaacataggatagaaatttattcaaacctgtttggatgtaccgactcttcgtgtcttctttgaaatccctaactagtttaaacacctgaagagatttttttaatattaacactcgaatcaatacaaagtaaataaaagtcaacatgatatatatcaaatttcatttagctcataccttaacaaatatgaccctcaatttctcttcaaatgaccctcgctcttcaaatttgttgaggccaattaagattcttttgagtttaaaaaaaaattaaagtgaagagtgaacaagaaaagaaataatttatgtgtatatatagtatactagtaaatattccgcgcttcgcgacggatatataaaattatattaaaattttaactttactatcaaaaaatttgtgacacaaatacttaaaatattaaattaaataaaataattttcataataataataataagtatcgtatttactaaaatggaataatttaactcaatgctaacttaaaaaaacgaaagtataatcagaaaaaatatatatatatttaattaatttattatcatatatattaaatattaaagtaatttatataaatttctcagaagaaaaaagataatttatatagactgaatgaagaaaactcaagaagtatagttttttgaaaggcctgtcttttttttcttaagtcaaactcacttaaattattacaatttttttttaactctcgactaattttttgttaaaaaaagattatggaaaatttacaaaaaattaagagatcaaccacacttatagtaaaactaattaagaaagaaaggattaaaaataaaaatttacaaaaaattcaccatataatcatctatcaaaaagtaattgttaaatgctataaataaaaaaaaagttgttgaaaactcaactaaaattaagatttaataaaagaaaataatattaaaaatttatgaataagcgtgcaaaaattgagatcaacaaataaaatcacatatacaatgaaaggaaaaagcattgtatactatcacttgaaatttataatgtttaaatgatgtattgtttataattttatacgtatatttactagttacaaaaaaaaaaaaaaaacaaaagatccaacacatatattagctacggtggagaaggagatgataccggctgtatagactacggtggagaaggatatgatccgtacagaagcaagaggactgtgcttgaagttttgagatgatgaataattaattatattaatgatcatttaatattaatttatacttatatatgattagaaggagaagagtatccatcaattgtttatacggatcagttaaaaaaaaaacacatagtgtttgacttagtttaagagtggttttttttgggagtaacgatgaagggtagtaatcggatgcggcatggttcagtggttcttttgtgtgtacacattgtaatactgtgtatttagtaattaaaataaggatgtgttgg

SEQ ID NO: 230629 - DNA, 1589 bp, Cannabis indica
actaagcgggttcatgtttacagtatttgttctttgtgcaattttgaacccgaaaccacctatcatatcatggctggttgctcttttacaaaagcatgtttggagcggggtttgggtctgcataacaataatgggagtgaggattttggtgcctggtttgaggatttctgtaacaattgtctggccgagaagattgataagttcgcaatgattttttggggtgtttggggggcccgtatgatttaatttagaataataaggctattcgtgtggaaaaagttgtgtcatctgcaattacgtatcttgaactttggaagtttgctcaaattaaaaatggaggagtttcatcttcttctagtcgtcctcatgctggtgttgagcgttggattaaaccgtctttgagagaattgaaggttaattgtgatgctgctcttttttcaagtgagaggagtcatggattgggatggattgctagagatcatgctggcttgtgctttgctgctgctgccgtcaagcttcggggagaagtcgaccctgttgttgctaaggctttgtcaatgaaggaggctttgagttgggttaaattaaattgggaaggaggaggtgttgttgaagaattttgtcctacatcggtggttatggaatcggactgtctcttgttggttaatgttatcaatagcaagagccaaggtctttctcctcttggtcttattatttcggattgtataatcttttacggtcctttactatttttcatgtttcagttcagtttgttaaacaatctgggaaccaagtggctaattggttagctcgttcttctggttcatgtcctgatcgtatttctagtagggggtctgtcccttctggtttggaagctattttgttagctgatttgctttaatgaaagttgcaatctttgtttcaaaaaagaaaattaagaaatgcttaaatgattagtggtacctagcacaatcatgaattgttatattgttattgaactacttaaggtttttttttttttttttttttcaaataacaatcatgtatttgatatcacatatactttaatttagtaattattataaaatattttctaatcattcttatgtttccattctacactttgataatgctcggcacaaagctcaattaaattacatccacccactacaacattattgatcaatagcggcagagggatccacggctaataacctttaaatctatcgctattagctattagcggtgagaatccgccgttaatagtccactactaataattagacactaataatagttattagcggcaatttttgagtctgccgctaataactattaatagcggcgggtgcccaccactaatgcccatcgataataaaattttaataataaaaaattaaattaaattaataaattatataaatatataaataataaattaactaaaaattaaatataatgtaatcaactctaaatattataatttaacaataacaatattcattaatattattaaaaatatctcaaattaaactaaataaataaaatttacataatatttatagtgtctgaattattaacaaacttaa

SEQ ID NO: 230630 - DNA, 1598 bp, Cannabis indica
aaattgtacacctcaataacaaacttgtcagagaattacaaaaaagggaatattcgcaaaaggataaaaaggaaaatgagcagctgcacggattgttgatgtaggcactaacattgaggttgatttggatgctgatttggacataagagcttacttggacaaggtcattttctaacatacattgataaaacactactataaatatacaataagctttttccttttgttcgtccgcaagatggtcataaccgacggtaaagcatcattttttttaaaaaaaaatcattatatatactctactaggccaagcccattaattaactaaaaaataaatatataatcctaaccctaaccctaaccctaatatctgtatcgtcgtcacccaaccccatcgtcggacccccaaccccacgtcgaaccccccaacaccagcacactgagtcgtcggatgcctacacacgttgtcgaaccccataacaccaatagactgagcaccaacaacggacccccttgtattatatcttctccctatctatctatctatctttctctctcaaatctatttttatttactttctagtttatattatttaatctttatatatttcaaaacttctttttaattcttagttctaatttttgaataataaattgataatagtcaacatgaatttgacttatatttatgttgtattgaagtaaatggtaatattgaaataaaaaaaataataaatttattatagtaaacaacatgcatcaaattttttagcatcgttatcgtggactattttattcatttttttttcctttatactaatattttcttctagttgttgtttcaaatttaaggtcttgtgttgaaaacatggcaatgtaatatcaacaatatattgatccatattataagtgtatcaatatgatctctactatgataattacacttcacgatggggggattattctaatacattatatggtgaaaataatcaatatattgagccaaattactacgatcgtctttcacaaccacataatcaaggttcatctattgaatatttgatagaggctctggcaagtaacaccattcaattttagaagaaaggtaacaaatatactcaaacttatgtgcctcattatctacaacctagtcatgttgcactatatagtgaaacaccaactactgctgagctgattcaaattatagcagccaataactttgcagattcaaaaaaatatcttacagtttcagcaaagcttccatgaacaatacagagcactcaacaatttctacaaaagatggagaatctttctgagcatataaaaacatctatgagtggattcatcactatcaaaactaacacaacttgaatcacccccacacaaagaagtttatgatttaattccaagtcatggtgtcaacaatttatatctcttgaatgatcatctccacaagaggttaaatctactttaattggtctaccatcactcaaaaagatataaaaaccaattgtataaacttaattcactcctctacttttttcaagtagaatgaaaagtattcgtgaaagaggagcttatcaagtagatccctaaaactc

SEQ ID NO: 230631 - DNA, 1869 bp, Cannabis indica
gatctcttgaagaaaaatgtactgagtcgcatattactaatgcagcatactaacaccgagtgacgaggtacttccacaaaaaggtaaagaagaggcccttcaacgttggagacatggtgctaaagtgagtatttgcaaatacgagagacgcatctacaggagtatttaacccaaactgggaaggtccttatgtaattgaagcactagtaggagccaggattcacaaattagctcggtttaatgactcgctaataaagaaccacaagaatgtggaacatttgcgatcctactaccagtagactgatgctgtaacttctatttttgatgtaatattttgaacttcaattattaataaagttgaataattttccaaataattacaaagtttacataaatggacatttgttcttgtgtgtaaggaaaaggtatcttaatgtcaagctttcgtaaaatgtcatgaaacattgaaaactacttgtcaagttttttctttttgagcaagtgaggatatagaattttaacgtaattatcgtagtcgactggtagttgattgttctcattattttatgtaacattttcttccactaaaccctcattctcaaacctcaatcttcgattcaagaataagcttcttggcaggctcttctagctctttaccatttcttagagttattgcactatagtcttatttaggattcacctcatatataatagaatgattaattttagataacgtcaatatctagtattagttgacaaatatttttattaaccatctattacaacgggtccgacctcctgttattgctctatcttgggggccaagcttgccattattgctagcaatcttagcggtccatgcccaccgttattgattatgcaatctcgatagtctttgtccgtcgagttaggtatatttcaatcacaatttagtactttgaaacacctaactcggcgggctcgaccctccaaaattagtcaatctcgacagtctttaagcaacctgtcgagatatgctaatattgtaaaaaatatatatttattttaattcctcttgtaattaaattgattatatacaccaatttacaatacaaatataatatataataattttagtacctatcatatcaacaaataacaatcacagaataaacttaattgaaatcagaaatttttttctttttttttataatattttctaatttcataagtacatattatctcaacaaataacaaacacaacaaataacacacaataagtttcttccttatatctccacaacgcacaaattgtgcacaacttacttcactaaaacaaataagttttaacctttcgtcacaacacacatttaaatctctaaaattagtagtatatcattaaacaaagaaataagtgattctacatacctctaataatgaatcatcaagaaaatttcatttcactttgtaaagttgttccttgctaattaaatccgcaacctacaatatcaaatatattaacattttattgaggcaatatacactctaaactttttaaattaagtttccattctaacaactaatgtgcatatccaaactcaaacttctcaattctaataaattattcacaaaattaaatttttatcaacaacatttactacaactagctagaaaataaattattaaaatgttaatcatagtttcaccctacaccacacaaaaaatattaaaaaacagtttctaaatcatatcatatttacgtacgaaaataaaaaccttttaaataaaaattacactaaaataactactacacaattgtagaagaaaaaattaaatcactcaatatacactatataacaattaaaaaaatcatatacatatttgtaaaaa

SEQ ID NO: 230632 - DNA, 1536 bp, Cannabis indica
agttttttgtttcttgttgtttctttcccttcctattgttgtggtttacgtgaccaggtttctttatttttttttttgttgcatggctccttctaagagttggcaggtgtgttgctgctcttttatttaattatttatttttgatcttagttctatttgcccctccaaggggttcttcctaggaaaaaaatgaataggtagctttacttttaggagaggtgaaatgtcacctgtccttggaaaaaaagaaagcatagactagattattaaaaaataaaactatgtttttattatgtatttatcgagtatatatacaagtgtagtagccaaagtctgttactaatagaataacaaaaaatgttctctctctataactatttcctaaccaacataactaactatgtaaaacaatggattctacccccacaagatgagctatagagatttattacacttattttggttaagagaaagttgtgttaggttagaaatagtgctttggtcatgatgtctgcaatattatgccaataagggacatgtatgaacttgattcgattttagtgacttgatctcgaaccacatggcagtcaatgtctatgtgcttggtgggctcataaaatactgcgttcttggagatatacatgtagcttggttgtcataatagagagtagctagagttgaatgagagatgccaaagtcttaagtatgttgaagagctagaggaaattgcacgttgtgttagccaaggacttgtattcatcttctgtagaggattttgacacaatggtttgcttcttggactttcaagatatgagagaattacctaggaaaatgcaaaaaccagtgatcgatcaccttgtatctggacatgtaccccaatctgtatcagtaaaggcatggaggtggaaagcattatcttgtttaggaagagaggagttgaagagaaggccttgttcaggtgttcctttaagatattgcaggatcctcatagaagccttcatgtgaggttgtcatggatcactaagaaactgacttagacgattaataacatatgttatgttaggctgggttattgttaagtatagaagttttctaatgagacttctataagaggtgggatctcaaatgggagccccaatgtccttactgagagatatgttggcatccattagtgtggatatagccgttaagccaaggagccagattcagtttagatttgtagagtgaaaggcctttgagacacaactatgcatgtttttaatctagcaatttctaggccaagaaagaatcaaggatagccaaggtattaagttggaactttgagtgtaggaaaattttgaatgtagaggcatctgtgtcattattgctggtaattattatgtcatcgacatagactaagagggtcaggaaggcattaggagatggccttatgaagagataagggtcattatgtgactgtttgaatccaatgctaggagagtgaagcttagcttggtaaaccattgcttgtaagactgtttcgaaccatataggctc

SEQ ID NO: 230633 - DNA, 1407 bp, Cannabis indica
aaaaaaaataatttttaattttgctgttctttgttaatttacataggacatggcagaaaagctcacacagcaacttttaaatcatttggaacacagagaaaggacaagaaagataaagaaaaagaatgtgttcggtaaaaaagaccagcaggtatggtgtttctcagtgtgtacacccacatatatttgatatgatgtgtataaatttatattatatttagaacagaatgtgttactgggttttttgtgggtttggcaatgtgagcttcgttaatggagattgttgcattttgagtttatttatttatttttattgagctgtggtgataaaggtcactgagtcctacgaaggcgaggatcgcagatgtagaacgagcttcttggtcggggttttacttccaaatggtttgcgattcgatcttagattgattattattattattattgtttctgaatatatgtatttgtggattttgtaggtgcatatgtatgttgttaatttttatttttttttgttttggcagtaaatcgttaattaaattgaccaagaatcgaattgatttaataaggagaaaggaaaatgcaactcagaaatttttgaagaaagatgttgctgatctacttgccaatggccttatcaatgcttatggaagggtattttgattcgtttccatcttttgtgctttgcttttgattcacttatcttaccgttttttagctgagcgaatttcgttagaaatgtaattttctttcttctgttttgttcttgtgaatatttaaagaaagatatatttgtagtctttagaagaaattaagaaagcaagcttgagattctggttaaaatttgtctattgaaacattactgtgttattgttctaactaacaaactgaaatgattcaatatgaagatagtttaattatttgaagtagaaaaagggtcatgtgggagaatacagtgaataaagaagacattaattcgcatattagctttgttgtgtgaccgttgtgctagaactctagtgggagtggtaagagtatttacttctttaatttgaatcaggtagacaatagtagaattttatgtggacatgttactactgccatctatctatgcacttttatttcactgaaattttatgttctcaattctctaaggtaccaattgtattatattgatgagtaattaaggtaccaatttagtaaattattatataaaatcattctataatttgataatataggtggagaaaattacaagaaaaattgtaatttttcctaacttacatttatgcttcattttataactgacgcaataggtgaaaaaaaaaagtatttcagcaatttatgtgtcattttataaccgacgatataactttttagtgatggttttgaaatgccacaaatgat

SEQ ID NO: 230634 - DNA, 1965 bp, Cannabis indica
ttgaattatagagctgacttgttatgttaaaaataccttttccagaacattggtgtttctttttgtagtacacaactctttcaaaaaaaaattgagtaggaaagtatttgtttaatggaatctaagaaagggatatttatgcttacttgtttgaatacctctaaaatgtcatcatactaactacctcttttaatatggatcaatttttgtgagaatggagcttttagggtgaacgacaaagtctgactcgattcttcaactgagtctttggaatgtgagcttcagactgactcttttcattttcttttagtgagtctttgttcatttcagtatcagtttaaggtacataagtgggtttttaaataatttttctatacctaaggatagaaattgatttagcttcttcagtaggtctagatgtacttacctcgtactgactctttggattgggaatgggttcactaggaagtttttccttttcctttcagctacaacattagcaagctgaccaatttgtgtctcaagctttaacatggattgagaacttgtgtgtaaagcttgttgggtggttttcatgaactgttgtagggtatcctctaaagatagttttctttgttgttgagaatatgacatattagattaggaatgactctgattgggtgagttgtattggtgtccttgattcattggaggtcggttctgtctccaagagaaatttagatgatttctccaatttggattgtaggattgagaaaagagactatcagatgatttcccataagcttgaagagtgttgacttcttcaaagaatgcctcttggtataaaggtaatgatggacaggactgagcattatgacttgtactataacacagagaaaaaacttcattcatgtgtataggagtattcatggattgacttaatgacatagcttcaactctcctagttagatttgctaatgaagtgtttaaatctacatcatctttggcatcgtaaattctacctctcttaggtgtgttggaatcttttgatcaaggatcttggcaattccactattaagaatttacagtttgattctcaagagactctcaagcctcttcttcttaaattgtaaatttttttcagtgtgcattgattataccatttgacagtttgaaggagatactcaattataaaagtatttcaccaatctcccattttcaaaaccatggtatcgacattttatatttaaatctttaaatctttctcagcattcataaattcttcgtgatttttttgataaaatttgaaaatttgtatccaaatattattcgttttagacatggaaagaaatttggccaaaaatttattaacgaattgatcccaagtagcaattgatcgagctaggagagaatttaaataggttttagacttatcttttaatgagaatgaaaaaagtctaaacctaacaaattcatcagaaaaattttaaaatttaaaagtagaacaaatttcgaaaagatctttcacatgcatgtatggatcttctctttctaacccataaaaagattgaaaaagttgaatcataaaaagtttcagctcaaaatgtgtagcatttgttttaagaaaaacaatgcatgatggaggattagcaaaaacgagagaagaatgatcaataagagttttttcttccacatttacttgatttggctccatgatgtcagaattttcaattttaatttcaacccatgataatttttttaccaaacgatttttagaatttcattctcagtgaatcatacaccaagtattacaaaaattaaaataatggaaaaaattaggaggcaatgcctactatataagtgcgtaaataaagactgaatttaaatagaatagaaataaataaataatatatattaaatagaaatataaatactaatattaatatatatacacaaataaagacaaaattataaagggtttttttt

SEQ ID NO: 230635 - DNA, 870 bp, Cannabis indica
cgctctgataccatattacgaaatcaagagagaaatgaaaagttgaaattgtgtaattgaactgaatgaatacaaagttaaaacagagggtttatatacaatgctcaacaagagcaggaaacggaaataacagaaaaggggaaaagacaaaggtgcccctgacacataacaaactaactaacacaaataaccaaacactaactgaaataactaccctaacagttaagctaagaaagtgaattcgtgttatataaatatatagcatttaatatttgaatttaagcattactattaattggtgttattattagtgagttggttttgagcaagaagggctatggcagctaagggatcaatagagacgagagagagattttgagcagaatactcatcatccttcacctcatattcaatagtggatttgataatggaagaagctgaagctgaagctgcactttcatcatcttttttctcaatgatctcaaatcgagttctgtaaaatgtgaaaccaaagtccaagtatcctccttcaacaacctcggcttccttcactagcttctcatcatctaccttagtgtacttctccttgtaactcttgaacttgaacacacctgatcatcatatatacaataagaatccatcattttcagttttcacttggttaattaattggccttaataatagctacaataatgaatttgaatgaataaatagttatggaaatttctgtattagatccaagatcgttctgctggtagaactcttcctatctgtttcaacatttaggataactttatagtatgatttttttttttatgttcgcatatgttgtacctattttaagagcacttgtaaatttttaaaaaatt

SEQ ID NO: 230636 - DNA, 2567 bp, Cannabis indica
ccttgcactacacctacacctgctggtgtttaaaactttaaagacaggtgtttaattgaactaactgccccaactctagttagtgcaggacgacccaatagtatgttgtaggccgacagtaagtcaagaactaaaaaatcttgcatcaatgttgtggatgtaggttgctcacccaaagttaacaagagtttgataattccttgactggaagaactatccccactggatccgcataaattcaccatgcaaggttttaacctcgtattttgtaatctcattttctacagtgtgtctttgtaaaggatattcactgaacttccattatccaccaacaccctttttagtcttttgttggtgagctagattgtaattacaagtgggtcggcgtgtggatacctcacgtgctttatgtcttcctccaaaaacacaattggagattcttcagtcttagctttctttgatggttctcgagcaaaaactaattgcttgttttttatttccttaacatatctcttctgggcatttctactttctccaatgagatgcagccctcccgagataaccaaaatatcctctctttgaattggagaaggttgtaatctttggttgctcgggttattgggcaaatttggctagttttgtccattaccttgtttctttgcatactattgaaagtaaccacaagagatgaggctctctatctcgtcttttaactgacgacattcatctgttgtatgccctatgtccctgtgaaatctacagaatttcgtttcatcccatttgtgcctcgcatgcctcatgggctcaggcttgcaaaatgcaacttgtgcttatgtgcaagaaatatattttcctgagtttcattaagctcggtataaatagtgtaaattggcacgtacttatcatgcttcttctttattttttcttttctttggttgattccttagagtcatcttttctctgtgaagcctcctagattgtcagccttcatcgagacggtacttgctaagacagtgctgcgtttatttcccgagcagttctttatcaatttcatctctttcctttcttcctcttttcatacgaacacctgagctctttcattgaactcactgatgttttttacagggcaaccctgtaagtcatcccacagctcgcctctagctgtcgagaggtcagtcgtaatccctgcttgaagagtagtaagctgtatattgtccttcaagtttctaactctagcagaggttgtactaaattgactcaagtaagctttgagtgactcgcctggctgctgcttcacgttagtgtgggaagacgctttaggtcgcctatctctcgctgcctgaaattgtttcttgaaatcaatagacagttgttcccaagaggtaattgagtgatggatgaatttatataaccagctgctcgctgccccagtcagcgaggtggggaataaaatacaacataagttattcatgacattgctagctcgcataatggtattaaaattattgaggtgagtgaccagatatatagtcccatcgtacggtgagacgtgggagtttttaaatccttgggaaaatttagagctcataatgattagatggaaatgtttgagctcttcatctaaatcgtaatgaggcagtttcccatcttgatattctttgaatttgttttgtaactcattgattcaaaattggattggatcctcttacttttgattggaattgagttatttgcataaattaggctttctccgattcaattcctcacgaagatctggccgcctttgatcatagttgcttgttgaccttgtacttgagtaactcttagattgactactccttgtatgacttatactttctcaagcattactatgttcaagtccctccttgcgtagatcgactgtgatctcaagattgcgaatgtcttgtgcttgaacttgcctcattacctataggccttctcctttggaaaaggtttgatacatgtcccctgatggggtgtgcatacgcctcctccctattagtgcgataaggacgttgacggtgtctcggtggtaacccacttgtcctaggttgagtcccaagatttctttcattaccacgagggatttcctgttccctagtcctgggttgtcttctattctcgtttttacgagaaggctccggtaaatcattgttttcattcccttgggttgtgaatcctcagggtctctgaggtacttcttgacgaggtgcctagttatttggttgttcatcttctggaacatccccaatttccccagcttactcctcctgagtgttctgggggttttcctgagccctctcttgcctccttgttcttgatccttgaggtctacctcgcgaccttctcactccaggatcatgttaattttgtgtgacattttattgagtcgccctcgctgcagcgccctctctctccaactcagcgtttcatttgttagccatagtcagtcgttgccggagttggcatttccattcaccaatggcacgtacctggtggggtcatatgcatcctcactcataagtatataatcaccagcttcagta

SEQ ID NO: 230637 - DNA, 1091 bp, Cannabis indica
gcgatttggaaaattagaaaaaccgcatatgcggattggtttaaaaaaatggttaaaactgcaccactcgcaccgcgaacacccctaagttttacatttattttattcctagagcttcacctgtttgtattgtgccttattgcatggcaccagtagagtgggctggataaatattgggaacttaatggataaatatcacattaggaatatagtacttctccttgtgaaactctattttttttcaaaaagtgttgatagatctttatgactgtgtatcaattataagaattgaatcattaatttacagttaagaaaaagtatcctaattgatgatagatgagttgtttgatcatcttgaaggtttaaatttcttttgaaatattgacttgatgtaagactcatcagttaaggattagaaaagaagatatccctaatattgctttcaagacacgttctagacactgagttttttgtgatgccatttgaattaacaaatgcacttgctgtatttataaatcttataaacaaaatcattgaacattagtaggataagtctgtggtaaaattcattagcaataaattggtatactccaagacatgttaggatcatgttgtgtacttaacaatagcattaaagaattttgagggatcatcatttacatgctaagaaagaaaagtgtgacttttggacgactgagatcaaattcttaagatgtgtaatctctaagatagtataattgtggatccttcaaaggtaggcgcaattattcgatgggaaatacgaaagtgttgttggaggaattaagacagcaccaaataaaataatatatttaaaatgaacaagattatgcgattactagaaatataaatatcacaaaaagaatatagtggttcagtcagatcacgatctgcttagtctatagctgcaagggttttctgtcttgttcatttcatgttggatcactcctttatatacaaagcaagtgtcctttgattacagagagattgatttaattatcaatccgtttgtacattgaatttaaacatttaaatcaataaaaacgtaaatacaataaatgaagaacagtttc

SEQ ID NO: 230638 - DNA, 2061 bp, Cannabis indica
ttcacactcagttgtccattcaaatttttttttcatattgagaacattgaagaacgtaatgcattggtttatttatttgaaaacaaatctgctgactgctgcaattcttctaattaaactctgaacgtctttatgattctatatggaaggcgtatctagaagagctttaatcttttattccactagaactgccaatgaaacccaaaaatttccctaaggaaactccaaaagtgcatttcgttgggtttagtttcatcaatacttatggatgatggagaaaggttcttgtaaatcttcatggtggcgcatggaggtcttagactttactagcatatcatatgcatagacttcaatattcaaccctagaacatctttaaacatcttagtaacaaggcattgatatgtggctccagcattttcaatccaaatggcataaccatatagaaataaatgcctttatcaatttgaaatctagcatgttcctcgtctgccacatgtacttttatttaattatagtgagagtatgatccataaagctcagatgttcacaccctgaggtagtgttaactattctatctattcgtggaagtggaaagtagtactttgagcaagctttgtttgggtctgtgaagtctatgcaaattctccaagttccattaggctttttgaccaataatttattggaaagcatagttgatataaagtttcctagagaaactatatattggtcaacttgtctacttctgctttcactgcttctgctcagactagatctaatggtcttatctcctgacagatttgttcaatcgtgggatctgtgtttaatgcatgaaaaatcaattgacggctgattccagtaaggacagaatggctctacgctaacacatcactgttttttttttttttactataaagatgattctttctctagtagctggaggtagattatttcccactttcatgactgtcacggaatcctcatcattgatgcacacttcttatatctcctccattggtttaatttttcttttcaaacctacatgtggatctacttcatctacttcatagaccacccccaatgtcggctaggtggatgttctaaattcttcacaacttctttctcggaccatcaaaaatggttttgtagagacattgtagtagatcaatgaactcttatgattccctttgattgttctaaagctctctatatcacatgggaactttaagcacaattagtgaatccaagttacagcaccgaagtcaattaagacaggtcatcgtaggatgaaattgtaggttattgtgtaatctaccaccacataagtatagtctttgaaaaatgagaccatgctgcttccagaaatatctccattcaatgtaactagtttttgtatttttcccattaaaacaagtgtatctccattaaagccatagagttgaactgggcagaacgtctaacttgtttccacaaggcctatggctttgaaagcttctttgaagagaatgttgattgagcttctgttatctacgagaactcaagacactcatttgtttgtaatttgggcttctatcaccaattaatcattatgtggaaagtgtacgtgcttggcatcatcttcaataaaggatatcaaaagattaatcattagaggacgttgtggaggtaattgtacaagactacatgcttcatcctgttctagctcatttaggtacctcttttctttatttcttatgcttttggtaatatagggccctctagatatggttgctacatggccatcttgttgggttttgtgccctaaataaaacccatttcaatataattagatttactaattaataaatatcataaatcattttatgttgcatggttcacatgatttatttcatgattatctttaatgtataaattctattaagtccagaacatatgtagttgttcatgattatagtgttgtcaacacagtggaatataatcatatgattatatgttcagaaagtgtaattccctagtttttcagttcactggattcagactggcatgacaatcagcgataggta

SEQ ID NO: 230639 - DNA, 972 bp, Cannabis indica
ccatatgaacagataaagggataaaggatcttcttgccttaaaccacattcaggggtaagcttattaatctaatatccattcaggcatatattaaatgaggtcgtggatatgcattaccttacccagttacaaaacatttcaggagccttaaagcttcgagcacatgatcaataaactgcaaacttactctatcataagctttcacgagatcaattttaacggcaaagaaaccctcttttccttttttgagcttgaacgtgtggatgatttcttgaactaagatgttgttgtcctgaatactatgcctagggacaaatgcagcctgagttgggcatattagtgtggggagcacatgtctaattctatttgcaattatttaagaagtaactttgtacgccacattgcaaagggaaatatgcctgaactgcaaaactttctttagatttgggaccttggggatcaggaccaccttagtaacattgatacctttatgaatcatttctgtaaggaaaaaatctcagatggcctcacaaaaattcgtgcccactgagtcccagtaatgtttaaagaacaaaactcatgacattccatccgaacatggggctttcaggcttcccatatagaacaaagtttgtctgatttcctcaggccctggaatcacttccaactcaagtcgttatagcggggaaagggaatttgcaattaaatgactcagattctccatcggaccctggaccgggtttgtgaacacttcttttggaaactctgaaaaactccctgccaatctcccttttggtcgttacccaaaccccgtccttatttaatatactctctacctcattatgcttattacagataggtggcggtagtaaaaaaaaactttgaacatttgtccccctcctttatctaagaaatacgagatctctattgccagtaaagagctttccatctaagggcctcgttaagggcct

SEQ ID NO: 230640 - DNA, 454 bp, Cannabis indica
aattaagatttggatggcacaatgcacgatctaatgcatgatcttgtgtttgtgatactcatttcaagaccaaaaaaatgtacttttcattcaaattgtcaagaaaatatccatgaaaatactcaccaatgtgtcctttgaacgtgatttttccttggtaaatcaaactttgttttatttactacaaaatgtaaaattaataagagggaattccccgaattaacaacatcaaaatgtaaaatttactttataaccacattaaatttatactatgcgactacaatagtttatggtcgcaaaatgataattttataattgtactatgtaattttattcaattaagcaaccaaatatgattatttgctaataatgattatgtttaaaacaagattcgaacaattttcgttgatgaatgttttcctatagacaaggcagttgcgatagtagtattgaa

SEQ ID NO: 230641 - DNA, 968 bp, Cannabis indica
gtgaaaatttcttcggttataagggttcgtcaagcctgttaacttgactcgatagttgaactcaaagctaagtccatagctttgaagaccaatgatataggtggcttagttttactgaaccttgtaaaaatcaagagtttgcaatttctatccctaaactatttacatttcaaatttgctatttgttcatacttgtgtttatatatgtgattgcattaaatttaaatattaatgtaaattgtctttgggtttttaaatttcaaaattagtttaaatttttaatttacccccttatttgaagcatatcttgggtttaacaactttgagaaagccaaataagaattcttttggtgatattcaaggaagagatcaactagcttatttgttgttaactgatgctcatgaagagttacggaaagacccattgtacaaaaattttataatcaagagctttaagctagccttagatataaagatatacagaaagccttactttcttttcttcatgaaaaggcagagcttcattgaataaaatggagggggatggaaattctgctacattctaagtaagcattagagctcaaaaagcagccaaccagatttattcagtaacagatatggatggagcatggtttgatgatctggatgaggttactgaaggtttcttgaattttataatcatcttcttagactttaaatggataataggagacttgtcactcgatgaattgcttcgctagctccactggtcactaaagcttaaagtaatacattattagcgggtacaccaaagaggaagtgcaacaagcaatttttggaatccatagaagtaagactctgaggccagatgcgtttggtacttacttctttcaagatagctgtgacgtgattgacaatgaagtatagtggagttattccctcttttttgcgtttggtagaagttgctgaaggaaattaataacacggta

SEQ ID NO: 230642 - DNA, 882 bp, Cannabis indica
aaaaattaaaaaataaaagtaaatcaagtgactgtggatgatctaccacaacagtttctctacagcactcagctaatttccaaagactccaaaacaaacagttccagggaacattgtttacaaatttcaatatttgcttaaatcacctaatccaatttcaagaacatgcaaacatttattcaataaatacatacaaacacataattaaaactttttctttccagattttgagagagagaaacctgctcgatgtcacggtcggcattcccgtagctaacaagatctgccattccatgtgagagaatttaccgaaactccaccaccctctccgatcccgcgccggagctccggtcatcatctacgaccaccacaggcttccggaaaattaccatcaacggtcacatcagaatcccccccacaaaaacctcctcttgctaaaacactctctctctatttctctcaatctctttcctaatacacaaaccaactctctccctctctctctctttcttacgtgcctacaccgcaaccacttcagatctacctctcaccttgaaaaccctaactagaaggccaccgttctggaagctcctaccggaataaagcacggtcggagccgtggactaacgcggaccgttcccgagagcaggctccggagctggcgaaagcgattttccgctgaagtaacagagatgcaaagtcggaggaagaagagaagtctccggagttaaaatccggcgagaataaaaaggtgatttgtcggagaacctggcggaggagacagaggagagagaaaaatctctgaaagagaaagaatttagggagctgagagagaagagagagagtctgtaaaagtacaactagtcaaagacttgaaaaaaa

SEQ ID NO: 230643 - DNA, 1155 bp, Cannabis indica
ctttatgatctgaaaagagtttaggttaatttataatctgtcatcacataggaggaagaagaatggttaattagtttaataattgggtaatcaaagcaattgaaatcatatccttaatttcacatccattgttaaaccttttatttgtttgttttattagattttgcttagtttatttagttcaaaatttatttattcgattgccaaatagaaacaagaatttaattgattggtacttaactgcagtcctcgtgggaacgatctcacttacctgagtattacttcttaaaacgatacgtatacttgcgtgttggatttatcacaacataagtatagtaatatgtatggtaattatgtgccctgtgaagtttaaagtgatttggacatgtttcggtagtatttcggtgagtgcaaaaactgagaatcgggattttttaatccctgcccaaccggtcaactggttctgtaccggtcaatcagttctggtagaagtggtcaaccggtttgccttttcggggtagtctcgagaatttgggaatcttatttttaccgtaactttttacttgggtgtccgttttggacgttttatgtactgtttcaaagcttacaacgagctttaccatatggtgtatattttagagccaaaatataaattttattttagtgtatttgaactacaaagtttggtaggaaatcctaggttgtcctttgcaattgttaagtagtgttttaagataaacacttattagtttatcattgttatgacagaggactcgagatcattgatcgttctccaagcaggtcgaccaacatacctgaactgaaacttgaggttaaaaaaatataatgcaccacatggcatgacaggttttgtgatcatcggctgtctgattagacagtaataatatgaatgtgacatacaacttcacttgattaggtgatatgatagatggatttcaaatatgaaatgagtttgcctgattaggcaatatgatatataaatacacatgattaggtgatatagtgcagctatgccataggctgagcttgcctgattaggcaatgcaacatatgtatatatatgatgaatgccaggctatggcataaatttgcttgagtaagtaatatgatatatggatactgacattcaggttg

SEQ ID NO: 230644 - DNA, 866 bp, Cannabis indica
tcatattcaagaaccaacacagagcaacttaaagtctaaatcagaaaatacatgattcctttcacaatgatctacaacaaagagtaagcaattaaccaaattgaataactcccaaaagtctatagtcattataagaaccaacacagaggcagagcagctcaaagtctataatcattatcagaacaaacaaacaagacttaagcagtaaatcctaatccgtatatctcctttcatatgacaaattcctcattcctcataagtatctatgtgtatgtgaaaggaaatgagggctctttctttcacaaattcctcatattctttctgaacctattcaaaatacaaaccaaatcaattatgaaaaaatacagactcattgtgtttataactcattgtgtttataacacattcacagcagaaaaaaaaaatagttcgcacaaaaaatcccaatcgactagaactagaagaacatacttacattttttttaccattgttcacagaaaaaacatcttgttcacagaaaaaaaatcttgttctttaaaatcacattcatcaccattcttcattgaccattgttataaaaaatcaagctaaccttcagatacgcgcacaacttctgggcgcacggctagtggcggcctgggctgggtgcacggctggtggcggccggggctggccgcatgactggtggcggcctgggtgggcgcccaactagcgctggtggttcacgttcacggctgggcagtgcagtgggcagtggattttttcacggctgggtagcacaactgtttgtttactttgtgtgttaggacttagggtttgatttgaatagagagaaaagaaaaagaaaatgaaatatatatatata

SEQ ID NO: 230645 - DNA, 1277 bp, Cannabis indica
tggaaatgtcatatttcagtatcacttgtccagacgaccaccaaaaagtttaactgttttgagttagtttttgaaaatgaggatgatagacttaaagctttggccaacagcccgtggaatgttaaagggtgcctattacttctcaatacttgagaccctagccttgatgtatatagaagcctcattttctactgcgcggttatgggtccaaatacataagcttcccttggattatttttctataattaatggaaacaaccttggggctcttgctaattcggttgtggaggtcgaacttgataataataaaccggccacatggaagaaatggctcaaggtttttgtggatgtctctattgaaaattcgttgttctctggttgcttcattgaggtacgaaaaggcattaaacattgggttcagtttaaatatgaaaaaattggtgttttatgctatcactgtggccggcttggccacttacgtagtggttgtgctcaagcagcccttgatacagtcgcaaatgccaatgggaattctttcccctatttggactgtggctgaacgtgggtttccattatatcgactgtttctccgagaaaaagtattgtatcgtgagcgagcaacacccaaggatgattggaatgattcaccggtttccttgaattcccctgttggactttgcatccccaagactggagttgttcttccccaacctccgatgaacggcccttctccatttttgagaattctgtaaaagattattccaggccctctattgatgaaacgtgctgccaaaaagtcggtgtgacttcccaagacatgctcaggcacacatgaggaaggtctttccactttgggtaaaaagctagcatttgttgatgctgagaaagaaaggtaacctgatgtatttcctattgtggattcggtctgtttaaatagagaagatgttgatgtggcctttgataactcaaagaacaaaggagtgtccttgctggcagaaaattcaaatgaaaaattagttaggcctgtagtgaataatgtggtagacacggctgggccttctatgatggggcaaaaaatttcataatttaatagttctctttatgggcaagaaaggaatgatcaacttgatgagaatagggccttggctaaatttttacaggccgaagaacttttttacaagaactaaaaaattttggagagttggacttacatgaaatcaaagctattaggagtgatattggtgtacacctactctaaacaaaatgagagaaccacc

SEQ ID NO: 230646 - DNA, 2097 bp, Cannabis indica
caaccttcagagcatgagtcaaaagtttagtgatatcaataaaaatacatacatggaaataacatcttgcatgatcgcaagtgggaatcaatctccaccacattgtcaatcaaactccccatctcacgaccgatttcatctgacaaacaacaaatagggaagtaatgaagttgaatccaaaaggaaatcaaatcaaaattcacctaatgataattgccattgccaatgcccgttgaatttgagagttttcacttcaaaaaggcccttaagtaatcacatatttggcgtctcaaaatctccatcatcattcccatcaaaatccatagctaattgcaatacaacaaaatcctcattatccatgataaccagaggaggaaacacaataaaaatttggaaacccacacccagaatatcagggagaaatgtcaaccaaggagagagggtcgaaagctctttcatatattttctaaacacacgattagatataaactttattatgtttaaacacataatatcacaagtatattttcaaaaataataagaataaaaaatcagggtcatttcagaagcatcggtgaagaaaagtttattttctaaaatctaaatgagtggcgttaaaaagttcatttcagaagcattggtgaagaaaagtttattattattatgacttccaaagatgaaaacctataacatactaacattccatctccattaaactagagtgaagccaatggaaaaacgtaatgacattaagttggtgtaatgaaaaactcaagatttgtgtgtgaaatgtagtggcatatattctctctacggtcagaaaaaatattatattattattagtttgttcatcatgacaaaggtgttaatgttctcctttgttacaagggctttgcccagtcatggagcattctattcctgcaatttttgttcttccctcataattcttactccatcggaactcagttgcttcgtttattccatgactcttccaacttcaggttagagacgatgatgaatctcgataaacacatgcttgttcaagtaactttcagttatggagcttggcaaacaactgtttctgtaagcattgtcaacttgaattgatttcagagaacgcgccaggatgtaattttttggataaagcttctacagccgcttcaattcgagcttcatcctgcaatgattttttttgttttagtttttggttatatttttcagatgtgagtggaaataaagcagggattgtgaatgtaatgaaaacttgtaaattaaagcttagatgtttccttactctgcctctgatattgacaataagtggcccgtatctggtttggcgataacaaccttgacaagtacatggagaacatcccagttagagagagaatcaaaatacacattaaaaatccagacttttccatgggaacttactgatgtgaagatctggaaattcaaggcaaagttttgatagaggtttagcagttgccacctgcattttcatttattttcccaacaaaacacacaacaatcagaatattatgagattaagatataaataaaattgcttacatattattttacacaattttcctttttttttgttgggagggagaaacagctttgtattaattagtaaaatggcttgttacttacatcggaaagatcagttttcaacagcctcgaaacataaggttccatcaccgctaatatgtcactggatcttgtcagttcaatgagacagtcccactgtgtttccagctccattaaattcgttgcagtaaggactattatatttttgcacttgatctgcaataaacactcgttagacaacttctaatattttccattgaaccgattttatctgtgcaagaattaattgcaagattccaacaggaaatgatcaacatagttctaaagttcaatatatgatatatcataaaaatatacaaatagaatatttgagtttctaagttcataccaaagggacagccagtttttcgtgatgcaacaattcagtaattccttccggtaacagagccatctgataaggataaaaccaaaactgagaagagattcgcagcaggaaaaatgtatcat

SEQ ID NO: 230647 - DNA, 1074 bp, Cannabis indica
aagaagaaaaaaggccaggtatcttgttgctttaagtttgatttcgtttatctttcaagtataaattgcgaagttcattattagacatgtgttttcatttattttgctccattgtgtaagaccaaataggtataaaaatctattaaatttatgatctggcatactctatgaagaaatgaaactatcaagaacttagtttctttgttaactatatgcttcggcaatcatatctgctgctgtgttcctcctgcaaattcttctgttagtacaatttaaattttttgcaagtaagcaaaattgatcgagccagcctttacaactagtcaattgttgttagaacctgttactattatagtcattgatgttatgccacaattgtactttacaatacatgcgcacaccattgaaatggacatagacgtgattgaacttttttaatgacttagtaaattcatgaaacacaaaccatctgtactattttatctagcttctttacaagagcatatcataaactggtgtaagaaaatgaaacaaagcatgtgtgctattttatctagtctccttacaagagcttatcataaagtaaactggtgtaagaaaatgaacaagaataaattacttttctgttttgaaatttgaaatctaacctttatgaataaggttttaaagacaagtggatcaggaatgaaagaaaaaggaaacagcggaaagtaatttttttattcttattttttctgaatgtttataaaagaaatttgcagggatatagccaagtgattacagaatactaggaacgagtttgaagaaatagagaattttattgatggtctgcttttcctgatctaacaccagtttgatcttttgcagtatgatatgaagcttctggcagttgacattcccatggcatcaggaccggaccagcggttattcttggagggagatgaagtagaatacaaggttggtgggggcctaatatctcaacttagagatcctgtggtaaaagcaatgagtgcggccaaagagtttgacactcttgatcagattgaagaagaggaggatgctgaaagagaactg

SEQ ID NO: 230648 - DNA, 1591 bp, Cannabis indica
aaaaaaaaaaaaaaccaataatatccctaaataattttcttaaaacgcgtgaaagcttcaaagaaaaaacccttgaatatatctctaattaaggatatcttgaggttacaagctacaaatcagtaaggttaccatctttcttctctaattctttgatttttttagtatttttttttatgggattcaaaacttgggacatcattaaagttagtagctaggacgtgtaatttatctgtgaatagtggactcaactacgcagaatggaagttcaatgtggactaatcaatatctaatatacatacatgtatagcctcgacaaataacgtggtgcttaaataataagatggagaagttcataaataatatatgcaaagcaaaaatggagatcaatggaagaattattaattttttgtgtttgccattaatgtcattcatcatttaagagggttgaataaacgattaggaggaacaatataatttaaattactgataatatacatcccagttaaacttaaattgtgaaagatcccataattaataggaccatcgacaatgttgtcatagtttgcatttctcccataagagctggttgaaagccatcggtactagaaggcaactgtttatacattaccaatacccctagtgtaaaaatagcttgcaacttcgttgagttgccttgtacaaaaaagaaaaaaagcatcaaaattaggaacatatcaacactaaacaacatgatgcagagtactatatcagccacataccaaatcccaaaaacaagctgataaaatgaagaatataccattgtcaaggtaaatattgtggtagtatcaagtgaaatcaaatactttggggcagttgatgaggttctattgattggatataccaaaagattatgtccatgaaaattgatatgaatctcccttaagagaattttaccttccattagttacaagggttgacgtgtgcttttttgttgtttttttttttttttttgagatttttacgcaaaatgactattttgactaatttttaatatttatattatcttttttaatttttaacatttttactttttaaaattttctttaatacttctttaaagatttataattacatatttaccttttgttctcctttctaatatctaacctcattcagatctgggttcaacatgtcatctctcactctctcatcaagcttatcaaactttcacacttgtcttctcacaatcaccatatgtatcctctcgtcattacgctaagcctcttctcaagccaccattgtcgttcaattgatgcttgcaaggtcttcttcttcttcttcttgctaaaattacaaaaataaaagtttagatttgatagtttttataagagtttgttgtttatttgcttatttattattgaattttctatttttattacagattttaggaattttgttcttattctgtaagttgagttcttatatatatacatataaaagtacacttgctaagtgtttggtgaaatgcccaaaagaattcttcactagcttaaaggaatagggcatattcaaatgtgattttattgcaactttaagttagcattttcat

SEQ ID NO: 230649 - DNA, 1957 bp, Cannabis indica
tttcttatattgattactaatcagattgtaaagagttttatttagggcataaaacccaacatgaagttgtataaaaattcaagctcagacttcgcttgaaaagatcaatgggtggaagagtctttggcagtaaagcagacttcaagctgtccctcctttctgtgatagattgttgaagccacacgtcactcccaatgatattccacacttggagagcatgtaggtatgagtctcctgggcctagggaaagtctaggaggtgcatggttatacctttacgatctcttgggtagtctatctccttcagtgaagtgcagtgacatttgagggtcactaaagcgagaactcaaacttccagcaggataagcttatcacaaggactccctaactagtttataatgtctcaagttgcttccttcttatgtaaccccagggaggcaatcacaccaggcgacagggatggcgctgagcgaagtatgctaaaaatggcctattcctacaaacagtaccataaccaggcctcattggtaacctagcagacaccgatggtattgatggtctcctctcagcatgtgccattccaggatttgtttccaaacaacttcaccacctagagacaaggcgggagaagtggatgtcaaaaaacaaatccgacctccatggcggcaccagcgctgtagtctctagctagatagagtcgttacattcgatgaccctttctgagttagttggcataactgcatcaagtcatagctccttagtctggcccgagcgtactactccgtatgtgcatggcagcacgacgagggatctgagcctggggacatcggtagtcgaccttgccctcggggagttcgctggccagatctgagcttctgacgaaaaaatattagtgcatcacgtgtttcacgactacgtgcactcatccttgtcactctttttgagtagattgaggcatcgagtctctttatgggcaacatgtcggttctgcacctttctggcctttggccggacctcgataagctatcaagaaatctaccttcttttcttgaacgaactattttttagctctcaatgaaagtatcaaaatttttactgagtttttcggtaaccgaataattatagagcttaagaaagtaataaatgcataaatgacaagattatagacaatagatttttacgtggtttaggcgttaaatatccttagtccacgagtccattttattagactctttggccggtgactatttatacaaatacaaaaaggatggacttttactccgatccaccatgttcctcttgaagaagagaaagcttagtaggaatattctagagttaataacggagttacagtaatgtgttttacagagaatcaatctttacttttaaggtgaagagcaaaaatggaggaaaggagagaagtcaagcttcgaaattggaaatcaaagtccccctgccttgtgtgtcttcgagagtatttattggtcgatcccctcgcatgggctgtcgttgatggatcttcataaggataaacccccaccattggatttgtaggtagtatattttccatgtggtctttaccgatgtcagattatactggcggtactggcggtgcttaggatgcctgtcattctagggccattctcgtttgaattactcttactcctagtcgtcggatcgtttaacacagtacacaaggatacacgtgctctgtatggtagcgtggtctagaagacaacctttgacatcatacaaggaaaagccccaccattgggttcgtagcctaacacgcgtgggctgagcttccgcaggtcaaaagtgtgccccggatgggtgcatttcaatgggaggcccatatccttcgtgggagcaaaaggtcctgtcttctaaaacagcaagagtcgctagctcgcggacatttctctcgtgacccgcattcgggaagacttctttgatag

SEQ ID NO: 230650 - DNA, 721 bp, Cannabis indica
ttaagaatagtcaatttgaagcagttactcatcttttagtcaagcttattactctaattattattaagattaaactagctttgtcttttgttttaaaatattagttctgttttaataatagaacaaatcaattttaacttgttcatctgtgtgttagtgtatattaatgctaaaaaatataagtggtgtctccattggaaattttacatattttaatttaattactataaatatataattatcataccttattatagtatgatgcctattaataatgaaaaatgctaagatacactaaggtgctaaacacaagaaatcgtaaattattattaatgtattttaatattaggtctcatacattttaatttaataataaattatataaaaaatatcttaaggtacttatattttaaaatttttgatccaattactttagacttttagaatctttttacgtcatgaaaaactaattatttaattgcaataataataattaattttttagttatattcatgataatatttttttttggataaatataaaacttaatatgaaacctagtgcctaatgcctatgactttgactaacacaaataaatctccaccttataaaaaatagatcagttaggcaagaacgacgccaccaccaaaaaagaaagggaaatttgattttctatgcttaaaaaatcctaaaattatatccctaaacctaaatgttata

SEQ ID NO: 230651 - DNA, 929 bp, Cannabis indica
agagtcctaacaacaaagccctagattgtggctccttatcaaagacttcaattaattagaatagaatacactagcttagacttcacataaatgttataagcccattaattaaatccctaaccctatgagttaaaatgacaaagaactatttatgagctcatattacaatcaaaataatgttaatctaaacccaaaataaaagtcctacacttacaataaattatttttcatactttttttttttagggattttccatacaattaaatcttttgattttaactatttttcatgcaaggtcaattaattaaaaacttattattattgttttatttgtaataaaattatctcaattttttttaattaagctagcacaattggtggtatatatacaagaaaacaaataatttcattttaaaactacacctaacaaataatttatgaattttcctctctgttaatgatgttgctctatgctaaacacgctttatctgtggttgttagcaaagtttattggccaagttatccaaattatattcgaagcactattatggctaagaccatgcgttatctatgtgttttgagattttcttctaaaaaataatttataattaataaatgatatttactatttcatgtaacatacaaacatgatttataattattagttgtcaataatattggatttattattagtgaattgtatctccctattttatatcaaattaataaatcaagtaaagttagaataatttttcaatgaaaatgaacatccatatatgcatgatgtgtctttggtaatatttttcaacttaagttgatagctatataataaaatgttaaatcataatttgaaagcatcatcaaagaatgattaattgattacattcatatattaattgaatgagaaaacgcgtatatatatttatat

SEQ ID NO: 230652 - DNA, 1215 bp, Cannabis indica
caatataattttcacaacaatcgttaactaattataaggtaatacttatgaaaagtattggacacacaggtacccaataacaatgcttatatatatatggtcatctttgtaaaccccaagttctcgtccaacctatctttttcatatttagattgatataaaatcaaagattcaacaccagaattttacaagcttcacctgccctagaaactcattctaggcggctagtacttgggttccccgaaccagggtaataactttccctatattcaaagatgcatcttacaaaaatcaacaatattgtaaacaacactcttttacaaaatacagtgaatctatacccataccaaccaagacccttgattggagacacaagatccccttgtgtgaatgatgagctctcttcaacacttttcttcaatctgaactcccttcagatctggtgatgaagataatactaaaaccggatcgaatcacatgggggttaaataacaatggacattacacggtcgctagtgggtataagttgagatttctcaatccggagtgggcagcatgttctaacaactccaaattaaaagcatggtggaagttcatttgggggtcaagactaactccgaaaataaaaaatttcatttggaaggtgtttaatcattggatcccaactaagatggaattgaggaagagaggtatgtccttattagccaaatgtgacaggtgcttacaacaagaggaagacataactcatgctttatggggctgtcctaaggttcaaaaaatttggaaacagctgggttattccaagtttactgagttaattggccttgatgcttcggcattcctttggtggcaatgggaacacctttcacaggagaagtttataagttttgcgggttatacttggttgatttggcaacgacggaaccagtttatttttcaaaacagggacccggacattcacttctggattccttgggcgatagaaaccatagaaaatcttttgggacagcaagaaaccagatcaggtcctcctccttctaagccgattcttcactggcagccccctcctaaggatgttttcatagtcaactcagatgcttcactggttcacgggcaggaaggctgtggaataagtgcgataattcgtaacgaagctggtggtttaattgttgttgaaactttgtacatacccggttgtatggctgtcaatcttgc

SEQ ID NO: 230653 - DNA, 1629 bp, Cannabis indica
ggtaaaatatattccaacacacacacgactcacctggtggcatagtaccatcagtgtcgttgacaactcctgttggtgtgttgttttgtggtctcaagccaggggctctcgacttaccgcccaaggtagcaccaacataagcatcacaatcaacactggtggacctagttgtcaccattttttcgaaagttcttaggttcttgtacttacaaatttctttcagaatgaagcacccattcgaacactaaaaaggcaaccaagggacttgatgttggtttttatggtccatatcagagttataaaagcggaagcggttttgaaaaaaaatagtttttatctaatatgtaccataagcccaaagatctcaatataatatatatagattaaatctaaactactaaaagaaaattcatacctcttgaagcctatcagggtacccttgtttcttttagtataattaacgatcatccaatccaagaacttctgatgaagaatctacaccttgatcttctaagccagcctcaacactcaggaatagagtgggctattagatcttatttggatgaattaatttaggtattacagtgtgttctcaactcatgagcactgtaattgagatagggttgtttaatctcacacacacatgatatagtgtaggtgtgtgacacctagagagagagtgtgtgtgtatgcgtgagagaaagaataggagtgattttttttattattatttttctctgcttttttagttgcctactttcttttaatttatgatactatatatcccatatatagtgttataaatgaaccattttaatcatttatttaaaataaaagaaaatatttaatttaatttgaattagaatttgaattcaaatataaatatctaataaccgaataacaaatattagttaggacttttattttaattattatttttttaattaaataattatccaataattcatttaattaataattaaaagataattagcttaatttaatttaaattattttaactaataaaataattaaactaaattattcatgggcatttatatatcaccctacacacgtgaaccatattctaaggtccaaaattaatttctcaatttttttataaataagatttattatttattttaccaataaataataattgattaatttttattaatctcttattttataaggattaaaataaatattatcttctctaaaataatacaattctctctttaatattatctaaaaataatatcatatttaattgattaatatagttacattttataaaattaaatagttaaatactagtaattatacaattcataattgtcataattaatcaatacaataatttcataaattactattttatccttaagaattatttcttatagaaattaattctcacttaaaattattcatcaaataaaactttttcctgtacagtgaggtgacccggagaccatggacctatattttgaagctccaacaaacacttcattattatcgatctcatcaatagaataatctagtttattaattttattattaccgcactaaaaatatggaagtgcacactttatcaatataaaattacatttacagaattcttacttgtag

SEQ ID NO: 230654 - DNA, 914 bp, Cannabis indica
  modified_base (11)..(11): a, c, t, g, unknown or other
ttattattatnttttttttttttaaaaaaaatatcatgtttggcatattattattttttttaattaaattatgaaggtgggttgacatgataattttattttttttcttccaatcaatgtgaagacacttcatctttcaatccaaatccaagtaagcttattatctactaaaactgtacatgtttaggagcctccttaattattatcaacgcagctgaaatgaaaattaaataatgtaagttaaaatcaaaattgagtaatatattatatatacatgtatattaacttgtcaaaacaaacaaaccactatggcaattaccactacaatgtataagaacgtccattattattgtattcaatactatttcttaacgtataactgaagcaatttttattcttttacttctcttcaaagctaaccatcattgccttttcatactttacacaaaatattgaaaagaaaaaaagaaaaaaaaaagaagcaaaactctacgtatacgcttgaccagcaaatatatctaataatgttcacacctcatttttaggtgatgatctcatattatcatggacggatccacatagaaaggaggggtatatatacatttttttttagtaataatggaaactttattaattcaaatcatccaaaataaaagatacaattatactagataaaaaaatactactaaaagtacgatcagccttaacaagagaagatcgcgtcaaaaaatatgcaattttatttgcagatcgtttatcaaaactaaaagaaacattaccaaccacggtatgttagataaattaacaattaacccaagatctatttgtatataacatagaacacaataataagatataataattaggtatgtgtacctgattgatccatagcaattatctctgtttgatccaca

SEQ ID NO: 230655 - DNA, 520 bp, Cannabis indica
accctctatttatataagcaaaaaaagtcataagggaaacaaaaggaatctcatcctcatcacacacatgtacagtaaggctgacatgattgtgatttttatctaaacatatatatataaatatatatattactgaggatgttgatgctatgtctcccaaccaccatgtgcggatcttgttattgaaaattatataatacggcatttaatatttttgcaatgcacgagtgcattgaatacaacctttttgtgaaagaagcaatgatcaatccactcagcatagttccgaatgagacaagagaagttacaatagagatgtcattggcgagtaagtttccttttgattccactggtctcctctcaataagacagcagtgtatgcacctttgcattaagcatgtgaaaattaattctaatattgacgttggaatttatttatttcctatgattccattggtctcctttcaataagacagttaagtggcgttgacaccagctcgttgcaaacaaggaaggggca

SEQ ID NO: 230656 - DNA, 1410 bp, Cannabis indica
tgttggatatgtgtataatatattggtatatattagtgatctagttaggattagttgtttaactagtttgattggatcatgacttttttattctatagactaacaatatgttatatatataaatgtatactgtgtatattttgtttttttcgaaacagtctcaaaggagctcatattatgtttgtattagaaccctatttttttactttaaatttatttgattgcttttatttttaaatagtaacagtattcttatttataggaagttaattttaaatttttgaaaaaaatatatataaattaaattgtataatattatttcactatatatatgtatattactctgcaggtataatataaatgattatttgtatttagttaaatatttgtatttgagattttaggtatgttatttcttgctctttttttcttcttcttattttagtcatttctaatagttttatgtttgtttcttagattcatctaaaaaataccaaaatattcaacagtaaatgaagatataaaagatgatgatgaagaggtaattatttttttaattattcaaatattatttactttaactatttccattaatagttataagttttaatatatttttcttatatgttattatagggaccaagttatgtggactttgaaacttgataaagattatgatgacggatgatgaaggttgccatagaagatatatttatcttttatttatggacttttaggatgtttagagtgatgttgaagaactttttagactatcgttcttttttttttaacaatagactaggtgtagtttttttaaggctattggtggattttttatatttcatgtaatagagttattatggttattatttgaatgactttttatgatggttaaatgggtagagggcgaatttaggatacgggcatggggtgggtgagcaatccccggccccgccatgccccatttacgtctctatgggtacccgattggaatacccgatgggaatctttctcccgccgccgtcctcgttttaatttaaacgggtattggggcgggtatgggggtaaatttagaaagcgggtatgggggtgggggagcgatccccgcccccgccccgcctcgtttacatccctagccatgttggaaggatcaaggctacttatacttcgtcgtgcacttcgaaagacaaaaatattgggttgttgttgaggtagacattgataattggcagattcgggtgtacgataatgatatgtcgtgcaccaacaatgaagattttgaagccattatgctaccttggactcagctgtttccacatctgctgaggtcaactggctattacgatgtcaacagttacattctcaatgtggagttaggggagagtagccaactcagatcaatgcatgcta

SEQ ID NO: 230657 - DNA, 673 bp, Cannabis indica
gaaatccgtcgtctccattaaaaaagttaatcacattgatatagaaaaagtgtttatggctggtcaaaattgtttgttttggtggattagtatgtgggattaataatttatttatgttattttaaatacttaattaaatgttttgacagtgaaaatactttatggtactaaagttctagaactttgaaaagtacatgattgattagtgctaggtaagtgatcacatggtatagaatgtttaaattaatttttttttatttaattaaattaatttaaatatataaaattaaataaaaattaaaaatatatttaatatccatttaaatattaaaaattaaaatatttttaagtattgctcttaaaattttaaaaactttttagaaagaattaatgttaacaaagtaatgataatattaaggaataccttctttctttttttaattgttataagggtttataatcttgggatattattaatatatgttagtctttatgtttttgtcttgccagctggcatgtgttagtctttctctctaaagtctttttgtcttttctgggtctattctttttctgggttcattttttctgggtttctattcaccatacaacgtagtttttttctgggtttcctattttgtcttggtctatgtaatggcttctagtagcagatctc

SEQ ID NO: 230658 - DNA, 1691 bp, Cannabis indica
cccaaaattcatcatttgcatgaagagtagtgctcatttattctattctactcattatacatgcttattggagccaagtgatgttgttaccaaagaaagtaattaaagaaattgagactatttgtatatccttcctgtgaaaagggtagcatatgttccaagggtcaggagccattgttcgggaaactgtttgttaagcaagatcagatgggggaatcagttttaagaaagttgctgaatggaataaagctaccatgataaagtatgtgttggtaggagcaaagaagaaagagaatctatgggtcaaatggaaccatagtttatacattaaagatgatgactggtggagttactctgcgcaaaactaggggagttggtagtggaaataattggtagctttaaaagatcaggttagtttgcttgttaatatacctctatttatcttgattaagtatcacatttcaagtggttataatttgctttgtccttcccaaaccaaaatgcaataaagccatgaagtgtgggggagatttaacacactgaaacatatcttgtaacgccctaatctatagggacgccacgtgtgttattttataatctactttaatactaatagattaactaattattaaaaactatgaagatataaaaaatatgactaaaataaaacactaaaacaggcatcataacgacattaaaaatgtattccgaggatccctattataaaagatttacagaagactacatacgataacaattcaaaacacaaaatcaaaatgcacagcagatacaacccaaaacgactcctggaaactcaacacacatgacggtggggtcaatatatacattgctggagaagactgtcacctcatggttgatctagcttttcttttcctttacctgcaccacatagcacccatgagtcacaaggactcagcaagaaaagcaacaataataatcatatagtttattattcagatattatcatttatacttagacaatgaaaattaaatagtcacacattacttataagatgaaatcttaatcacttcaggcatctgccacgaataacatcagtgtacagatatttagtaatacaaaatcatcatacaaaaaaataaagataatatttatttaataatataaattatatatatatgttacctcgtaagtaaatatcttcattatatcacattgcctaattaggcaagtcgatgctttaatgtgataatcctatattatattacctaatttttgctccaaaatatataacatattgtagatctcgttgcaagctacagaaaagtatatagaacatccaaaacgggcacttgagtagaaagttatgacaaaaatacgatttatgatctcctaggaatctccaaaaattgtgaaacacgaaaaatcctaaatattgcactcaccgaaacacccctgaaacctatccaaatcattttaaacttcacaggacacatatataccatatacactatagtctcaatttatccaaaattaaaagaaagcccttaaatagaaaacgtcattaacatttagactaagctttaaaaagttccaaactcgatttctaactcaaaatcatctcaaattaaaatagtaaacatcgaaactagtcccatagctaccaaagagcaattctaggaagtcaaaatctctataaccactctaaatc

SEQ ID NO: 230659 - DNA, 1372 bp, Cannabis indica
ataaaaaaaataaaagaataataataataaagaataaaaaaaaaagaaaaaagaggatatagtgacactttttgtgtgttgttgttactttttcagtcaaataaaacttgactctaaatgcctatagtgacacatagagagtgattgtaaaagggttcagtgacacgtgtgaagtgtcactaaaaagtatctttccagtcactttcattagtgacgcgcggtgaagtgtcactaaatagatttgcagtcactcaacatgagtcactaaaactcatttatctagtagtgcatggtgatcttcatgaagaagttacatgaaaattctcccaggatataaagctcctccaaactcagtttgtctcttaaaaaagagcatctatggcctaaagcaaacctctagatagtggcactccaaactgagctccacccttcttgcggatgatttttcccaatctttatctgataattccttattcataaaacgaacaacaaacatgttccttgctgtcttagtgtatgtggatgacattattttagctagcaataatgatcatgccatcttccactttaaaatttcacttgacaacaagttcaaaattaaagatataggctctcttcgagtttttctcgaccttgaaattggtcgcacaagcaagggaatattaatttcccaatgccctttcacattttagttgttgaaagacatacttaggagccaaaccaacatccttagcaatggaatcaaatctcaaattcagtaaagataaaaggggctctcctccctaaccctactgcataacaaagcttaattggtaaatttatatacctcaccattacaaggccaaatatctcttatggagtaaaccatttaagccaatttttacatgcacctcaagtacctcaccttcaagctactaataggctattgtagtacctaaagagcaccttggtcagggtctgtttttccctgccaacacctctccaataatctcggcatatgcagaaactagtctctctccttcaaatgtttaaagttttcttttttttttttgctgatgctgattggggaagttatcaagacaccagacactccatttcagagtactgtgtttaccttggctactcaatcgtttcctagaaatctaaaaaataacaagttgtttcttgttcatctgctgaagccgaatatggagcaatggaaaacactacatcagaggtgacttggatccttgctcttctccaaaattttggcatatctcccaaaattcttgcattactctattgtgacaacactgttgcacatcagtgagaatcctatctaccattaacgaacaaaacatgtcgagatagattgtcacttcattcgagaaaa

SEQ ID NO: 230660 - DNA, 925 bp, Cannabis indica
caatgaacataattatggccatatttttctagtaaagtttaaccattaagttcaagaaaaattagtgtagtttctctaaacctaggacacaatgaacataattatggccataattatttgtattcgaagcttgattgagcaaagaagtcaaggaaggaagctgcttcaatctaatagtcctgttgaatcaaaaggtgaagaaattttttaaatactatttcgttttttttttttttttttagtaaattgtatttttaaatcttgtttattgcttcctttcgagagagagggcttcaagttcttttcttttatatttgctttaacatttttggtagttataattttaactgtcttaaaaagttgagttgaaagttattaattcacaaaatagtcttgccacatttttttaattgtataattattgtcaaattttaccataaaattaataattccttcataacatacaataacatttttaaatattatgaattaaaaactttcgttgaagtaatttaaagttataatattcaaatatttcaatctatcacccgataaattagaaaacagtagtaatatctaattacatgcaaataaagtttagttaagcttctcagctagcttctttaaatttgagttttcttcttctttttctttctccttatttttaaaaataatcccaacttcttgatcaataacttcccaaataataagaagatttgatgtaccaatcgaaatttctttcatcatatgtgcacgacttattcccgcattgcttttcaagttccaagaagtactgaaagtactcattaggatgaacaacttgcgcctcaacctgtgttaattatcgtaatacaattttagttagtttatcatcaaaataactacgttttatactacaatcaaattaataagataccaaatacaa

SEQ ID NO: 230661 - DNA, 1008 bp, Cannabis indica
tcaattctcacttccacaagcaaaaaacatctacagtcaattctctctcccataagcaaaagatatctacggtcaattttcattcctgcaagcgaaaatcatctacagtcaattcttactcgcacaagcaaaaaataatctacagtcaatttcacaaataaggtatagctagtattcaattttataaagataagcattaataaaatatcttaagaaagtatatatatttcaccaacctcttatctataagcatgaagaaaacacatatctatacacattttttaaggaaaataaagctaaactcttcattacatagatttctctctctttttcttttttttctaagctaatttcaaattaattgttctcatgagaaccaaaaaaaaaaaatagggactcaaaatacagaaagtttaaatttactctaaaaaaaaaaaaaagaacttacagaaattgttggagagaaagaagcaaaattataagccaattttagttaatgcccaacgataagaaggagctcaattgccaagaacttgcaaggtaatcttcgaccatttgattttttgtctgaaacaaaatgatgacttatatcctttggattttgtctctattggtagataaaacttatgctatttttaagctttttgaaaaccattggtttatgatgatagtgggtcgtggcccaaatgacaataataataaataataataataataataaaagtgatattgattgattgtacactcgttgggcaaccccttctcactgctgctactattattatcatttgactactgagctactatttgataatttaattgctactctttctacaatatttctatattgagtgctcattgttctcacaatcaaagtaactaatacttacattgaatcacaaattgactgctctcattaatcaacttatttgaacgcaacactaagagacagataatgattgttgtgaatcctacatgttgactgtgacaatttatatggtattactt

SEQ ID NO: 230662 - DNA, 1949 bp, Cannabis indica
aaaggaggaggtttctggtaatgtgtatttttttgagtcacaaaatacacccattcttgagcatccgtgagctcggtgtactgcgtatactggagcgtataccctctcatttgtctcttatcctcaaatcgcgtactacatttagaagatctcttactctaggaactttggggcgctcctgcaacacttgtggctggtgcagactgagttggaagttgcgcattcatcctagggggattacttacggggacccctaggtgtgacagtaccggagccagggcaagattctgagtatatcccggagtggcagagaactatattctgtttgtttatggggtagcaaggagcgcaactctaagaagttgtgttcctgccgcatacctaatactcccattggataatacccaccataagtcattatctgggcttcttctagattaatgtacttttggaccctcttttgaaagtcttggaggctagcagctccttcctgttgtagctcattccaaaaaaaagtcctagtctggattccaacttggataaagctaactattttccatcgtcgacctttttggtttttgaagcctcctccttgaacctctttatgaaattcttcaaggtctccgttggtagttgttttatgttggtcaaggcgcttacttcgaggttaatcttccttgtcgccactaactgtcaccgaaaactgacttgtagcttgttccaacagtctacagatccgggttctaacttcttgaaccattcttcagcagatccacctagcatcagtgggaaacataaacactttgcatcattactgattctcatgacagtcatgactctattgaatcgggacagatggtcctggcacagggctcccaatcatcgtagtcaaactccgagtcatctcccttctgtctccgcgtgaccctagcgatgtctttgttgaacattgcccattcggctaagttccctcgtttagggcaccttccgacaccgatattgcctgcttttttttttttttttttccaggcgctttctcaagtcaccatgcttatcattaagtttttgtcttaagtcggcagggggatgcttgcgactttttctccctctctcctcgggttcctgatgcactgatacgctctttcgatcctctcggtcctgagggccagtgctctctcgagggagcctgcccctctgcgaacctttccctttcgggaaatcagagcggacttttcgtgaatcttgggcttttttgttcttttcggggaacgatgtaggatttctctttgggtttccttcagagggatactgtatggggttggctccctattcttaggtttttgggtacttagtgaggactcttcttgtgtttcttcaggtcctagaggcacgaccttgagatgcacgtgggttccagctgtttccatagccttttacattcggcaaccacttatctctttacatcctcttattttgttccttttacgcagctagttcggcctcatgattagcctccttttgccttagggccagtaactcggtatagctgccatcgtcgtaagcatcatacccttcctggttttcttcgtactcctcatcattcgtttcgtctcgctcttcagaatccatgtttactcgtgaggctgcttctttgtcccctgggttctgaggatcttgggggggggggacaaggctgacgggtatggttctgagtctccaccattgtgctctagatcttctattgttgtcctctggacaatgcttcccacagctctcaatgaaaagcaccaaaatattgaccgaggttttcgacaaccaaatatctaacgtaataatgagagcttagggataattaatgcaaatacaagtagtttttacgtggttcgggcattaatgagccgtagtccacgagtctctaatattaagaagtgggtgtttcttacagagaa

SEQ ID NO: 230663 - DNA, 1814 bp, Cannabis indica
aaagaaaaaagaaaagaaaaacctacgtgttttcaattatggtggaggttagttttgttttgaataaaaggcatttatagataaaatcaattgagttagacctcacggggggaggctagttaataagtgttatatattactgaaaaaatctgactatttttttttaattctatgttaccaaattttattttacttaattggctacatatatagttcaaagctgcccaaactacaaagaacattactcataattaagctagacacaccttcgatcatattgcacacaaatatgataaaagcacagccataacattacttattaatttatgtttattatctttacattaaaaatccaaaattgtttacccaaataactagaacagtttcaagaatgttagtaatttgggctatctaagagtattttttattattattattatttatttaaaggattagactatacataacatactacatagttaatatgtaaaaaaaacaaatggctatattaatttgaagaggcgctcaatttgagagattttggaacatatataattagttattaatatattttgatgatcatgaatcatgatcaggatcgaggattgacttagcaatttgttgataatattattttatgaaagagcaataatactatcagcataaataatcttaatttatttattgagagaggcatgaacaccaaacatgaccttaatttggtttattaatttgcatgaaattaaaggaagtacctgtagctactaaaataaattatgagtacgtacctaaagaagagatatgtagattccctagacgtgggttgaaagtagaatatcaattaatgcaatattgaaagtggttaaataatgtagtacttttgggggacgcatgtgaccttataggaatggagtcgtatcatataaagttagtatactggggttttttaggagacaaagactaaataaagggcttatagctagatagagagtgtgaacggatggaaaaaaaaattgcatatttgactgactattaattaacaataatactactcaagaacgagtctcgaatcttgaccggttacacgtacaatctttgatttagctaataagctgtctcccatattaagcacaaataatccacaaaccaatatatattatataatgtgtttgttcgtcgtaagtatttggatttgactttaaatgaggaagaagaagaacttgactttcatcttcatccccccaatgctttaattaatttcagtgataatgaaaacaagtttattgttcctcaagaaatatatttatatgtatatatataattgaaaaatgacgtcgataataataaaagttttaaattacacatatctaaagattacatatatgcttcttacacgtattaattaataatttcaagtgatcgtcatgagtgatgtcattgtaaattaactattcgtaacaatattcgttacaatttattaataatttctcggagtactagttttttaacattttttaaacattcaatctcttcgatctgaataaaaaaaggacaattagatttatgagttaaaaaacatatacataattacatatgttacaaagaaaatggtgtaaatgagtgaccaaaaaaaaaaaaaagaatggaacaaattaatgagattctacaacaattgaaaagaattactaaactgtgatatatatcacgcactaactatattattaaaaacaattgagcatttcatattaaaaaaaaaatatatcggtcatatttaatttatttttctaattttagtcatatatatatatagtctt

SEQ ID NO: 230664 - DNA, 1045 bp, Cannabis indica
accaacaattgttacctccccccgttgctggccattcgaacgttataactggaggacctcaccttgccaggaactctaggaaatcatgggagaaatacgctcggtctttcaggcatgagccgggtgacgatgtgttggcggtccaggagcgagctcccaaataaccttggtatgaacatgagtcaatcacgttctctgaggatgacaccaaatacgttcagtactcacacaatgaccccttggtggtagaggtaaaaatcgccaatatgattgtagcaagaacaatgatcaataacaagtcgtcagccaatatcctcttcaagtcttcattggaaaggatgggcttgggaacgaaggatttggaaacctgtgaacgtctcatctatagattcacagaaagttgtatggcaccagctgggctcattaagttaccattgaaagtgggaatagcccccaagagtgtcactatcatggcattattcgtggtattggatatagtatcaccctacaatgccttaattggccgcccagccctatatgacctgaaagcggtcacttccatctttcacctcctcgtccaatttcctaccaaaggtggaattggctgcctgaagggcaatcaaatggtggcacgagagtgttataacctatccattacaaccagggagaaagtagccaaatccctcaaagctacaacaagtagttctcagcaatgaggactcgcccaaaataagacattgatctccattttggggatattgatacatgggttggtccaattgaagaattggaggaagtaccattagaccccaaacaaccttccagattagtcaagatcggaaaagagctttcaaaggacataagatcggcattgatccaattcttaagggaaaaccaagatgtcttcgcctggtcacacaaagacatggaaggaataagccccaccgtgataagtcacactttaaacatcgacgtcgaaaacttcaagccagttcaacaaaaaagaaggttactcgacaaagagagagccaaggcactaaaggaa

SEQ ID NO: 230665 - DNA, 884 bp, Cannabis indica
ttcaaacaaaagacacacatcacctaaacaattaggcaatcccaaccaccaaacacacggtaactcaggagagaaaattagttatgcaagcgaatgagcattagcaatattattaacccgcttacaatgaaataatgtaatagagaaaaaagaatctcacacaaaaaatatcataaaccacaatatcatactcagaaaaattttatttttataacccacactttacaccaaacgagaatatcttcacataatgataacctatttgaagacagagttagagagtaaagcagccgctttaggaacaaggggttcaaaattgctaatcaaaagagtagacattgagaacaaaatccattggcatgagacaacacaaccccaagtctcatcgctcctgtttctgctcaaacaccagcatccaagatcacagattgaattgctccaactggatttccatagacaacaccatccccaaaggcacaataatcaatgccaaatcactattaaggccatgaaattggacctcgtgataatgcataattagataatttgaagcccaaggtcctaccatttcatccttaagaagatgatgctcatgaaccatagtattccagcgatgccatatcatccaacaaattataagtaattcttatactttttgtttacgaagcaacatcatgatacaaccaaacaacaaaatcatagaaagaagcggccactctaacttaattctaaacctcgaatttccctatttttttattgttagaagtggattaataaaatttaatgagacatgtttcctactttatagaatcatatattaaaaacttataaattttttcttttaaaaaatattatctgttcatgaacttataatacatatgttt

SEQ ID NO: 230666 - DNA, 2037 bp, Cannabis indica
ctatagtaaggttttgaaattttacggacaaaaaaaaaaaaaaaatttaaataaaaaaataataataaacaaatatatatattagcatttattttttaccaacttatactctcaattattagacttttaggagaaaacatacaataagtttacaaaaaaaaaaaaaaaaaaaaaaaaacaacgttggtagggaggaaaaataactttcgggtctatacgagagaataatattaataataataaaaatatttttagataataataataataataatgtcttaattattaatatgtctaatcaactaattcattccatgttttttattttgggcaagtcgattattcaaaaagttaattagaattttttttcttgaattttcacatgtattaaattatgttggtaactctcttatgtcagggtattttgggtacaatacatataaaaagaggtatgtttcaaataaaaaattcaagggacatgatttggtagatattaaaatctaagaaacatgatttagtagataaactcactaaaatagtaaaattgaatgaaattagacaaaagtctttaaatcttaccatctcaatagttcaaaaagaatttttaacggtcaaaaatattcagggaacattatttaatacatgttaaaatttaaaaggtaaaaatcctaattaccctattcaaaataataagttacaaaattcacttattttattatttatcattgaaaaaattattatattttaaaaaatgcatgtggcaacaacatgaagagtttatttatattcttatttctaaaacaaaaaatattaaagagattattcaatagtctctgtcttctcttacagcgactttctttattcatcagtaccatatttggtttttatttgctttattgtaatttttattcttcatcattatattcaacctgattcatgagaagtgcaactattttaggaagagtttaaatttagccattaatagcttctattaattaaaacttgagtggggattaatatttatccgtactaaactgtaatatatattacgtcaaaaaaaattatgatatacatatgttttttataaaaaattagtacatagtacttaattatattatatctacacaaaaatttatttacattttattaactatgcaaaatattattaattttatatttttaatcttcatatcactattgagtcaattcgccaacattacactccttttatatttattcttctttttcattaaacaatccattttcatgtgcttcttacattcaaagcaaattagtaaatcatctttattctttttttcttttgagtgatcactccctgtttgtggcttcttcccaaagtttttcttgaattttatgaaccttttgtatttcttggagaagagtgtcaagtctttcatgtcactacacaagagctatcctcatcttcttcactaatggcacgaaaggaggaagacttgaatgaaatagtcctctttttcttctcaactttctcttcttcttaagcactcatgaaaatttcatggttcatgagtgaactaattagttctcccaagggaagtgttgagagatctttgacttcttaaatggcaagtagcaactacctttccttgatagattttagtgagccttctcaaaattttggtcaccatatctttttgaataagtaccttgctaagagagttcaaaccattagtaatagtagtaaaacgagaatatattttagcattggtttcatccgctttcatcttaaagttctcatattgagtggaataaatttagattttagtttcttttatagcactagttccttgatgggtaacttcaagcattttccccatatcaaaagcggtagaggcttgttcaatatttttaaatatatctctatccaaagctagggccagccctaaacataggtgggctaggcccgcgcctagggcctactcattttaggggcccaaataaaaaaatatcttttaaaaaaaatacatatttttttaataatttttaaaaatatca

SEQ ID NO: 230667 - DNA, 1196 bp, Cannabis indica
acatgggctactccactaattgccaattgattttgagatagaacctcataattctcaacagagaggaattttcgagcgctgtaagtttttcatctttttttcttttattttaagcacactgagtagttgagctaagttaaaaaatatctaactttaggttgatctattgatttttgaatttgttaagtctggtaggatttgatctaacttattctgttgtataatgaaataagttggctgggaattaatttcaacagttaaataaccaatcaagaagaatagatagaaaagattgtggtttgaaaagtggaacttgctaaactaatttggccaggttgtaaaaacagtttgtcgagcaatacaactattctcatttaacaataaaaatgtctctgtttgtcgtatatatagaatggcatacagatacagtagtaagtatagtagtatatactgttattattattatttgtttttctactttaatatttgactttttattagtttgacattctcttgaattgaaaataagacagacatccatgcatatatatatctatatgcatgtcagtcatatatgccatggaccagcactaccaaacaaagtaatattgtattgctatgtgtacgtattgttgtatagatggtagtgtgcgtggaccaaaaaattaaagtatatctatatgataatctttttggagaaattaactttatggtgaattattcgaggattcgagtatgttcaaaggtagaacacagaatctatgaatatattatggaccccttcacggtcaaaaagtaagtctctgacattccaattccatctcccccatagcttacccattatatacatataaaagtcaaacacatcacacacatttccctcgccactacatatatacaaagaatatgatttctttgtataaaaataaataaataagttgtagtctctaacgttttttttttttttgtaataataaacttttcctctctttttatagattgtagatagtgaagccacactcattatatatgtcattcttttgattgttttacatctctaaacactaatcttgttgttaatattgttactttacctaatgactatcagattcacatcaataaatttagcaccgtaaaaatatatgataagctaatactaatcgcgatgtgttatatattccagaatttaagttcaa

SEQ ID NO: 230668 - DNA, 1362 bp, Cannabis indica
aaaattattttaaaaaattgaaaactatattttaatattttttgttttctagtttttaaaaaattcagccaaacgatcctattagttcttaaaagttgttttctaatttaaaaagtgaaaaaagtttttaatttatgaaaccacataacttctaaactagtcaaaaaatttcaaaaatttataaagaaaacgatgtcaatataataaatacaactataaaaaaatttaaaacaaaaaatattttaccttgtattttctagtacaaaaatttactaaaaaattataatagaaaattaatgatagtagtcatttatggacatgcacaaaataatgaattgagggcaatacttctataagtagaacacatacatattatgtagtgatcatcatcagtttgtgtcattataagttgcaattactaagtgggagtagtgagtacaggtggtagttggatgtttaagtaagattcattaactccatacataatgtttctggttggatattttttatatgaggattgttattaggcaccagtgatgtctagcacattctcgatatgttgtattgtgattggctagcgatactctttaaaagctattatattaaattatatgagacctaatatttagttagaccaatagcgatattgacacataagagggtgctaaggtattttttagcctttctctttttacatacatttccaggaagccgccaaaaacttatacgaattgtgtagatttctcttattattatttaatgttttgaaaaagtccactttcctggatttgacagaaccaaatataaaatctaactatttaatttaaaagattatttaatttgttatggtctttttttattttttttattttgttctttcccacactaattatgtgaagcaagttccagattagtattccaatggaaattatgggattatgtatgttgattgaattgtataaactatatagtttataaatagaattttccaatcatttctagctaaaaatgattctcttaaaaataaaaaatgattttattcaaaaaaaaaaaaaaaaaccaaatctaatacgaatcagctttatctccattctacacatttctttctatgtgtgtttgcactggtgtagatttatttgtttttttcaaattaaccaaactaattcttctaatttttcaaattgcaattgcgttgtaagactttaaatttaaaattgtaagaactagccaaaaaatacagtacagtgtgagctggttctatttatactattaacaaaataattcaatttttaatattttaaagaaaaagagtaactaatatttaaaaagtaatatttttaaatggtaaaattagctctagta

SEQ ID NO: 230669 - DNA, 1995 bp, Cannabis indica
agggaaaaatttaccgttctaccttttaatgtaatttatccttaaaaagctttagttacttgtaaatgatattttaataaactaatataattactgaaataagtgctcaatcatttatcgtgttaagtcaagcttgaaggaaatcatcatttcacctccaatagtttttttttatcaatcagtaagttcattaacaccagaatttttacacactaccagcacctcagccgaggcctgcacaatcaatctatacagcatacagaatttagaatttcttgctctctataatctatacctgctatttacactatagactattctttacaacatcttatgacaacaatatgaatatcctggacaaacaaccaacaaactacaaacaacaaatagccaaactggcagcagcacaacagtaaaagccacaaatgtcgacagcagccaggaaatcaaacagcagcaggcattcacctcctgaaatgcaaatttaaaaaccaatccttgtcacttagtttggttttgcttggccagcaactcagtactctaagttccacatcctttattgtctttctcaccacctgctcaactgatgcttgctcagaattccacaaaactccattacggacttgccaaatctgatatacaatagcagttacagcagctgataaaacaacttttcgaaatctactaatctttgctcttccgatccacctaatcaacttgttcaactccattgtttccactctccagttcagtctaaccttaatttcagctaagcaagtgtgagaaaaaggacagagaaagaataggtgcttagaagtttcagtttgattactacacaacaagcaggaatcttccccaataatgttcattctatgcagcctctctctagttttgagtctatcctgtatagcaatccacaaacaatagctatgtctagggatatttagtctattccatacctcatgactccaattcactttgtcttttaagggacaaagtgctttgtaaccattagagatccggtaaggagtagttgaaacttgctgaacatccataacttctaagactttgtttttgacagccaccaatcttttccaataccaactggcctgagaagaagcttgatagctccaccaatccactcctttcatatacacacaatgtatccacctaatccacaagttatcttctttattcgcaattgcccaaacatatttaatcatcgctgctgtattccattcggcaatcttttttaggccaatcccccagctttctttggttggcaaagacattcccaagctataggagctgctcccactgacacatgatgacccttccacaaataggctcgacaaattgcctcaatatctctaatagtcttcttaggtaacaccataatttgactccagtatgagtgaatggacataagaaccgattgaacaagtacagcccttccagcaagagacaaattccttgaactccatatcttgatcctggctgtcatcttctcagctagtacagcacattctttccctgaaattcttttagcacaaatagggatacctaagtatttgaaaggtacctcttttttgcaaaacccagaacaatcagtgatgcgttgaatctcattctcagccataccacaacaataaattgcagacttatgaggattcggatggagtccagaagaacttgaaaataacttcaggccttggaggacataatatatgctcttgaaatctccatgacagaacataatgacatcatcagcaaacatgagatgattcagcttcagctcagcacatctttcatgaaatttgaactccgggttagaacctatcttcagaagaattcttgatagatactccattcctagaacaaataggagaggagacattggatcaccctgccttagccctcttttcccttcgaagaaaccatgtaatgatccattaaacatgagtgaatatcgaggagtacgcacacagatcatta

SEQ ID NO: 230670 - DNA, 2093 bp, Cannabis indica
tatcacaatttaggctcaaatatagttaacaaaaatctacgttaacaataagaaaagtaaagtcagtgtaagaaatcctaacaaccttgctaaaggaacaagaaagaagaaagaactaatagaacctaactgaaatagttgttaactaaaaacaattaactactaatgaacttaccagtactagaaaataacagagtaataataaatcttaatcttgtcaccccgtctcaagatggatggtataaatcaaaaatagacatcttgataatatgagaagtaagtattgtagaagctaatggcttagtgaaagcacctgcaagttggaggctattggaaacaagaattaattgtattgctgaggttttaattttgtcacgaatcaagttcgatgtctttagttctttcatagaagtagaatttttagcgatgtggatggttgactagttatcacagtagatgaaggcttgtttagtttgtggtattttaaggtcagtgaaaaggtattgaagacacgtaatctcactagtggtggctgtgagggctctatattatgtttggaatttcttgagaccttcctgaatgagagcatcaaagagtttttcgtactattatctggatgattgtcgtagtccgtaaattgacttgtgtagtttgcataccagattggattctgtagaaaaaaaagaaggtaatgttagtccaggatgtaattgcacataaacttattcattgaggtcaccatttaagaacgcattgttaatgtcaatttggagcatgttccatttctttatagcagaaacaaccagtaaaagtttaaatgtgaccattttagccacgagagagaatgtgtcataaaaatcaagcccttcttgttgtgtgtatccttgagcaacaagacgagctttgtgtcgttcaactgaaccatcactattgaacttaatttttatacacccaataacatccaatagctttctctccaggtggaagaggtacaatagaccaagtctttttgtttctaagtacagtgagttcggtgttcacgacatcaagcaattgtttgatttgtattgcttgcttatatgtttgtggctcattttgtgaagtaactacaagtatgaaagccttatatgagttagcaaaacgagtataagaaataaatttatttaaggatgaggagtagaagattgattttcaacataggatagaaattgtggaacaatattaagtgcatcaaatttttattttaccaaatagatccatgtgaatcttgaatgatcatcaactaaagtaaggaaaaacttgtgtccagaatgagcaaaaatgtggtaaggtccctaaatattacaatgtacaagatcaaaagcattacaagtaaatttattattgctacaaaaaagaagtttcttttgcttagccattggacaaatataataggggtgtctttgtgtaaagcatcaacattacatttcagtttattactaagaagattcaagtgtttagtagaaagatgttctagtttagattgccatatatcagcatttattggaaaaatagaaaaatcattagatgaaggccattcttggattcatctttgccaatcatcctcttgtggacagtgtcatgtataaaatggttaataaagaatttaacataaagagaattgttattagttaggaaattcacagatatgatgttgtgtttgaaagaaggctcatataaaacatcattcaaaaacaaatgtggtgaaacaatagatccacttttgctaactaacagatagtcattatttagtaataagagtcttgtgggagtagtactgcaaacaaattggaagagctttatatctgaacatatatgtcttgtgactcctaaatcaagtatccaggtccaccaacaggaaacatagacatattggaaagcacaatacatgtgttacctggggatgtgctaggatctgttttagctataccaatttttttgtccagctaataggtttagaagctactaatggtgtgtagtggtgagttggggaagcatagcttgattgtcaccaaaatactcccatttcaaggttggcttgtactttgttggct

SEQ ID NO: 230671 - DNA, 1680 bp, Cannabis indica
tggataattgattagctttttcaatgataaagtttcaacctttataaactaaaaagtctaatttcttaaaaatgttcaaaactttgatatatagataaggcaaacttacaaatccatggcacggtagtagttaagaggaccagtaaaaccagactcctcaaacttctcaggaaagacttgaagatcttcttcggttatccatggcggcaaagaccaaggtgtcctcaaataatcaattatctcagtatctggaggagctacaaaatcatcttctgttattgtaaagaatttcttcatcactgtcaagtaatcataccttgcaaaggctctttctgctcttcctggttcctagtaactcaaaactcaaaattcagtaacagagagtttcatagtccaaccaactaaccaactacctaactaccaatccaagaaagtcaactttttgaaaaagaaaaagggtacctgaaactgaataatatgacagccatctccaatagattttctaagtaattcagtatctttgattgttgaagatcttggtcgatatggaatacttaaagctacaaaacccattactctatcaggcctaaaaagactcacatgccaccctgcataagctccccaatctattccaactaaatatgcctttaagaagaaaataaaaatcaaagctttataatcagataagagaagaaacacatcagaaagatcagattttaataatgtgttgtgtattgtttaagaaccttttcttggtgaaaatggtccatgaggcctatgatatcaccagctaaatgaaaagttgtgtatgaagatggggtgagaggagagtcagagtctccatagcctctcatgtctggtgccactacatggtaaccatggttagccaagaaattgatctggtggcgccaactgtaccagttttcggggaagccatgaagaaggataacaaggggacctgttccttgctctgctacatgtatccatatcccattgctcttgattctttggtgatttacctcattcatgttcctccttgaactttagagagagagagagagagagagagagattgattaatggtctgctattttaaatctgtaatggtgaattgaatgttgcataataaaaattagaggttgttggattagatgagttagagggctagaagagtcatgttgagaactttgacatcatagttgagtgtttgactcgctttcttttcttggcaattttcagtctcatagaataaactcatgttcaatgttttctctttacttaaattcaacaattgtataaatatgtcttgtcctctgacatggtttgtttcgtttaaggttgtccctttgttttaaggttgtccctttgttcttttctggtctggtttttgtcttttctggtgggcttcatggcatccagtagtaggaatcatgaagatttggttgatattacccttgaagaagaggattctggtggtctgttttgtgaggagatacaggaggaagagagggtagcgtttgatgcacgttggtgtttggtgggtcgtttcctcaatgaaggttcagtcgacttcccggcaatgcagcagaccctagcagcattatggaaaccaggtatgggtgtctatattaaggaacttgatggtggtattcgatacttgtttcagttttaccatgagat

SEQ ID NO: 230672 - DNA, 4985 bp, Cannabis indica
agcggggacgttacacttaaatagaaaatcatttccttaattagaaaataatttccataaataaaatattctaatacaactttctactaattcattattaaataataatgaaaactatgtcatcccatattaaaaacaaaatgaaatcttgagatatataataaagtaatgttctttttttttttaattttaattttttttttttttagttgacattattttagtacaagttggttcattgattcattcatgtgtgtctgttcttgcattttgatttgaaggtcgaaacctcgtcgttttgttcttcttttgttgttttctttctttcactctgttcgagactttgaacaaaattagactaaaatgccagtcacttgttttcctgcctcatcttcttcttcttcttcttcttcttcttttttctttctttcaagtttcccgctctgtaaaataaaaatgtcatttttattttcattgtttttgttattataattcaaagattcaatttttatttctctttaagcttttgaagatattatatgtgagtcatgtgttgtaactagtattgggtgttattttttttttttatatttattttttgtggtagtaaagtattatgttctttcattttcttaaaaagtaaaagagagaaaaagaaagttgaagaaagatgaaaaccagtgtaaggactaatcttcaggccatgaaagctgcttcttcaaatcatattgataaagtaacttcctttattctttttctaaatgtgatttttattgggttttaattcatttagtttattattttctttgaagaaatgtggagcttcaaattttcaaaaatactcttaagaaggtttcaaatctggtgggtgtctgattagggtgttgaagttttacttgaaaaagaaaataagaaaattcaaattggttctgtattaaattttacattaaattctcattaataaacacagtctccaattatgtacttaatgaagttaaaaaaaagtgaatgcttttgatccaaatctgaattggtttctctctttctttctttctttctttcacttatctcaaggaacgaatagctttttcttttataatttatttctttacaacaaggcatgcagatccctttttcatttattattggtatataatacattcataacattattatataattttttttgtgtgtttggtgttgaattttccaaaggagaagatggagactcaggggagaagagtggtcattcgttctgagaaaactctaaccaatagaagaagaataaacaaggagaggaaaatggccttgttacaagatgtactacacttcccaacttggttttttactctttttttatatttgtttctatattgattgtattgaaaatgatatatttacaggttgataaattgaagaagaagcttagacatgaagagaatgttcatagagctttggaaagggccttcacaagacctttaggagccttacctcgtcttcctccatatcttccttcatctgttagtattataatcttacaaaatatttgattatatatataatgtgtatataaattctagcttagtattcgaaagggtcaatgaaaatgtttgttttttggttcagacattagagcttcttgctgaagtagctgttttagaggaggaagttgtaaggcttgaagaacaagttgtgaattttagacaaggtctttatcaagaagctgtgtatgtatgttcaaagaggaatgtggaaaattcaagtgattcttcttctatggatcaaaccactcctgtaagaaatgctaagcatcataggtcgaaatctatgtctcaattcgatttcaattcagcaacttcttcaccagcagcagcagcagcagcagccaggtctcaacaaccttccctttgtagaactacatcaagtagaaagttactccccaatgatgccatctcagtcagatcaggaggttgttctgctagtactagtactactaggcaagggcaagggcaagctaataataataatggaaagcttagtactcgaaaactcgaaccaattccatccatttcagaagatggaagaggaaaagagaataggttatggtcaaactttgtaagagcatcccctgagaagaaagttgatcataaaccatctcctgataagagaaatactaaaatggtggtaaccccagttaagaaaccaccaatgaagcaagagccaaaggacaagactactacttctgatcaattcaagttgcaggtattgttataactaatataaaactttgcttcttttgtttttggttgttgttgttgttgttgttgttgtggtaattgtatcttttgattgtccagctagaatccagattggtagaccaggaaagagctaaagacagttcatctggatctttagaagagggagcaatggaagctgactcttctcctaataaagtatctgaggatattgtcaagtgcttatctaacattttgatgagaatggtgagcacactgaaggacagagcagttgaatcagggagttctcagttgtcatttttcgctcggttagcaaacaaggacatcgagtttctagatccttatggtacacctttggattttaaaaatagagatgttggtccatacaaacatctttgttctatcgatgctagttcgattgatatcagccgaacaaccaatgcattgttcttgatacacaaactgaagtaagtattattatgctcccatttgactaattttgattgtgtttggatttattctgtacttaccattgtttacttaggtttctacttgggaaacttgcttctgtgaacttagaaggtctcaaccatcaacaaaagcttgcattttggattaacacttataattcttgcattatgaatgtaagatgtctctctttttatgaattgtaacaccaccaacaaattcaatgtattatgaaaatgaagataactaaaagttgtgttaattaacaatgttgtaggcatttttggagcacggtgtacctgagactccggaaatggttgttgcactaatgcagaaggtaagaacagttcttacttcatattctatcttttttagacttgaatatgaatgtcaatttaaatgacattccaaacccaaaaattactcaatgaaatatttttaaaggtgtaaagttaaagcatgttagcctcagagatctctatgtgcttttgttagagaatgattatgaaactgtttcatcttttcttacttcaggcaacaataactgttggtgggcatttacttaatgcaattacaattgagcatttcatattgagattaccttaccacttgaaatttgtaagcaaaactcaatatagtcaactatgttcttaatgattattttgagctttttttattatccatggctagctaagctttaccatgtaattctctttgttacaaaagacctgtccaaaagctgcgaagaacgatgagatgagagctcgaagcaaattcggattggaatggtcagagccattggttacatttgcactctcttgtggaagttggtcctctcctgcagtaagatttccctttcttttcacattttattacagctcttcaagtcttttatgttagattagattagagctacaataagtttagttaaagtttctaaaattgatattatgaaatgaaggtgagagtgtactctgcttctcaagtggaagaggagttggaagcagcaaaaagagattatctacaagcaacagttggtatctcaaaaacaaacaaagtaatcataccaaaattattggattggtatcttcttgactttgccaaagatatggattcaatgcttgattgggtatgtctacaactaccaaaagaaacaaggaatgaagctatgaaatgccttgatgagaggaaaggaagagaaccactttcacaattggttcaaataacaccttatgatttcagtttcaggctgctattgcaccgctgaggttttaatgtcattttactcttctcttaatacttaatagtttgttctgaactttggatgtggtaggtttatacctgatatatgttaagagttgatcaaagggtacataattccagcttctttttttttaaaaaaaaaataaaatgaaataaaattaattatgggaggatcattacatgagtccttgaaaatgggtttttgaatttgtatttagttcataaatatggacatgggaatataatatttaatataaataaatgaagttgtggaggcttcttcttcttctttttttaatagtaattttgacataaatgaataaaggaatagtactctgacaaaactactaaattgtttgaggcacataaattgtaggatttgaaacaagtaatatttgactggaaataattgtgtaactgattactgatacaattagagaagttcatcccaacctaaccagcaaaaattgattttgaaaacttaacttaaccaccatgtttcggacttgccttgccagttcttggttgctttaatgaatatctttcatttcaaaacaaaaaatataatcttttttttttaagaaaatagtaaggagcaacgagctcaaaggggctgagaactagaataattcattaatgcatgacatctgttaggataaaatttttgatacaacaaggataatcagatcactatactgtgcttgcagtaattgttagagcaaatttagctaaggaatcaactaccacatttacaaatattttaggacaataatttttttcttaaaaaaaaaatgttcttggacagtaattaaatagttagagctacgtgatctgaagagaaaagaccataagttgtacaatctcacattgcttgggaaagatcatgtgtgatgattttgagattgtgtaggtatgggactacatagttgaagatgacttaaacggattgattggtactacctatataaacaaggtgcatcttgtttttcggtagcccat

SEQ ID NO: 230673 - DNA, 1135 bp, Cannabis indica
tttatttagggcacaaaacacaaaacaatttagggccaggccttagcagactttgtagtagaatgcacgggcaaggaagaaagcgtatcagaaaaaaaccctaagccaaaacaaatacctcagccaagtaacagtgaagacaagccgacttggaaactacatgtggacgggtcagctacagatcaagtatccggtgcaagaatcgtcgttgtcacacctgggggacaacacctgcacgctgctgtcaagtttggatttatggcatccaataatgaggccgaatatgaagctttgatcgccggtctaaaactagcctgagaaatgaaggccgaacatattgagatctgcaatgattcataactggtggtaaatcatgaatctggagaatacgaggctcggggggaaaagatgatagcgtaactaagcaaaatacactactcgagtgtccttcggacattctaaaattaatgacatcagaattgattagaaattgaatatttatcaaaaatgtgggaaattgatagtagcatttgaaaatgatcacgtgcaggatgctgtcagcattccaaaaggcacatcgcaagtcctatcttaaaaaaatataaaaaaacaacttggggataaatgttatctgagatttctctctaaatacgtggtagtctaggaagaagacaggtggcaatgagatccatattacaggacacatcacctatattactcttggaacccattatttgcaaggattagtaataagttagtcatctctaagagaatctagttgctttgcgaggaactcttgcctcttccgctctatgagtgaagtacatatggagagtgggacaagagtactaacaaaagatgacatgtcactcaacgattgagacacaatactcgcattttatgcgagatgggaaagagcgtcaaacaccttactctgccaagcatttttaagtgtttaagcccattattctctcattttacgaacctccatacatcaatcgaagactttataaatgagttttgaagtcataaacaagggataaatcacatcccaccaaactcctataggcaacttaaaaatcatcataaagtaggcaatgatgccctaagtcagagttgggaaattgtgccaagt

SEQ ID NO: 230674 - DNA, 1093 bp, Cannabis indica
tttcagatcacatgaatggttcacattacaatcctacaactcccggactgtcttcggccggcaaacctccccaaacaagtagcttatatcagcaacaagcttcttagaaaataaacagtccatgaatatatggctataagattccctttccaactcacaaactgggcaaagctcagagattgtacgcaaaaatgtaatcaagttgtctcgagtaagaaggtgattattacaaatctagcaggtaaataaatctgtgtttggggaacaacgagtttatgccaaactgatttagcatacacaacctttggggcatcaactagagaagagtagaagtatttggtcagtgactttcctctcctaacagcaagtaaaatgtcagtcttcactacaaaaaactgctacttttagtgataactttttggtcacaacataatttttttgtaactaaatatgacttttagtcacaacagaattttacttgtgactaaaacatagtattttggttacaatttgtcactaatttagttttagtcacaacaattattgttactaaaaatacatttagtcacaacaaattataatttttgtgactaatactattatccacggactttttattcacaacacgtgaatcatgatttataattagtaacaagttttgttgtgactaaaagtaaaaaaatttagtagtgcttatcagtatgtttccttagcctcaaaatcttcttgaagtactagctcatatatcttgcttgattggaatatcccacagatatcgatccttgatataaattgaatcgacccatctcacccatagactatcttgtttgctagagatagcccgaaggtatttgaccattaaagtcatattccatttcccccttcataaaatccaacaccaccaagctttttcggaagacaaactttctcccaagaagtgagatgaagtttactcttgttgccatgtttacccccacaggaagtcagacaactcttatcaatagcagttgtaactttgtaaggtaagataaataggctcatccaaaagttactgatgcctaagaggaccaaatgaatcgattgggctctacca

SEQ ID NO: 230675 - DNA, 804 bp, Cannabis indica
attaggttactttcaggttacaagttattttttatttatttaaatgtaaccatgatggttacaataaaaatgtaaccattggaacctcttccatatatatatatatataatatatattgtatttctgctgaaactcgagtgtaagcattgcacactatatttgaattctagaagagtatctaatacaattgaacttaacatatctaagaatttaataatattaataatgtgatcgaagtcgaattgggagtcctttttcaggagtaggcatcatatcgcctacaatattctcgtttgggatgactagttcccactcgaacctcttcaccacattgtgaacgaatgtgagaatggcaagtctagcatactctttgcctggacacatacgaggcccacctccaaatgggacaaatgtaaaagttggaaaagtacttatgtcgtcgtatcgtgatgggtcaaatttttctggctctggaaagtattgtgggttcttatttgttgtactcacagtccaatatacctatacacaaaatcatatgtgaaatcaaacttaacttagtttcacttgaaaattcacacgtgttattataagttcataacattcaattgcatcccaaatacacaaattaatgatagattaactggaccaaatgtggaccacaatccataatgaaaataaaattgtttgaatatcatatttacagagtgctctcatcttcttaattgtgtgggtgttaaacacccaaatgatctatctatttaaattgagaattgagctagtttttttttaggattatttcacaa

SEQ ID NO: 230676 - DNA, 745 bp, Cannabis indica
ctcacatctatccaactcatgacctcgaagaagacaaaccccaaccatttacttataagacttcttacacggatgtggcacttgggagaacccaaaccaaaacaatctcactttctctaaataatttgttataaatatatatatgagtaaatacatgtatatttttaatttaattaaccgtttatgttcattcttttctcaattcttcgatctttcactttcacattttaaagtctctcaaatcattaatactattatcacccataaatggaatacacttgttgggtatgacttaaattccttctgaaaattagtccattattgtttatttttctcccttccatctctcccacagtttcccctgcaaaccctaataaagtcaacaactagttctataaaatatctaaaaatggaaagagagaaacaacctagaataatctccttgtctcctgtgtagtactacctatgccctagcaattgttaaggtttctagggggatatatataaacaagtcatacttttatgcctctatacataaatatacatataactaaatctaccacagattattaatttacttcaactacataaatagaataatatatatatatatagggacaacagtactgacgaaaagccagaacttaattacacacacttgaacaagaaacacaagatgggttgataacacctaaaaatcgtgatgcaataatattctcctagtgaatttataaataatttataa

SEQ ID NO: 230677 - DNA, 2994 bp, Cannabis indica
taaaattgttgttgagaattaaagctagtggcaagagttatattttgtgtgtggggtttctttagggaaaaatttattgtgcattgcataggtcctataaagatcaatgtgtttagggtggtttgaaccgaaactaattttccttatcctaccttcaccctagcctatcattacaagcttggcaaagttctattgatccttggagtggtgtgtgtctacattagtggagaggaagttgttaggtaacctatggaggcatcatttgaacttgaggaccaaggtttagttaaaatgctagttgatcgaaattttttgggaaaagctatgcttacataaaagggaggagcacttgatacctactttgggcagcatcatttagacttaaagattctggtttaaagtttgagtaagatcctcattcagcgtatcatttgcaaaattattctcaagagttatttccccttgtgtgcattgacaagataaattgcatcctctttcgttgagtatttttattcatttcagttcatttgtttttgttttccgttaggctgtatgtttgtcctgtttttgtggtcttgttctcatcactcgaggacgagcaatgttttaagtttgggggtatttgatagctcttgagtaacgatttatttgatatcattttaagctcatatttttatataatttgtgtttcatttaagttattttatcttttcatttgtaaaattttcagtgttttatgctattatgtgtattttgaagctgttagtaagaaattaacaacttttgtttataaaatagcaagaaaagagcaagctagtcaagttattaattttgctgaaattctgtgaaatttttgctgtagcaaatgtagcagtagctgattgttaaagtacatgaacaaaaatgacgtggcaattttggggatgacgtggcgttctaagagtggtggctggagcaaatatttggagagattagatccatgccatgtgtagggtttatttttggtaaagggtacaaaatctaaagaccttctgtacaagatagcctccatcagaaagaataggagaagaacaattttctccatagaacccctattcgtacagagcaagaaatagagaaaaaagaagaaaatggaagagaaaataggatgacaagaatatttcatcatctacctttggaaaacttctcctccattgttgtttgttatttctttcttttttcttttctgatatctaactctaccattcaaactccatagctgaattttaaattgtaatggttttttataagttagctatgagctaactttttatggtttgaattgttaaagaaccctgtgttttagtttagtaatttccttatgcacatatttagtaaaaattctcatgttcattcaagtgtgctttatgttaatttcttattgtatatttgccaccaatatcttgatgttaagttatatttaattctggaatggttaaatgtaaaggacttaacttggatgacacaagttcttaatcttgttagattagattagagataccataggaatatgttatgtccttgtgtaacatttgagaactgtgcttgaaaattgtattcttgagcttgattggcataggaatatgttgattaggttcaaagattgatgtcattaaatttggaagagttttatgcactttaatggagttcttgttaacctgagattttcgctaaggttttgctaacgttttactgcatcaaaacgcacagtttctactaaacatagggagattcaatagtttaggcctttcacattttgacagtttacaattcatttttattttcattgtgcagccacttttgagttaatttactttctttccagtttatttcattaaagcattaatcattccaattaggtttttgagcattttgcttggtaatgaactttttcaatagaaattttatttttacagtccttgtgtagacgatacttgttatttatcattgtattacttgtttgtgactaggtgcacttgcatatatctaatttttcagaatattaatccttcccgcccatagacatacggaggaggtttggatggccatggtattgccaggtcaatcctagattgccatgatcattccaggtcaatcgtagccagcaatggtcttgctaggacctggtaagtcatgtgcttcctaggatcctgcaggttactatgacttcaccaagaggaagccatccttttgatgtggaggcgagcctttggcaagtggaggatagctttgaacaccgtttccttgtagagatcaggttcccttggttgaacaaaagctcccttggtctgaaagtcagtttttggctggccagcttgtgcgcagatcttgaccagcctataggcttacactggccagcctataggcttcctttggctagatagagatgttggtataacctctttagagctcacttcactcattttggctgttacttaacagtttttccatacattgtatggaggccctctcttgctaccaataaggatgtattctatctgtactctgtcaatagcttatgtggacatgccatgtcaggtggacaaaatatgggataacatttacccccaagtccctgttcaaacatccggtctgatagggactttctagcttttgtcttgtttgttgtagtctctgttgagcagccttgtcgagccaagtgttggctttcgcatggcatacttttggatctttcattttatatacatctcatcttctcttccaagatatctcctctttattcctgccattaacaagttttaagctttttaagcttttgaaaactttttgattctcatgttagtttgtaatctcgttggtatattgatcctcctgatagttttagaatgtttaatgtgttgactttttgatggaaaagattcaactctaaccttcttcatgattcttgactctttgagtcataaagaatacgaggtttatatttgagttttgaat

SEQ ID NO: 230678 - DNA, 2478 bp, Cannabis indica
aaatccatctaaagagagttgagagaaccaagaagcccgattacccacatcaatcggtttcttttgcagatcaagcttatgtgggattaatgctcaaagaatcaatggctggaggtatttcgatccttatattcatatagtgtatatgattaattccgcactttatacttaaacatatatatttcagtttatacatataaatgtctaacatagcctactccatacgtaggactccttttttcattcgttttttctttgaaatcctgaagttttgaaaatttgtcgtaagatctgttttgttatgattgctgagattggaattttcgttgaccttgttaaaatataatccaaaggagattttttatcttctttttcttttttgaagtttagaaggatgaatttgtgagtgcaataaatgaaatctttgggtctacttgaagtaatggactaaaattgaatattgtagtaggctttggtttttgttcccaattctaatctgagatcagtcccaaccaagtatacggctttgacattgtctcatctaaaagtccagcccgcagtatagctagaagctaccagctaaatcatttggtttggattgatgttaatttactcattatagcaacgtgattccgtttcgtcttatggcattttttttttgtttcttccctgcttatatttgttttattttttaaggaatgaaagtactaatttgttgaatgagttgagttatgacttttgtgcttttcaaaatttttacggctattatatgcctggaatctaattatttagggtaattagagtaaaatatcaagatatcatgaaatataaaataatataaaatttaaagttaaaagtatttgcacatattttactaattggttctaaaaggattgactttggtaaatttatgatttaagaaaaaatttaagtgaatctggtattttttaagaggattaaagattaaatagtaataaccgtgacttggtatgatttaaggaaatgtctaaaaaaatttaggtattatttaagagaattaaagatttaaatagtaatagatatgatggcctaatctttaattaggatggattggaatttatcaatttacaaatagggaagttgtaaaaattatgagtaagatataatatggaaattaattaagtaaatagagtagtataaataattaggagggctctattattagatatataatcaaaaataaagaaaaattaaattataatactcaaattagatagtgattatattagctaattcattttatttcaatttctagaaattacaaatgacaataaatatgagtttggttataaaatttataaataataaatgtggagattttgtaatcaataagagatgggatcattaatagtgaattgagaatattttatttactttattattggaaaatattgaaataatgtgcagtaaaggctaatgtagtattgatttttgtcttttttttttaatttttttagttgtataagaagatgccaatttaaataaatttttataataaattgaatggcctaatatttaagagatttgtcagcctatttatttaaataataaataaggaattattatgtcaagaaaccaaattgaattatggtttattaattaatattaatttagtatgtattgactataaataagatttttactaaaaaaatagatatataaaacaattttgccttgttgtataaattataagtatggggatttagtaatcaatgggagatgtgatattaaatattgatataatagaaatggatcaagtggtaatttcattatacagatagtagggtttaggttcattgctttttactaaatttattttagatgataaggtctcagtaagggatagtgactttaagaaagttatgaaatagagtgctataattcagttgctactagccaaagggtattccctttggctagttttattaatttttagtgggattttggttgcttagttcttgttatttggtaaattttgatcaattggataattttctaataaaaattttgttttgggttttttgctatttttcaagtgtatttcaatgagctaggagcgttgtttgaagatgttatagttttattgtttaaatttccgggggcagttttgtcccatgtggctcgctctgagaatttagcgacccatggtttgacaaagcatgctctacggtttgacgatgagctatccaggtttgaggaggttccagcgtcggtggcggacgtttgcgtcgtaaattcatgagtgattctaatcactttgtaaaaaaaaaactgggtgggctttaaattcccaatcctgtgtaagtaaacatgcataccaaacagcccattagtgtttggggaagaaagtagcaggcccaaatatgtgcgtaaagcttaaattattttacttttttataaagggtcgggttgggcccggattgggttgattgggttaat

SEQ ID NO: 230679 - DNA, 1872 bp, Cannabis indica
ataagttataaaatattattaaaaaatataaaatacaaattaaacgggtcactgtcagggcggggagtatgattcccgttctcaccccgtttagcattcggggacaaaaagtaatcctgtccctgccccgtttcccatttagatggagaattcccaccccattagggggggtccccacggggccccatccctatgggagaaatgtgcatccttagttgacactaaaaaatggtcaataaaattaatgtgttaaatgtttaggatatggatatatggttagcgaggaaattaatttgtatgtgctatcactacaagggaaacgcgttttagccagcacgtttcaacaaacttgaagcttttttgggaaattttttttttttttgaaatttttacaccacatactaaaatttttaattttttttttacttttttactgtggggtagaatttttttcaaaaatattgtgttaagttttcacagttgttctacggttgtttcttaattgttccactgttgttttaattattctgttttgctgttttacgattattttataaaaagacagtatttttgtaaaaaattccgtgtgacagtaaaattataaactttccctcaaaatctaatatttttgtaaaagtcccttttttaggattttagtcaattataagtggcttggggtaccccaaaacttagaaaaatttaatctagcttcttccgtaaaatcccttttacctagtgtcacaaaaaattatggacaaaaggatgcttgcaaaagtttgaaattttgtgggatcttgggaaattttatttaaagcgttagaaaatatttattattttgaaaacattgaatctttaattagtttaggttaaactatttgttatttaacaaataatatatataataaaattaaaatgtgatatattatataataatataagattaatgtatattatatatttaaaaattaaattatataatatatagtttaatagtacacataaagttctaacacatatgtggaattacaaaatttcaaaatagttttgtaacttaaaaattacatttgattatttgtaattaagtacgtaattacatgtagaggttataatcaaagggagatgtttctagctgttagagatctttaatggagacctataaatatgatgtattgctatttttagaatattttgctaaaatttaactccaataatgatgtaaaatgtgtgccaaatttagcccaagctaaaatttgtgccaaatttggcataaaagctagtatgagtcaaattttaacgctcacaataagtattacctttttaattacatttttgtcacttattaatactattcattgactttgaataagatatatttataagatattaaaataatataaataaaattaattattttgtttatttttatataatgagcatcaatggtaatattgatttttatagtcaatttgcaccttgtgcattgaagcacaaatacaaaaaattgaccaaatatagttttatggtatattttggactaaatttaaccctaaatatacacaatctattggagatggtcttagaaaattttccaatgctcatttataacatgtataattgatataaaattaagtgagagtgatttggaatgttttgaagaacaattgacaaaagttgaagaaaatggtaactagtaactagttaatatatttttaagctttatcatgagtgcatttttgaacgttggaattgcttctaacatatccccattaacctctaaataacctaattaagtctatttacagttaattaaaaagttggtaacaatatggggtataggttttggttcacttttgacatacacttgttttctat

SEQ ID NO: 230680 - DNA, 1027 bp, Cannabis indica
ttttttcaaatttcactccctattttagagaacatgcatggttggagatactataataatatttacatcaaatacgagaaacttaagttatgtattttaagaagaaaaatatatatattttttaattaattaaaatgtatatttttatttaaaggtggtacttatgaacaaaaaaaaattagcttaagttattaagttatgctccttctaacttttgaacttttttttaaattaagcgtttatatattacaatacataatttgagactcaaattaagacattaaacacacatgcatatgttacgaccacttaagcaagtccttgaacacccctctctatggcaccgtttcactccgaagcagcacaatagtctctaatataccattctagtcgtaaaaaaataaatatgacccattaatagaatgtgacaaaattcatgagatcacatagtttattatgtctgactatattatatagaaagctacacaaacatgttcccttaattttcaaggatttcgtatttccatgtaacattttagtgtgtttacatagaaaatgcaaaggaaactataaaactggaattgggtgaaaaaaaaacaacaattgaagctaccaacgaacagaacgttttatacaaaactggtccaaaacaggaatttgaacaatacaaatcatgaatctaccatgtgattatggtcttttactcattcatattctacatagtaattgctggaaagatatggtctaagaagattcagcagcggctttttcagctgcttcttcctctcgaaacttcttcaacgatggagctggccttacaacaatgcttttcttccattgccggtctagctttcgggacaatctcttatttattccctcctctagttctctttcccttcttacagtaagcattcgagcaatctatttaaaataaccacatttgcataatcagtacaccattagaacaaaatcttgaagagaaaaataaatatctattaaaggcttataaacaagctttagaaattca

SEQ ID NO: 230681 - DNA, 1899 bp, Cannabis indica
ttctcctttccacaatatcctatcacacctgtaaaaattaaattaattttaattatcaaaattttgattgtaacaaataaaaaatacttgcagcataaatactcatatttaacttccaattgtagataaagacttaaattataattttgtaacttcggtaagtaagtgtcaagtaaatcgtcaagtggtaattcttaattggtctaggttataaattttttatttaaatattaaattaaatatattaataaaaaaataacacatgaatggtgacttaacatttaataagtatgcacataaattctaaaaatacaacttaaatattattacttaagtatttacgctaaaaattactttaagtaaatgcacatggttttgtttataatctcaatattattataccaaaattgtcggtttattcatgttacttttgtttattaattaatttagtttaataatgatagttttcacatggactgttctcaattacatcttaattatataaattaatcatatatatatatattatatatatatatataaatactcaatgataagtggaagcttcaactaggcttggtgatattattattatgattaattaatattaaaaaaaaaagaaacatataaaaagaagagaggctggtaagtaaactgtcatgaacagagcaaaactgcagcactaaacatattttataataaaaataataattatattaatgatatatattatagaagaaagagataatgataagtattggtagtactaccacaacttgttcataatttcattggacaaataatatataaaaattaatgattaagacttaaagttgaagacttaccaggcaggtgttctttgtttgtgtttggatttatttgatgagatttgattaacataataatgatctgaattagtaacatatttgtatgttggtgcaaaatctattaccccttcttcccaatctttgaacactctcccttctctttgttctttccttagctataatatcataaaaaaaaattaaaattaataaaaaaaattaataaaaaattaataattacgacataactactcaaaattttgagtttgtaaacgatattatattatcttatatggattaaatataaaaaatattgagccgtatataagaatataggctacttcactcatcgacaattagttttgagatgaaaattcatgcaccttaaatctaattatttatttaacggcataagtatttaatgtttaaaaaattgtaatttttgttcagtttcgtaaatacaaatttcgttttaaatttatcaaaagaagatttgagcgtaactcatactatatgttcccgtccaaacttaatgattttgaatctggaccttatatgtgtcctgtttatttaagacactgtactaatgaaactgaaagaaaattacatttttactaatattagttacttgtgccactcaaaaaaaattatcagatttatgccacttacaaactcaaaatttaaataaaattaatcaaaattaaaatttacctgatctttctccaaaagtgtttgccaatcatgtttttcaattagctcatgagtttcacaatttccactactaccacccacaagtctataattcaaatcacctagccaaataatcttactgaaaaaaccaaaaaagaaaaaggattaataattaattaattaattagaattaatcataagataaacaagttttaatgaagacttactcatgctctaatatggtattaggtgatgatttttctaaagaagaagatgatgatgatgataatgaatgagatgaaaacttgtcttcttaagaatttccatgacatctgagtttcttttgacctcatctcttctttttcaccagaagtcaaatgagtac

SEQ ID NO: 230682 - DNA, 867 bp, Cannabis indica
caaaatgaatcatcagctcgtcgaagaatctgcattaagaaaagccaattggagagcttaactaaattactaaaagttaaaacatttgaaaagaattataaaattgatactgtttctaaggaagaactaaaacaacggctatactgtttcttaggagaaactaaatatcccattttggttccatcctttataatgcaaaaaaggacaacgataaaacatgtaaaagttccattaatagaagccacaatgcaaacagcaattataaatgcagaacatattcgaaatgcacctaatgttcacctggttctgaaaataaaccaaaaatgcacgtattgtttccctgtaaggtttcgatacacctctccacaaagagtgttcgccttcaacaatattatacctataaaagacaaaataagtgtatttcacaacataggtaaacaataaaattttgcatcacagaggtatttctgagtggtctcaaaaaaataatttctatgacaatatcatggaaccaaaactcgtatttctgagttatagtgtaaaaatggagagaaaaatatttgtttgttatttttgtttcttttcagtatgcaattagtaccacaaagacaatcagtatgcaactaatacccttaattacagaataaagaacagtaaatataattaactacaaatcctataatatggaaactaagaaattacagctacaatcaaatcataggatttgatttcttcttatattatagatattagtagtccaaacttgtttactatgaaatcaaatactcactcccataaccccattgttagaatatcagccagttattgatctgtacgtacatacctaatgttgataattcctccatc

SEQ ID NO: 230683 - DNA, 1232 bp, Cannabis indica
aaggttttttattctcaaacttttcgaaaaatatggtgtgttaatcggtttaccataactaaaatggaaagtaatcaaatttttagtacaaatatttcaatttaaaatatacaataaataataataaagttaaaaatatggttaaaatattaaaatatttataatattttaaatttaaatttcttcatataaaacatttacataatttttttttattttaattcaaagataaaccaataaatttaaaattatgattaaaaatatctataatattttaagtattttaaatttaaattaaaatttatttatataaaatatctatataatttttatttttaaatatatataatagtattataaaattcataaaaatattttgttaattaataggatattctgttaaagttaccgtaaaaattcaaaaagcaatgttaaaccaagaattctgttacatagggacactttatagaatagatataataatttttttatgttattaatttttatatacatctttttttttttttattaattgtaaaaaaatttggaattcaaaaatgagttaatttctacatatatttttttttttttttttgaacaaagggtaatcatatattcagtacaatatttttaagaccaaagggagcattcaactcattaaagacaccatctgacacaaaacaagactctcttgcaacacaataagcagctctatttgtagatcgtttgataaaagataaataaacattattaagaccagctagcaaagaacgacaatctatcaccaacaaaccaaactcagaaggcatttgaacagagctattcactgcctgaacaactaccaaagcatcagactcaagtatcacatccctttatctttttcgcttgatccagcttaaagcttctttcacctcaatcacctcagtaattttaggccaaaccgagccacatcagctacccaaaataacctcaatcagcttaccattatcatcacgagccacacacccaaagccgaatctttgctccaattcaaaaatggcaccatcaacattaactttgatcttatgcatctccggttttcgccactgcacaatactgttaaaaaggacaaccaatagcccctttttttgagattgggcagcactccagtgatcaaggacagaacgcgctgatctcaccattcaaccgttgagcaagttttcttcttccaaaacaaatcattccgagccttc

SEQ ID NO: 230684 - DNA, 1427 bp, Cannabis indica
aaagttattcggattgtatttttgtcggtttattcggtttggtttgggcggtttgttaatttttttgaacagccctagttggtcgtgctattttagtgagctcagttcttattgcaattcattcctattaggcccaagtcataattccacctaagagtagtgttttgaagaagattgatcagatgtgtaggtctttactttggggtggttttgccaatttccaagggtcgggttatatggcttggaaaaatttgggtacgtcaaagaaaaataggggcctagtcttcagaaaaattgtcatttagaacattggtgcaattgaaaaacaggttttggcgattactcaaaagaaagataatctttggatgaaattagtttcatacaatgttcttaaagaatgaggatttgtgggagtaccagactactcaaaatagttgctggtattgatgcatgattattcaagtgagataagttgaagtaaagttgctctactcagaaggtcaattactctctgcctcttattccacaaagtagatttgtgatttaatttttccttctcataatgaaacatggtatgccctgattatttggaagagatttgatgtttccaaacataaatttatctcttgattggcggcttggatgatgttgaaaactagagaccacttgatatgccaagggaatattgtggattattttgtttgatttgtgggatggctcttgaatctcatcagcatctttttctccaatgtgagtttagcaagcaattggttaaagcctaattaagatggataggtttaaactgttgtagcttgattttaagctagttttttgaatcatattcgaaggagtaaagtgagctccttgaggagggaaattaacattttggttttcaaccattgtgtatatgaaatttgggtgaaaaggaacagagcaaactatttccttttcaaaaattgtaattgttaatagaatacatagttttatgaaaagatagagattgaatggggaagctacgtattagagagtgagatcgttgagggtgtagatgttttcaaatgaagatcattgatttatttttttaaaaaatatatattgttgtatctaagggtgttcatcaaaccgctcaaactgcctgcattgcaaaaaaatacggtttgaaattttttgcagtgcgatcgcggattgaatttttcctaaaccgcgtggtgcggtttgcggttttgaattattaatatgtggttcaaaccgcatcgcaccgcatattataaaaatactaatttttatatttatttagatccaatatgtgaaggcccagcccaagctcactaactattgtattgtgaaacttgaaacttctttttcatatttatttttaagccttatggtatttttgacaagtattgttcaaattttattgtatttgt

SEQ ID NO: 230685 - DNA, 1474 bp, Cannabis indica
aaaaaaatatataattccttaagcaaaaatatattatagggtttttttttttttttgccaaatacccttaatcttaatataaatattgtttattaaaataaataaataaataaaaatatatactatctataacatgaatttataatctttttcttttgtaataataatatcaatggccaacaattaaattaaaaattggaatcatgttattaaaaaataaataaaagagatagagaacgtataaaaggtaattaaagtgagaagaataatctttacttattttttattttttttaatgttatatttaaaaatatataaaagaaaaataagcatgaaagttacatgaattaatgaaagattaattaagagtaatttgtattaattagagggcgatttcatggacatgtaagacacgttgtggtttataatgatatgattcatgcacttattaaatatataatatataagacagaaatgctaatcacgcaattaatttttttatttttttaattgagacaaacatgataattaataaaattaatatattatttataacaagttttcactaaagtcattttcatactttttttaatcattttaatattatagatctatttaattaattaaagttacttaaaattaataaatcgattaagcgttaagaaaaattagagtttctcgttgttaaatctatagttatcggagttattttttttctctagccaggcctgccgactttccttggggttaggtacgacttggtcggggttgtgttttgctactgtttagtcttgtctctgtgacatgcatttgagtcttgaatctatagcatagttttgaatattttagtcatgtctctgtaacgtggttttgttttgttgttggtttttctttgttcttcgatgactccccatcaaatcattattaatgactagtaataacaagttctttacgacgaaaagaattgttaataatgcaattacgtattttacacaatagttgaatattgctcaagctacgaggttgaatatgtatcttatgagcggtgaatgaattagaatatatgtgttcttaaggttgattgtgatgttgtaatttttttatctaatttcattttttatttttgtgtcaaattaacaatcagagaattaggcagctgattattttgttcattttttaaattataattctagtcgtatctccaacaaggagatgtcgcgattagattgcaggatattattaagttgattgctattaataaatttctatgatttattaaaaaaattacatctatttaattatatgagagatatagatctatgtagattataaatagtttttaattgagtttaatttattttgttataaattattcaatcatcatatgaaaaataaatcattttgtaatttttgaatgattacatttattttatttttgtttatgttataattttggtgtttaccctaattgatc

SEQ ID NO: 230686 - DNA, 895 bp, Cannabis indica
aggaaaaatctgtaaccaagcgagtttgtttattctttgacttgtttggtttgaggaagaaggagaagatgcggtgtcttggggcgttggaatcggtgagagtttccccgttaccttccttatctgttaatggaggcaccggcaaagaggttactttagccgctgggcttcacctccgctactccaccactcctcttcgttcctcgctctctttcactctccccaatagctttttcttcagaaccagggcgccttctcaaagaactgtctccttttattgccactcttgtactaactcattccatctttctattgattgattgattgttgttgttgggcagaatagttgttatgttgagttatagcgtaattagaatttgaaagatttatgctttgaaattgaagtgtatatgatttggttcatagtatctatactatatgagtattttgggcagatttattgttatgtttgaaattatggtattggaatctgaaagctgtgctttcatgggtatgatttagttctgggtagtttaggcagatttgctattcatacattaaaattataatgtgatgattaggtctgaaagttttattatgctctgatgacaatgatttggtttaggctataactgagtaatttaggcagatttatgtgctattcttctttttcatttgtgggttttgttgattactatgaaatttgatatgttgaagggatacagcaagattggctctgtcctttgcttaaaatggtttctgggctaccagagaaatgagatttaaccaagaattcttgtgacatgtctatatgtgatagtaatcactttcttgttttcctattatctttatgttgattccgattgaagcatgatgggagttgtctaaaatgaga

SEQ ID NO: 230687 - DNA, 689 bp, Cannabis indica
ttttttaagattttatatcattttaaaacttaataaaatatctacattttttatgaagagagtttatctaattcgaggtttttctaagtttaaaattacgcgttattgatgtagtccaaaatcaatttgctccaagaccttctaaaaattgtttcgataaaatatttatatctcttatgttatgactctgattttaatgatctttaaactttgtgaaacagtaatgtaatatctcataaatttaataataattaattaagcatattttatgaaatatgaagcaatatgtgcattaagagaatgagtaagtttataatcgtactagattaaatatgagaaaataagattatgtttagaaattggaaaatttagcgtaatttattaattacagagattttattggattatttatgtaatataaatgctatatgtaaaataaaataaatttaggcccgacaacagtgaaaacccgattgatttgccaaaaatgtcacgacgatattagtatgcgcagttgtggtaccatgaagtttaattgatgtgaaaattatcggagttatacgggataattggttataactattttatttctagctttagagattacttcttagcaagagtattatagtcattttttttaccggaacttatttagtaatttgtcttttagtggaattttgtgaaaagaa

SEQ ID NO: 230688 - DNA, 1073 bp, Cannabis indica
ctataaaagctaaactcaagactcagaaggctttcgtgccaagtgtgttcatggaaaagaaagaaaaagaaagttagtgagagagtgagtcattgtgtaaaagaaaaggaagaaattgagggaaattaagctcttctcagaggatagcttaacggagacgtagtctttgattggggtgaactctgagatcaatctcttgtgccttcttactctctgtttgcatctctaacctattcctttttaatctttcattttttggtaattgattcgtgttgtgtgttcttagatctaggctaaatcagagatgttcgaagctttttgtgtgtgattggtgtggtgagagttttgtgttttcctggtttttttatttgattgttatcaaaacgcagtgtagttttgtgtgcatgtagcgtttttttctcttttttcgatatgctttttttgagttattggtgtaggtagataaatatttaaatgttaaaggaaatttcttaaaatatcccacataggaacacaactcaagaactgaagaaatgtttgatttatgtagtttttttatttatttatttatgtagttaaaatatcatgcaaataaacaattataatacatatgtttagtgtctatttttcacaaagagcatctccaatagagagatataaatgtaagtgatgtaaaatgtgtgtcaaatttagacacaaaaaatagcatggtctaaattttagctcacagtaaataattaaatactacctttttaattatttatttactacttattaatattattcattgactttgaatatatttataagatattaaactatttatatttaaaaactcatatcttaaaaaataattaaaaattcaataaatatataaacgtattttagaaaaaaagttatacattaaactaaaaaaatgttatgtttaatcaaacaaattaaaagttttggagataaaaaatagagtcaaacttgttcctgtaaaattattttgtaaaaacattgattatttaatataattttttgtatctaattggatttttgaataaaaaaaaataaaataattttttaaa

SEQ ID NO: 230689 - DNA, 732 bp, Cannabis indica
aggtgttcgatgaaatgcccgaatggaatgtggtttcgtggaatgttgtgttattggggtgtttgaggtttgggaatttggaagaggctcagagagggtgtttgttaagattcctagtaagaatgttgtttcggggaatttgatgatttcgggttatgcaagaacaggagatatggatcgggcgatttctttgtttgaagagatgcctgagaggaatttggcttcttggaatgctttgttgagtggttatgtgaattgtggtagtgttgagttagcaagaagctattttgatgcaatgcctgttagaaataatgtttcttggattaacatgatttcggggtactcgaaaagaggttatgatagcatgttatcaacaaaacaatcaaccaagggaagcccttgagttgtttaatcatatggttaaaacagatttcaacattcagccagatgagatgactttaactagtgttgtatctgcttgttcacagcttggttatttggaattcgggttatggatcgaatcatacatgaaaagaatgggattcaattggatgatcacttggcgaactcttttatcgatttgcatgctaagtgtggaaacattgagaaagcattcgagctatttcggggtttaagaaacaaacatttggttgcttattctgcaatgatatcgagctgtggtgtgaatggtaaagcaaccgaggcaatcgagttgtttgaagagatgaaaaa

SEQ ID NO: 230690 - DNA, 1428 bp, Cannabis indica
gccatacatttagccataagaaccgacacataaccattatggtatttaacctcagccgcaaccaaattgcccttaaaatctctgatgacagcagcaattccgctccccatctgatctggacttagtgctgcatcacagttgatcaaaaaagagcctttcggaggagccttccatctgatcacacttttatccctcttcttatccttgatgtcagtggcctttgtgagagcatggttaacaaagtcaagagcccaaggtgtccagctcttcagagggggattcttattttggaagattcgattatttcgttggctccacaccatccaactcatgcccaaaaatctttcaaaatcctgattagagcatttgtttttcataaacatgagaaactccatcaaatccgacatcagtccaagacttttaggaaagagatgccagagccccgtctctttccaaacatacttaagccgaggacattgccatatagcgtgactgattgtttcaatctgattccagcagccagtacaagttctatccaatttgatacctctctttgcaagctcagtcttagagggaacccaattatggcaaactctccatataaagttctttatttttggagttaaatttgaatgccaaactgcagtccaccaccctttggttatcgatttgtttgacgtttcagcaccttctttctcactttgcttcattcgataactgctggccaccgtatactccccatcaattgttggattccaaataagttcatcttctccgcagtctcgcattgtctgtatccccaatatcaaaggaatgtcatccttgttcatcttttcctcaagtgcatctaacttccgatccccggcctcattgattaatgtttccaccaaagagttgggaggaacctcagcaggagttcagagagtaaaagggggacctctaggaatccatctatcctcatttatccgaactttacgcccatcactcacccgccatctagttcctttcaacaaaagctctcggccccaaaggattccctgccatacattagagcacccagtaccttttcttgcttcaaaaaattctgaacttggaaagtagagagccttcattacttgagcaaacaagctattgggatttgtaaccaatttccacgcttgctttgctaaaagagcttgattgaaatcttccaagtctttaaaacccatacccccggtccatttgtccttacaaagcttctcccaatctccccaatgaatttgatgcttggcctcagtagatccccaccagaactgagtaatgagtgtctggatttcgtggatgataccttttgataatctaaagcagctcatgacataaaccggaattgcttggataatggatttaatcaacacctcacgaccggcttgagagaagagacccattttc

SEQ ID NO: 230691 - DNA, 839 bp, Cannabis indica
ataaaattagaaaacttttcaacattatgttaattgattgaattagaagatctttatctttatttcttaatctttttatacaatatcaatatgtaaaaagaagtgttaatcaaaaagtacatgatgtggctaaaatagcattaggagcttgataaagagttggtatgaaatggtaatatttctaccaattactgttgtaactatgggctgggcctgggctaaaacagactaagtccgcatctagagcccacagagtctaggagaagaaaatatttttttatttaaaattatacatatattttagtaaattttgaaaatactatataatttttaaataaaggacccaataattttttcccacccgataaacgggcctaatgtaatcaacatttttcccaataaagttacagttttttcaaaaaaaaaaaaaaaaaaaatcaaaaattataataaaattattgttatttaaaagaaaattatataagtatcaatatttattttcttttaacaaaaaaataaataattaatgaaatatgacaaaattaaaaaattcttgcacaaaatgctaacaccttttcttttaatatatggtacatataaataaaagaattgctaggtgtctaacatttactacaaaaaaaaattgttatttttggtgacaattgtttagtcacaatataattttttcgtgactaaatataatttttagtcacaacaaaatattacttgtgactaatacttttagttcacggaccttttagtcacaacataagaatgctgatttataattagtcacaactttttcacttttagttcacaaattttgttgtaactaaaag

SEQ ID NO: 230692 - DNA, 1264 bp, Cannabis indica
ttttttttttttaaagaagggataccctttgaggagaggagagcaactagattataagggtcatcctcaattcaaattgcaacttcatctaaccttaaagttatttttacaagtttgtgagcaaaagtattaatcgtgttgttgacatgagtaattgaggcattggggaagtgagataaaactgagttaatttacttgatgagatctctaaaaaaggagatgtcttctttgagctattgtcttaagccaaaaccaaaagtgagactaattttttttttccctactaaatgaaagagaaagttggagaataccaatttcaatataatcacattatgataataatataatttattttggtaaatagttgtacttaaatatcaaattattattattttttaaaaaaagtaagaaaataattttttgacataattatattgaatttttgttaataataacacaacttatctttcttttttttttttaatgggtaatactatcaaatattggtacttatttttttttatccagtaataatatcaagtcattcctaatattacacttattgaaggtgttattgttgaaagaaagataaaagaaaaaaaagagaagagggtatttaagtaaagatttaatattattgctcttaaaaattaatttactacttaaatgtaattatcaagtaagatattattattgtaaaaaaactagtttctaaataaagtaaaattatacattttaggagtttttatataattgtgcaaaaatataattttctataaaaaaattatagaaaaaataaaagatactacataattggtttctatagataccctaaacttatttttttttttttcaaaaaaaattaccataaagaatttttttaaaaaaaaaatatatatttcataaattttgccccaaaaaaatagaaatgaaaatttttcctaaataaaactattaacaatgattttatttgaagatatgctaagagaatcatatttaacaaagagagagagcttgaagcaagaatattgataagatttagaacattatgagttcatttggtacgtcgtattacatcgtattacattgtattgtattatattcaattgtattttatgtaaaactatatgtagtattaatttttatggatacctaaatatataatattttagtataaattaaagtttaacatattattatataaaatatgatatataatccaattcaatataatacaatacaatacaatctaatacgacattct

SEQ ID NO: 230693 - DNA, 1558 bp, Cannabis indica
tggtctgtagggtcagtcatcagttcatgaagcaaccagagtgacgtattcgtgtataagagccattcattctgtaggtctaaagatccaataaaggcttgaagcggggacgttacaattattattaataatataactatataaatatatatttaaaagttatataaatatatatatttcacttctttattttttacttttccacattaatgatccaaccaactacaactacaagatcatttattcactattggatcaccaataagaattcataaatcaaagtgttatataattagatagccacgtacatatactagcatatatacacatattataatacatgtagatatataatatatatttatatatagattttgttatacatgttgagaaaattagttgtatatagatagagattggtcagccaaattgtaaacaaaggcatgcctaacagttttctttgaggccgatttggcttgagtattgagcaaataaaaaatttcttattttaccaaaaaataaaataaaataatcatataccaaccaattaatcaaacaaaaacatagatagtacttcctcataattaaaagctagaaagccaaaaaaaagagaaatacaaaaaccctaaaaacataaaccaaaacattataagaaacaaagcatgactattttattcctatatttatatatatacacgcatgcatgcataagtacgtagtgtacgtacacttcatccagtcaagccttggtacctaagttataatagtttcttacatgtttgacacaaacacataacataactaagagagcggtacgtatgccatgcatgcatgcatgattgcatgcatgcaatggtatactataatttaagaagtcgatgatgagaggtgattatcacgatcatcatcagtagaaaaggtatccatatttggaagttgatcatagttggctcgaacacaatatccagagcccatagcattacaataatagggatagcaacactcgttcgacgcaatattgcatcttttaccgccagcgagacagccgcgactaggcacgcattttcgatcctcaccgaacgttgaaccctcgcaatgcaatcctccacagcaaatcttcccttgtgccacattacagtattgaccaggtattttacaagaatctgcaacaagaatcagcaccatcatcatcgttattactattccgttacacttcttcattattatatatatatcttttgtacttgtatatatgttcttattgatttttttgatctatttatagggggaaaattcaaacctactactactgtttggtcattaattgatcatgaatgaaataaatatgaataaatgttatattttattgatagatgtgataatattatatataactttttaatgatatatcatagatatgtattggggttcgcaactaaagataatgtatgtgttttctttttttcttcttctcaacccaatataacttaatatatggtaagtttgtaattatttaaggttatatgtgcattttaaatagtttatagtgttaaaaata

SEQ ID NO: 230694 - DNA, 933 bp, Cannabis indica
aaaaaaagaacaaggacagaacaatataatacatacttcttcttcaacaagcaagcacgttcaatccatttaacatattccttgcaatcttcagtatctatgttcatgccaatctcttgaacaaagggaaacatctccttaggatcaaactatacttcaccagatggctccttctccttcttcttcttaacttttggttcagaagaaccatttcattgacaaaaggagatctacagtgcaatccagatttcgcttctctcttgacagcaaccctagattgcaaaggtactacatctagtacttcaacctcatcatccacaataggggatgcagaatcaggaattgataccaaatcccattgatcattttttacactaattggcgaggcatatgcccgagtgaggttgtcaaccaaatctaaaatggattggtcgacttcaatgtgttcataagaaaacacaaaggcctcatccttctgctcacctaaaccagaatgaacctgaaaaaaaaacatgaataaccagttataataaagacatcactaataacaagaaacaaacaaacaaccttatcttcttgaattgcagcccaccagactcatcatcataatcaggaagattagatttcgaaactacctacaaaaaaacaacaaaaaacatagtcataaccggtttctaaaaaagagaaaagaataaaaaaaaataacatacaaaaaataactggttatacaacatataaagaaaaactgaaaacatgaaaaaccaaatgtaaataaaaataactagttataaaaaaacagaaaagcaacaaaatgaagaaaaaatacctccggtgacaatggatcaggtaactcatcatcattgccaccaacatcgagattctcaaaataagaatcctcagccttatcctcgacatctttgggcacagacgacc

SEQ ID NO: 230695 - DNA, 718 bp, Cannabis indica
atataccattgtattaaataatacctaatacaatccaataaaatacataacagtgtactaaacaagaacttaaagtaatagcttagaaactaacaaggacaagctttacttacatatccaataagattgaggggtttctctgtatgataccgactgttgttcttctttccacttataatctctaatagtatcactccaaagctgaatacatctgtttttactgatacaatgcctttaatggcgtactcaggggacatgtaaccactgaaataattccaaattaaagatgagataataattaagagtaaaggagaaaaataaaaaaataataatataagactacttactatgttccaacaactctgtttgtgttttcttctgatacattcaatccaaatatccgagccatgccaaaatcagatatttttggattcatctctttatcaagtaatatattgcttggttttaaatctctgtgaatcacttttaaccttgaatatttatgaagatataccaatccttgagcaatacccccaataatgctgaaccgtttttcccaactcaataaactccttctcctttcatctaaacaaacaaaaaagtttaatttttttttcttttctcatatgacccaaaataaaatctttacagaagaagaaaattaccaaatagaaacaagtctaaacttttgttgggcatgtactcatagatgagactt

SEQ ID NO: 230696 - DNA, 991 bp, Cannabis indica
gacggaggtgtgcagagcaaaacggaaccaccagaattaaggtagtttagctgccaaaaattctatttctgtggttaagtgttacaaaccgtaaagttcaggtggtttagccgccaatatcccttacagatttttagtcatctttttaggtttagtctcattattctattttaatgcttgcgtgtttttctaaattagcaattttgcacactaaactttgacaactatcaaattgtacccccgtaaaataaaaatgagaaagattcaatattttttttaggaaatcttaaaatgttaatttagatattaaaaaacattattttgaacaaattagaaaatagaaaaataaattaaaattttaaaactaattaagcaatttaaaaaattatttatttttattaaaaaatctattttacatgtaaaaaatatattataatttaatttttgtaaaaactaaattttatgggaataagtttgtagtttattttttttctttaaaaattcttagaataataagcttgaattttttcttcaaaaaatcttaatttgttttaaattatttattggattttcaataattttagttggatttttttaagatacgcgtttataaataaaaataaaatttaaaaaatattttatttatgaataatttaggttttaagtgacttaatatttttaattaatttgatattttatcgggtcttttaataatttttattaatttgttttcagaattaatataacaatataatttttaaaattaatttttttaataaaatgtgccaaaattttgtattggtcaaagttcacataagtaaaaatattattttttaatggtaaaaagaaacaaaacttgacagaagaagcataattatgtcactcttatattttagggaaattttttaatattttaagcgatagaatcacgtagtgtcgaaagtttaaaaagtaaaaatactaattatgttataaatattaataattatgt

SEQ ID NO: 230697 - DNA, 1760 bp, Cannabis indica
attaaaacgatcatttattttattttaaaatgtaataattatttcattaaactaataaaaaaattattatattagaatgatatttttaattaatacattttaattaatacttaaaaatacaaccaaataaaaaaaaaaaataataaaaaaatattttcttttcattccactccacttcattagtgcttccaaccaaacacaccatctaatataagttgtaatatcttaccaaagattatcaatttttatgtaaaaactatgagtcaatatagtacaaccccaaaatatcattatacatgcagttgatatctaagaaagttttccaatctattttataggatcacatataaatttttaaaaaaatttaaataaaattcataatactaaaaataaagttgaaaatatttaaattttattttcaacactataatatatgaaattttttaagtaactacaatatacatgtacatgtactaggagttaaaataaattacactaaaaattcctgtactaaatgtaaaaaacaaaaaaaaaaaaaggaaaaattatatcaaaacttccttatttaaggataaatcacaaaatccaaatccaagaaacttttctttttttctttttatcattatttaacacttttaaatgtacaacacacaatgacgtaatatgtgctcaaaaaccatgggcgaagtttcgtttcgttcatgtaataaaagtttgttgagcaatacccacaactctgtaagctgcgacaaattcatatacactttgagaaatatcaaattcgaccttcccaatttcttattctacacttacatccacacaaaacaaaataatataaataaataaattaaagtttcagttgttacattagagaagtagatgacttaattacacatatagtttgccttttctcaagtacactatgtagacctttacatgataataatgtatatatagagactctgtatatatataatatattctctgaccaaatatcgatctaaagaaaaataaatacatataacagaaaactgattatcagatcagcacatattccacataattaataatgatattattgataaatgacatcatcagttctatctcaaattaattcattagactttaattattgatgtatatattattagctacaatgaattaagaagaattaatattatatgtgcatgggaaaacgatattggccgctatttaagccaataatagataatctgcatggaccaatgattagggatcgaaccacatgttttgacttatagtgacacttatataattgtcatattcctcaagtacgtactctcagccacactcttatacaataataaaattgatttttttatttatataattatgatttttagtagataattatttattattttgtatcagtgtcagattcacatgcaaacattggtagtgccatgtgcactataagccaacaaaatattcaggtggtttgagaaggtatggggggcattaaaataaacaaggagagccaattgaaccatgttctacttttatatattatattatatatagtaagataaggggaaataatataataaatataatcattataatattaatagtattgtatgatctattccatattatatataattatatatatatcatcatgaattatgatagatgtgtgtagtatggaaatattaattaatattagtgtaatgtaactgatcgtcggactaaacaatggatcttcatgacaatatatgatc

SEQ ID NO: 230698 - DNA, 654 bp, Cannabis indica
aaaaaaagaaaaaaaaaactaattggattagtaatattgatctctctatagctgttatataaatatataaatctatttaatgggatcgaattaaagtcaaactacttcaatgtccaactaaggctacaaatattatatatatatatatttatataaatttatctcgtctgcccacgtttgtgctctaaggcagttttatgtcccctttggggttaaccgttttattcaagtatttttccagattttttcagtttctttcttcttttcttgcagttaatttcctcttctcctttctttttcggtctggtttttccacccttatatctacctatctgtatcttagtctttttggttcatattttacttatggatcctctaatacacaaaatgaaagcaaagattaatctcactgaggatgaggagtttgtatttgaattccatgacacagaagcttcttcaccacaggctagtgtcgatactgtcttgtatgcaagaattcttaccaagaagaaagtctggctctcaactctgcagaatcaaatggctgaacattgggatgggagatttcccgtcaaaatttcagaagcttcaaacatgttaatgctcactttcggttgcgaaggagacaaaacacgagccctggatcgtgaacct

SEQ ID NO: 230699 - DNA, 1411 bp, Cannabis indica
aaatttttgacaatattaattctactccttaaaatatacggctttattaaaaactttcttaaatttttacatttacagaaatttgcatggtccttgtattaggttttgtctcattattctaattaaatattgatgtgtctttgtaaattatcaattttactccttaaatttgaggggtgttgtctgagattttcagtaactaattaattagggtcatttaaatgattagaagagattcaatgtgagtatttttacgtggttggagcattaatgagtcttagtccacaagttactgctatttggtataatagttctttttacagaggatattttttttgaccccttctttagattatagttggggtatttatagcctcataaagaaaggtaaaaagattaatattgttggatggaagcatgatttgcacaagttctcaaattcaaataataggatatgtatgtctgtccggtaggttgcataagttttaacttttgtaattagatatgccctcaaccttctttgattgatgtgataattcattatgcagctgtcataagactcatagattagaatataatcgccgaataatggattttataatgcctctgacacgtcttttcagaatcattcacggacatttctcccatgctgcatttaatgcgcctgtacatttcacatccgagacctaacgaacggtcctatatgttttacctagttcccggagatgaacataattccttgatagcatggaagcgattgaagctcacagaggggcctcccaaacatgattaccgaatctcgaagtgttctcttagggagtttatcttaagtattcttgacctttagaccttcttgccacctagccaactctgggactgccacgtagattaggaaaaaattaagggcaacatttaccctccaagtctcatttctcatttttgcatctttgtaaaatgagatttactacttgccttaaggagtggcatatatagtcaacattctacacgcgcatgaattatttattatttataatcatttctcctcaattttaggaaaaacaattcgattcccgcctattcaacagagtccttcattaatatcactattagggaagtactcaagcattttaactaccccttttccttcatttttctactaggatggcttagccattggatttttagaatttggacgatttgaactctgactgtttgatgacagccaattggtattcaccttggagggcctataaaagcttccttactaaaatttttacccagttaacttgttgtagtagaactggtgtagccattacgttatatacaagctacctcttcccattcggagtactaaaagttataatcacccattgtgtccttttctaatattcaagagccaaacatgccaaag

SEQ ID NO: 230700 - DNA, 605 bp, Cannabis indica
tatttatttattttttttttgaaggaatattattttatttattaaaatttgtattaagttaataaaataagaaataaatattttaattgactcgtcacaagaaacatgttaatagttcataatcctaaatggatataaataagttataaagtaacccatttataaataggttagatttaggttttaattttcaacacaactaataaataggttgagtttgagtttagtatttacttgtaatatttaaattttgatacaatacgaatatgatccgccataaacacgaagtaacacctgtactttacatattacaaaatatatgacaatttttctttagaaaaatactaaaagatacacgtagtgcttctttaatatgttataccgttattgactttaagagtcctaatccttttagcttttgtatattttcaatggaattattctttagaaaaaaacactccaaatccaatggaacaaaatagccttgttgaagaaacatttataaatttaatgatttccaatttaatttttgataccatatacagtagaacttccattcaagaatacacttgggaccaaataaattatattctaattgagaggtt

SEQ ID NO: 230701 - DNA, 944 bp, Cannabis indica
tccatgtgactctcttatgtcagggtattttgggtacaatacatataaaaagaagtatgtttcaaataaatataaaattagaggcacatttagttaattgattcaacttaccccaataaataacctcttcaattcatcaacacaaaccctgaccattccttccgggagagagaggttgaattttatatatgtttttattatttatggttgaattttaagtattgttttttttattcttcattgatcgactctatcatttggagatttgggtttttaatttctcataatattttttttgttgccaactgccctaatattattatttattttttttgctgaagccctaatattacttaccaagtacgtagatatgagttcatcatcatcatcatcatcatcatcaccatattctttccatagcccacaagatctatttggcccaacaaaacagaagaataatgatcatcatggggaaaaagaagaagaagatcgaaaagaaatattaataataatatttcataaaaacaagtagtgatcgattttgattatatatattggtatgctatatggattttaatagctataagttattataataataggtttttgagagttgaatcggagtagagcttgtacatttcgaacgacgaaactggaaagggatttgctgggtagcttttaagttattatataatgtgttgaacaatattccatgaaattatataaaattactaatacttgttgttttccttgctgtcactttttttttgtttcatatttatttatcattaatttcttcattatatatacagtagaagctctatctaagaatacacttgggatcaagtaaattatattctaattgggaggttataactaaatagagttacactagaaaaaaaaattaaaaaccaaaaatatcaatgtaataataataacaataa

SEQ ID NO: 230702 - DNA, 1598 bp, Cannabis indica
aattgtgaagagaatcccacatatgagattggtttcctacattatttgaatttcttcaagcagaattgcagttgatcctataaattgcgtgtggtggacctgtaggtctgcgatctcgagtctgactccttttatatactcgctcgtaacttgtttacctaataggtgactgctccatatcgagtaaagggcccatagatccacgttcacaagtttgagtcctttcgggtgctcacttgtagtttgcttccttatggggaatcccaatgcctattgcttgctaagtagtggcatggttaccaggaatggtagtgtggttttgcatgttcatagattattgcttgcttgaacttatgaattcctttcgaaacaaagttcctagcagagaattcaaactgtagttcgggaactcaaattgtggctctcaatgaaagtactaaaatattgacactaaaaaagtgtccaacactagctagctagattggtgagatgaataatgagtttaagtaaaaaatttagagaggcacacataatttgtagtagttcactctccatgtcgcgatggtaatagagctacgtctactttgagtttttatttttcacgagatggtaattatagaaaaatattaagtgtttaagttctggtttctacagagagaaactagagagagatgctctaaccttgtgggtagttttttgaatgtgaaaaataattaagggagctctccttttttaggttaaggaggcccttaaaaataggaataaaataatgaaaaaatacaagttggctatttttgaccgtagatgatgatctataagtaaaattaaattttgaggttaaccgtacaaaattcagatctcgggtcgccgatggtgggacccgctctgggtaagttagagcttattttcgtaactcccttggagtgaaatttagagtcaataacttcaaaattagattgaagcgtgagatatgactttatagagcattaaaatagcttcaaaactcaagttgaattatgtcaattggatcaatatatagtgagttatgatcgtttattgaaggttgtccatgacccagcgcgaaggttgacatccaatgcacaagttgacatatgacgtcaacatggacgctatgtaagtgaaaaaaatcaaggggatgtactttctcattcttaagtgatattttgacatcatttagtctgtctttgtgttctggcaaagttggtcactagttcctaaagatgttgttctgtggaaatgagagacttaaaactcttcatttcttagtgttctatgcatgttggaaatgagaaagataaagttgtgaatttgacttctctaacttcatgtatcttattattgtgaaaaagtagacgaacattcgaatcagaatcagaatcggataagcagaacccaacgcaccaggccatttgtcaacttgggcattgggtacttcatttttgagctcccgagttgttgttttgacaattccaagtttcttgaacttaaggacgaggtctcctatcctatttttggccattttggattgaatggtcgaattaaatttgtcatttgaatgatcaaaaccagcgcaccag

SEQ ID NO: 230703 - DNA, 911 bp, Cannabis indica
gaggtcaactacgacataaacactagtcatagtcattaataaagaataatatgaaaattttgaagttatgagcagcattcctagtatcttctttaataaaactagaaaattaggtaggttgtcatgaatgtgattcccaactttatataaatatatttttcctttttctttttcattagttaatggtgtgtcatccatgcttgagccaagttggcattgaccccacttaaacttttttatcatttttttttcttcaattaaactaactaataaataaagaaaataaatttgaaaatttcttgtctgtttagtgaaatgtattattttttttaattgtatttttggtctcactattttgactaacaacctcaatatcaataccaataatgatgctcttaggattcactctcctcctcttcaagtagatgtttattgatgtcggctatgactattagactattagtggagtgaagagtatgtttttaatttttagggtttttttttttttaatagcattgttattgaatatcagtgatgtctattactttctaaggcaaggcactttaattacttagaaattttcttcattaattaacatgttgttgtcaaatatgatgagtggaacacattcataaaagatgggttggaggatccttgggttgttcacttcataaccttagtatttggtggttttgatgtagtttatttaggttgcaacaccaaggcaagaggcattccattcgaccaatgattttcacatctctttcaattttgaagcctattagcattgcaatgggccttcatgcaacgcgagagagggtaaaaatttaaaatatggtaatttgaaaaatagttacgtttttctcttaatagcaattttagaaaataacaaattatctttttaaaataaa

SEQ ID NO: 230704 - DNA, 723 bp, Cannabis indica
agacccgaaatataggttaattataacctaacaactatcccttagattgtgctataatattgattgtaagtgccactagttcctaatactacacattttataattagttaataatattttaaaaaattattatattaaactcgaatagatattatcttaaaagtgctaacaccactaatatatttgtattaatttttttatactaagactatttctaatataaaatgtaaatattttgctaaatttagcactaaaatataaacaaatgttatatttgtaatgatactttaatgcatggtgcttagaatctttttcgttgtcatttcgttattagtgtaattaagtattaagtcacatatatcttaaaataataaaatattactaactaattataagatgtcatctctaaatagtgttagacaggtgtccaatagcaatattcatatttaatattataaatcatgacaatattaattgtaattaaaaaatatattaaaacttattaaatgacaaaattgtaattaaaaaaaataattatttatttgtgttaaatttggcacactactatattttggattaaatttggtacaatttttagcataagtcaaatttagcatacagttggagaattaattttttcttaagagcattgctatatattaggtactaatagtgtctagcatctttttagaaatgtcaacttgcaaattgatcagcgatact

SEQ ID NO: 230705 - DNA, 1437 bp, Cannabis indica
aagatcaatggctggaggtatattgatcctttcattgcatatattatagatatgattacagttgtttttccgcatttcatatcgttttgtatatgttatattacatacactatattatagtctaacacacacaaccataatttgtaataatcttggaagaccaagtttcgtcccacaatgactgattatcaattatcaaataattaatattttgtttcgatttgattaaataaaaatattggagataattgaataaaacaaaacgaacaatttaaattaagagaaatatcaatgagaaaaatatggattattatgacccccaactgtcttttattttacatcataaagtaattactcaattttttttttctttctattcaattaacaagttgaattaagtagttcataatctgataaagacttacaaacccaatctatgtgaaaactctctatatccctatggcaaagtttaatcacaaagaaagcattaaacaaagcaactcataaaaatcatacaaataatttagatactttcgttttaaataaatttacattcataacaatcaaaacatattgaaatctcactttttaaaattttgattcaaaatatataacaattataggtgatcagtcagtaattgcacaattaaatcagattgcatagaattaaaataatagaaaaagaagaaattcagtatatattttaatttatgaaagaaattaaagtggttcacataataatctttaaaagagatttaactcataacaatcatcttaaacatcaagagattcaattaaacacaaaaaaaatgaagaaagaagagaaagaacactaattagagtcctccaacggtgttctttcttccagccgtccttcgttagcctccaatgtctacaaaatttgaatatataatgaaaacctagcctctactcgtttttaggtcaaaaacaagaaactgccaaaatttagtctctagtcgcaatgtgacagtcagtagtcccatgatccgtaagaggaaaaaaattttcttttttttttttcacttatcttttaccttttaatttaaaaatttaatttcatttttgtcatgacattaggattaattggatttgaatcctaatcctagttgttaggccattcgaaaattagaggaataaagaagaagagaaaagacttttgatcttttccttattatttatctttttcttttaatctctaatttttctttaatcttaatagcattaggaattcatgttaccttttaaatttggattcctattcatatttgtatatgaattttgaaatctagcttgaaaagagaaggaaaaagatataattatatcttttacttgtcatttacttctttcttaaaagctttaaatttaaaagactcccattagctttaggattaagagattgaactcacctataaataa

SEQ ID NO: 230706 - DNA, 1327 bp, Cannabis indica
aatggcaaaagtgttgaaaatgtccacaatcttctagaccaactattaatttgcaaaattctattgctataaagtcaacatcttttgtattattgcttgagaaattagattgcgacacaataacaaaaccgttcttctttcatttatttcataaacaatttgaaaagttcttcagaggtatacttcgctccacatagatacatacatatacattaattttcctcttaattaaaaaactatacatatggttatcgtgtcacaatcccttcattatttattttaaatgatcacattactttcgttaagttagtataattgttattttatcaatttagaccgattataagaccatgaagatctaaaatttgtgtttggcacaaaaaataaatttgtgctatatttagctcattatttataattgtgctcaatgaacaagatgtaagataaaggaaaaacaattgattatattgatggtcatttcatattttattaagaatatataaaattaattattttttattcttttattatttaaataatggtaatatgttaaataaagtaaataaagtttaataaaagtcaattaatcacaataattaatgacattatagtaaataaaaaagtagcatttactgtaggttaaatttgacacaatgttatatcttgtggcacaacttttagtatatgtcaaatttagcacactttttagaatactatagagtattagagtataatttttttaggtgtgctaaaatataacaatacactatttttttaggtgtcctaaagtctataatttgtggtggtgtgtgtggcccaactagttaactattcagtcaaatctagtttttaccaaagaatgcaatatacacttctctgttcgttttttttttttttaggaaaactttgagattcattgataaaaccagaaagtacaaagttcatgtgaaattggaaggtagagaaccattccaagtacattcattgtctatatacacttctctagtttaagattcccgattctgcaatttttttattggcatatcacatttccaagagcattaaacttaacaactcttgcccccaaaagaaaaaacccttaacaactcttgggatggtgtcagaaatgtttatggaaaattcctgataaactatgaaatactagtatgtctgtattcgtattggacacagtattttttcgttttcattactaacattttttaaaaaaataaaaaattctccatattttatgtctgttctactaataatttgacaaatcacatatttactcaaatttatacagccacatgtttctttaaatatattt

SEQ ID NO: 230707 - DNA, 1577 bp, Cannabis indica
ggtctgttttgggtctaattctaggtgtgggtttgagttcagctctcgagttccagtccaattctggatttggtttcaggttcagttttggtccttgttcgtgactaggttcctatcctagtttgggttcggggtaggtttttggtccgggtctgggtccaacgtcgaatttccaggtcaagggcaggtcctggttccagtttgagtcccgaattctaatttgtatttgggctctcgagcctaggtccatggtcttggtcccctatctaagtccgattcctaggtcctagtctttgtcaaggttcgggtttgggtcccacagtcttggtttgagtccaggtcccggttcaggttttggtccaggtttcggccccagtcttcggccgagttcaggttcggttccttgttagggtctagatgctggtttgggtcccagtgagggtttaggaccaggccaggtccatgtcccgatccaggttcaggccctaggtctcaggtcccagacctagtcaaggtcttggttgaggttcttgtctgagtttgggttatggtttgggttctgttttggtctcacgtttgggtcctaaacacagttccaattcttattcttggtccggcatcgattccgagtcaaggtcagagtctaggttggggttggggtccgagtcttagtctgagtccgggtacgggtttttcggatctcggactgggtctaggtctgagtaaagctcccatgatcgggtctaggtcttcgtctgggtctgcgtctgagtcctggtcccatgtttcgatccctattttggtctgggttagtattcggtttcggctttgggttcgtgtccatgaccaggtctgaatcctagtctcggtcaaaggcttattctgggtctgggatcgagtcccgtgttcaggttagggttcgtgttcaagttggggttcgtgttcgagtctcagtcctagtgtggatctgggaccggactaggtccgagctcaagtttcaaggcttggttatggtctagttcgggttcgagtcctgagttcggatctaggtctgggttccgacgccaaggtctaagtcccccatcaaggtccgggtcctagatcccagtctgggtccatgttcgggtttgggtccaagtccaagtttcgattttgattcagtgtctaggttcgggtttgggtctgagtctgggttgcggtttgagtcctggtttgactctgggttcgggtctaggtctaggtccaaatctcggtctgggtctgggttcaggtccaggtccgactttgggtcccgagtgcgggtccatgtttgggcatgggtcagggtctcgatcaggatctaggtcctgagttttgatcccgatctgggtccagatctgggttcgagtccaagttgtatttgaatccctatgtaggtccgagtttgggtctgggattgggtcccagctctaggtccaggtccgggtttgggttcggatctttgtcccagtctgggtacacgaccatgtctcggccctagttccggtctcggtttgggtcttgggcaaggtccgagttcggtttaggttctgggtccg

SEQ ID NO: 230708 - DNA, 989 bp, Cannabis indica
caaaacgtgtattgcacgtaggttgcctctagtatattcatgtatagtgttaatataaaaataatctaaacatttaccattttcgtcaatattttatttgacatttgtgacaaaatttaacgaaaaaattattttataatacgaaaattattcaaagattatttttaacagactaaaaaaatcaagagcaccataaaacatagaacatggtttcgaaggaaataaaattattactacccttaatggaatttcgacaaagaaacgaaaaagaaaaagaaatacccttaatggatttttgatgtgatcttatcgttataattacacccaaaaagtaaagggttgcaatcttaatcctaatcttaattaattatttatttgttttgtttttattaaatttggggacatttggtgaggatgaatgttcttttctttctctttattattcttcactttatcaaattgggtcctattttattggtaaagcctcatagacacatgcatgatccatccaaactattttttttccacaacaattgaattatttattttcaaaaggaaaaaagaaaaagaaaaatccacatttttaggtaggtcattttcttaatattataattataatatacatcttatttgttttccaaaaatattgagtaattatatttttaaaaaataaaatttaaaataatcaatttaagatgtatatatatgtaaaaaaaatatgagtataactagatatttaatattattttttacattgtaaattatttaaatttataaaaaagaataatatacgctactatatgtatactagtatattgttacgtgcgatgcacgtatgctatgttttatattaagtattatattatgagttcggaaggaaataaatgaaacaaaaataaataatatttaatttaaaaagatttgaataataaatttaaattaaacttttatgtccagtaaaaacatattggaaacaataataataaggt

SEQ ID NO: 230709 - DNA, 2045 bp, Cannabis indica
ttagaaagttcatatttacggtgttaaacaacatacttgtgagtagatctaagatccttgtaaaataaattccaacagagccaactccaagttctcgtgtacttgccaagcttatacgcacctttattgttatcttggaactcggtgcaaatcttttcagtatggtccaagcattcttgctgcaggatcttttttgtcaaggaatactcttcagggagtaagtttcttaggaagaattactttcctcgatctattttttgaagggcctggtaactgtttgtgggcaaacatgttgctttgagttggcttggtctctttattctttcccttttgtcaagggatcctgatagaaagatgtggtttacctcttggtcactgtagaccagaagtatgagagtagactgttggtgaatcgggccaaccgaggtacagccgaggtggccagccacgttgagggagcatttcctgttgacgccagggtcagccaaccttttggaggacatgttgatgttggagtttgatcccttctacacttagttggctttgcccccgacatgattgtcgtagagcctttatgcactctatcaatagttattcagcttctttattggtaatgcttcttagagatggtattgagacaccatgtctatgcgttattttatgtaggattggacaccctacaaccatccttctaatccctactttctagcaagatttttagtttgaggtatgttgctataggtgtatccatgtttgttatccagcatgttcattccatttgaaataaagatacttagttctttgaagaaccgagggggtacaaaggtttccttggttgtcaaggcacaactagctagttgaccgagtgtgttatctgttgcgttgtatttggggactttccttttactatatcctttcagctgacttaacaagtcttgaaagtagctcaagtaggccatcgtcttcttgtgttgagctgcatattcacctaggacatgacctatgacttgttgagagttctggtgtttgtctaggtgttcaacagtgcttcgtgtgctagcttgaggccaacattcagagcttcatgtttagcctcgttgttagaagctttgaagctaacctttgtttccacgtgcaaccattgcccccaggtgttttgagggccaagcctacattaggcaagtggtcaaggcacctcctggttgagttgttttgctcttgctttcgcttcttctttggctcctacttttctcctaaactttgagagatttggggagatatccttctatgtttagccatgaagttggaaagatcttggcctttgtttgccatgtttggtcgataggtgaccgtatattggctgagactcggtggtctactttagtggtcagctaggtcctataggttttgatgacacctgtcgcaatggctagttggcatgtattgcatttggagttttggtaagagagtgaagcatgcacacttctcctccttctcctttcttccaatattcttatttttgaagaattgacagagatcgtctacgctagttggcacatcagacaacacttggggcaatatgatgctctatgtttgttcagcattgacttgccctcttatttgggctttccaaacaacttcttccaactttataaagccatttgctcactcaaggaactccttcatgttgcccatggagatccttctaatatctttctagaattcactcaatggtaagataccttcgagtatggctggatagcgaccttcttctgtatggcctttgaccttggtgggctcagccatgaacctttgaatgtagtctttcaaaggttcatcttgtcttttgtttattttaataacatcctcttgtcgtgaaggtatatttcttgaagcggagaaatgaatataaaactctcgggagaattcttctcaagaattaaatcttcctagggccagcttgaaataccattgttgggctatttcaaaaagagttgccgaaaatattcaacctcacacatctccaaatacttattggggatctg

SEQ ID NO: 230710 - DNA, 1244 bp, Cannabis indica
ttgttgtttttgtattgtttctataaaaaaaacagtaaaaatgtaaaaaaattcttcaaacgtaaaaatatatttttttttgcaaaaaaaaagtgatatcttatgtaattattcttaattaattaagcttcaaaaatctttgtaaaatctattattttatcgtaaagttcttatttatttataatttaaaaaagaactatttaaacacaacaaaaatgttataaatctaattaattaactacaagagcatgtgaatagcatgccgacaatactcaaagaccaacaattaaaatgttcttcccaaaataaataaatattattaattaacacatagtccatggcacgattcctcttttcattttattctcatttcaaaataaataataattaattgtgtataattctctattgttttgcagacaattttcttggacaggtgacggttgctggtgttgtataaaatgtttataggggccttaaagcatctattttgagaacactaattcatacaatttcttaagacaaaatttcgtcaaaagtttttaagaatttaggtttgatccagatttttacaactttaaaaattgatggtaaaaatacttaagcttggcaaacttgtgagtctattaattcatccccactttgttaggataagtaacgagacacttgtatgtttctgatttagtcacaacttttttattttgtaatttttcataaaatctaaatctaatgactaaaataaatcaaaaactttaaactaaaattaattaaattgttaaagttaaaacaaaaacaaaaaaaaatgtacaatttaaaaattagaaaacatttattcataaactatttctctcgacactcaattcctccatacccaaaaccctaaatcgcatcctacctaaacccctaaatgttgaagacaacaccagtttaagtactaaaatccaatcaattttgtccatattgactctaattgattctcattcctaagctaaattcctaaaacttgaagagacgacagtagaagtgcttaaaaattagttggacaatggaggacaacgatggtggaggtacaattattttttctcttctccttgatttataatattttatttataatctgagtgaatcgaaatggtttttactcttttttatttctttctatttgactgaaaatggttattaaatttttactctctttttttctttctcattcgctgaagatggttttcttgttggagttttat

SEQ ID NO: 230711 - DNA, 1294 bp, Cannabis indica
atgttcgagagagtgaaaaactttttaacaaggtttataagaggggggtagtctccaaatttgtttacattcaatattttcattcaaggactttgctaaaaaggttgcttagtgaagctatcagatttttagatggagtaaagagggaaggcctaactcctgatgttgttacatataatacattgatttgtggtttgtgtaaaaagtctgaggttgataaagctgagtgctatcttcatacaatggtgaatgatggacttgaacttgattgatttacctacaacactatcattgatggatattgcaaacagggtaagatccaagatgcagataatcttctgaaagatgcaacttataagggctttgtgcctgatgagttcacatattgctcattaatcaatggtttgtggcaggagggtgatatagaccgttccatggatgtatttcctgaggctttgggaaagggctaaaagccaagtattgttttgtataatactgtgatcagagggttgtctcagcacgggcttattttgcaagccttgcagctgatgaatgatatgtcagaaaatgtctgtaaccctgatatatggacttttaatttagttataaatgggttgtgcaagatggggtgtgtttctgatgcaagtaaacttatgaatgatgctatttctaaaggttgtcttcatgatgtttttacctttaatacattgattgatggttactgtaaacagttgaatttggatgatgccattgagggagtaagtagcatgtggagtcatggtgttacacctgatgtgatagcatataacactattgaatggtctttgcaaggctgcaaggaacgaagatgtgatggaaatgtttagagcaatgttggggaaaggatgtgcccctaacatcgttatgtacaacatacttgtagaaagcctttgcaaagctcggaaaataagtgaagcactggacttgcttgatgaaattcaagataagggattagccctagatattgtttactttggtacattgattaatggtctctgcgataatggggatttggatggagcatacaaactatttagaagagctgaacaagaatttaaggtttctcatacaacttcatcgtataatattatgatcaatgctttctgtggaaaactgaaggttggcatggcacaaaagctatttagtgaaatgggtgaaaaaggcactaatccagacagttacacttaccgagtcatgattgatggattcttgagagtaggtaatgttgggttttatgccctaaataaaactcttt

SEQ ID NO: 230712 - DNA, 2153 bp, Cannabis indica
acgagtgtggtttggaggatatgaagctggttgggcacccgtatacatgggaaaaaggcagagttagtagcgcctggattgaaattcgactggacagagcattggttaactccctttggtctcaggttttctctcttgcaactctctataatcttgacttctcttcatctaaccactaccctttgtggctagaaattgaagccaaacaggtgctgagtgttaataaaaaaattcaagtttgaaaatgcttggttaaaggagcctatgtgttttgaaatcgttaagaattgttggaacttggctgctactgatgtagtctcggataaactcaagttgtgtgctgaaaacttgagtgagtggggaaaagaagtgacgggaaactttaagctcaggattcggaggtgtaaacaagagttgaagactttaaaaaataaaagagactctctctctgttcaacgatatagtgaggtgaaaaagaacttattcaaggtcttggatcaaagagaggctttctggaaacaacgatccaaacaactctggttaaaggagggagatcaaaatagtagttatttctataaagtttctacttcaaggagacgccataatcaaattgagaaactgaagaacagtgatggtgagtaggtggactgggacaatggcttaccaatggtggtatctaattatttcaattctttgttccaagcctctggggtttcttgccgtgaagtagttgattgtgtgaaccataaagtccctgtttttgcgtgtgctgaattccaacaacaagtaactgaggaagaggttaagaaggcagtcttttcaatgcacccagacaaaagtccatgtccggatggcatgacaccagcgttttaccagaagtgttggtccattgttggcactaatgtagtgaagatggttcacaattactttactactggagagttcgaatccaattgtggtgatgccaatattgttctaattccaaaaacaaagaacccttcatatatgacttaacttcatccaattgcgttatgtaacgtatcatacaaaattatcaccaaagtcatggtgaaccgcatgaaacctttcatggatgatataattgccgataatcaaagctctttcatcccgggtcgcctaatctcggacaacatccttgtctcttttgaagtgcttcactatctgaaaagaaagaggaaaggaaatgaagggtttatggcgctcaagttggacatgagctaggcttatgacagaatagaatggcaatttttggaggctatgcttcggaagttgggttttgatgcttggtgggttagtttactcttaaagtgtgtctcctcaactcgctatatggtagttcatggtggacgtgagatgggaccgattttacctacaagaggcattagacaaggcgaccccctatctccctatcttttcatcctttgtgcagaaggcctctcgaccttacttcatcgatatgaaagtagaggtcttattcatgattacaaggttactaatggggcgccaagaatatctcatatgttattcgtcgatgacagttatctctattgcaaggcaacattggtagaagcttcaagaattcaagaggtgttgaacaaatttgaattggcttctggatagatcgttaatttctcaaagtcatctattttttttaacacaaacacgaatgtggccactcaaaacaacattagcaataggcttggtatgaatattgcagcccaaaatagtttgtaccttggcctcccaagtacaatgagcagaaacaaaccggctgtcttgggctttctcaaagagagagtgtgcaaacgaatccaaagttgggaatcaaagtttttttcacgtgcgggaaaggaaattttaatcaaaacagtggcacaatctcttccaagttacgcaatgagtgtctttttgcttccatttgaaataatgcgggatatggagaaagtaaagagcaagttctggtggcgatcgtcaaataaaaatgggaaagggattcattggctctcgtgggatagactttgtcaccataaggaaagatgaggcatgggttttagacatttacgtgactctaatttggcgatgcttgggaagcaagggtggagattaatggttcgacccgactctttggtagc

SEQ ID NO: 230713 - DNA, 1688 bp, Cannabis indica
gacacctttaaaccctaatgggtatgggttttcccatacccagatctcacctataaatagaacattacccattcatgcaaaagtagaaaagcaatttctcggatcaagtcctaagaattagggttcatcctctagagaaaaaatacatgtaagaaatacattgaaacttttctagaatattgactcgtggactagagtatattaacagtcgaaccacataaaaattcttctttcttcttctttaatttattgctttcttaatcttatttatttataatctattttcaaaatcttggtaaatattttggtacttccattgagagttgaggaaacaattaccaaaattgtcatctacaacgatggttgcaacatgaaaattagtgttcaagcctcctgctcaagatggtaaggacggtgttgccaacgacagtgagaactagctccccctaacaaacactcaggtgggtgtcacgggggaagggcaaacgatagaggcaggtaatcattcacacctagaagactaacatcacgagaatcaactcgtaaatgatcctattgaggaagatgagcgagatggccatgtagatggccctaaggatgaccacaacaaaaactataaccaagtgtatgaagaagagtattacgagcaagatctcgaagtaatacgacttcagtaaaaacttgcaaacacccaaaggatgttagcaagtaagaggaagttttcacgttaaatgcaagaagctcttgcatgcttacaagctcaagctatcctccccagcaaaaaccctcctaataaaaagtgtaaccatcttggaactgggccctcttccctcaatgaatgacaaagggaagggcataatgggtgcccctctaggaagacccacaaataatgatccactacacaacagaaatgtagttgaccaaccccaactgagagaaagggagaataaagtgccagggccaagccaaccaatcaattcccagggtagagtcatgcagtacaatgggtcagtgcttatgtacacggtcctaacatttggggatggaaaaactgccacaataattctattaactagagcgtttaggtggaggacctagacccaaaagatagcatgttaatgacggaccttggggctcacttaaatgcgaagtagaaaaaagtgaagggtgagaaagcaaggcctaatgcaggcgatttgagaaataacatcaatgatagagtctgaggacgcaagctcctaaatgatcatataagatggctagaagatcagatagctggattaacaaagctcactgaccgtttggtttggaaacaaagtggagccgtatctgactcgaaagatgaggatccagaaccatatgtgaagagaatcatcaatgcgcaactgtcgaaaattttttgaatgccttaaattgaattgtacaagggaaaaaggaacctagggcccatctatccaagcacaataggatgatcaagtagttcaagtcagcgaatatgcaaagtgtttgtgtttatctttgacattttccaaatctgtcaaggattggtggaagggattaccgtccaactccatttgaagttggaagtacttacagtacatgttccaaaagcaatttgtggctgccaaggactttgtgttgggttttatgccctaaataaaactccatttcaatgtaatctattttat

SEQ ID NO: 230714 - DNA, 2313 bp, Cannabis indica
agttagttgttataacttctaattgtctaactaactctaaggtagctaacttagatggctcttccaatttttgattcttgtactatataaagcctatgtaattgtttttcccaattaatacattcttcagttctttctctctaaaaactcaaaatggcatcagagttgaattctttcagcaatggcaacctcgttctccgacgaccagggaggttcttctcaagccgccgccaaaaacaacctcactcttccaaaaactccaactactactttttctcattccttctctgttagactcgatgaacacaattatcatcatggaaagcactaagtttttgctgcaatcaaaggtgtgtgattacaaagatttatcgatccaactctaactcctcctcaatacctcattgaagctaatttcctgactaatcgtctaagtcctaatgatgaggattgggagcaacaagatagtgttctggtctcatagttgttgtcctctatatccgagaagatcctgacaagaatggtggattgtgatctgttgctcaaagcagaggctaatcttgctcataccaaacccttcactagaggaagaggtacatttcttcaccctattattctcaatctaacaatcttggtgctaatccccagtccagaggtcttggatcccaatatggtcagttctctgcttaacaccctcaaccagggctcaatgctcgctgcagtaccccatcttctcatggaaatatgtccaataccggaagtggattcacacatggtcgtggacaatattcagcatggggtcagaaagttcaatgtctactttgcaacaagcttggccacattgtgaagcaagtttttataggttggataaaacctttgaaaggcctgaatcttttcaacaattcactggtagtgctattgttgcagaagcgccttccctctatgcttgtctagaagcggtttaagacaatagttggtatccagattcaggagcaactcatcatttcacaccacatgctcgaaatccaaacaacaccactgactactatggtgatcaacatgatactcatgggtgtggtggaacaagttttcctatcaaaactattggtcaaagttcatttctatctccatttcattcacaaaaacttactctccaaaacttacttcatgtgcctttaattataaaatatcttctttgtgtataaaaaattttcactgacaacaatgtttcttttgaattttttcctctgcattgttgtgttaaagacctggatactaagaagatgttgctgattgggaagcttgaccatggcctatacaaatttgatcctcttccatttcaatccaccactactaccaaacataatagttcaaattcttcaagtattccagaatacactacttgttcataatttacagttttcattgcggcttaacaggttaggacatcccacaaccaagatagtttaaagtgccttaaactcttataatatcaaaataagcaataaaaatgattatggtttttctaatctctatgatgcttgttgcttaggcaaaaatcatatgattcatttctctaactcaaatacaatttacactgaaccattacaattattgtactctgatctatggggtcccgcccagtcaattctttcagtggttataaatattatatatatatatatcaattttgtagatgcttatgctaggcacacatatatgttgagaacttaatgtgaagccttaccaacttttaccacctttaaaactcaagtagaacttctgttgggatatagaattaaaaccatacaatctgattgggggtgaacatcaagccttaactagcttgctgtaataatgtggcattttacacgaagtatcttgtccctacagtcatgaacaaaatggtgttgctgaacggaaatataaacacatagttgagagtggcctaatcttacttgcttaagcatctctccctcttaagtactgggatgaagcttatagagttgttgtttcttaataaacaaaatgcctacacccaagcttgcctataagtctccttttgaagttttattccacaccaaacctgattacacatctcttagagtctttggatgcctctgttatcttaatctaagaccctacaataaaataaaacttcaaatacaaatatattccatgtgtgttccttgggcatagcgtatctcacaagggttgcaaatgcctataaagatggtaagttgtacatttcaagaaatattctgtttgatgaacatgttgttctcttctttattgcagcatccaaatccctgt

SEQ ID NO: 230715 - DNA, 1077 bp, Cannabis indica
tttaatcgaaaaaaaaaaagactaaaccggaataaaatcacaaaagattggaagaattcctaacggtttttttagtatctaaatctaaataaacttatggagatattattggggctacatagacctatcgtcttcaaattttatcgctttccaacaacaaaaatacatcgagcctatattaagctgcatcgaattaggctaaaaattcaaatttttctctaaaacacatatcaaaccattgtgacgttaaatttaacacaaacttaaataaacatattaataattttatatattttaactctaaatcatgcacaataaaaaaaaaaaaaaaaaagcaatacaatggagaagctgtggttgatagagaaattattaagtatgtgggtcgttaggttcacggtggtcattagattcgtgagtcgttgggtttgtgatcgcagtgcttatggagagaaaggaccggagttgtggtatgtgggtcgagttcttagagtgagttcaaagagcaagagggagaaggaaagaagagagagggtaggtgtatgaaatagagggatagaattgattttataaaatgttagtctataataacttaaatttagaaaaataattttaatcaatataaagcgaaatttctttataataactatttaatatttaaaataagtcaaaatttttattttgcttatatttttagttataaataaaaatgaaaacttaattaaatgaggtaagagtaaagaccgttacaaaaaaaaattatttttacactttaaaaaattctttttttgtatttttatgggatttcacacagaaatttctatagcaactaacgtaacaatctaaatcacgacgaaaatccgtttagcaactcacataaaaattatcagagaaaccattaaaacaacccaaaccgtaaattttgaaaaaaaaaaaaagcatatgaaataatttcaaaaaaaaaaaaaacgtgtttcttctgcatttttattttaaaattaacgataaataaaattggataaaaagacaaaatacaaaaaagcctataaataagatacaataaatttatttatttga

SEQ ID NO: 230716 - DNA, 965 bp, Cannabis indica
tttggagaagggcttttttcctcaagttcttccaaattttctatctgatcatatccatttttggtatgaaagtgaagtgtttcctgtaatcaaccataagcatggaaatcttcataatgtaaattaagaagtatagtattaaatttgaaataataatagaccactccaagtaggtgagaaaatagaaaaaaaaaaagtttcactaactttatggaaaagctacaatttttcttttcaagatattaaactatgaaccaaaaaataaaaataaaagtagtataatgaatatttgaacataccggcatccaacaacagaaaattgttacaaccaaagaaaatattgatatgatcaagcatggtaacaagtatgggaacctgtcatttcataagatttatcataatttgtggtgagtctgcctagcttagtaagaaaaaaaatcagtgaactatgaacaataataataaatacatagatatataaaattggaaagctattcttacctaccaaatagagactctttaaaaaatatatttgggaacttctctgcaggctataattcaatttcaaatgcatcaaaactaaaaataatataaaaataatctcaactacaatttccaacttctatcattgaagtcatgcttggattcctctccaaaataagtaaatagataatgatttgttttcctagagactgacatgagtccgagtggcacgagcacgaaaaaatatgaaattaaacacaacacgacatgatgctacacattgacatgacatgacacaaaaaatatgtgcttaagtatgacacgacacgtatgtacgaattaactagcccgaaagacatagtacgagacaagcttgaaaaacacggtacgacactttaaataataataataatgatatactaagcaaatatcatgtgtaaggtacgtatatacttaattatatgtttaggctttttttttaa

SEQ ID NO: 230717 - DNA, 1669 bp, Cannabis indica
gtcccgaccatggtcgcgaccatgaaaaagggtcgcgaccatggaaagtggtggtcgcgactactggagcaaaatttgaccgcttcagcatctttcagtaaaatgtgtataacgttcacatacgaactccaaatgagttgattcaagatgcgttagaaagaagaaaaagaaatctaaaacttttatgttttgactttttccaaaatctgatcagaacatagtcaaatttaagcttgaagtttcagctttattttcttgcagaattttacctattctatagattgttgttttctgaaatttgatcaatttatacattccaagtgtgaaacctgaaaccaaagaaaacaagcgtaattctattccaaataaaataataaagaataaaaactactataaaaagtgacccaaaacgtatgctaaaaatagcctaacaaaccccttcccccaaattcttccaaaaattgaagtatttgaagggttttttaatattttggaggctgggataaattgaaaggataactagggagtgattaaactctccttctggtaaaaaaagtcacctctgctgtagtataattctccaacaaaatttttctaactaaatattctatcaaatttagtatacaccctatctttctcttcttgtttattattccaagtaaagaaagaaacattatatttgatgtcttctaatccacaattcgtaacacaagactgaaaatgaatcatataattaatattccttctatagtacaacatcttggaggtattcaacacagcgtttaagtcacctctaatatttcatggaatttacataccattagaaatagtttccatgtctctccaaactaactctctacctttattatcattagcagcagaaaccacagttaagaaaaaggaatctcctctttttggctttaccacacagtgaatcaactgactagttcctctcttaggtggcgtttggttgaaaggaatgaaaatataagaataggaatgagaatgagacaggaatcggaatagaatgaaataaaatttaaaatacataaaaaaatcattaaatttttttctattgttatattggaatggtctttccttcctttttaaaatagaatagtcattccaccaaaatggtggaaagaacattctattggagtgtcattctaatactttaaaattaaaccaaacaaaggaatgaaatgaacattctttcctttccattctatttcatttcattatctccaaccaaacaccaccttaatgtatacttcaaagctacatggattcaagctataataattcgcctatttgggtgatgagcaagattaatagtgaagcaccaacctttaagcatgctaaggtatatgactcccatcttttgagccttaaccttagtctcaaggagctcaataaatcctatatttttgttatgaatcatattcataacatctcttctctttgaggatttattgatgcttcttactagcactaaacatcggccgagtttatcgggttttagattcgcgggttttaggttcaaaaaaataaaaccgaacctggactcagatagggcacgggttgttgggtttcggttggccaggttgactgcgttggcgggttgacccggtcaactctttaaaaaaattaattttttattcaaataatt

SEQ ID NO: 230718 - DNA, 869 bp, Cannabis indica
ccgaccgatgtacagccctatgggcttgtattgctacatagttatgtcattcggattaaagaatggtggggccacctaccaatggttagttaacagcatgttcaaagatcaggtcgagcataacatggaagtttatgtggacaacatgctaatcaaatctagaaaggttgggggcatataaaggatgttgatgaatgcttcaaaatcctcaaaaaatataacataaatctcaatcccctcaagtgttcttttggagtcagttcaggtaagtttctaggctttattgttaatgctcatggaattgaagctaactaaagaagatttgagccattctgaatatgaagtcactgacaaagtcaaagaagttcaaagcctcactggtcggatagccactctgagcagattcatgtcaaaattaacgaacaagtatgttctatttttcaacatcctctgaggacgtaaaaaattttaatggactgaaaagtgtgaagatactttccaagcattaaaaaagcagctcacacaacctcttatattatcaaaacatttaagtggagaggaattagggatataccttgcagtgaccaaatttgtagtaagtgtcgtactgatcagagaggaaaacaacacccaaaattcgatctactgtgttaagaagaggttaatcaatgctgaaagtccataccctcgaattaaaaaattgacttattgcatggtccttgctttgagaaaattaagaccatacttttaagattaccccatacgagttacaccaaccgatctctttgacaagtcttacgtacaaaagtctgatgcatctgatcagatactcaaatgagctttgagttaggacagtacgaaatctctta

SEQ ID NO: 230719 - DNA, 1008 bp, Cannabis indica
tttatttttaaacttttgtaatgaccttctattataatcactgttacatcacttttatgaaaagtgattacactctattttcattacaattactcaaaatgactaacttatccctactttatattttttttactaaaatagggataattttgtcaatttaatacttattcaaatattcatttcaataacaaaccaagcataacaatcgattcctattataattctcattctattacattactattacaattaccattctatttcatcaaactgaacaccacctaataccaaaaacataaactcgataaaaaaagtaaagtaaaattatgtgggttttaacgccctttctataaggtttctaatccaccggaaaactgcccttgcctttttgcaagctttattgatgaattagtgaacctaagagtacaaggttaagaacaaaagaactagctacaaaatgctgtcttactcctttatgcaatagttcacaatgggtatttcaaattcaggcacatgatttccttttacaatccttcaatactccctcaactatatctaaataattaggaaacaaactgtcctttgtggttagattttgttcagtcataattattatgtaataaagttatataaaacttcaaattattctactaaatttttacttttattcttttaagcaaaaataaattagcattgctcgaattaatatatgataattcttaattaattagtttattatatatattattatagaattaattgcggtaaaaccctcaatattttcattttacttgcacttactcccaaaactcaatttttggcggtaaaactcacaatacttattttctgttagcaatttaacatttccatccatttgaagtgttaagttccatgctggactgtccacgtgtatatatacgtagacacaacatacacatagcacaatttaattggtccatgtaaaaaattatttaaaaaattaaaaaaaaaacaaaattaatttaaaat

SEQ ID NO: 230720 - DNA, 1008 bp, Cannabis indica
gggcataaaacccaacacattacgcctcaccaaatcctccacttcaatcttttagttttatgcagtgattacaatttgaaggattaatgagcttaccatcatagtaggactaatatcagttccagattttttcattagaatgatttccaataatccacgaactattatctctaataaaatccctggtcttctaaatccctttagccacctgtgaagcattcctagggagagtgttatcccaaaagcttaaagaggaacaatacttttctttcatcaaagttacccagagggcatctctatttttcagcaataaaccaaccaagcttagccagaaggcaaaaattgatatctttgaagcttctaatacccaggcctccacaatttttcaacctgaaaattgcctcctaattcaaaagggagagataccgaccatctttgctactaccggtccaccaaaatcttctgataagtacatcaagagagttggtaattttgactaggagagaaaaaatagccatcaagtaagtagtaatggccgagatcacattctttataagaactgttctagccacttgacaaaggagtttggtgttggaagttattttaccaggatcgagatttactaacaagtatgttgattataatctataatctaacaccctaaatttcaaatatctagtttatttgaatttaatttaaattaattaaataactaataagataatataaaataatatattaatttgaaattgagatatttctaatgttatattttaaatcttataatttaataaattaaatttaacaaaataaataatttaaaaatatgatatttttataatcaggatattatcaattttatttaaaataaaatatcttaaatttgaaaattttatgattagaataccctaaaatatttattcaaacaaaaattaacaactttttaaaaatttcatgttattttaacaaaaaatatataaattttaattaagataaatatctaataag

SEQ ID NO: 230721 - DNA, 1460 bp, Cannabis indica
gtgtacaaggagccttttgagaagcaaaatgagagaatagacaaacatctatccaaacaaacttctcgagcaacatcaggtaaaacatcgcgtgtattcgtaacataacataacatagatttatacttatcttaatgcttgtctctgcagagatgactttcctgaagcaagctccagtcctcaaccgaaagcccaaggctggaactgcgacgacatctcccatcatcccgcagaagaggaagagtgatgttgttgcgactcccacagctgactcttctacgaaataggttaggcttgctaaggacaagggaagaaagtcatgatcgaccttgccgtcagagctcgcgacttcgtgacccttcaaggcaagtttgtgaatgatgagttcatgtcgagggttgaggcgattcctaccgaggagatgatgtcgctaggggcagaactggccacacagtttatgactgtgttctcgagggcgtttgtcgctggctccaaagaatatgatcttttgaaaaagcagaatgctcttctccaggagaacgtgaagaagttgaagtaggacgcgaactccaaggatcaagacatcgaggacctccaaaaagccaaagagcaggcggagactaaggccaacctttctcagtcgaaggtcgaggaattgactcgcgatctggagactgaaaaggaaaattggaagaaatagtacaaacaagatgtttctaactacatttatacgaccttattcaagatgccagacttcgacttccctgttcttagagtagaagcggctgagatggtcgaggcttttcacgctatttcgcctactcagactcaagggtgcggaggaaacctttttcctgaggaggcagagactgcagatgcggaggaagtcgctaatggagctgccagtaaggtcgcagattgccctactgctccaactgcttaatttatctaagtttttatttaaatttatcgaaccttttagcggtacacgggtactcgcattttgtacttggaaaattttcattttgctttccattttctttgaacaatatatatcccttcgaggatatttatctatctgttttctttaatcggtacatgggtactcgcatattttacagacttgcttaatcttaatctatttttacaatattaatacagctgtgtgtaataactttaaaaatgttaagacttgcaaaacatttgaactgtcgagaattccagaatttttttttattataacaagaaatcaatagtacaaagtagttctatggtaggctataccccctatacttagaatatttatcaaaataaattggctaagtataattacattgcgagtactattgataataatacttaaggctttttccattccaagctctttcgatcgcagtaccatcgagttctgaaagttgatagatcgcgtggccaattttttcagcgataagatatggtcc

SEQ ID NO: 230722 - DNA, 2055 bp, Cannabis indica
tttgggggataggatctgaagttttgaacaggtccgaatagtatttcaccaaaattgcctctatttcgtggtcctccttgcaccatcttctatgatcatcaaataacccctttatcatatttttcttctttcgttgggaggctttatgatgaaaatacttagtattgcgatccccatgagcaagccaaagagcccggcttcgctgtttccacattatttcatctttggtctcagccacattcaactcaccttctattcttcttctagtcttccaatccgccgccctagaagacttagagaggttgtttagctcctctttaagtcttttagttctagctctaagatccgcctttttgtccttgttgcaatccttaagagtctccccacaaagattaatgcgaccccgaagaccatgcggggagccccaattagtattatcaaaccaaaccgattctacaatccgaccacattcttcctcttccccccaagcttgttcatagtggaatcgagatctccaagtaggcattctatttgcacggtccatggcaaggctaaatttaagtaacatgggacggtggtccgaactccaccatggaagaagagttaccgaagattcacaaaaatacttgaaccaagtcgggttagccaaaactctatccaacttctcaaaaaccaggttatcttgacgcccattgcaccaagtgaactcacccccgttcattgtaatctccttgaaattgcagtaagaaatggctcttcgaaagtcacgtaaaagtgcttcatttttcacacagccccctttcttttctttagccttaattatctcattaaaatcaccgccacacacccaggcaccttgaagcatatcccgcagtctctcaagaaggagccaagagtctttcctacctcccggatccggacttccataaaaccccgtaaacctccaagaaaaacccaatccattttccaccattgcatcaatgtgagaaactgtgaatgattttacattcacttcaaacggctctttccacaaaagagcaagaccaccactcttccctttggccgccaccacaaaacaaccatcaaaacccagcaccactcggattctttccatcgccacatcattaagtctagtttcggataagaaaatcatctcgggatgataatctttcacatgggaacaaagggctttcaatgtccaagggttcccaagcccttggacattccaaatcaagatactcattgcactcggcgacccggttccaccgagttcgccgctgtcatgttcaccccagagtccaaatccaaagatctagaaatgtcccctgcaacgttgtttatttccccctgaactgaactttctgccaagtcttcattgcttgctattataggagctttgagttaggtatccacctttttgtttctctttgccacaacccttttctttcttccacccttctgacttaaaacctcacccctaactcctttcccatagtgatcgagatgtcaatccattctcccccctctttagttaagtgcatccccgaatccacaatctccccattgccttctctatgtaatcgtttaccaggttcactgcccatcccttcttccttgttcagcacctcccaaaaatccgcccgtcttttcaaaccagagccactctctttcccaaagtctttctctactcgtttatccttaaaactgcctaataagttactgaaatcaaaaggaatagatagtttagaagtcgatacctttgtgttaaacgagttccgattggtgatgttcggaatttgatcgatcttctggacttccccaatggagatgccttcaagggtctttttgcactcatcacctcctacaacccgatatgtagacctgtttcgaaaaacttcattcccccctcctctgtaattgcctttctctcttttagccccattggtttgtcctcaaccttcatccacgccccataggccagtgaactacatccattgccatccgaaatagttacaggatgcttctcacaggacctaaagtcgtgtcctattcgtc

SEQ ID NO: 230723 - DNA, 2038 bp, Cannabis indica
ttgttcttatagatttggtaagctcaagtattttaaaaaaaaataaaaacatataaataattgttaattattataaaattaaagattttaggtttagaaaaaatcttatacattttatatgtattacagtttaaagcttaaaattattttttttttgttttcagtaatgcaatttagaattctagtttgaagaaattttataaaaagataaatatacattttttttcttttaatctttaaaatgatttttattaaaaaaaaatagtttgttaatttttttagtgtgttttatttttaaataacacttccatttataaatttttatttctattaatagttttatctattttaggaatatagagtaatatgattataaatatcaaccattagatatttgatctaatggtcaagaataaaatatccatacatgagtaatacccattaagagtatacctatatatatatatatattgttaaaattcttccaattcataaaaagactctaaaatagtggtagttgggagctatctcccacaaacttaacaaatcacaaataggaccctgagttaaaataagttataggaaaaaaaatgagaaaattgtattatatactcactttactttatttattttaatatttacctttatttttatattcattgagatatacctaattttatatatgatgtccccattatatctcttagattaatataaattatatgctatacttaagtggagggtgaaggtatatttggcaatccactcacaaaaatggatagattttaatgaaatataatctgagggtatttttgattaatggatacaaaaaagaagtatttttcaacttatcaaaaaaaaaattaggcccttattataagaataaatggtatatttaaaaattattaaaaaaatatgtatattttttaaaagatatttttttatttgagtccttaaaatggtgggcccaaagcgcgtgcctagcacgccttaatttagggttgacccggaccacaaacattgtttgagaagccccacgaggccagagtgtaagcagccaagtttgactccctattacaccaaataacaaaacaagaaaaaagtcaaaaagattaaaaatagagaaaattatactcactatggtattttaaaagttgtttatttaaatatggtatttttaagtttgaccaatttatatggtatttttttatttttatttttaggtatttttatggtatttgatatgtcatatatatatatgtaaattaggtttttaaagcccatatttaatgtttttatttattttaggaagttttatttgtcattggtgtcagaaaagttgtcagaatttgttgtctttgatcccttctcggggcattcgccaaggtgatcttttatcgccatacttgttcattatttgtgtagaggggttttcttcccttcttcataggtatgagatgaatggttccattcgtggttgcaaggtggctaggggagctccagtggtttctcacatgttatttaccgacgacagctatgtgtattgcaaagctattgaacaagaagcctctactgtccttaatctccttcaggtgtttgaaggtgcctctggtcagcaaattaactttgcaaagtcctctgcttttttcaattctaatacggaggtcagtgtttgaactaggatctatggtttttttggagattcaaaaggctgatgagaatagtacttatttgggtcttcccaatatcatgggtcgtaagaagactgctatcttgggttttcttagtggtcggttgaagaagcgaatccaagggtgggaggaaaagcttctttctcgggctggtaaagaagtccttctaaagactgttgcccaatctcttctaaattatgctatgagcgtttttcctcttaccactggacacttgtaaagatttggaaatgtctcatggcaatgttttggtggcaatctgattcttctcaacataaaggtgtacattggatgacttggtcgcgcttgagtcgtcactaacatgctgg

SEQ ID NO: 230724 - DNA, 1707 bp, Cannabis indica
tgggatcgagaatcttgggctgtatatgagcaagaagaataaatactcaccaagaacattctctgtatttataagggtgacattccctcaagtgtggaatctgtattaaatacatccatcaataacaaagactcgtggactaaggctcattaacgccccaaccacgtaaaaatccttctctcgctttcttacagctcaatattataatcatattttagtagttgccgaaaatctcgtaaataattgaaataaatattaattaattaacataatgtcactacaagaaatgtcacttttgccagcacatttttgtgctggcaaaagttggtattgcactgataaaatagaatacttgtgatgtgttggcaaattaatgttggtattagaacttttgctagcataaaatgaaaagcgctggcaaaaataacttttcccagcgcgtaaatgcactggtaaaagttagattttagccactgcaaatgtacgctggtaaaactttgacttctttgctagcgcaatttgtgaaatgcgctggtacctggtacttttaccaacgcagtagcgaactgtgctggtaaaagtgatatttcttgtagtgtgtaattgtttctcttattttttaagtatctgcattcactataaaaatgtaacttaactacacaacaaagatatccaattttttttaagaaaaaaaaaggacattaaatttttatgaaaactaataaaataatgtgaatcttttaagaagcattgtgtattttaaggtgttaattgtgtattgcatgacaccatagtataacaaatgacaaaataacattacacaattaaaaaataacatttatagtgtaaaattaataaattgtccaatgataaccttaataataaatgacaaaaaatacaaaaaaaaagccaataatctgactagagtggatataagttctgccccaaaatctataaaaatgaaaaatattactttttcatcatgtgcgacggacatttttaatggattatattatattatattaataatatttggtgcgtgacttcttccgcagacatacaatgcgggagagaatcgtttgcctatatatcatctatatttatatggccatctatatcatcaggtggatgcgttcacagagtcagccttcaagggaaacccagcagctgtttgcttgctagacgaggacagagacgatcaatggttacaatcggtagcagccgagttcaatatctccgagactagttacctgactcggctgcccagtgagtctaactctgatgggtcttcaactccaaggttccgtcttagatggttcactcccgttgttgaggtttgtttttcaccatttcttttagttacactcgtatatttaatcattttgttgattggtttctgctaatttgaaaacccataacatggattttgaattcaagtaagatcaattgcttatttctttagttatctttctttgctcatgtgttgattttgcaagttaagaaaaaatctcagaaaatgattacatagttttctttgaactataatgacttgtagttgtaccagcatttcccccaagtgtcactcaagcttcaaagatcaatgcccttgcatttttattttggctaattaggattttttgttccctaaactttaacatgtaccaaagcatacccctgaatttttgtttaatttcattcaattttaat

SEQ ID NO: 230725 - DNA, 1260 bp, Cannabis indica
attcccttccttccattgaaggcgacaaatattttttaaccatagtggatgatcactcatgacacacttggttatattttttacattcaaaatcggatgccactttggcaatcccaaatttttttcaactcatacatacacaattcaagaccaatatcaaagtatttcgtactgataatgccaaagaccttacacttactaatttctacgctaccaaaggcaaaatacactacacttcacgtgtaggaagaccacaacaaaatgttgtggtagaaagaaaacatcagcatatactaaatgttgctcgagctctagccttccaatcaaacgtaccactgcaatactagtcctctattattgctactactgtgtatcttttaaatagaaccccttctcttctattaaaagaccaaacatcttttcagatactacataacaaacaacctcaatattcacatttgaggaattttagttgtcttgcatatgcatcgcatgtcacaccagcagccaaactctcttctcgagctagagcttgtgccttcctgggttatcctcccaatatgaaggcttacactccattagatcttcaaaccaagaagagatttcagtcacgggatgtcctcttctatgagcatatttacccatttggccgtgtgtctcaaacacaacacatagaccattttttctcccaaacttctgagattcacccttctcagtctcacttaaaccctctatatactactgagatcagtccatctcagcaacagaaccacaatattccaacatcctcagcagacatctccaaggatacaacataaaatcttgaaccatctattactgttcctccttccaggactaacagaccatgcaccaaatctggtcgtgtacaacatcctcctagttacttaaaggattatcaatgtgattctgtgtctgctaacatcagcacagatcaccctctcctcaattacatctcataccacaaaatttctcttgaatttcgagcagctatcctatctctaagtctcataccagaacctacatccaacaaacaagcttccaaattcaaaatttggaacactgcaatgatgtagaaatagatgctctcaaaaaaaatcatacatgggttgttgtcccacttccacctgaccaacatgtaattgacaataaatgggtatacaaaaagaaactaaatcctgatggctctcttcaacgttgcaaagcacgtttagtagctaaaggttacactcaattacctgg

SEQ ID NO: 230726 - DNA, 1412 bp, Cannabis indica
attcatttctttctaactctgtatcttgtaaatgactgttttctattttaaacatatttaccagctttgtacattgaattttagttgaaagtgtggtagtgttggaacagtagtgtgttgtatgttgaatttaaatttgtagtgatttattttcaaaggagtatattttgtttttaacttgtgttttggtaacgatacttttagtttttgtatttcatggagaataaggtatgtcttctaatgaaggtttgaactctggttagctcttccgaaatgtgtaaagtcctctgcttgaatggataatgatatgtatatttaccttgtgattgatggtggaaacttaagagaaaaaaggagtagtactctcagttagatatgcttattttagtttcaatgtattacattagatgggtcctggtaatttgaaatttcacaatacattaagtgtatgagcaagtgttgttggcattatataatgttactggtcaaactcaagggttaatgtagaatgttggcaattgctggtaggcagtcgtttcaaggtttgaatccccttatactctaaaacttgttgccactggcacttgcaggtctcctggtcgaactgttaaagacaaatgaaaatgtggtcgaactcatatttttacttcttttttgtgattatagctcaaattgtagattgttaaatggaagttaatgtgctatattttgttaaaggaacacgcatttcttgttatgtttaatatgaactgaattttgttgtatttttccttcacaaatttatctgtatgcagaaaagggaagccccagctggtgagaagccagaaccagttagaactcacctccgtaacatgattattgtaccagagatgatcggaagcatcatcggtgtgtacaatggcaagaccttcaaccaggtcgagatcaagcctgagatgattggacactaccttgctgagttttccatctcatacaagcctgtcaagcacggtagaccaggtatcggtgctacccattcgtctaggttcattcctctcaagtgaaggctgccagtttgcatattcagtatttttgttttgaagacttacatgaatttttgtttcccttttctgttgtttaaaagattttgaataccattaattttgctctttagtctctgatcatggcctaaatattggaagtatccttttttaccttatacttttttttaatgaaaattatatttttctttccgttgaatacagctgaagaattaagaaacgattacttgattaaaattgtcacacaatctggtaaattgacagtttttatttgttgtgaacaattgaactaattgtttgatcaataagttttcctaaaagtacatcaaagtaacagtaaattcaagcctttgggttgttttgatattggaa

SEQ ID NO: 230727 - DNA, 2333 bp, Cannabis indica
gttgaaatagttttgaaaaatgaacaaatacaaatttaatataagaaacaactactagatatagaagaaagtaatacacatgtaaataggctacttaagctgaataaggaatatcatcactagattatacctctgccagccattgcagcaccaacaagaactgaaaaacatagacttaacataaaaaagatggaaataagaaagtactaaactaataaaaggacaacagaaaaccacagaagactcagtaatgcagaatacaattcatttcttgtattttttagtagtggcggtatcctcattagctttcagtctcttagcaataatgatgtctggtgtagttccaaaagtatcagttggtgaagtttcatcaacaagtttagctttgcctttatccataccaaggaatttagttctttcttgggagtgcttagtaggagagagtgatattgggtgaattagttgagtattatttcccttactcgacccctgttgagttagagccacatccaaggacttagttatagtagaagactcaaatgcaattacaagctttccttttcctttattggatttcaaagttggttggataatagtggaaggagcagtgccaacaaccccagaaacaatagcagggacttctaattaacagaataaaggaacaaacggtgaataaaccgataatgggggtcatataccgaatcatgtgatcgaggtttcatggggtcgcgtagttggtagatcaattgaggaatcgtgggtagaaaccatttagtggtacagaatgagagaaactaccctaacttgaatcgaataattatctaaatcaggagttataacaagaagtgaaatgagatcgtgggattctcaatagacagaaagatgggtagttaatttgagaataaggattaacatttaacacttctatagaagaagaagatttttaacacaaatgcacatgaaccatatattacctaacagaaccatagatacaacctcacaaatctcaacagtacatcacaaacaaaacaaaccaacaacttatttcaacagaacatcacaaacagagtaaaatccacagactactcgagaaagacattgaattaaaccaaatatgtttctcgtattgtgtttgtcagtttgaacaaattgtgtgtttttgttcacttttctcccccatgaatctctccaaggaagcaaagaatctccgaaattgtgtaatcctaaagaacttcgattgaaaccagtaagagattgagcagttaaaagagaataggattgataatgcgtcgtgttattacccattcttccatattatttaactagctttttcataatttggatagatctatagggcaagtattcctctttatatttttgtaaaaagtcttttattgttcacatgcaaatttaaagcttattcccttgaaagggaacaaaactttctttgcgattaattgttctttatgagtccaccactatttctatgtgtacatcactaatcagaagccaaattgaaactggaatcttataagtggaggattaaatcaatcatttaatggcatattcaattttctcttctggtggtgttttcttatgcgtagtttaggcatttatgttgcttgaatatgttttaaggacctgaattcattgcatatgagtaatttgttgatttcatcttcgtggcttttttggatagtatgtgttaaaatcttggttagactaaaattttccaccaaccgtgaactataggcagttggagaactatactcaatattttatttgggcaattgaagagtctccaaactccaaaccctttaattatgatcaacaaatgattctatctcaaatgtaatttaaagaagacaatgaagtattggtgggagacttacagattgcgattcttgctaatacttgaatttgttgtgaatcaactactattttctttgtatttcaagtgactactattttctttgtgaaactagagatcatactgtttaatctcataaaatgattccatttttcatttttgattatgtcaaatattgtatgcagatgattgaaacatcgactaggttacccgctatacaacggctaattgagattaaaactgttgcagagcaagtacacttcaaaatatcaacctctctctcactttcactaaatcgcatagtcaccattagcccctctcaggtggtctgagattttttggtacaacagagccttctcatctctggttaaacatatatgatttttatttgataattactttttatttttaaatacatttaatattatctatctttggttatacagttcaaagatgacaagcc

SEQ ID NO: 230728 - DNA, 917 bp, Cannabis indica
aggtacacttggtctaataaaactatttctgaacgtttagattgggttgtagtgtcggaatcttggagtgatctttatccgaaccatagtctccaacatcttggttattatggttctgaccatcgtgttcttaaacttagtttagctcctactaatattaactatactgtcaataggactaggcgttttaggtttgagaatacttggcttgaagacccctccttttataatgtggttaaaaatgcttggaatagtattctggttcctgattctgtgcaaggtcatcataatcctcttgtaggtggttataggagttttcttaagaagcaaggggattgtatttcttctctaaaaaattggaatagggacaataacctcctctttaaaactagaatccaacaccttactcatgaaattaatatgcttcaggatcagttgtttttaaatgatgaggatagggctcgtttgggtagattacaatcattgcttgatgctttactctataaagaggagatttattggaaacagagggctagagttaaatggcttaatgcgggggacaggaatactaagttttttcataaacatgccacatcaaggcgtaaaactaaccatattaaatatcttaaaactgacactggggaggttgtcaactctttggaggggattatggatttaattactcgttttttctctgatctttttacctcccagggaagtgatattgaggctgctgcctctatttttgattgtctaggctctaggctttctgatcaaagtgtagagagtctctctcagccgtttgttgctgatgaggttaaaagggctgtgttttagctttctggggataaggctgtagggttggatggtcttaatgcctttttttatcagaaaaattggtttgttttgggtaatga

SEQ ID NO: 230729 - DNA, 1172 bp, Cannabis indica
tttcccataaaggaatctcagctagtaggcttctcaaccaacatgcttcttcactagcagtaaccagtacaatcatttcagactccattgtggattgagctaatattgtctgtttcttagacttacatgaaataactccaccagctctactaaaattatagccacttgttaccttggagtcatctgataaagtgttccattcagtatcattgtacccttcaacgacagttggaaacttcttgtaatgtaatccaagattcaggattcttttgaggtatatcatgaccctctcaataacatgtgaatgctctacactaggtctactagtaaactgcataataatcccacgacaaagacaatgtcgcgtcttgtccaatattagtggcatatggaagactgccaatgatgctcgcgtattcagattgtcttacacaattcttaaatgattttacactgggattatatggtgtacaaagaggtttacagttaaagtaattatatttctttaagatcttctcaatgtagtgagattgctccaaagaaattctcttttcaaacctagtgatatgtataccaaggatcacattcgcttcacctagatctttcatgtcaaaactttcacataacacaaatttcacattgttcacgacatgaatatttaatccaaaaatcagcaagtcatccacatataagcatatagtcgtgaaaacactatttttatatataataaatgcatttgtcattttcatttactttaaaaccatgtggatgacaagattatcaaatttctcatgccattgcttaggtgcctatttcaaaccatacaaggatttatctaatttacatactttatgtttttgaccaagagcaacaaagtattcatgttggtccatgtaaatctcttcttctaactaccattcaaaaaagtagttttattatcaatttagtgcagaataagattatgaatagcagcaagagcaatgagcaaacaaatagatgtaaatctagtaacaggtgaatatgtatcaaagaaatctatattttctctttgtctaaaccctttggcaattttctctttgtctaaaccctttggcaacaagatgtgccttgtacttttcaataataccatcaggtctcaatttctttttaaaaatctacttacaacctattgt

SEQ ID NO: 230730 - DNA, 1431 bp, Cannabis indica
aaaaaaggtatagtttttttagggtttaaattattggtttagaaatcaaattttttgattttctaagtatagaaaatcaaatttcccattaacaattcaaaacatttttttttataatgtagtgagttgcaagtagttagagcggtgtaaagtctttttccaaaataataaacatttaccagtctgaataatacatgtatggataaaccctcttacataccatccacacaattttcccttttttttctttttaaaaaataaatatatatataaataaaaactcaacaaataagaattttataataagaaaaacgaagatgatgaagaatattaaattactgaaatggatactaaccctaacaacaattatccaatcatcatcatcatctgatattccgactccgttaccggcgccgtggccggagcaattccacgcagtggtggtgatgaacttgagcgaaagccaacaagtacacgtgacggacttgtggtacgactggggaaagggtagaaacgtaaatatacaccagaagcaattggcggagaaagaatacgccgttgaatggaataacggcacgtcgttttactactcgcttaaccacaacccaccgtactgtaatatcaccactttcgaagtgggaattactcgccccgattttttacagactgatgccgagtactcggggactcaaatggtagaggggtttttgtgccacgtgtggaaaaaggctgatttcattgtttattatgaagatgttatcactcaccgtcctgttcgttttgatttcgtcgatggtagtaagtattatattttaacccttttgttttaaaaaattttaattttagtcatcttaacatttttattttacattttagccctcttaatgtaggtggctggcattccttatgggtgcatatcacaattaattttgttatgaaaattacatattcaagctcatactttcttaattaattagaccttaaagtgctaactgtttaaattgcaattatggaattttaaaccacaagctctgcacacatatgaattacttgttgttggttttgagatatgaaactccacacactatcacaattcacaactctactttttattaatagattatgttattattaactcagtaaataatagatatgataatgatgatgataagtaggagtgtttattaatcacatttaatatttttaggtatatttagatttgatttaattatgtattagatgttagattttattatccgatctgatttaacttgatctaatatccattcaacatccaatggatattggattgaatcggttctattcattagatgtatttcatgtaaatctattggtttaattttagtttatctaatattttatacttagtatttattggatcgatcagttattattagagattgaatcgat

SEQ ID NO: 230731 - DNA, 1013 bp, Cannabis indica
caatgcaacgctcgaggggaaagaggccgacaccaaggagcgatgcaatgccattgccaaacgctctatcgagcctggatggcgaatccagaaatggatttgagtttcttgggaagggccaagacgaattccttgcttactgcgagcaagctagaaaggtagaagaggaagtcgagatatcgggagaagtagtaaaagaagaaccatccgactctcctactatgtaggcttggtttttaattatttaattttaacttttttttggaaaatggccatacgaccgagacagtggtttgccctttgtggctcttttttaagacaaatttgcaaagttggatggctaaccttgcttttattttatcttttatgtaatgccttgtacttttgcattcgaacataatacatttgtttacttgagttttttattcacaaattaaacaattatactttaatcaaaattaaaactcttgaagcatttccatcgctcttattttcctttgatattattaaagtaattagtaatctactatgtgcgcgagcagttattgtctgctatgctttctgttatcccaaattttgcactctaatgtggcatcacaagaatggtgacacgtggagtccacttggaacatctgctcgggaagatagggcgagtaggatgcctcactgacatgtccagagtaagatatttagcgatccgtgcagagcaatcaacacttaccaaattcagctttcgcaacatgagtcatcagctcaatccctataactcagggatcaatttacgtggatacgacatacacacgatcccactatcagtgtactcagcctcaatcccacgatccttgcattcagcattgatcccacgagtttatgcgcattgtaacgagagaggaaactcttcctcctcaagtttcccagccttataaatagtgatacatgttcactgggcaaagggaccgagagatttaaagtcgatacggagctaagctaagactatattattatctaagaat

SEQ ID NO: 230732 - DNA, 1989 bp, Cannabis indica
ccaacatattatgcatcgcttacgtcttccctggcgcaacgaagttgatgtctagccttgcacatccaatgtcgtatggtttctcgttaatacgcgaggcaacagtttgtatatctttatctcgcttaagaccttatagtcaacaagttacaaatattctctgtcacttctgcatttaatgagttattccattaaatgtgattatcgatacacgcatcgatccatattccccttacatgacacgtgttctccattgaaatagtaatcgaattttgggtataacatatacattaagaataaaaaggaaactataaatatatatacatctatatcagggttggctatggtgcggatagtattatccccgtctcgaccaatccctgcttcgactacttgaaacttgccccacactgcccattaccaccaagtctgggaatccccactctttagggtggatccccatagttacccatccccactgtataaatttccatctctagttgtgaacaggaccctcaaggacactttgaagaagtggcttgaagaggcaaaaggaaattggccaaaattgctcccaaaggtcctatggtcgcacaggaacaccgagaggacggccactggacaaactccatttgctctagcttgtggctatgaagcgatgttacttgtagagttagtgccaccatctcacaggagaacaaactatgaccaagatataaacatcttgctggagaaatcccttgaagaagtaaaagaaaggagaaagttgcaggcctaccagcaaaatgttgcaagacactttaacaaataagtttaggaaaggaaattcttcataggagacctggttctctgaagagtgttcctaaccaccaaagatcctacatcaagattgtttagatctaactggaaaggcccctaccaacttacagagataacaagtaagagagcctacaagctgcacaggtacaataagaacatagagctggttctcctaccaagatattagaatggtgatcacctccaaaagtactaccagtgaccaccttatatgaatgctactctctagtagaagttttattaactcatttataagagttagtttaaaagagccagtacccataacctttcgacatggcctcccattgttctttaatgatggcctcttcttgtcgagcagaggtagccacttgacttctagaagcaggatttttagttttgtaagcttgtagattcaattatgtaagttgcacaacaacaatgtccaattaatgaataaaaatgatgtttcagttcaaatatattatgtctaaaccacttgctaacaagattaacattttaaagttattcttttcaattccacatacatagaccaggtagcaccacaagaaaattcccaaccaaggtcaatgaaacatggtgaattgcaagtgaccaagagaccataagtttgcgtgctcacttgggaggctcccacactgtacaatgcatcaaactagcacggaaaacttatggataaaacttataacgtttactataagctactaaacctacctctaagtcaagtgcaggcatactttagcttggcataatgaaaagtaaatttgaataattatgtgtcaaggcaataagaagatagctaagattaaagaccgcctggggggtcacatatccatgataaaaggctttagggctaaacaatgtaaatgttaaaaaaatgaagtgcctataggccaaagtaagagtgtgaaagccatgaaggcaaaaaataagtaacgttcaaagtaaaaggccaataggccatacaagagcatgaaactaatatgtctatgaaaataaaaatcaataatagcaggatactactaaaagtgtaatctaaatcaatgtgcaggccccagtggagtcgagccgaaagctgcagtatgcgcagaagtggtcggccatggccgcgtgcaagctggctgatcacatggtcagcagcttggcttgcca

SEQ ID NO: 230733 - DNA, 1309 bp, Cannabis indica
gactgatatttaattagatgtgatttaagaggtatgcaatatgatgaacagtatgattttggtgataaagtgtttggaattttatgtcaaatgtgaatatatatcaactttttgtatgtatggtcaatgagaagagaaatacgaataaaaatgtgtgtttttttttcactatatatgagattattgccatttacttttagaataaggataataaaatgggtatttctttcaattttcctatttaattaatgagcatcttattttatatgatgagttttgaaggtgattaaatcggtaagaattttgtgtacttggttttaggtaataaatgaagggataattaaaaaaacacaaaaataatttaaaaaaaaattacaaaaatacgtatacgaaatttttaatatttttacgatttttatattttatttatgtaaaatacagtatttatatgtatttttatgtggtactcttattattttgttgttgattttttgttatttgtatattttttttatgttattttgatgttattttttattattttgttgttgattttttgttatttgtatattatttttatgttattttgatattatttttattattttttttttttttttttgtgtttttatagaatactgtaaaaatatatataaaaaaattgaacctaaaaatataaaatttttataaaaattagtgttttatataattatccaataaattaaaaggatatgcattataattaaaattaaggtgaattaattttaattataagaaatcaaagtgtttagtaaatcaacaagtgtaaccagtacttataaaagctactaaaagtaacacgtaactaaaaaaagaacaaaccaacacaaacacaaactcaaacaaccacaagctttcaagttgaaaaatataaaacactagtaactaacacaagcaattagtttgataattgcttgtgttatattgtatgatcagtaacaaactcgggtatattgtatgagtatcctatcgcccctcgacaactgttatgcttgtattgcatgacgggggtatagtagaggaagaacgatctccatcccacaaatctgagatagtgaaataggctggtggtttggggtgaggcaacactttctcaccactcaacattagaataacagaagacatattaggcctatcaactggcttttgttgaacacataagagaccaatatggatgcaacgcaatgcttcttcaatgttgtcaaatggatcttttaataagtatttgtcgataagcttaatttcgttgccttccttcatcaaagtccat

SEQ ID NO: 230734 - DNA, 768 bp, Cannabis indica
caaggaagagatgcattagaaactaaatacaaggtttgttaacaataaaggaagttaactcccaaaaaaggaggggcatccactaaacttggcaagcctagcccaaattgccaaagcattggcagctacaacatgagtttggggaatccaaaacacaacttacaatgagacaagtctaaaacagaaaaaagcaaagagcacagaccagccaccttctaaaaaggctaagcattagaaagagcaatacaatcactgaacataacaactttcgaccaacctacgtctcgagccatatcagtcgttagaatcacaactctaacatgtcatattattattaatataattaagtatcaattcttattataatttaatgtaataagttttatagaatatcgctaatgagaaatgctaagaggtaccaatggtgcccagcctaacaccatcttagcaatcatattgttattagtgtaattaagtatcacattctatataatttaatttaataacttttaaggaaaagaattaactaattgtaaggtgtcacctacgtgatgttaatgcactgctagtatctaataacaatactctatcactaactaatcgcaagacccaatctctaaatgatactaaccactattaatattttataactataggcatcgttatgaagaagaagaagaaaatatataaagaatattggagattaactaaaaagtagtactggtggttgtattgtatctgtttacaaattaattaatataaacaaat

SEQ ID NO: 230735 - DNA, 968 bp, Cannabis indica
agcaatcatcttatcattatgtaattttttgttcctcctaaaccagatttgctacatattcaccaaaatcaactctaaagaggctacaagaaaattatcaagaaacttatgaataaaatcataaaaattgtgacaaatagcaagaggatcctctcaaaaaatatcacaaagtttacaacaattagctaaagacgggcactcccataaggcatggtgggtagtttctaactgggaatcgcaaataggatatatctcatctatccataagtcgtgctttgtaagattgtatttttatgcctttatggtaattttatgtatttcaatacacgacatttcatttatatataatacatattcttgccctattttctcccaatatacgtggctactccatgacacgacatgtggcagataaagattaagtattcggaggtgtttaaacaaatcttcagtaggaatgatttccttggacaacctaccggttcctcctagagctataactaggtttggagggaccaaccttttgttcatcttcgggagctaggtagcatctagctcgctcgggcccaacaaactggagatgaattatccacgggcattaaatgcagcatggaggaaacgtctacagacaaatatgaaaagacatgtcagatgcattaaacccattctttagcaattttaagttagtcaaggatgtaagtgatagctacataatgtactattacatcaatcaaggaaggataagggtttgtcttacctaaaccctatgcatcctaataggtagggacgcatgccctacttcgccgatttggaaacttgtgcatggccaaggtggacacttaggacaatagaggcctttctcctttctaaataattgttatcaatacccccaaccacatttataatggggggataaaaaagaaaatagatcagaacattctctgcaaagaaacacctacatattaaat

SEQ ID NO: 230736 - DNA, 971 bp, Cannabis indica
gcataaaacccaacagtaatcatccttaatggcatgttggccatcaagagcctcctgcaacttcttcttgtgatcctcaaggtcagtttgcaacccagagatgagggcagcctcggtgctgtttttggtattcccgacactaagcatgatctccaaactagaaaccattctttgcctctctaccaaaaaggcctttagctcagaattggatttttcctttgctgcaagggaagcctccaatatcttcacacgctcctgaaaagcatttgaagaccccctagagtaatcatgagtaaagctcaatttcattagggcctaaaaacaaagcaaaataacatcaatgttaaacatcgcaactctagccggacagtcccctgtttggactgttatggatggccagacaaccatgtaggcttctaaggtcggccagccacatgtaagaagcaccatggccaaccatcctttatagtgccaagaagatgaacagagctgaaagtataactcaccagagaaagatcctgaagtccgacgcagtaaagcctgtcaggtccaccgtcacccagctccttcagagcctcatctaagaaaggaggagccctctctatgcaccggttggctgactcaacaaccttctatctagcagctgaccccgctcctctagtgggcctccgtgtgccttggctgacaggccgtactacaggctgtccaggtggtgcaggctcttgtggaaggggaggcaatgatggtctagcaacatcctcaccacaagaggtcttggccaccttgggcctcacccatgcggtaggctcatccaaaggttcgcctgcaagacctctcaatctggaagacatgtctgcaaaaagaaagtagaaaagttagaaagcattcataaatattcaatgcaagaataaaagcatggtgtcattaactatcaaataccatcatcatcagaagaggagctatcaaagccc

SEQ ID NO: 230737 - DNA, 1344 bp, Cannabis indica
ataattcccatctcagatcgtgccaatgagaatattctctcggtcgagatgaaatctgcaagcccaattattataaaaaagcccaaaaagcacaaaaggtcaattctaaagaaaaactatacattcgattaaagatgaactctagatgaaataagcatataaatggaagagttacatcctagatagatgacatatctcggatgggatgagatagctcggaaggaatgacatatctcgatgggatgacatatctcaaatgggataagatagctcagacgggatgactaatcttgaaagatatatatcttggatgagatgatgacgtatcttgaatgggatgatgtatctcagtgggtcggttggatgacccgtatctcggtcagtcggttggatgactcgtatctcgatcggtcggtcacggtgactcctatctccataggtcggttgggatgactcgtatcttggtcgatcagttgaatgactcgcatctttgtcagtcggtcggtcagggtgacttgtatctcaattgttcaatcgggatgactcgtatctcggtcggtcagtcggatgacttgtatctcggttagtcggtcagggtcactctcatatctcagtcggacgatcatatgactcgtatctcagtcggtcgattagggtgactcgtatctcaatgtcggtcaggattagtcgtatcttagtcggtcggtcggtcagacgacttgtatctcggttggtatgtcggggtgactctcatatctcagtcagttagtcggatgactcgtatctcagtcaatcagttggggtgactcgtatctcgattggtcgggatgactcgtatctcggttggacgatcggatcactcgtatctcggtcagttagtcaatcggatgactcatatctcagtcagtcggtcggatgactcgtatcttggtcagtcaatcagtcagatgactcatatctcagtcagtcggttggggtgacactcatatttcagccgatcggtcaagatgacatactttatatgggatgacatacctcagatagaatgacataaacataaacaaaaatgatgacttacatccaagatggaaggtatatccaaaatgaatcacttacattgaagatagagaacatatacaaaaataatgacttaaatatcctagttaaaaaaattacacattatgaataagagaaatataaaatatagacacctataataaaataaaggataccaatcaaaatatgtaaagacactttataggaagtaatgggcatatgtcaaaataaaatcttgttaatttgatacttaagggctcgtttggaatgccgtattaggtcgtattg

SEQ ID NO: 230738 - DNA, 1031 bp, Cannabis indica
taaaaaaaaactaaaaaaattagaattgggctatgaatccattcattgatgtatgtgagcatgattaatatttatttatttattttaaataaatatatacttttaaaattattgtttaactaatattcatatatattaaacattaactagctagatgatttgacattcgaaatagtgaatatatgacctaatcgctataggttcttcaaacaccaaaacacgaagtgtaataacagtttggagaccatgacattaaggaaggtgaagttggaggtgacctattagacgaacaagaggaatacgacgacgtattactagtattgatcatattgttgttggtagagccagagggattaagaatcgtcagtggcaccatatcttgaagcaacccttggttggtcctttcttcatgggaagattcttgatggtagcccatagaatcaatggttgtacccaagcccaatggctccaaatcctgggcccattcttgagtttgttgggcttcattgtcttggacatggaaggtgctcttcttgggctttttagttgctgctggattggagacttgtgattgacccgattcgaagaatgggtaagtgaaatgcaggtggagcccttcatatgtgatgatgagtgtgtctgggtcttccattgacctctccacttgcttctttgcattacaccttgggtttgtgcatctataatagctcctgtttttccaaaaataaactcatcaataatcactacttgataatattgggccttcttttgtaaactaaaaaaagttgttggtattctagaaaaaatattttgattattgttgcattacattgcattattttattttaattttagctactccttggttttataaaattatatagtaatttaaagaacaaaaaacagggtaatataatataatatatatatagttgagattgtagttaattttgtggttgagtaaagttggcattttgaataataataataataataataataataataataggctttttcatttttacact

SEQ ID NO: 230739 - DNA, 1163 bp, Cannabis indica
tttttacggaattaggcatatagaaacccctattgcaactagcgctacaacataaattgcaacaaaaaagcgtacagaaacctctattgcaactagcgctgcaaccatttcagaaactcaaccgtaaatttaaaaagtaaaaaataaaaaaaatagcatatggggtaattcctaattatttggagttttatttgaaacaaatatataaactaagttttgaaataatatcctaacaactaaaggagggaatttttaaatatgtatatttcatttacattgaaaattgtaaatattacacatccaaccaatgatatgatattcatgaatgtgtcacaagtccatgatcttcatttatacctttcaccacgaaaataaaatagtcttattatatctagctattttcaatgaaatctaccagtacaaagaaaaaaaaatctaacagacaatgaaaggaaaaatgagaaagcgaaaaatcaaaaaacattctacaattgatctcgaacaatcaatgtagtgtcctagcctgttgcagttgatcccttagcagaccaaaagtttcgaagaaaaacaaatgcccctccaatcaacgttgacaatgtcacatttttatgaaataaggtgtgctcatttcaacttcacaaaagataaatataaagcacttaacataaacatttatttttttttatgtataacataaatactgtataaacattcaggttttagtaagccatgtgaaacgaactgctaatcaagcagcgcatggcttagctaaatatgttttagggttagatgatgacataagttggataggagaaatttcctatcctatttatattattctattattgtaaataatttcaatctataataacagtgattttttttttttaaaaaaaaaaaaaacaattcaggtaactacagaagtttcaaaattataacttagatattattactgcaagaaattaaacttaggtatttattgtaactgagaattaaacttaagtatttataccgtaaattactcaaaatttaaaaatataatatgtataattcccagtttaattctcaattgtaaaaatataacataaattacaagttttaaaaaatcttaaaaatgtaatataaaaaaaaaaaactaaaaaaccttaaacttaaccttaaaa

SEQ ID NO: 230740 - DNA, 1714 bp, Cannabis indica
attaaatatgccaaaaatggaattaacatgtttgttatattttttttaatcagatatgaaatttgttaatgttggctagtagccattattatgctgccacatcagttaaaaaatttactataagaaaaaaaatcccacttaatataattattgttgcactctatcctacgcaaatagtgattgaatttaagaataaaaaagagagatggatcaaaaacaatgtaaattactaaatccaattagaaaagttcttcttaaaaaagtaaataaaatttaaagttgaagatggaacaaaaacataaatttgtcaataaaatatataaattataatagtgaaatttaggaaaagcttagcccttataacatggtttttttgccgggtaacatatatatggccgagccttatttttctcgggaaccaacgttgttgaccaaacacactagttcccatcaaatagataggagaatataaatttttatgagttatgtaaggtattttataaaattttaaaaaatttaaaaatatttaatacattaataataaaaaataaattaaaaaattctcttaaatgtcgaaataaataaagatcattagtgtacctttcttaagaggtgcattgttgtagaattttttataatatttatgtgattcttttctttttccaaattcccacattttaattattaaaaatatatagtgatatatgtttatgttaatctatatataaaaaaaagtaaaaagagaaaaagagaaagtggtatgatagatgtatataaagtaataattatatgattttcattttaacttctttaaggaatcactgcttttactttagtcgtttttcggcggccatttctttacggcaatgtttgtcgaatttcattgatgatccttaatttctttcgaagctctttttttaaataattattaatttattatttttcatttaataaaaatagagacaattatataaaccttatttttataaatttttttacagttttacagttttaaagtttaaaggttaaattttttttttaatatttttatagtattctataaaaacacaacaaattacttgaaataacaaaataatagtaaaataataatcaaaaaaaaaaaataataataatatacgtacaacaaaaaattaacaataaaatatttagagtacaatataaaaatacattaaaagatcatatttatttaaataaaattttaaaaattgtaaaaatatttaaatttccttacaaccctatttttgtaatttttttttattacttttgtgtttcttttaaataataaggaaattgcactgtatacccattattttatttgttttgatttttacctccatttttattttctttaaaatatacttatttttatagatgatatttctattagactccttaagttaatgtaaattatatgctagacttaagtagaaagtgagggtatatttggcaacctactaagtatatttaaataaaatataatataaaggtatttttgattaatggatacaaaatttttcaacttatcccttaaataatcccacaatacattagggaaacttacaaaaatactgaaatttgggttaacttttacaaaaatactgtcacgcagaattttttttaaaaatactgtgtttttataaaataccagtaaaacacaaagcaatataacttaaaacaacagtagaacactagt

SEQ ID NO: 230741 - DNA, 1107 bp, Cannabis indica
cgcctaagatagttagggtgttacagaggtggttcctaattttcacattgttaatttcaagtatggtttgaggctaaaaaacttatggtaagaaattaaggacaatctcattctaagggtctgggattgtaaattctgggttaaattgggacatgattacagagaataataccccgattcctagaaaaacaaatcacaaagaaaacccaaaacctgggaatcacataatcttaaatttctagccctaaattactcaaacattcatatatagttcacccaaacaacaaaacaatacaaatcaaaaaatacataccaagaaattaagatcaaaagcacaaaagaaagtcaacaaaagggaatgtcactacaggtttgatgggagattatgggtattgaaaaatttcgttatggaaactccgattccagagaaattaggtcttgacgattctgaagtcgagggatgcaattgggtgaaacttgaagaaaaaaggtgaaagacaaagaggacatacaagttcaaggaagatgttggttgagaaatttttgaagcgtgaaggtttagtaggcagatatggcaaaaatgggggaaatttaaatttatacccaaacattggtaaagttagattaagagaaggataaatctaataaatgggaactaaccaagaaaggaacagtcacaacattaaatgctaaaatgatttgcctcgaagtcttgaactgcagaaataaaagcatgcaaaatttaaatagaaaatatgattgtacaattgaaggcatttaaaaaaatcattttcttttaaaacgtaccctttaaagggcaattatgatacctaaattttggctagcaataagaagcgaacatgtgtatcagagctggaatatgaaccatcccaagccatgcattattaaatgcacattaaatgattcgcctcagaaggtacattaaatagaaatattcaaaactcgctgccacataggcaataacgagatgttaactataaaatgattagaccagtgagacaaataagtccatctcaggataaatagaaaacacaatgaaggttatcagaatgagtaaataatgaattgttagagattttattacaa

SEQ ID NO: 230742 - DNA, 921 bp, Cannabis indica
aaaatcaattgacaataaaaaaaatagctcatgtatcttatatattatcagagtggaactttctaacaaagcaaacaaaaaacaagcaaaatggttaagagacgagatggacgacatacaattgttggtaaccaacttgaatatgcagcaatcccagcatttggagcaatgatcaaatgaggaaatgaatcctgaacacagtaaaaaatgtcaaaaactaataaaagaatatccgaatttctacgagtctctaaacatggcggtgtacaacctttactatatctttgtagcaatcgtgataaaaccctcttcgaaggttaatagatactgtctgttcaccccagctaacatcctcagttgatttgcaaatgcagtctgcgctaatgcaacgtggatatttccgaagagtgaaactcttaccatccctgttgatcttgagacaaaaaatatagaggaactacattattaccaaaaaagatcataatgggaatggtgttgataaggaaggtaaggaattgtgctctcttgcacattccaaaggcatatgaaaccaataaataacacttttttttttcataagttctcgcttaagcaaaaatggttggattatcgtccccctctcccccaaacttttattgggataaggcctgtattgctctcgagtatagaatgtgtatgcaatgtattgagtaaaactctttgcatcagaggagcctaagcgctcccactatagcatgtaaccaagttttcctcgtatttctaatatcaatcctctataatttcctacagttttggctactgttttattattttcttcagcttggattactcgggtcttatcattcgactgttctagtattggctagcttacactcggtccatggaacccgtattttcatcgtattagttaagtaaacaaat

SEQ ID NO: 230743 - DNA, 3349 bp, Cannabis indica
tagacaatgtctaaacttactcactattatcactttggtgaacatatttataggattatcattgatgttatcattgatgttgactttcttcatttgaaattcttttccattgacaatgtctcttatgaaattatacttgatgttaatgtgtttagatcttttatggagcataggatttttgactaagtgcaaagaactttgattatcacaatacacaaaaatatcttcatatttgaattctagttcctttgttaaaccttttaaccatattgcttctttaagggcttttgtagtagccatatacttagcttctattgacgatggtgctacaactttttcaagtgtagctttccaactgatgtaaccaccttgagcagtgaacacataccctgtggttgatcttttagtgtctaaataccctgaaaaatctaagtcaacataccctggaacttgctctttgtttttatcctttgaattgtagattaatccaacatcaatagtgcctttgacataccttataacccattttagagctttcattgttgttgtaatattccaaaattagtaaaatggattagcaaccctagttaaaattaattaattataattgagcaattatattattatataattaattatattaaaattaattgagaattatcatttataagatcctattaatgagttagggtatttttgtaattttgacctgggaagggtaaagtcataattttgatgtatattatgctattcgactatattattatatagtatgttcatgttgtcttactgcaggtaaattttgacaagttggcacgatttagtcacaaccgagtattttgggtccgaaccaagttcggggtctaaaattattttatggtgtgattgtgttataacataatttatttgggaatatttgaatgtgtatgcgggatgaaatgaatgaatttcccttttatggtttataagtggaatttttgactttaagggtacattgctcgtttgtttatattttacaagaaatgcattaagagtgctattttctgaaactaaaggagataaagttgttgactggatttttagtcaatcaacgcggagtcgtaataaatgagatttaaaccaaaatcgtaacaataaatgtaaataatgataccggaatttgcaataaatgtaaagaaagacactagaatttaaagaggtttagccctagatgtcggtaacagcctactccccttgtgttttattgattagagttgcaaaactaagaacaagctcttgaatgtaaaaaataacaatggaagaatcttttctctctaagtgctcaaattttcaaatccctttcccaggtcatggctgaccttttatataggagaaaaggtcggtgcttctcactttaggagacgcgaccaatgcggagccatctcaaccgcctccttggtttttggaggtgcttaaaattcaattcttatggtaatatcctgttatttttgtgggtttgtaatcgtctttgagcttcttgcggaatttgaatatttgaactagccactgacgatgagggtctccccagggtgtggtatgatcgttaacccccttcgggagtagaagctaatacttaggggtgacactcctgagacccaacatgaggagggtgtcaattaccatcttgttttgacaccccgagaccccttcgatgttgtgggtagccatggtgtcacgaggatgtactcatcaatgtttgaggatgccattacgtttatggtgggggaagtggcatctacccctagaataatttgacccgtaggtgtgtggtgatcgtttatcccacatatgagggtgttagtccaccgttttttcttggaggcaaccaccttgctcaagctaggggtaaaggtgattgttaggcatccattctaatggtcacgaccacccatcatgactaacagtccaccccaacggtcatgactttatatattctccattaatcaagtctcagtatttccgtaccacgtgccgttactctttccacatcaccatcgtcaaaatttaggtaaacaaaagtataaatcattttatgggttctttctcactcaaccgacctctcactctctctttatgcacttgaaacttttttattggtcttgatatttttgggtgaaaattggtagcttggagttgatttcttgagggaaattgtttgtttaagcttggtgagcacttgaggtagttttccttttaatcttatgttgttttagttttgaaatttgataatagatgattattgcatgttgtgagtttggatgaagtttataggtgaaagacaagggttttccttgtgattatatcttgtattctcaaacctaagtttttggatgtgtttttaattgtgtttgtgtgttgtgctgagtacttttaggcttgagaattgaaatttcatgtcatttttgtatattgacgttgctatggttaactttgagatttttgctatgttagctcaagtttgagttaggtttgagcatgtgaattgtagctttgtgttcttgagctcatagatctttgattgctaataattggagctttgattttgtgaattcaagcatgttatttgaggtataatgcctagaatacacattttttttatttaagcatttatatattacaatgcataccctgagactcgtacctaagacctccaacacccacgcatcctcctatggccacttgagatagcctcaagtggtttcctagaaaacaccttagtttggcttgaattttgtttgctaattatttagtaagtttgggggtcaaattggcctaagtttggattgggttaaacttgattttctaggcattttctgggttttgaacccagtggttgcgatcaagctcaaactagcgagggtgagcccctacctaggctctggtcgcgaccaccacaagtctggtcacgaccaaatgacaaaggcagttcatttttttgctattttattttgtgaacaattttcgactccaaactccgttttggaagttctatatatcattggaaagctcgttttgagctctattatttggtctagtgttggagtattaattgtgaatatttatggatgtgatttttggggatttaaccgtagtttgtaaaatcttagaattgtgactaggataaccggcgcttggttagaatcaccagtgcatcgagatttctccacatacattagaaatcaagtaagacagtgaactaagtacatagaatatagtgcagtggctcagtagtacattatgttattgttattgtgaatttgcgacctggggttattaccctaagtgcgtattattataaatgtgcaataat

SEQ ID NO: 230744 - DNA, 1561 bp, Cannabis indica
atactactataatacatttatattttcgagcagtagtcggttttgggtgtttaatttcgacggtactctatcgtgcaatagagttctgatagagtgttcgactaggctgttttatcctggggacgaccggcaaatttcgactgcttgcacactcttgggcagtgccgcaaacgtcttaaagagagcgacctagtccgcgactcaacccagaatttttcattcggtaatattgttcctctttttattttggtagcagtttattcaacaattttaagacgttctatctgctatgactactaccgatgaatgttctggttctacaaatgaacagatgacaaaaactagatcttcaaaaggagccttaactaatttctaattgccgaatttcaatatatcttatcctacttgtttcagaaaactttatagtcaaaaagttaggcaacattgacaatatttgctcaagtatgcatccccaaaacaatataactttgtcgacctgtataattaagttaaattactaacttagcccacataaaggctttagagcatgtcttattataagtttcaaaactactatcgaggatagcagagcaaatgaagctcaataagcaacacattttaatgtaaacaactaagggcccattctcaagctagcgtggtatgttgttagacaattatcataacatgattaaagagataaggacaaaccttggtgataaatgaaagcatagggtcaacaactagcttagtgacaaacaatatgaactcctgacaagtagacttccgacatcattctccagttcctgcaagaaagagagttactgaaaacattactgtgatgctctactgtggcattgtgaaaggtattaggtatctaatgttttactctgtctccatatgttctcaacaaaagttcactatattccttaaaatcatctctgcaataaaataataataacatgaattatgattcaataaaacactaattaacatcataattataaaattggggtaccattaacaagtaattgaggctgcttacacagttgggcgacccaacaagccaccatacttgtcttcaagagcttgtggtgtgtcaaaatgtaaaattgtgacaaatggtttcatgcctacaaacaatcaaaccataatacataattatatggtgttttaattagtaatactattcaaaataagaaaagaaatttgtatacaaatataaccctcataccatttgctattacttcattgatcaaattgttgtagaagtcaataccctcttgatttattctaccacatagtgaaccttctgaacaagtgaaagaaagttttccaaactcaatacaaacaaatttttgtttatgattaaatcatattgtttggataaataacttactaggcaaaatcctggaccaagaaattgaaaatctgtaagaatcgactcccagatcctttaagagctttatatcttcctgtaagaacagggcatataataatagatcatcaattcaaaagttttccacgcatttgacaattgcaaagaaaacatgtaaagcattca

SEQ ID NO: 230745 - DNA, 895 bp, Cannabis indica
gataagaattattttatttacgataacataaagtttttagaatcatatttaagatgatttgaagaaaatttactctaaatatggctccaattcacgtcaattattcagaatataccaatgaaccatattttgttcatcttcacttattctgattatgattgtttttcaaatagtttagttggtaagttcaatatagataatgtcaattttcttcttacttcgacatcatctggattttagtttggacgattgtaacaagtttctatcccatgatgattcattgaacaaaaatttaatgcctcactaattatatattctttagcaatgcaaccttcagaccgagctttgttctttacatattttttcaaatgaaccattttcctataaaaggttatcaaattaatatatatacattattgcatatttttaaaattcattatttgttaaaggaaaaaaaattatgttacctttcaattgaatacatccattgcatttggacaggaccaccaaacttggctacctttggcaagtggatagctagatgaatcatctcatcgaaaaaggcagggggaaaaatgctttgcatcttacaaagtgtgaacacgataccttcttccaaatcatttaagtctttcacatacaatgtcttcgcacatactttttgaaaaaaataaaggataattacagcaattacactcatcacttttctttttcaagtattgccttacataaataggttgcaatatctgtaataagatatgacaatcgtgacttttaaacccgtaatcttcccatctttcataataatatttcgagacaagtttgccgcacatgcatctggaagtttaatagactagaagaccttacaaattgtttgtcgttccttcatcgataa

SEQ ID NO: 230746 - DNA, 1022 bp, Cannabis indica
tttccaatgaggcttctgtaagaggttgggtctgaaataaggggtccaacatccttgctaagggatatgttggcatccataagagtggaaacagttttgattctaagtgatccaactttagtgagatcttccagggtgaaaggtctttgagagatagcaatgcctgctttagatcgagcaatatctaagccaaggaaaaataaaagtggaccaagatccttgagttaaagttttgagtttaagatggttttgaaagtagatgcatccaaatcattaattcttgcaatgactatgtcatcgacatagacaagaagagcaaggaaagtgttatttgttgatctgatgaatatggaattatcattgggggattgagtaaagccattgctaagtagagaagtgcttaactttgcaaaccattgcctagaagattgctttaaaccatataaattcttgtttaatgtgcaaacaacatttggtgaaagctccccctcatgtatatagcctttacgaattttcatgtagacttgttcttcaagatcaccatgtaaaaaaaaaaaagatcaccatgtaaaaaagcattgtttatgtctatttggtgaagggaccagttaggctacaatggcaagaaataatttgagtgtgttaaattttgcaacaggtgtaaaggtatcaacatagttgatgccatgttgttgattatacccctttgcaactaaacgagccctgtatctttctacttcaccttttgaattgtaatttgatcttatatacccatttgtttccaataacatagcatccagggggagagaaacaatggtaccatgcattattttgtttgagggcaaagaattcattatccatggctttgagccattgtgaaagttttgatgcttgactgtatgaagttgtctcaagttcgatagatgctttgagaatagcattttgaaaagatttgtggtagcttgtcatacttgaggtatttgttcaagtgatatcagtggaatgattgcatataaaatttt

SEQ ID NO: 230747 - DNA, 2110 bp, Cannabis indica
tctttaacaaagtcacaaataaaaaagtaaattcatctagcttcttcgcaaatgtagacaaaaagaacattgcacgtttatcatttccaataacttcagggcgatacattaaatctttcatgtacttgtaatttactttcaatttcaagtcataatgcactttgtcaacatcaagttcttcgtacaaaatatcaaccaaacataagtagcttacaatcgtatcaatctcaaatgttaaattttcggcccagttataaatccaatctctactctcaagctcctaaataccattatacataacaaatgcattaatagttaaacatatcacatacactaaaaaaatacaattacaaattcagaacaaaaatctaacagaaaagtaatgaaaaaagtcttaaaagcaataaatctgtaaatcattgggcccaattgtactccattgggcctaacatcggactcatcagtctcagttaagatccaagaggacaatcgtataggcatcgggcccctatcaggcttacatcgagccaactagccctacctttaagtccaagttgacaatcaagctatcattgggccccctatcgcgcccaattaggccatccctatttgatattagaccttagaaaactatcggacaaccatcaggcttacatcaggccaatcgaccctacccttaagtcgaagttgacaatcaggctatcatcaagccctctatcgggccatcctatttgaaattagcccttagaaacttatccgaccccccccccccccatcgagcctaactcggaccatccacccccgaccttacaactaaaattacattgggctagtatcaggcccttatcaggccccatcggactagacgaaaaaaatacaaaaaaaatcataacaaaccagacaacaaccatttaaccacaaaacaacagaaaaacaaatcaatcatgaaaacaacattctaaactaaatataagaatcaaaaacaaaaaaaaatcccttacccatggatttttgccgaaaattgtcgggtaactctaaaatggagtctcacactaaagcctctaacttctaccactttgtagtagcttggagagtttaatttacaactaaaaataaaattttagttagaattgttagagaggaggagagaaaatgaagttgagagaaagagagtgaagagagaagagtgggatgggttagggatgtgtatataaggggcattttgggtactaaaacatttttatactcattttttcaatagtgataagtattagtttagggaattaatttaagactaacgtaagtataattaatcaaatttcccaaccaaaattatatattagatagaccaagaaaactcacaacttgttaagaaccgtgaacagaattatagaggcatgcaaagagttacatggtttcacctatattttacaatccaagaggtttcttattataacatgtagtctaagactttggcgaattactgaggtgtttccaagtccggtcttcggtctagtacttctctttctgaatcatttggaaatgcatctggataggtagccaaaatcctcgacttcatgctcctgataagaaagagttgaggtacgtataatccaaattaccaggagatcaactaaatctagtgaggcatactacatggtgatgaaatcatcttgactgacactaaaaatattttacaaaagaacatttacaacagcatctccatccaaactatattaggattgatatgcaatgagatgaaattatacatagaaagtctaaacctgctggcaccctaactttgtataaatggtgacaaatcaaatcaccttaaaatattgtttcaagaaaatgctcaagttgacgagcctccttaaatatcaggtaagtaccttcacataaatacaaacggtttaacctaaaagcaccaatgtacaaagctatgaaaactggtgatagattggtcgagattagatgcacatactctatggttaatattcaaatatccatataattaagttaaaacaactggttccaacaatagaaaataacaacaacaataatttgtcagacattaatcatgagaacaaaagaagcaatcatgatctac

SEQ ID NO: 230748 - DNA, 666 bp, Cannabis indica
aagaaatgccgttagataggcacttttaatatataaagatatttatatatttagagtttgagtgaggtatgctctggaaaacactattaatgaggctgtactagctagttatccatgaggcttgtttattcacacagctgttactactagctaggaaaatatcacttgaaatatgaaaattgaaaatcatattgatgaatagtgatctgattgataagcttttaggatcattctcttctaataagtatcatattttcgatgaattaatgagtatatatcttaatcaatataaatcgacgtgaaaaagaagaagataagacttcacggtaagatggttagaaagcttatatgtgacttacagacaaaaataagggtatttgcttttacttgtcattcctatactacaataatttggtttctaaaacgatttggtgcccaatgggctttgtatacatatacaatatcaatatattgacttaatattattgttatgaggtcatatggatagacgcttgtgacgtaggtataatgagttatccaatctaatttattatttttttttgaaaaaaaaattcaattcaattcaattagtaattaaatttagaaaattattatttgatgtcatttacaaaaatattagattttaagtaaaaatttacaatttta

SEQ ID NO: 230749 - DNA, 986 bp, Cannabis indica
aaaatttttctatcgataaatagaatgacaatacactaaatatcgatgaaatatgaaaaaaaaaataaaactatggaaaaattgcctgaaaaatggcaggtcgtttttgtaaaaacggcaaggcgtttctgtaaaaacggcagactattttctaggtctgaaaaaatggtctgtcgttttttactgcagaaatacaccaaatctcatttcttttacaaatcaactccgaactttctgcaactctctaaaatacctattataggtctaataaatataaaccaagcaacaaaattaagtataacttaaaattacacgatccaccattgttgagctaagtttgagttcttactcagcacttcaaaacaaccatcaaaactatcttagaaagcatcaaacaactgaatgtatccccaaaaaacaaacccacactccccgaagttcagacataacctactcttagaatttgcatacttgaaccaattaaaaacctccaaaaactaaagataaaagaattctagggcttaccacatattgtactaccacttcctcttgaatcctagctgaaatccataagaattgctgaagagaattttggttcttgttggttctccttagggtcgaagtagagagagatgaaggggtatgttttatttttcttttttcttcttcattatttctaacttagataaatcataagaattatggcttattttaatcatataacaatctaaataaacctaggaaatgttccactaggtccactaaatgataggtcaaaaatctttaagacaaaaaaccaatttgccctttacttcaagcttaagcaaccttaagacttacgggtaaaatagtcaaatactataattttgcctcatctcgatattccaaatattaaacttatgtacctcgctaaaataaaggctctaaaccgacccgtgtgactctaatagaaaaactgtcatattttcatcgttaccgagcaaaaa

SEQ ID NO: 230750 - DNA, 1596 bp, Cannabis indica
tttttttttttgaaaaacttgaagcttcattgataaaaggaggtacaaagctaacaagttttaaaaggaaggtaaagaactattccaaattaactcctcatctaatcctagtcctaatttagctaaattatgagcagtgatattcaaatcactgctaacatgctatatcttaaggatcgataggactaaaagataaagaatttgtaatgttacatagcaaatcatttatactattgttccaattacaagaatttagcttatctactaaagttttacaaacagttttgaccgtcgagacaggcagcttgatcatctgagcccaatttactgctagctagagagcttttgcttctacaagagtaggggaaaccgacccccgaaaaggcttgacaatacctacaatactctggttagacttattaaaggctattacactcaaactgtaaactcttctttctttgtcaatagttgcatcagtatgaacccgaaaagaaccagctgaacaatcgaacaaagctggaggatcctcaacttgagcaccagtagcagcaagagatttctgctgtgcatccaaatactaaagcaaaaaattactacaccaagcaaacacttcattaggagggataatagttctcttatacaaagcattgtttatctgattccacaaagcctagaaaaagaataacaaaagatcagcagaacccttacccatattggagaaaatattagaaaaaaaatgtataatgtctaagtgtctattagtattataaaagtgagcaaaatttgtagccttccaagctttcctggctctagtgcattctagtaaagcatgcgtaacaatttcaggttgcaggttgtagaaaaaacacataggggatggaataatatgtctctggaaaaggaggacagccatagacacagaattagaaacaattctccatataaaatgtttgactttaggagggattttagcatgccagactttagaccaaagaattttgaactttgaaaggaagaagtagaaggaacatccctaccagaaagagcaagatggtatgctgatttaacactgaaaaggccagagctatcctttccgtagattaggtaatctttaccatcaatccctgaaattggtacatttaatatatcattaacagtacattcgtcaaaataggtgttgagcctatccagattccagcaactaagttggtcaataaaataagacagagttttttgactggaatccaaatcacgtatgggatacttaaatttattggtgggaagccaatgatctgccaaagttctaatttcctcttcatcacatattttccatattaatctcgacactaacagatccttaccccagagaatgctacaccaagaaaaagaaagactatgcccagacttagcatccaaaatagaagtatttgggaagtatttggctttcaaagtgagacttaacagggaattaggttgagaaaagattctccaagcctgcttagcaagcatagcttggttaaaataaatgagagaatgaaaactcaaacccccaacaaacttagaatgacaaacatactgccaatttttccaatgaac

SEQ ID NO: 230751 - DNA, 913 bp, Cannabis indica
gggttaggaagcaagaaccacttaaaactaataaccaagttgaaacttgaacgacgggaaaaaaattcagaatttgggggaaaatcaatataccgaatcctcgtcgaagcccatcatatatcctgtcaatttctgttatcgcaaagctcatagcctacatcgaattcgttccttctttgagatagaatttacctgaaactacttttttagaaaaaatggttatggagtaatgtgagaaaagttatgcccaaggagggaagataagtgcgggagcactcagtttttttagctttcctctaaaaaaatttcacaaaaccatttttaatttgaatttagtataataataaataaattgtatttttttatacatttatcacaataacaatattttggtaattattaatgttgtcgctattagaaatgctagatatactaataaattaaaatatgtgaaacttattaatttgcatcaataaaagtatgtcatttcttttagtatttgagaccataaaaggtgtattttatcatttctcttatcattttattgttgttgactagacatgatcttcttcggctaataattcctcgattctattgtcaaaattgggcaacacataaaaaatatattttttaataaactatttgtgttttacttaattaaatttttttaaatattatattaataattcattttaaaatttaaatctataatatttaagttaatttgttttaatagttattctgtttgaattcaatatcattgaataatatttaatttatatatatttcattacataaatataaataaatatacatatatagctaactaattatcagtattttaaaaaaaaattaataaaaaataataaataaatactttaaaaattaataaaaaaaaaataaagtaatggaa

SEQ ID NO: 230752 - DNA, 2603 bp, Cannabis indica
ctagtgtttttgccactagatgtatgggaaaagttattggtgtctgcctgtgcacctggtggatcatgagactggtggatgcctcgtgactgtcgattgctgacatgccccgcctgggcttgtcgtatggtttcttcaagtttgatcaagtctccagctctaccaaggaactccttcatgttattgatagagatccttcagatatctttccaaaagtcactcaatgggagaaggccacctcgtatggccatatatcggccttcttctgtaaggcatttgactttggtagcctcagccataaacatctggatgtaattcttcaaaggttccccttgtcgttgtttaactttgataaggtcttctagatgcgatggtacaagtcttaaggacaagaattatgtatacaattgtagtgaaaatttggcccaagagttgaaccttcctggggtaagtttgaagtaccattgttggactatctcagataacatggctgggaatatgctggatcgcacatcaacaataaccttttggagatctcaaagtattttatgtgagccagtggatcttctcgcccggtatacatcttccatattgacattttgaacttaggtaagggcaaggaatttatgtatgccgagaatggtgatcccctcaactaataaagttcaaggtttgaaggcttcaaaccagctatgccttggattatgtccttgagttggtcgaactgtggttgcatagaaggatcttttgttgtggggacttgactgactgacccttcttgggtaagcaatagattccggagagatagggctagccggctataccctatgtgagggtatggtgaaggtcggccagacttctgctgaattgtaaaccttggctggccattcttatgtacgggagctcgccttggctagccaggcctagtcctagctgttgtggttggtcagtcagacctacattgggcagggtctggccgcccattatgcctccatggtcggccagaccaacaaaaggcagggtctagccatctacaatacttccatggttgactagacctgaaaagggaagggtctggcctcacgtgatacttatattgttgtctaaaccatcaaagggtagggtctggccgcacgtgactctgtgaccgactgatgttggttgtgtgttgacaagggtggatcacaccaatttctagagtttggtggatctagatgtctcaagtgatcaatttgacttcttgaattgctattttaggtgtttccacccactctcgatccttgttaggtgaagattgtcctctgggctcctcgctcccattagggaggaagtgctgtgctctggtcggccaagggtactattgttgatggttggccagctattggttgtacaattggtggtgtcgctcagcaagagatccctggccaaccccccatgtcgttggctgctacgatttggctatttttacctttagaccttcgaggtaaggtttgtcctccctccgccaagggaagatctatcctagttcctcaagaactaggttgatcagcatgtgatagaccctccctaatctatcaacaagtcttccttgaagtggatctttgatgagatcctggcctctaattgattctttggttgaaccatcttatcaaatcgctagcctctcagttgtagcaatctaactctgctttgtgagattgaaggatgtactcctagttatccatccatcttaggaatttgcatctttactgagcgaaaacaatgcaatcagtagcgcgtggttctttagttaggcatgcatggcttacacttctctgagtctggctaactcgagatcttctctccaatccagatatggctcgccaactactgggcctgtctctccagcgtagaactagagatgaggtccagttgttattctaggggcttgtatcagtttagctaagtgtagtggccagacttgtggcgcctgaagtgacgataggattcaccagatctgtagagtttatggggattttagttgtgactggaacttgagtacctagatctgcagtatgtggatcttaagggagacccgaagatgcagatggtgccatagaggttcttcttgtgttaaccatggaagttgattccttgaccaatgtcaaacaacagcccaacaaaagcttaaaagctttcattcaaaggatgatggaagtggccgcaaatacaaaggtcagcgacaatttgaagttgatggctctccaattaagattgcttgtggcctctttattgtggggagagatgcaaaggaaaagagctgaaacaccaagtgagtttatgtccaaagcaaaggacataattagccttgaggatgcctacatccaggcatttgggtccttccggtaccaacgcctacagtagacgctccaagttttacctctcagactcctgcttcatctttttctctccccggatctcagttctctccaaccatttatggatctaccacgtccgacctcgtcccaacatagaccgatttctctgggtacgggatggcaaaaactaggtgtagtgcaggcccttgacagtctaaatctgaggtccaagactctagtgcgagg

SEQ ID NO: 230753 - DNA, 735 bp, Cannabis indica
ctttaattttttttaaaggaaaattattatatgtaactaaaacttgaaaaacaaataaaaaaaaaattaagaaatactttgaagagaaaaggatgacgacatgcaccaacaaaagagagagaatcaatatgattatttttcttgcaaaaaataacgagattttgatgattaaactcttgtagttatgatttaacttgcacataattctttaaactcaagttttagtagtaaattccgccaatctttatttttgttagcaaattaaatagacaagtgactatgtgccaatatagattattctatatatatataaataaagatacaagtgtcttgttcatattggttcatataattatatatttatattcagaaaataatttaatgaaagctttagaaatatataacttataagtaagtgagacgaatgatttttacgtggttcaaacattaattatttctagttcacgagtcagtatattagtattataggcttattaaatgtattacaagtggtgtttacaatataaaaccctaactctatctcactagatttctcttgaaaaagaaaaagcttagaggatatttttgacaaagcttcggctatttttcttttcatccccctttatgaaaaaatgaaggggtttatgtaggctaaagcttgggtccaagcatacccatgacccgtttagggttttgtcaaaagtttgcccactatcaaagtaaaatagattatat

SEQ ID NO: 230754 - DNA, 1127 bp, Cannabis indica
ctctttctcattcttgatcaaaaagaggccttttggaaacaaagagctgaacaattttggttgaaagaagggatcataatagcaaatacttccatcgtgcagcaagtaatttgcgtagcttcaatcaaatatcgaagcttaaagatagtgatggcatatggcgtgactgggattcgagtttatccaatgtagtggtggattatttcgacaatttgtttgctacagcaggggcagattgtgatgaaattattcattgtatccatcgaaaagttactccacagatgaatgaagctttgatacagcttgtttgtgaagatgaagttaaaaaggctgttttcggtatgcatcttgatgaatgtcctggccctgacggtatgacgtcgacgttctatcagaaatgctgggatgtggtgaaaaaggacgttattgaggtggtggagaagttctttcattcaggggagtttaatcctaatggtggtgatgcgaatgtagtgatgattcccaagaagaaagtgcctgaaaacatgggagatttgaggcctattgctttatgtaatgttctttacaaagtcattactaaagtgatggcaaacagaatgaaaagtctcatggataagattgtctctgagtctcaaagcgcttttataccaggaaggcttatttcagacaacatcttagtctcctttgaaattttacactacctgaagcggaaaagaaagggcaaagatggatttatggctttaaagctggacttaagcaaggcttacgatcgaattaaatggaattttttaaagcaaatcatgttgaagctcgattttgcggatgagtgggttcagcttataatgtcatgtgtttcttcaataaaatacaagttcatccatggtggtagagaaatgggacctgttataccttcacgaggcattagacaaggtgaccctttgtctccttatctctttattatttgtgctgagggtttgtctgcacttatcaagaattatgaggacaaaaggtggattcatggttgtaaggttgctaatggtgcgccaagagtgacacacatgttattttccgatgatagctacttgtactgtaaagccactattcaagaagcagaaagaattcgtgag

SEQ ID NO: 230755 - DNA, 1015 bp, Cannabis indica
aaaaaaataggaccaaaacaatacaatagttaggaactaatactgaaatcaagccttccataggggagcctttcattggagcttttttaatctgcattagttagatcaattgtaaccaaagtaaccagtttcagaataaacaagcttaaatcatgcatacacttgtaagcttttatcactcaagcacatagaccagttcaaatcttggatgattggttaactaaagccaagattcagacactaatcataccttttagggctcgtttggtacaccgtgatgtattgtattgtattaattgtgttggattgtattgtattgtattaatattatttaatacaatactatatttgatattcacttgtattaataggttgtgtaagatacaagaaattcgaccccaacatcgatcacgacctggactcggatcctgacccgaactcagacccaaaactgaacccggaacatgccccgaaccctaactaggacttggactcggactctcgacccagacccggacccccgacccgaacaccgaaaccgaacctggacctagacttcgaactcggacttgggtcccaaacctagaactcggacttgaacctgaggttcgggtcaaggtcttggttcaggtccggtgtcctagttcaagtctgggtctgggttggtgtcaggggtacgagtggggtccgggtccatggtcagggtatgggtcgaggtctaaggtctggggctggggtcggggctgacccagaccctttgtagatattataatacaagctaatacagattatttgttatgtattaaataatacgactcacatcctattaaaatttatggctgtaataattaatataatacaatgttttatcaagacatagtcttatttgttatttaatacaatacggcttaccaaatgagcccttaatgatttttacaagacaaaggtataggcgttctactagcttgcacaaaaaccacttccacaaccatccaaattaagataacgagcttgt

SEQ ID NO: 230756 - DNA, 1286 bp, Cannabis indica
ctttgttgcaatcactgaaccttgaaaaaataaataaataaagatacacatatagaacaaagaatttgaaacaaaatttatgtcccacacaaaaatcttaagagtcgaatttagacttttgtttatttgaaaaagtttgacaaaataatatccatgaacctaaaaaaaaatggagagagacagtgacaaaacaaagcttatccaaataatacatgagtgccaaaatggtatactttcaatggtataatagtgctgcacgatgcatcttgagttcctgtagtatcatataccactattaatgtgttagctaaactcgaatctatagaaaaatagttctaatgcaagtaaccatttgacagccccagatcattatattttgaacttgggagaagagaagactggtcttgaagtccaacacagtcaagcttttttacaaacttcttatgaaaaaatctgcaaaacaatataaatatatatatatttatatatatatatatatatttatatatatgaatatgcaattgtacatcccaaagctagtgaaagagaagacttaaaactaaccttaacagtactaccttaaacagagttgaatagagctagcactttcagtatttgataataaatcattttttgaaaataattcatctttcagataatagtttaccattggagaatatgcaagagactatccttccctttaactagttgcaatcattgaacctgcaaagaaaataaaagaaagatacatgcatcaaaggaaaatttaggacaaaacagaatacatttaacttatgcttttaggggagggtttgggtatgggaaaactataagaaatttatataaaaaaaaagacgtcagcctcatctacagactaaatatgtagaatatgttgtacctaactctaactgagcttttctgctaagttgcttgggttagtaagtggcaagatatttatcggtctctcccagacatgtatggtcacggcatttcaaaatccctcgacactccttccggagcaagtccatggccgacccactaaagatctccaaaggaggaacccaaactcatccaacttgttcaaaacatttacaaagctctgaactttcccgtctcgaagaaatcccgaaaggcacttctccaccaaaaatttgctctcaacgcagacttaaactgtgaggcctcaacgcctgaatccgcaaccagtctcgacaccacttgcgaagtctcaaagcttcccactctcgaacgaggttagttggtcgaaagtcggccgaaacgcttcc

SEQ ID NO: 230757 - DNA, 3737 bp, Cannabis indica
attattaaaaaaatatgtatatcttttaaaaggtatttttttttatttggattcctaaaataagtaagccctaagtacatgtctagtctgcttatgtctagagtcggccctgtggtagtagtaagtagagaattgctaaaagacattatttagcacatttttttagtatcatatactattagtttaattaagtattaaattttatataatttcaaaaaataatttttaaaaatatcggtaactaatcataaagtgccacttataaaaagtactaatcaccgatggtgcgaagaccaaagtgtatttattaaggctaattaggattttttcctctcttcttcctccaaactttgacatgtactaaatcataccacctaaacttttttggccgttaaaaattttctctgaactattgagattgttagatttaaggacttttgtctagttttagtaaaaaaattctaacatggataaaagtttaggaggcgtgatttagtgcatatcaaagtttgagggatatggtttggtagatatcaaagtctggagagcatgatttaatacataaacaattactgaaacagtaaaattgaatgaaattagacaaaagttcttaaatctaacaatctcaatagttcaggaggaatttttaacggtaaaaaaagtttaaaaaatataatttagtacattttaaaattagagagaaaacaatcctaattagccatttattaattgacttttgccctcttctttttatcatattaactttgtcaaaaatcaaaacgaacacgctctctctctccattatatatataattcttctcacaagcttaatagtagccatttttttttgagagtggagccacaatccttgtatatatcatgtataatcaccacctgtttatttgggtttgaagatctgaccaatttcaatcacgaaactactgaactactacgtactttgacggtaattaattaattatttaattattatatatattatatatataattataaataatacatcatgatatatgcgtgactactgactactgtgcgtttactttcttttttcctaatttaggttggtttgatttgagtattaattgctattaggtgttgagtattatgaggggtaatttataattagttacttttattttttaaagtttttttttttttaagttacttactatttaattacaccaatagttgtattttttagttattattagtcaattgttattagaaaccactttctatagatagtgtttcacaattaattagcaatattttttaaatattatttttttaaattatataaattaaatccaatacttaattatattaatagtaatatgatatttcaaaaaaaaaaaaaaactacacgtatattattatatagtaataatatgaatgtgaaactagtgtatgtaactactgttgcagctttattttgttgaccaggtacatataaatgagaaatattaaacaatattaacagtgtttaatatttttttttatgtgtcaatattagtatatatttaaataattactatcgagttatcgggttttatatagtctaatgtaataatatttaaaaaatattaatagctaattacagaaagtattaattaagcaccgctagtacagaatggtctatacagaattaaaggagagagttatctattcaaactcatcctctacctacaatacaactacttatatatagatgatcaaaagttaaaattgagttgagttgaacaaacaaagttgatcagtttgtttatgattaataatttctttgtttgacaattgataattatatataattaatttattggcaaataacaatagatgtgggtgtagccaccatggaaggttacaacaacaatgatcagcaacaacaaccgccgccggctgcttctcatcgctatcttcatcagctcttcagtacaacggagctgaacctccaacaacaaacaacaacactacccttatccaataatcatcaacataataataataacaactttgattatgatcatgatcactattctcaagaatccaagcaagtttattctccagaaactactactgatcagccaacagctgtctccacttatacccgccgccctcgcgggcgtccacccggctccaaaaacaagcccaaacccgctatcgtcctaaccagagacaccccaaatgcccttcgatctcacgtcctcgaggtctcggccggatctgacatcgtcgaaggcgtctcggcctacgcacgccgcaggggaagaggtgtttgtgtgtttggaggtaacggaaccgtcgccaatgtgaagctgcgtcagccggcttccccagtggccggaagtgtggtcacgcttcacggccgtttcgatatactatcgctgtcggggacagtacttccgccacctgcgccgcctggcgcaggtggattgtctatattcttgtcgggtggacaaggacaggtggtgggtggagctgtggttgggccgctggtggcgtctggtccggtggttctgatggcggcgtcttttgccaacgctgtttttgaaaggctgccgcttgaggttgaggaggaggaggaggagagcactgaagctcctccggcgtcgcagtcttcgggtgttactgcggcagcagagggcggcgttgctttttttggaatggggtcatcgatatcatcgtcagtagctgggaattttccattttcgggtgataatttgttgggttggggaccagctaataataacatatcaactactactgttgctgctgctactccaccaagacctccattttagttgtttgcataaaatcttgatctgaatttaagatgatgatgatggtggtgatggtggttgcagtatattttatatatttatatatatatatataataataataataggtgttacccttaattttttattaaaatctctttgttaattttttatctaaaaatatgtcccaaaatatatatttagagatatttgttatacttacaatattatttttataaaattttcaattattttaaataatttactaataaaaataattttagtacactaaactatctagaattgtttaaaagtttataaagatagtattgtaattataataaatatcggtgtaaaaaataatcatgtgattttaaacttaaaaattaactaaaaaattataattggtactcatctctgattaaaactaatcatcatttgttcttcttcattatatatccttacatttacaaatttccaccataattaaatatttttccagaggttccttaattaatttcctaagctacgtacaagatatatggagttgtagtactagtgttgtttattgtatacaattttataaatatttaccaataattattatatattcacattatataatagaaataaacataaatgttaacgattttaacattttaattataattgattttctaaaaaaaaaaatacataaaactaaatataaaaatacataaatcaatatttatactttgatatattactgtttattaaaagtttataaataaatttaaaaataaaatagttatgtttatttttttaagaaatacttatgttgataagttattcagaaatatgttttaaaaaacaaaattataactaaacgtaacattatgtatattgtaataccctagaattaagaaatgaattagcaaaaccttaattagataattatga

SEQ ID NO: 230758 - DNA, 973 bp, Cannabis indica
aattaatcataaaataaacatgtgaaccatgtaataaataatagtcaaatgttgagataaacacatcttaactatatttataagtttataaatttgatgatgttgttagcttttaaaatatttacaaaaatataaagtaatattttagtggtaaatcttatacatttgtcgatatttagtgtaattctatgtataccaatattatttttactgatatgttatctaatcagcaatcataaaaatatatacgctaaacaagtatatatgtatatcattatacttaccacgatttcaaattctcaaatgtaccggttaatctgagtaaaaatttgcatattacatatttataaaataagtttagcataaattaataattttcatcatattgatacagttaatttataaaataatttccctacatgttatatcattatatataatttatataataatagaacatgtaatattgactttgatactgtatttatataaaatcaatcgttttcaacttaaaatgaaactaatctttaccttaagctttcacttttcaatgatttactgtcccgctactaccagagcttgaaaattattaggtgttgggttgaaaattttaaaaaataaactaagggggaggaggattttgtcacaccgaaagagaggattttgtttcttgtgtttatgttttaaaaacataatatataagcttaattgataagtgaaaaacttatcatttatatttatatataataataataaaaaataatattatatatattaataataatattaatattataaataaaaattttattaataataattattttactattttcaataatcctaagatatttggtcaattttgagtaccctaaaataccctgatatttcgtgtaagtgtcgttattttgtgacagattatttgagtacattgtctagtcatgtctggtgtttcagtctgttatatctgcac

SEQ ID NO: 230759 - DNA, 863 bp, Cannabis indica
tacttgtacatagagtgatagtccactttagcatttaataggccaaagtgaacggaatgagtacaaaacaaaacaatttaacaaattggggagctgaatctccaacatttcaatataaagaattgatcgtgtcaaactttaaaattcaaaaaaaaataagttgaccatataacaaatattgagtccatcaatgactcttaattaaatcaattagaatttctaataatattacctaaatattccaaccaggtggactaaaggaagcacttactcaatattatattaaccaaaagtatttctagctaggtaaggttttataattttcaagatatttttcaaccctcaaaaagaattgtcacacgaaaaaaccaaatatgtcttctattaaaaaatggatttaacagtacgtcaaaaaaaaaaaaaaacatggatttaacaaacctactcaatgaagcagacaaagtaaaaattacatttctacctaattaagtaatgatgagaaagagagagtaagagaggttgcatattagttttatttgtttttttttttaataaaatgttaaatatgagtatttctaatggagaaacaaattagtgatctaaaacttaaatctggttcatttataaaaaaaaaaaatatactcttatagtgtgtcaaaagacgatacaaatttattttataacaaatattgtattaaatttggcacaatatttattgtgatgaaaaatttacataactataaatgtattatttttctatttactttaaattatttacattattatattgaggaaattacacatgatatgggtttttaaaactttttatgaaaaatatgacagttttatgtttgtccattttt

SEQ ID NO: 230760 - DNA, 1065 bp, Cannabis indica
cattagcggtgaaagtaagccattttgtaaaagatgtaaaacaacaagtgttgcaaaattgaaaaaggaaaggaaaactattggcttgatatgctattaaaaattaatatgtcaccactacaccatttgcattgcatgtaacaccggtaacagtctccttcatcgactagaaggattcttgaaaccgaaggtgttcaaatctcgatcattcttcatcttcttcttggagcgaaagacatgagtgaagatggaaccaacgtttgagtagttcacggttagaagctgatggatcatctctgaagctccatgactccgtttgggtaacatcgggtctcgtttagccaaatggttttcaggaacgagatctacttgtatagatctttcagatctcgtctaagaatgagttttctattttgttgcagtgagttcttggtattttacattgaagacttggggtttttgtacaaattaaagggaaaattgattttcttgtttgaatatggagtttatttcttttttttttttctttttttttttttgtcttgaatccagatagtattagtttttatattttgcattcaggaagtttggggttttttatacttaagaatcccatttttttgtatccctttttttttttttaattttggagttatatatatatatattgcttctgttgcatttatactgtgttataatattgttattatgctaaattttgtataattacaatcaattattaaagtcaaatttaaaattaaaattatactatttttattaatttaattaatatatatttaaatttcagaatatttatatttattgataatttaatatttatatatatatatttaaaaaaaaataaaataaaaattttaagtccagcatagttggactagacattttttagtttggactagacatttttttagtctaaaaatgttggactaaaaatatttttctagtccaaaaatgttggactagaaaaataccccttttatgtcccaggctattatgtccaacacaaaatagactggaaaagtttatctagtccaactttgatgg

SEQ ID NO: 230761 - DNA, 938 bp, Cannabis indica
ttactatttatgttttttttttgcagcaatgacacttattttttactttgttctctgtatagtacttcctcatgtactagctgaacataactatgatgactattatctgaatcaaaacactgaagttttgctcatgcttcttttaattggggtatttttcttaattttgataattaaatgcattcatactgtatatagcgctaattttcatggcgacgaagaaaatccatccgtgcaattaactatgcaaaatgtaccagaagataatgcaacggccgtaaattatttacctgcacaaaatacacctgaagaaattgtaccagtacttactatagaggcatttcccgaagacaagtatccatgtggagacaatacaacatctgaaggagaagaatgcccaatatgcttagaagtatacgaagagggagcgaccgtaagaaagtttccttgcggtcatatatttcaccctgagtgtatgcaagatatattaaatagtagacttaagaagtgtcctaattgtagatttatgtttgcttaattagtacttattttattttagtttttaaaataaatgtaatttggttgaaattaattatttaatagtgtatgacttttttcttcctaatagtataattaattatttaaggtttttttaagtttttgattatgtatgctttaaacaattatcttatttttgttttagttttattttaatttattaattggttttactttaattagttaggtgaaaaaaataattaagacaatacacgtgtttttaatagtaactctgttaatgggtactaatgaacaagagaatctaaactattgtaaagtggggttttgacttttgagttttaatacaataatttttagaaattgggtacttattaacaataaaatgaacaaaattaatatttatgtgtaagtggtttgac

SEQ ID NO: 230762 - DNA, 1309 bp, Cannabis indica
aaagtgttaccaaacgacacctacataagttatgtgaatactttcgtttcatatcaaaatctatgttcattcatttaaagaattccaaacatgcataaagtgggtaatcaaaaacatgtaataaacacaaatattataaataaatcacaatcaaggaagaaagaacaattgactaatattaactcatgaaataatctcaaacaatatcgatccatcaaatcgttaaattaggagtacttagctcataattaaatccataatcaaactaaacattaacataaacataaaaaaatagaagatgaatgagatgaaactagtttgggattgtcacggatcgccaacttctagctccaatcttcttcttcttttctagggttttatttctctcatttggctccccttattttgaagccctctctcgcttttaaaacataagtttcagccaaaaacacgtgaaaagacaaaaaaagtcccacttcgcacgatggcaacaccgtggtgacacaatgccatgccgcggtgactgcagtttctcaaatatataattttggttctttaaaattttgcttcggcaaccacaaacctctccgagacaagaacacatgacaaaatctcgtcacaatgacaataagccttactgcggcgactgacacatttttatagcttcaatttctctcaataaaatatgcataactttcacatacaaactccaaactaatttaggatgtaaaaaactggagaagagatctaaacttttatatttttgacatttactaaaatttgatcagaatatatttgaattcaagcttaaagtttcagttttagtttcttatgaaaaaatttctatgttatagatcagcgtatttatgatatttaaccaatttatatattttaagtgtacaaaaacttaaaaaaaaaaaaaaagcctaattccatttaaaaacctagcatttaacaattaatgctctctgaatattacactaaaaatttatcaatttttttttaaaaagaaatgttgagatgtcgatctataccataagctaggtatagggttattgttataattaataattaattaatatatagcttttaaaaaaaacatactagaagatcttatatatgaaaaacataaaatactaaaattaattaacttaaatatcaacactttaaaccctaatatatgtactactttaattagaaacctaatgaaaagttgatatatcatatatattattaatgaatgcatgtatatatatatgtacagtgttcatgtgaaaaggcagtaatatatatttactatgagagccaa

SEQ ID NO: 230763 - DNA, 2318 bp, Cannabis indica
agtaggtcattacccgttaactaaaggggttgaacctctataaaattttatgtcatatttacttatctattcttattgtgtaaaaggtcccaagcatcagtaataaattggaatccacttttagttggccaaatctgagatcaataaattggtgctttcattgagagtgagttgtcaatttatctaatcaaacaccatgattaacacgaggagaactccagctatagcttttgcctcttcaggtcttcctcaagatcctatggtggttgatcttgatgttcaagttctagccacagctggaatctccacgaacccggcggatgtggccgcacctaccatctcagcaggcaccacaaacatggccaccacaactggccaggtcccaccaccattccagttggtcataatgaaagaggaccctccactagcgcctgacatagaatgaatggccaacatagagtaacccatgagtgccacaactagatttggtccacaatattatggtggaaagatagggccaagaattggcaagccagccagtgaggaacctcatgtagattgggataagatctcgagtcagccacatagagaagccatatgtcaagttggccaaacttaagaaacacacgttgttggctctgatgctttcacgcaacagagacacaaattttcgagatggattgatgaacaagagtacatcttttgatctcatcaggtggaattagactaccgtaacagaaaagctagtgatctaataaggccgtttaatgaaagaactatcagaagaggttaggatctcatcagagatcctctccaagggagactaatcaatagatcagggagggcctacagataaactgtccaaccaagttcctctggaactaggataaacctttcctaacccgaaggaggacaagccttaccatgaagatctagtggtgagaacatccagacactaggaaccattgatctaggggccggctagggatctctaacacaatagcaccctcgattggccaatctttggccagccagcaccttagtggtgcacctttggccgaccaataaggtcaactcctatcccaaaggatccgagtgcgagtaacccaaaggccaatctaaccgactaggcccacaaacgggtggaaacaaccaagatgacaataacttgagaagtgagaccaatcacttcaaatacttggatccacctaactgcagcaattggtgtgatctaccccaggtcaatgcacaggctcaaccgattagtcaaggaagaatgggtggccaggtccttcccagtacagagctgaccggtcatgaacaactacgaggctcgaggctggctggccctttacatgccgtctcccagagtatggtgaacgaggctctcgccaatctagggctacaactcaattaggaagagccaatcaaataggtccctgcagtaatagatcgttctatgcaagaacagttggatcaaatatgagacatgctcaagggcttggctggcctaaaaccatcagaccttgagctagataggtcaagggattcgcctttcttagcatacatcaatgccttgcatgtgcacaaattcaagatgataacttggaagatgtacacgggaaaagaagataccctagtacacctaaaaaactttgacatcaaaatagatctccaacaagtatttggacatgtgtgatgcgaatatttccagtaactctagctaaaatagcccaacaatggtatttgaagttgcccccagtaagatttaattcttgggaagaattctccccaaagttctacattcaattctcttcctcaagacaaaataccttcacgactggaggatcttgtcaaaataaagtagagataagatgaacctttcaaagattacattcaaaagttcatcgttgaggccaccaaggtcaaaagcttgacagaagaatgccaatatacggccctactcaaaggcatcctaccgttaagtgaattttagaaagatatcagaaggatctcaacgagtaacatgaaggagttccttgagcaagttgatggcttcataaagttagaaaaagttgttcggtaaaactagacaagagggtaggtcaaagttgaatagacacagggcatcatactacctcaagtgttgtttgacgtgacaactagcacaaattacctctgccgattctctaatgaaaaattgactttttgcaaatgccaataataattacagaaatatacgaaatataaaactgtatacgtctgcagaagcagaatgtaattttgttactgctgaaaccagttttgcagcgacaaaa

SEQ ID NO: 230764 - DNA, 761 bp, Cannabis indica
agcagatcagtatagtactgaaggaaagcctctgtgatttggactggattctcgactctttccccgctagcattaacaatagaaaggatcctattttgccttctcctttctcgaatacttgaatggaataatgaagtgttagaatcaccttcctttaaccaatgagccttagctttttgttgcaaaaaagatgttaacactttatacttatctgcatatgattcccgagcctctctctcttggttttgccattcagcattcaaaggatcgctcaccagcttctgttgacactcaagcatccaatctttagccttcaactcctcactatatacattagaaaacccctgtttgttaatcgcattcagcaccggtttcagacctcgtagcttattaacaacttgaaacattttcgaaccaataaccggtttggaccatgcttcagcaacttgttcttgatatagaggataactagaccacatccgaaaatatttaaacggcttcctaccacttggaggcatagggtgaaccgtcaatattgccggagtgtgatcaaataacccctctgcagtaaaaattgcttcagcatatggatacatgtctagccagctatgattcgccaacaccctatcaatctttgagaaaattctatcatccccttgttgcttattactccaagtgaagtaactcccaccaaacttcacatcctctaatttacaattcaggacacagtctttaaaacccgtaggactataatgaaccct

SEQ ID NO: 230765 - DNA, 1281 bp, Cannabis indica
aaaatttgcttgcggatttgagtgctgttgaagttatttttgttaaacgatctgctaatttagtggctcatagctttgttagagtttctaagttgtatcctgatcgtatcttcagtatagaatctgttcctactgatttgttaccttatttggtgacggaatttgttggttaatgaagtttacattttccattcaaaaaaaaatgtaaacaaattatataaatgatatttattgtgaaatcatgttaaatttaaatatatgacccctaataacaaaaatagccaccaaattattttattttacttttgattgttaattactaactcagaaatatgtgtattaaattaatatatatatgatttgctctaaaataaacttttatttgtttaattaaagaaaaattgatttagttattttcttattcaaatttatacatttttaattaaaaatagagtaaataataattattgaatatgtgatctaataattaatatatcgtcatgtcatgtggttttgaattggtatttaacagccaaaaaaaataatataactataataaaatcgtaaaataagatattttataattttttttattagagtgatatgtaatatttacaaatattagaggcttcaccgcaaattattacaatatataataataataaagctaattgaagtgtatccatccttatctaacaaaaattctcacaattataactgcaaatacatatagcctgatttaatgcccgagaagggacttgatcatatacggacatatgatatacgtaccaccatatataatattttaatgtatatatatatataattagtttgtaatatttatgtatctgttttcagctggttcaatctccaaaatcaaacctcttcgaaattccacataagggtaagcaagcggggattcatctgcttttatcttccacctacgtacgtacaaattaattacaatattatatattattaatatatatactcataatgataatgtagtggtcatgatcattatgttaaaatatatagatatattatattgccaccattaattataattgttattagagcattgctattgggcaccagtggtgcctagcaccttctaaatgtgtcgacttgcaattggctagtgatactctataaaaattattatattaaactatatgggacccgatactaattgcaccaatagcgatattgacacgtaggagggtacctttaggcattttctcttgttattattatatatgtattcgtattaattaaata

SEQ ID NO: 230766 - DNA, 1173 bp, Cannabis indica
ccccccatccggacccaacccagcccccatcgaacccagcacacgcccccatccggacccagccccagccccccatccggacccaacccagcccccatcggacccatcgggtctcgtcttccccaaccattcacgcctgaatcggacttgcgcgtgggttttcggttttggtcggttttcgtggtggtcatggcatccagcggtgtggtggttgcgacggtcgagcggtgcggtgaaggaggtggatcggcgtgggttttgtgtggtggaggaggtggctcggcatggaggtgcgatggaggaggtggctcggcatggagagaggttaaaaaatatgggaggggtattttagggtttagggaaaagtatacccattttttcaatagctataactattagtttggaaaataaatttaggtataaaaaatacatagaaaatcaaatttcccatatatttttcgtattgtgtggtgttatgtctaaacccatatattttcgtatgtaatcatacttgtattaattttgtaccgtataaaaatccaaaccgtatttagggcactaaatgtgagtggtttggtacacatgtttgtcgactaaaatagggacgcggaaatagttgagcacacggaaaaaacacacattcacttcacctattctttcatatactattgactatttattagtagtaatgtaatattcattaatattattattattcattcattttaatatatagttttattttatattaattcacactttcctataacatatttatttatatatcacttttcaaattttcccatattggtgggcaggcagtgttggaccaccaccacaccaccactacattaagctatatatataaaaataaaaattatgcccactttttattatatgtcataatagttaaacaaaatataaaatctttttttttttttgttatttaataaaataaaaaatctaatcaataattttctaaaataatattaactcttattgtagagcactactataaggtggcaccctaggtccagagtcggccttgagcataggcaagctaggcctgtccctaggacccacctagctcaagggtcaaaaaaaaatttatccctttttaattttttttttttattcaattttgaaaaatatcatatttttttttttcttaaa

SEQ ID NO: 230767 - DNA, 1538 bp, Cannabis indica
tatatatatatatattaaaatgttatttatatttatttatataaaaaaatattaaaaaatataatatctattaattatatttttattggattttcttttgtgttgactttgtaacacttgattattttgtgtatttatttttatgatattttgttctattttattatttagaaatgctgttgttttaattatttgaaacttttagttgcattatattgtaacgataatatgtttatggagtattaaacttatataaagagtgatatttaatttttatgtatttttctttatattgttatgttaatattaaaatttaagtgtataattggatatccaattaaaaaattgatccaatttaattagtaattgaattggattttaaggtctaattagattagatgggataaacaaaaaaatgttgaattggattagatgttcatccctacatgatagcatgtaatcagtgtgtgtaatatacaatgatacaatatcttataaattgttaacgatattttataatagttattaaattatattatttgagatatcctacctaactattctaatagcaatatgctattataagtggatggtgttaataaaacacataataagaatgagcattactataaagtactattagtgatcttccataaaaattaatacattaatttatattgattgtaccatattgaaagtgctaaatctgtcatcatattccaaaagcttagccaaacaaacaacatatgttgcttctgtttttagtaagtaattggccaacaatggccgatgctgtgatctctcaatggaaaagaaagccaaagtgagactggtgaagttttgaaaaaggctcaagtgatggaggttagattctgtgatatcctcttctcttgtcttcattttaagtgaaaattacatataatatggggttttgaaaatattttacttaaatatggcaattttaactttgaccacattatatggcatttttttatttttaacttttatatggtttaaattataccatatttttttatatatttactttcaaaaaccatatctattagaaaaactagaataaaaggagggtctccttctctgttcagcttcaccctaatcgccaccctccaacagcagccccagccaaagctccaccgccgtccacacctctctctctttatactcgatggcagagggcatcaattctcttcgtacagatcttgagaagcaagcaaagcaaagcaatgacaatggaagaagagacctaactagtcaaactttgcatagctacaacttgtgagagaacacatagcatgggttaatggcagaagcaaaaacgaactctcaaatgcctaccttctcacttagccgaagctcttcttcacgtcttctctctcgtcgtctcctctacccttcgtcactcgagtatgaagaacaaaataatctcatttttctcatttttttttaatcagatctagatgtcattttctcttaagattgttgtaaagtccttttttggcaagttaggtgacaaaata

SEQ ID NO: 230768 - DNA, 2318 bp, Cannabis indica
ttaatttttttgaacagccctagtcgtagccacaggtatccaaagttcccaaagagattaagctccttcttaatgctgaaacatgtctcacaaactttcagccaattaattaggttctccatttagttatagctattgccattagttccttctcatagattgcttttttccgtgcttgttggcctaaagtttgactgaagtaagcaatggttccccaaaaggcttagaaaaatcagctaaagtgagaattggcactgataccattactgtcatgatggccaggaaggcgttttctgcaattgaattccaaccaaattgatcttttcagagttgggtaatgcaagcatagttcgctccaaatcttttgtagtgccctgtgagaccgagaaaccccttaagttgtttgatagtagttggtgttggccagtcaatcatagctttgatcttttcggggtcagttgccgctcccttgtaagaaatgatgtagcccaaatgtgcaatctctctgtccaaagtcacatattttcttgttaacatggagctcttgctgtgaaaagatgctgaaaacttcattctaatggtcgacatgctccaattgagtcatagtatacacaagtatgtcatcaaaaaacaccaagacaaacttcgctaagttaggtcgaaatatgtagttcataagagattgcaaggtggctagagcgtttgttgacccaaatggcatgacctaaaattcatactggtcatcatgggttcaaaatgtggttttgtgcacatcctctttccttgttggtatttaatgataacttgattcaaggtaaagtttggaaaaaaacatagtaccactaagctcatacaataattcttcaatgatatgtatcagatactattttggtatattagtgcgattgctgggccaatagtcaatgcaaagatgcatcctttttcttcattgtatgaaatggtgaatcaattgtctattctcgttgaaaagtaatacatatatagataaacacataatagaataggaagctacacaattggaaactagaattaagctaattagacaattaatatacaactaacactctctctcaaattggagcatagatattgatcatgcccaacttattacatagataatcaacctgaatctcattcaaagctttcgtaaagatgttctctagttgatcaccagtcttcatatatctatctgcattgctttggcaatatcccattgcttcatccacatttctgaggtgttgtacccttacttcagctctctgattgttggtactaagtcattcaagaaagtgctcaactgttctggtggtatgctattcaatggaaccaaaagtctaatgaaatcattcttgtaatcacccatgtttccttcttgttttactcaaagaaattggtcatacaaggaccccatttgtgtatcccagaaatgcttgaacaccaatctcttcatttctcaaaattgttagcttctaattctaatattgataccaaaacaaggggcgtcactggagaaggaaataaaagttgctttgatcttgtcgcgctcatcatagtggtagcaagaaaagtacttgctcagcttgcattatcaatccatctggattctcctcatcgaaggttggcattttaagtttccgcaacctatgttcttgacgatggtggtgaaacccatgagttctttctgagttgacagctcctgggaagcatcttcctgtcattcttcatgatcgaatacccctgtagtccctccttcattgtcatcacgtgtagctccactcaaagaattcttgtcccttgactcgtttccagtgtgattccagagttcttggacctttcatgaactttcttgacttgccattaaattcttaaatcgttgttgcatctgctagttgagctgaatggagtctttaactccagccatttctaactttattgcttccatttcttcctccatgagaattgacgagccccctttttgttagtcttctttggtcccatgtctgcagctcaccgcaccgccaaattgataagtcttttcttagttagaatcaaactctcattcttgcaaaaataatcgctgatatccctccaagaaatctttattaaattgctggaaacataatacaaatcaagcatttgagaggcttgtctctcctatcctaatttttcaagaggattggtctctccacaagaactcactcttatctaatccaagctatccttacaaaaagagcctattacgtaatgccaactagtctaggatccaattagaagaagacaagtcaacccctaactaa

SEQ ID NO: 230769 - DNA, 1614 bp, Cannabis indica
ctgagcagagtggaagcagcaaacagagggaaactagcagttgaagaagctctacgcagatggagatccgaacatggtcaaagaagacgctcttcggttcataactcaaccaaatttaagaactctcacccgtctcaccaccgaagagattcacgtctcctcgatgtgaatggactacacatggtgactgatgggtcaaaacctgttttgaagccaacattgtcaattggacaaattctaagcaggaagctgctgctgcccgaagagcttgaaatgggattgtctggaaaaggttctggaaaaccaaaggtttcattgggtcaaatgcttggtaaacaaaatggtgatataccatcttctttgagacctgagaaagaaaattgtaacaagcaattttcttgtaagagaaagaagtttggatttgctcgtttttcactactcttgactaatcaaagtaagaagaagaagaagatgtcaatgatgaacttgaacttgaggtaatgcaatgaatccttcattgttgatcatattatattcctaattatcattagtgttgtttgatttaattgttgtatctgcttactgttatttctatccttgattgtaaaaatgtttgtgatatatatgttatatatctcatgtcatatgcttttaacatattaatatatatatatctaagctttgtattcagagttgtttctttcttatctaatctgatgcaatttctcaagtttgcaagtactgattgtaatgtatataatatgtaaaattgggatttatgattagctcaattacactcttttaatgctaaacataaacattatgatgtctcttcactccactataattagtgtttattttataatttggtaacatttttcaataccataatgttgtcgagccacctaaagttgattctttgaatattaatagatggttttattgacttaattctaatgaaataatttatcatatggtgggacatgtaatgtgagagaagttattatttataaaagttggatgaaactgaaggacataatcactatagaatatagatgtatatttacatagagattttcttttcgatttattatgggtttttttttttttggtgggataaagggccaaaattggggctcactatacaattcttttataaaaataaagataaataataatacaaattttgttttgaatttataaaaaaaaaaaaaaaaaaaaatttgaatgtaacaactaatatttacttctttcggactaataatttagaatcaggtccttatatgtgtttgtacaaacaaaagtaaaagaaaattacaattttacaaacattaagttattatgctgctatataaatatctaaatttaattttcggttgcatatgaatatttaattttaatttttgatagtaatatacttaagttatatttttagaacttctgttacctagctattaagtgtcaagtcaatagccacgtgacaatctctaattgttctatgtcattaaatttttattttttatttaaaaattaatttaaatatactaataagaaaatgacacatgtataatagtttgacaattcacgatcgagtacctacagaagttttaaaaa

SEQ ID NO: 230770 - DNA, 680 bp, Cannabis indica
gttgctccgttagttgctatgaattttaaattgttcttttatttgcttatcgttaaccaatcataaaacgacacgtttagaaagtccaagtataactaatgtcatgggtgggaaacctgtgaacacagcagattaagttcttgtcgtatgacatggtggactatgtatgataatcgttgttggtttttcggtctgagtttttaatttttagattttgttatcttgctgattgattatttcctgaggtgtgggagtggactcttttcttgaccatctatggaggaacaatatgcggccttctcaatccatgatgatgatgaggaggggcttatctttgaagcaggggcggatggattggcagagattgacgatcgatggcttctggtaggacgtttcttaactaatcgggctatagattttcaggcgatgcagaacaagattgctacactttggcaaccagggagaggtttatatatgaaagaacttgactcaaacctttttctatttcaattttaccatgaagttgatatagaacgggttattgaggggagtccttggacgtttgatcgagcatcgttaatctttgaacgagtgaagagtggcgagaatcctaggagtataccgttggtaaaactggatttatgggtacaactgcacaacttgacagtcggattcatgtc

SEQ ID NO: 230771 - DNA, 2263 bp, Cannabis indica
aaacataaaccttccaaagtggcgattctgagactggctcgtccagtaggtcattcatcctagaacattttactacaaaattggctagagcctaccccttgattgaaacctaaggctaatactggatatcaaactggctaagttccagagcttacttcaagagtctcccacatgatttcgatttttgtagcacttcgtggagaggatgattagttaataccttgatgatgcggggtttaaagtaggatcttagctttctagaggtgattagcaagcaaaaggacaacttttttatcatgggatacttagactccgcacccagcaaccttttgcttacgtaatacactagcagttggacccttccttcttctcgcactaaggtggcacttacaacgtgatcaaaaactaccgaataaagttataacaactctccttccactcgcttatataaaattggagccttagtcaaatattcctttagtgtttggaaggcttcttcgcattccctagtccattcaattttcttatttctgcgcaatatgtgaaaaaaatgggatgtacttgtccatggacttggacacgaacccactcagggttgcaatccttctggtcatattatgtacatctttgtactttttgggagaaggcatgtcattagacactttggtattttcaagattaacttaaaatccttggatgctgactatgaaacccaagaatttactagagaagactctgaatgtgcttttctttgggttgagtttcatgccatacatccaaataatttcgaagacttcctttaagtcatcactatgctctacaaaagttttggatttcacaagcacatggtctacgtatacccccatgtttctcccaagtttatctttgaacattttattgatcaaatactgataggttacttcaacattcttcaatctgaatggcataagcacgtaatagtacacacctttgtctgtttggaagttgatatgttcttagtttgcgatatgcaacttaatctgattatagctggagtaagcatccataaatctcaacaatacatatcttgacgtgacatccaccatttgatcaattcattaaagggggaagcagtcttttgggtatgccttattgagatctgtgaagtccttgcacatcctccaagtgccattgggctttttgactacgaccgggttggccaaccacactgggtatagtgcttctctcaaaaaactcaatggaatctaacttttcatcttcatcttttactgctttaactcttatcgggtctaaatgtcttcttctttggtagactgctgtgtcattctcatcaattttcagagcatggcaactaacgtttggattgatccttctcatgtctatgcaactccatgccacgatctcttgattctttttaactgtcaccacaactttctctttcaccgctttatgtaagtttctccccactttgatagttttggtgggatatgcatcacaaatgttgaactcttctatatcctcttgtggttctatcattttctctatcccaactcagggatccaacttatcttcaacctcctccgtgatagcctcagcttttgcgtgtacaactgttccgagagcaacgtaaacctattctctgaccataaacattgatcagatagagacgttgtgacaattccttgcacttctttggtcacctctgactatgccaacgcttccatcatcaaaaggaaacttcatgctgcctaatggatgtaacatcccacaaatttactaagataggacgccctagtatggcgttgtatgttgtgagacaatccactataacaaatgtgtagtgtttgaaggaacatacattgtgttctacttttagtgaaactggaagttggatcttcctcatcgatatcaacaagttgccattgaatcggcatggtgataagtcaccttttgttagcccaatttcctggaattcaaaattaaaaattatgataattaagcttccattgtctactagcactaaggaaattcttttgttggcaatcttggcttctattacgaaagggtcgttgtgaaggaaatggacatttctagctgtcggaatatattttaccaggatctagatttactaataagtatgtttattaacatcctaaatattaatttctaaaacaatcgaattcaaacacataaaagtttgagtaaccttaccttgattgcagcgttatataatgactcctccaactcaaatctctaacccttg

SEQ ID NO: 230772 - DNA, 834 bp, Cannabis indica
tggagaaggttgtgcatagtgcaggaggatatgtgggatcttttgttaagtctgattcaaaaaacttctatgggatttggcgtgattactagcgggtttggtctactattgacattgaaaaaccattgaagcgtcgtatgaaattgtgtaaggagattggggattgaattagggcaacattcaagtatgagcatctacccacatttaatttcatctgtggaattattggccattcagaatgattctgtctgaaacattttgatcaagacttggatcaaatcgttaaaaccttatggtatagggatgaaagcacaaatgaggaaaaagaactatctcatcggagcacaatggctcaaattgggaaatgaagaagcattgcctagaactagtggtgtttctcgccggtccgatgctaaaaatccgacagttgatgcaacaaaaatcatggaaattgattccatgatatctggtagtaatggtggcaccataaagattggagataagacacagggtagtaatgaagatgatagggtatctggtatggatgtgaggaatactgatagtaataatacgatagacaaagtcaactttagtgagaaggacatgacacttattttggaaaataagaaaaggcagatggatatgtaaatattgagaacgaggatgtggtaccgacgactggattaaagttagaattgatagagctcttgtttctcaacattggttggatatgtttcctactgtaaaattgttaaatttggaggtctctacttctgatcactgtcctctactcttggtccctgtaaatacgagtgctctcgctggtagaagagt

SEQ ID NO: 230773 - DNA, 1969 bp, Cannabis indica
aaaattttgggaatgagctgatgtattttgatttgttttggcaatgagaattttattattcaattttttgtaatagtttgggtattttatagttatttaaataatttacaatataaaaaaaataatatttaaataggtataaaataaataaattttctgaacttttttaggggatgctttatataacttacgcataacatttttatacaaaataaattaaatattttattttgaaaaataaattggggttttattttaaaaataatgtttacatcaaaatggaaaccttgactagtgtaggcccgttcagttgccttatgttatttgctgaattgggtaatgagtacgacaaagaacaatgatctagttaagttattatgtccctcaattatttgtctaattgtgtcatagaacaaatatattaattatgagttgttaataatagtgatgaaacaaaccattggggaaaccaaagattaaaatgttaaaaaagtttgtatgttttggcagtggaaaagggccgactacacttccctcattgctcagaagttcttaataactttttagactacgaaatagagaagcatgaacatgatgatgccttttttcctgataagggcaccccagaggagcaagcaaagaagaagatgctgttcttggatctcaaacaggatcttcacaaagcattttctaaagacattgcacaaaacagccaccctcctcctcctgctgcttcatcatctttttcatcctaattatccaaacaaggtctggaaaatcttaatggtctagttcattgtaaatttagttttctctcttagataaagacattattatatatagtttgatcatttttttttcttcaagagatttccttaacaccttctgttgtgttttgttatgtattctttaaaggaatattgttattaggtattaattgtacttaatagtactactacgagaatgattagatgagcttccaatgctttggaatgaaacacatatgagctctttttaatttaatgataatattcaaagttatatttggaaaaaaattacataagccatgatgtggctagtggtacaggtgctagtgatttttccatatattttaagaattagtgagtcaattattctactcactataaatatttattgcctggtttatcaactcgaaaagaaaaagaaaaaagaaaacttttctaatgtgattacttcaaaaaagaaaaaggtttacatttatgatccaaattgcaaaggctcttgcacttcggcaggcctcccaaaaatactacctccatgcaattcacaaggagaggcccatatgaaaactagatcatcaaacaatattagtagaagcaaaccacatataaatattgactctaaaaaactaatatatcattgaaaataaaacctaaataagaatgagaaatttacacccatgactgcctttttcattttttttttcatttatactgtcgcacggagtatataacttttatacttctttttttttctctactgtgtcaattatttttacaatgtctttcattcttactttgacatgtttatactgttcttctaaagatttgttcttcatagtcttatataaaatatgtattatgcattgttgtcatatttatgtttttatcattttataataataataataaaataggaaataatgagtagttgtggctccccacatcaaaatttaaattttattgttttattagagtgattgatttggaggtgagatgtgacaacacactactcactaaagcaactctctcatcaactttatttatttatttatttatttaattttaattttctttttcataaaactcccttcatatttactctttgcctgtaaaaaaaataatgtttctctctctcctttatccttgtgtctctattactataagacataagatcttgtttagtgcttcactagcaaaacccacct

SEQ ID NO: 230774 - DNA, 738 bp, Cannabis indica
ataaggtctcactggtatatgctacaagatctaatagcattccctctacataggattttcgatttttttgattacgatcaagacaaggcagcgggttttgcctccatttttgtgaaaaatagaatttgtggttgactttgcttaatgtatttaaatgtaattaaaattttcgagtatcaataaccgcctgatcaatccaatcattggttcgaccgttttgagttcccgaaattagaataaaatattcatcaaggggtaaatctgtattttaatgatcttgcagtgccaaattcacaaatgttgctgaagttgcactgaaatcggtagtgaatgaattgatcaaagagataggatttcaatgtggagaagacaatctatcaaccgggatgccactcgctaggttattggcgcgtgtcactcacgtgggtccgattctactcgatgaaccgagcaaaaacaagttcattgaagccattaaaaatgaaccagaagtggaaatgttattcactgccctctactcaaatgcagatgtattagattagcaaagtgagcttgtgattttttcttttcttttaatttcaatttacaatgtgtattttttataagaaagtcatctatgtaaagaatagaatgtgattcaccttagtttggtattttcaaaaaattattccaaattaaaagtgacaaaatagagtcataggactatatagcattgtaatttatctttgtaccttttat

SEQ ID NO: 230775 - DNA, 704 bp, Cannabis indica
gaggggaacaacaaggcttcgccgccgatgtttgggctcttgggtgcacggtgatcgagatggttacgggtcgggctccgtgggcagatgtgtttgacccggtttcggctttttaccgtattgggtttacggatgatgtgccggagattccgagttttgtgtcgaaaaaaggtaaggattttttgggcaagtgtttgaagagagacccattagagaggtggtccgtcaacgagcttcttaaccacccatttctcgaggaatttgaatccgaatccgaatttgttgggaaggaattcgatagttttgatttggatagtccgagatgtgtactgagcaccgtcgattcgaatcaggatccgaacccgtttcgtggcagtgttacggatacggagacagactctgctgctcaaagaatcagacggttgggtagtgaatgcaatgcggcgtcgtttttggaattggactgttgggccttagatgaagattgggtcacggttagatgcaactttacccaagaagggcccgttatgatatcaatccctatggagtgtttaggcccatcaagggatttgttccctattgatgtggatgagaccccaaatacgaaggggacgttgaaaatttggacttgtaatgaggatgatttgatggctcccaccaaatttagtaatggttcgagaaaattcaaaaaatgtagaagaaat

SEQ ID NO: 230776 - DNA, 1845 bp, Cannabis indica
tttagtttttttttttttttttttttgctgaatatgttgtttagagcttattcatttattgtgtacctttattttataaaccattttattttttctcagtttctgttaaattccttttacttttttgggtaatttttgtttccacattatatttacctaattcttcattagtcagtcaaatgatcaatcaaagatacttaatttgctaatcaattgctctacccaaaccaaacaaatacattttattcatgtagctgtacaaaaaatcttttggaattgattccattataactttgatttgggattcaaactgttgaatcgtataaagattaagataaagttttacaatgttttgttttagtttttctagattatactatcttgtctttatttaataactttttatcaaaattaagataaaaaccttaaataaaacaaacattgtctttatttgataactttttatcaaaattaagataaaaaaccttaaataaaataaatattacgtggctcgacacgtaacttctacctagtatatatatatatatatatattaaaagaagatgtattgatcatatacattagtttttagcaattgataggtctcaaatctatgcataaatcttaaatgtattttattacataatatctacattcaaaatttgatagttgtcgaggacactgcacatttatatagatgtgtaaaaatctcttaaaataaataattaaaattaaccttttgttgtaaaatctttaaatatttgtgaaatacaaattaaaagcttattatatattatgagaaataaattactactcacctttataattttctatttaatgttacctattcttggaattttattttttgaagcattgtaataatcaaaaatcctaaacaataaataaattaacatcaaaactattatatataaattttggtttgatgcttacttatactaatgataaatattactcacttacattgcaataaatttcttaatcgcatcacttggtaattctctaagtggattgagttagacacacatctcatgtgatggattaaatattattctcacccaataataattgttgatggaaaaataaattgttatatataaatatattactatatagctaattaaaataatttagattaatcttaccctaaattaatagagatcaatgaaagttacatcttttagaccctaaaatccacaatcaatcgaagatgatcgtacgcgggtaccgacaacctgtagaacaaagaagaaattaattgggaaaacgttgggacaccgggatggtactgaccaaagggactccaacggtcaagttaggaagattgttaataatgtaataaaaaagatgataataaatgactgaactaagttaccacctatcttgactgcagaaataagtatgtaattttagagagaatgagagtgtgaacgataagtgagaagtagtgggatcactgaaaattgatctttctctcagtaacttagagtggctcttataggcgtctatggaaaggcgttactcatgaccgctcaccccccttgtgaagcgctcctctcctacttgatcagggagattgtcattagtgtggtcagtttgattgatcactttagagatcgttagatgagtgataagactcagtcttgtatacaggtcggatcatcgtgagctcaatgttaggccatggataatgttaatgtctgacttgactgtatcttttggggcgttattggccttggtatgttgatcgtatcgtcataactaagtcaaataagtccaacccaaactcttgtttgtagcattttttggaaacatcgcatgtgacat

SEQ ID NO: 230777 - DNA, 1300 bp, Cannabis indica
ttactaaattagactcactgtcgttggctaaaagcgaggtcaacagatctctttgattccatttaaggattcggccagtagttggtggtttgtttgctggtcgaatgtaagtcttcaatggatggaagtgtgagctctatgggtatcatagctttgtactcgtaggttagagagacggttctgtgacctattactattttttctattgtgcgataggcccatagtactttgagcagttgtttaggccaattcccttttgcttgctccaagcatttatttaacgtatctttaagtgtttggttgactgtttccacttgtccattttcttttggataggcaaccactaagaaactattaatgattccatgtctgatgcagaaatcaataaagaggttactgtgaaactgtgttttgttgtctgacactatcatctgtgggagtacaaaccgacaaatgatgttcttgaccaaaaaatcaagaactttgtttgatgtgatggtagctaagggctctactttgacccatttggtgaagtagtcgaccaccaccactgaatattgaactcctcctttccccttagcttgtgatcatatgaggtcgattccccagattgtaaatggccagggtgtttgcatactattgagttcgtttggggcaactctaggtattttagagaacctctagcatttgtcacatttttgacataatccattgaatcttctatcattgtcgggcaaagtatccttgtctaaagatcttctttgagaggctttgccccctagcatggttgccacaaaagtcctcatgtaccttgaccgtgaggagtttgtcttattcttttatgcacacctcagaagtggcattgagaaacttcttctgtgcattactccgtccatgataatgaagcaagctatttttctcatcagtctcttagcttcatccgagtcagttagaagaataccttattctaagtaatgtgcaattaggtcatccatgatggagagttgtcactcatcaagataggcttcaaatcttcatcaatgctccatttggtgagttattcgacgggaactacactaagaatgtcagaatctatagtgctagccagtttagctagtgagtctgcattggcattatgctcacgcgacacttgttggatggagtagggcttaagctaggctaataaatccttagcttttcttaagtatgaaatcatgtttcacccttgggcttgatactcgttgagaatctgattaacaactagctgtgaatcagtatagatctcaagtgattcagcttt

SEQ ID NO: 230778 - DNA, 1732 bp, Cannabis indica
gttataaactgttggcattcatttactattgcccacggttctccaccgttggcattagtttttcccaacggtttttttacttcggttctaaactgttgggaaaactctccccttaccttttccaacggttttcataactgacccccttattaactgttgggaaaagccaattttgtagtagtgagtggatttgggcgaatttcaaatatgaacacctcccaaccttttgttttatctgtggtatcattggtcattccgagtgtgcttgcctgaaacggtttgacaagccgattgatgaaattgtcaagccatatggaatcgggttgagggctgttatgaagaaaaagaattatctaattggggctcaatggctttgtactggaagagaagaagagaatgccatggacggcggtggtccaagctttgccaaggctaacggtggtgcattgaatatgccaaaattgtggaggttgatcgagcaaagcaaggcgtgattggttcaatcggatcttcaggaaagaatattcagaatttaaatgctgggattgtgtataaggaagtaatagctggaagtggggatatgattatgggtgaaacaaatatggtaagttaactacaacatgatgccgtgtgtgtgattgacagtaacaaacgacgaatggagatagcagaggggaatgttacgtgtgatgtggaggatgctgaggtggcatcggttgaggagtttccagtggggtcaaaaaatgtgttaaaggtgggccttggtttccaagcccaccaatcattatgagtataatagcttggaattgtcatgggcttgggaacccatgggcttttcaattcacaaaggatcttgtgatccaaacgaagcccaagtttgttttcttatgtgaaacattatcaaggaaagttgttgttgagaagttaagagttgttgttggttttgatggtgctttttcggttgatgtacaaggaaaaagtgggggagttgctttactttggaggaatgaggaagaggttcagctattgggttatgggcataattatgttgatgttgcgattactgatgacttcagtagaaggtggagattgacggggctctatggtgaacctaatagaaatcttcgtaagcccacatgggatcttattcgaatgttgaaggccaagtctaatctgccgtggtgtatagttggtgaccttaacaatgtcacttcgcaatccgacaaacgtggaggtaatccttatccaaactggttaattgatggcttttgtgacactttaattgagtgtgagttagttgacatggatttatttggttatccctttacttgggaacgtgggaggggtagttcggagtgggtagaagtgcgaattgatagagctcttgtgagccaaacgtggcttgatttatttccttcagggaaactgtggaatcttgaggctacaacttctgaccattgtcctcttaatttggttctttctcattcagttggggctgtcaaagttagagtttttcgatttgagaattcttggcttaaagagcctctttgttttaagattattgaggatgtttggagtagcaattcgggtagtcatgtgttggataaaataaaattctgtagtgaggctttgcttatttggggaaaaactattctggcaattttcaggaaaggttgaataagtgcaaggctgagatgaaaaaatggaagaggggccgtgatcctttggcggt

SEQ ID NO: 230779 - DNA, 884 bp, Cannabis indica
tgtttcccttttgtcggccacactacacacctacacatatacatcacaaatacacacaaatatatatatatataaacctatataaatactccttcacttaactaatcttctttgaccaaggcttacacacgattaattaatatatatacatacatatatataatcaaacaatatcttagttactcagtttccttattagctagtgaccacaatatttaaacccttatatgatgaaacatatacacacatatataattattatatatacgagtgttgtagtgtgtagtacataatatacattatattaaatgataatatatatagggttatgtcttgatgaatatgaacaagaactcgtggatcaagcaaagcatatcactaaaattataataattatagttatctcaaagtacccttttgctctttgctttcttaattttcctagctatatactactttacctatggaaatttctctatgttttttttaatcttttttttaaagtaattaatggtgtttgattgtaattatatatatatttagtaatgtatggagtttgattataataatagtattgttatttggtattaatagtacctagccatttttatagacatgagattttataaatagttagtgatattgcttaagatcattttgaatggatggtgtatattttaggttaaatttgactcaaaatatattacaaaattatatttggcccaatttttttatttgtattctaatgcacaaggtgcaaattaactataaaagtcaatgatatcactaaaacttattgaaaatatacaaacaattaattttatttatattattttaataacttataaatataaaaaaaaattattaatgaatagtattaatga

SEQ ID NO: 230780 - DNA, 1110 bp, Cannabis indica
ttattaattaaaattaaaacaaagaaaagaaatatgtatataaaccctaaccaaaacctaaaacccattcctttcccctctctctttcatctccctctataaatatctttatatatataaaaataaacaaaaataataataataaaaaaaaaccctaaacttaaacctaaaacctatccatttcaccctctcttttccatctccttctatcctttttctctctggctcacgacctcaattttagacgggccactggctggagccaaccaaacagcccgcctccctctctctctccctttaagtcccttactctctatctttcacgaactctctctctctctcaatctctctcttttcaactcagatctacccactcatactgagatccataaagctaaacccaagtcgcctgagttttctcctagctagtcgtgagcctaggttgaaagctcacgaagttgacttgggtcatctagagaaggtcagatctaccttatgctctatctacataagctgaaccagaacccgaaaagcacaggcgcagtttcgatttcaagggggttgggagagaagagatagccagagtcaatattgaattaaaaaatttataaaagcaaatcataaattagttttaaaaatgaaagacgatagtgagttcctaaacgcttcttcgcgtctccatggtttcaggcgagcttgggcatttgaggctttcactttattaaatttggtttgtgattttattatttttttttttttggattttatttttgttttgcattttattggtgttgatttagattttgaaaatgtaatgatggtgttggtggtggggaaacaaatatgaggtttgctttgaatttttttttccgacttggatatgaaaagtagagtgcaatggtggttgttgtagtggttgtaggtagtgatggtttcaacggtggtggtggtaatggatggtggtggcagtagatgttggtgtggtgatagtatgaagaatgtattagaatatttctaattatgaaataaaataaagaattgattttgtgataaatgaatattttatattcattgaatttggacaaaatcaattacgtaatattctatata

SEQ ID NO: 230781 - DNA, 1515 bp, Cannabis indica
agatttttttaattaaatagaaaaattaagtataaaaacttaagattttcaaattttactcattcataggtaatacccattaagaatgcactcatatatatgtgtatttatttatagctacgagaaagttcttatgtgaacttagatatgatgcaagtttacccttttcatagaacacacacaattaaagatcattttcttaaagcaaggcataatccttatctctttcaaatatactatgacataatacaaaatatatatatatatatattgttatacaaactaattttagtatctgaaaatgtaggtggaaaaaatataaatattgttatacaaataaattctaatatctaaaaatgtaggtggggaaaattgcagatttctctacaattttcccctacctacagcaataagtcattttatagccgacagaaaaagtaaaaaaaaaaataacgtataagtatgtgtcgaattgtaaccgacgcaataacccaattagcgtcggttacaatttgaagctaagtttcttacttcacttaacaaccgatgctaatagtgcgtactttttgctttaattgagaactgaagtaaaagacaatttacgtcaattttgaaataaagcaaataacttgactatttgtgtctgccgatattatgccagttttaacaaccgacacaaattgtttatgtgtcactttacaatcgaagcaaaaaagtcatttttgtagtagtgtcatttcaatataatctgatttactagttaataaaagattagaaatcattttatgttgcatggttcacatgattactttcatgattatatgtttaatgtataaattttattaaatctagaacatatagttattcatgactatagtgttgtctgcacagtgaaaaataatcatgattatatgtttcgaagttttagtcccatgatttgtcaatacacgtgatttacacggatatgataatcattgataaagtttacttacaccttggataagtggtatgtccttggttggtttccaaggtttctctcattgccacgagggattccctggttccctagtcgaggctgtctcgcatcctcattcctgtgagatgcttctggtatattattttgtttgttcccttggttcataaatccttaggatccttagggaacgtctcggcgttgctcttgattatttgtttgattctccattggaacatcccttgtaccctccggttgttcttcctgggcattttggggattttcctattttgtttcctgtctactaatctttatttactatttctaatatagcccctcatcaaattagaaattgtatttatagtatccacattttaaaattatgacaatcatgcccttaagtcataaacttcattccaaaatagaccacataaatttgacttgtttatttgatgacccaacacacattttatatagacaaatgtgacctcaataaatttccaacagtctcccactgggacatataaatgtgttaaccttat

SEQ ID NO: 230782 - DNA, 2413 bp, Cannabis indica
aaaaataacatatataataaaaagccaaatcaatcttatcaaattattattattattattattatttaataaaagacatcatagtcatatattttatattatgtatatgtaaaagggtggacatgtatgatgtatcgaataataaaaagatagtgatcaaccaagatttgactatgaaagaaaagaagaaatgaggtctgaaattttttaagacgcttttacaagtctgaccgaattagtggtaataagtaccaaaaagaggttaaaaaaattaaaaaacaaatagacttaatggggtaagatctgaccgaataagattcgttgtgttattaagtgcaaacaaatacaccctaaaatactctgaattacactctggaagataccccgaaccaaaatcagactcaaggagaaaatccaagattttcccttggtggccaaactggttgaccggtttgccagttgcctggaaaaccggtcggccagttttttgggcagccatggggaaatctaatttttcaccccaaaatccgatcaaacctccaccaaacatgctatactttccagaacagtccaatataacaaatgaaacatatccaaatcaccaattcatcacaattcatcaatttactcaaaattacattctcaaatgaaaattaagctcaaattacttcactaaacatattcaatccaaacaaccattaaaattgcttgattcaaactccaacacactctaaaacagatctaaaaacacaacctcaacctaatttaatcctacagccacgaaatcccaaaaccctattccaaaatcaacttaaaaattgaaaattacaatcctcaaagaaaaggacttacctccaaagcttctcggttgatcttgggtatcaaatctgctcaaaatcagagagaaattgagaagaattcccttggttttggttagcttctaagtcacgaaggagagggaggaagagaattgatttttggtaccttttcttctaataccttctaaaacaaaagccctttactattttaattaacttattattattattttttattacataaaataatcagccaaaagaagtcacaaaaggacaaaaatcaaatgttaatcctcaaaataacactttcacccctccttaagtaaccctaaacctaaagcacatatatgggtaatttagtaattctagctaatccaccaagtcgacaacccaaaattctaagctagtccggaatacttccaaaataatccatcctttattgtcgtgacatttttaaccactccgtcgatcttccacggtcgtcgggctcgaaaatattttattctagaaatggttctacgatacccacatattctaataaaatctccgtaattaataaattacactttaaataattatttactagtcacactaatcaaccctaatagagatcataatcttaccttattaccggaataatttacatatttaataaaatatgcctaattagatatcataatattttcctaagatattacaatatgcctcatctgtcacacaaaaataaagttttcacctcgagcaaagtcatgtgtcttcattggctatccatacaatatgaaagcttacattttacttgacattcaaacaaacaatattttctattcccgtgatattgtcttcaatgagtaatatttaccctttcaaaaatatttctcataatcaaaacattgatcatttctttcactacactacaaaattcactaccaccagtcaagaagatcatcatttcccagcacacaattcttgaacctatcccaaatgtcactcttctcaataatactgatgtgcacatccaaaaaccagacacaacaaaagacactagatcaggtcgagcacctcaaaaaactcccatcttaatgactataattgtgacttagttactcacaccgatacccaacaccttttaaccaacttcatatcctatgacagattttctccatcttttcgagctgctatacttgcccttaatctactatccacaccaacatcttataaacaagcttccaaacacaaaatttggaacaaagccatggatgtagagataagtgccctcgaaaaaaaaactcatacatggattgttgtacccgtacctccaaatcaacatgtaactggaaacaaaggggtatataggatcaatataatcctgatggattagtagatagatataaagaacgattagttgctaaaaggatatgctcaaaaaccaagaaattgaactgtttcaaaaacttatgctcctgtagcaaaatttaaataccttaaaacttctcttggctcttgctgccatcaataatgggcatttacatcacactggacataaacaaatgctttatttgctatggagaatcaaatgaggatgtctatatgaaact

SEQ ID NO: 230783 - DNA, 906 bp, Cannabis indica
aaccaataaatagaaaagttgtattgtatatgagtatatggaaaagatggactaagcttgatgaaaagggaaaaagtgagaaataaatacaaaatattggtatccaaccatatatacatattattacacagcataattcacgtgggaactatacaatttgacatgtctggtttttattatgttacattaaactatataaacatctctctttttcttcactactatatatatatatatggcctatatatatacactattatatatacattaatatattcccatgagaggtcaaggaacagcacatgaattaatccaacttgggaattcgaactctcttgacaaagttggcctatatacatatatatatatatatatatttatatatatctttctctctctatctttgggatatatttctctttatatgtaattggaatctgtcaatgttgaaacattaccacaccattcatatgtgatgagttgtaaattaatcaactatgtcttcttaaatttaattccatttctgattcaactaggactaaactaaaccatgttggtttccaaccctttgaatttattttcgatttaatcaaatatatgtttatcaacattgttattaggtactagtactgttcaatatcttttataggttcacgattagttatcttatcgatattctctaaaagttatttttttaagttatataggacctgataattacaccaaaaacagtatgacgtcaccgaagaaagtactaagtaccagttataccttttagcaattattaataattatagagaaatgctacaggatactcttaaaatatcaagtaccacaaaaaataacgtactgttattttaatatggggtctcacacattttaatttaaataaataatataataaaa

SEQ ID NO: 230784 - DNA, 1598 bp, Cannabis indica
acttccctaatagtgatattaataaaggactctatttgaataggcgggaatcgaattgtttttcctaaaaacgaggagaaatgattataaataataaataattcacgcgcgtgtagaatgttgactatgccactccttgaggcaagtagtaaatctcattttgcaaagatgcaaaaatgagaaatgagacttggagggtaaatgctgcccctaatgttttccaatctacgtggcagtcccagagttggctaggtggcaagaaggtctaaaggtcaagaatacttaagataaactccctaagtgaacacttcgagattcggtaatcatgtttgggaggcccctccgtgagcttcaatcgcatccatgctgtcaaggaattatgttcatcttcgggagctaggtaaaacatctaggaccgttcgttaggtctcagatgtgaaatgtacaggcgcattaaatgtggcatgggagaaatgtccgtgaatgattctgaaaaagacaatgtcagaggcattaaatccattattcgacgattatattctaatctatgagtctggcggctgcataatgaatcacatcaatcaaggaaggttaagggcatatctaattactgaaggtaaaacttatgcaacacctaccggacatacatacatatcctattatttgaatttgagaacttgtgcaaatcatgcttccatgcaactatagtaatctttttacctttctttatgaggctataaataccccaactataatctaaagaaggggtcagaaaaatatcctctgtaaaagtaactattatatcaaatagcagtgacttgtggactaagacttattaatgctccaaccacgtaaaaatactcacatggaatctcttctaatcgtttaaatgaccctaattaattagctagttactgaaaatctcggacaacatttctcatttttatttgaggggtacgatttgatagttgtcaaaatttaaggagtaaaaagttgataatttacaaagatacatcaatatatttaattagaataatgggacaaaacctaatacaaggaccaaatttctgtaaatgtaaaaatttaagaaagtttttaataagtcgtatattttaaggagcagaattaatattgtcaaaaatttaaggaataaaattattaattattcttatttttaattatattcagagaaaaggcaataatacaatggaaatattgtgtctatatttgtagcgaatggagagctgtggggcacaagaaatttaggaggtgtttaacaagaacgcagaatattcatgattaatatatagtttgagatatataagcaaattaatgcgtttagtattgggtcggtgagagtagaggcatatacaaatattaatactcataagataaataaagattcaacaatttaataaaaaaacaaatcaatcttaacatatatatatagataaatgacagaaatttttataccaaaaaatttatggatgaaaaagtttccttgacaaaattcatatatacagagtctcctaacccaaaaagaagacgaaaaaaaaaattcctatcgagccccaaatcagaagagtaagaaaaaaaaa

SEQ ID NO: 230785 - DNA, 2819 bp, Cannabis indica
aattccataacactcttcttaaatttttttttataaatttttgagggccccaaaatttaattcgtattgggcccatatattttcagggtgggccatgtgtgtatatgtactgaaaatatcacaatattaatcacttatacataatataaatgcaacataatatatatgtgcttgtaggagattacattatatattttgttgtgcttttaaaacacacaagacataccaaacagaaaatgataaattaaagagaggatgtaatcttgaaacgatcaatttctcgttgaaatgtttgcacagccaactcggtagggaaggctatggccaccgaaatccctttctctccttccttctcgagcgacacaagacagctaataatcatagaaaagcaggtggctgctccagcgaatctcggcaaaccccaaccaaaatctatctgatcgaacccaagacgagtattgtcagaaacaatgaagtttccaagttcactaaacctcggtcggcctctaatcaccataagatctgcaactgatttcatgtactcaacattcacttgctctttcgctttcttgatcaactccacaacgtcacccaaagagcttttgcacaaaacttcggctttcgacattactgctgggtatgcaaaagcgttgccgtagtatcccaatggcaaacctaatttctccatctcctctttctttgtacgtatacttgttaagcaggaaaagcgaacaacttcatttttgtttagattaagagcgattgtacgacatttccagagacatgcagcgagtaaatcaaatcgtgaacaagtttttgctaggtgtggtggaagttgttttcgaagggagtttattttatatagactgaaaaagaatggtcgttgaatgtggttgtttgggtccagcaacatgtttgagcattcggaaataggagacacaagtggtacgtcttcaaattcaagatgtgaacaagttattcttggtgggtttcgagcgttaaatatctctcgttgccaaacaggttggatagatggaacatgtgcaccacctaccatttctgccattgtcttcaagaactgggccaatccaaatccgtcgcacattgtgtggttaaagcttagtgcgaacaagaatccactacaatttaaacgagtgacctgagaaagagtcgtacacttcaaaacataaaattaactttttatttatccctacatactcttgttctctatttgaacaatatgttagtaaaatccataatatggggactgataaacaatccaataatatatacattttttttgttgaaaaattgtatacttttattttttatccattttaatatatattttaaagaaaaagcataaacacgaagaagaaaagaatatgacaataagcaacttaaaggagaggggaacaaaaaattacactattcttcaattttttaatttgactaataaattcaaaacaaaaaaaattaaataattattaatataaattgttagaatttagaaaaaggtgaatgggttcatctcaaaatcaattgtcaatgggagaagtagcacattcctcttatatattctataattttttcacacattaacaatgcatgtagaactatctataatataaataagtatagttaatttatatacggttataatattattattttattataattattaaaactatacttagtattagtagtattatatatgatattatatatggcatataatataattatagggacacgattttgtcctgtgatgtactttcacggaatgtattctgtgatgtacaacagccgttagatgggggagttatttgatctgagggctgagattgatttaaaggtaattagggttaaaaaatggtaacgtaccctgagacccatctaatgtacccagagacccatctaatgtaccacggaatacattctgtgaaaatacatcatgggacaaaatcatgcccctataattatatagagattgtagtgctttacagtacacaaactttcaaaattaagagggggacaggatccgttcgggtacaaccaatgtttcactaaaaaaaaaaacttttagttcaataaaaataatttgggactaaacaattattatagtattaataataaaaattatcactaaaaataaataagttatggctaaaaaaacattaattagtgacaacaaaaatttactaaataaaatattactgacaataaaagttgttattaaaaaaaataagttgtaattaaaaattaattagttatgactaattgttttgacattttaataattatttgtcaaatagatttttgactaaaagagacttttagtgacaatattatttttattgcgattaaaaattttactataatttttttagttataatgttgtcaccatatttttcaattttcactataattttttctccaaacttaaaagtcaattttttttgtattatttgatgatacgcatgatttaatgggattaggtctatcttttacaaagtgaatatctaaaaataaaataaaataaatacagttaaaacgtattgattccgactgaaaattttaattaaaaaataatatttatttgtatagtaaatagcaaaattttaagaatttaataaagtatatatacaataaaaaaaaaattgaaatgcaataaataaatttaaataaacaaaagaattcagtataatattaaaatatttataaaataaaaaattaaaagtaatcttatattttatatgctgcaaaaaatgttatattattttttataatataatatttagattaaataattaag

SEQ ID NO: 230786 - DNA, 1554 bp, Cannabis indica
ttaaataaattatatgtttcattgatttgttgcatagattagtctatctccataaaactcaatcttttatatatcagttaaataaattgcatgtttcgtgaatttattgcttagataaaagagttattaattgagtgcttcgccttgattacatacaataaagagattgagataattgactgcttcagttttattaacgggattaatagtttgattggaaactgaaaattacattctttaataaaaattaggaatgatggttgaaggtagagaataacctttaactagtctctcatatcgtagtctcaattttaatttgtttcttttacttttctgctatattttaatttcaatcttaaaactcccttttctaacttttgaataattaaataaacatagtccttgtgggatcgatctttacaattatactaaaataattggaagtattggaattaaaaaaaaaacaataaatttgttgtggcttacgacatggatcattatgaacttacaaatttttaaataaaatctgaaataaaaaataaataatctttaaacgaaagtttcaggttcaagcctatgtcaattcctctgcatagtccattttaatatcgattttaatatcgaatatggaatcatgatgaaaagaccatagagtatgaatccgcatactgcaatgaaaaatattattaccccactgcaattgagcggcaggtctttcaaaatatctactgcccttttgctccttgttactatgtagaatataagaccgaagaaagataatccaataacaccggtggcgatagccaggccaatggaaggtgacaatactgcgtatgtacccgtaacaagaagctatcaccattaatcccatagccaccattgctaaaaccatagacacaacatagtacgacactaagtcttcactatgtttgccagaagacactatagtgaggaagaggttcataaagacagaggtagtagagagcaccatggctattgtgtctgttatcatgaacgcttgaaaggctttgttattcctgagaacagcagtgccaataacttgttgttgttgatttccaatctcactacttaaataacctccgggcaaagtgaaaccggctgtaaatgttactgttgcaattaatgtggcagcaactagagcagactctttgtattttgtagtgaagaacatttttctttcattccactcatttctcttctcttcctttattttttcgcggtccattaatatttgttcatagtgaggatttaccggcactaatttttagtaaatatgttagatgaaaagaatttaaaggcaaaataatcatatatgcatgccaaataaaattgatagttatatataatataattaaatagaaataaaattgtgtacctcgaataaaatctggatccctggaaagataaatataatttgagtagtgagtttggaacataatataggtgagaatttattaattaaaatatttttgtgaattaatctcaatattgactttgtataaaaatcaattaaaattaaaaaatataataatt

SEQ ID NO: 230787 - DNA, 1082 bp, Cannabis indica
tggtattcctaacaatgtggaagagtttgttattaattatctacaggaatatattgctgctcagtagagctatcaaggggataatctggattctgaggctactcccatatctcataatactcagcagctgcattctattactttacatgaggatactccatctctttatgttgatgcggcccttgatcacaagaatggcttaacaggaaccggtttcatcttcaagcttggtcatcagaatgttttagcttctcactgtcgtcctttgcccggcgctgctactcccatttttgctgaaggccgggcgcttttacagagtttattgtggtgtttggattctaacttgtctcctaagtttgtcttctcagattgcttgaatttggtttccaaggtgaacagtgcctggcaagataattctgctctttctgggcttgtttctcggattcgattactcttctccaactttcctaaagcttctttgcgttttctccctcgtcagcttaatatggacgcccatggtcttgcaaaagaagccctcaggccgagagaagataattagaggggattactttggtccctctctttgctgcctgtgttttagttttttcttcttgcagcttctcttgttaaaaaaaaaaaaaagaaagaaagaaagaatgatataagaaaatagaaagcagattctggactaacgcttgacgaaaaagaatgtcgattgccgagtatatgtaagaaaatttgttatttaaattaacaaaggtatccgtgtaaataaaatatattttacgtgatttaatataattttttctatattaaaatgagtttgtattggatatagtaattaaaaaataatatttttattattataattagagtaatttgcggcataaatatacaagtttaactctcagttgtaaataaataaccaaatttaatttttagggataataatacttaagttgtaattctataacttctatcggtacttagttattaagtgtcaagtaaattgccacgtgaaaatctctgattggtccacatcattaagtcttttttttaaaaaaaaaaatcatttaaatata

SEQ ID NO: 230788 - DNA, 1116 bp, Cannabis indica
ttttttgtctccataattaggaaaagccaatgtcactcttcaccatgtactactatactactcttccaattctttcaacttcctttgcttcaattgggtcccccacaatataaacgccttttatattccaaatattatataattgactggtaattaccaagatattaattatagtctaattattatataaaaattcagcaaaaatggaaacttagttcttctcactttttgttatttttatactgtttatttcgactaattacaatcccagtggtactggaagtaaaatgtagtgcaaatcagataaaattagcttaggaaaatgtgaaaatgaggaatatatctttgctctttactgtctgagaaagaagctggaaactgatcattatcagggaatgtggaaaaccaagaatttttttattgttccattttcaacttgatttgctgtcttcaattgactcaaaagttaaaatgggagatttaggtaaagtgaagacaatcgaatctcatttatagaacataaattacaaatattttatacatatgtactatatggatttttgttataatgctcagtgataacatttttcaatacatataattctaatttttatattaccactaataatatatatttttttttgaacaaataccaattattattatggctcatgaccatatgattggtagaatttaggaatgtatggttgaggtgtatgagatttattttaaaattaattgacaatgaaaaaaatagttcatgcatcttatatatggtgttatatttttacttcttagagcatctccaacggagatgtaaataagtagtgaaatactaaaatatagctcatttaacaaaaagtgtgctccaatagtgtgccaaaaagtgatttaaatttggcacataataaattttttgccaaatttgacacataataaattttgtaccaaatttggcacaatatttgttatgatgtaaaatttacactacaataaatacaatactttttcatttacatttatgtcatttttattattttattaatatatttaactatcacattataaattatgaaaaatttatattattttttttattgtcttacatattaaaat

SEQ ID NO: 230789 - DNA, 1180 bp, Cannabis indica
taaaataatttccaacatgtagtaccttagatttgtgtttgacatcactcgtgcaaggccccagacatccgattgtatcaattcaagaggagttttagctctggtgcttaagagtttaaaagggagtgagtgagattttccaaagtgacaagcttcacagttgtttttcatttattgaaaagtttacatgtgcattgtgtagcacttgatttaacacttttggagatgagtggtctaacctcctatgccacaggtctcttttggacagacatgacttagagacactctttttagagaaatttcaacagagggatgagagacaatatttacatactcaagaatagactgaaaattttgattaaaaacacttagagcacttggactactactgaagtttgtgtgtggactttgaaactgatacaagccatccttaagcttcccatgcagcaccacctgctttgtttccatgtccttcacaaagcacgagtctgaatgaaactcaatgtaaactttgttatcaaatgtcaattttgatacactaatcaaatttttgttatttgtggaacatgcaacatatcttttaggatcaactcttttcatctatcatagtgtagataagcagtgccaatattagagatggtgagttgatgaccattaccaacaatgagtttttcattacctccatatatagcttgatttgttgctgaggttgtctgcatcagttgtgacgtgattagtagctccactatctgcgtaccacccctcatggtcgactgtttctagagttgcaatgaaagcaacagggtccttcctgtcttgtgcagatcctccttgtccattgttaggtgttgaacccatataattttcatcatatcggttataacagtgtgcttcataatggtcatatcttccacaaacttggcaggttggctttgagttcctaccaccacttttgcctcttcctccatggccaccactactgtttcttccacctggtgaatatcctctgcctccatagccttgattgttggaataacctcttccacggccattgttgttgttgtgaggttgattctgtttctgtgagagaagagcaaatggagatgatgagttatttccagatccttgactcttggatgagccaatgcctccaagtctctcaagcttgctgtcaaagctt

SEQ ID NO: 230790 - DNA, 1808 bp, Cannabis indica
taagatcctggtaaaataacttccaacaatatggtcacacatgactaccgagaagccgaccattgggaaaactcatttgctctagcttatggctataaggcaatatttcttgtagagttggtgccaccgtctcacaagaggacaacctatgactaggatacaaccaatattttgctcacagaatcccttaacgaaatagaagaaagaagacatcaagccaacctaaagctacaggcgtacaagtaaaaggtcacaagacacttcaacaaataagtcaaggacgagaaattcatcatagaaggcccggtgctccaaagagtattcatgaacaccaaagattcaacagtagcagtgttcagaccaaactgggaaggcccctaccaagttacaaagataacaagcatgggagcctacaagctggtaaggtacaaagagaatatggagcttgttctcctacaaagatatttgaagtgagagcaccttcttaagtactagtagtggtcagcttacaatatgctactcaacagtagtagttctaccaacatatcattacagtaaaaaagagctagtacccacggcctttaggcgtggtgtcccatcattgttcaaccatggcctctgctttgcatgtcaagcaaaggtatccatttgatatctagaagcgaatttttattatgtaagcttgtagattaaatttatgttagttgcacagcaacaaagaccaattaattaataaaaaacaatgtttatgttcaaatatgttatatctaaaccacttgctaatgagattaacttcttaaagttattctatttcagttacacatgcgtacaacaggtagcacccctagaaaattcccaagcatggtctatgaaacatggtgaattgcaagtgaccaagagaccgtaagcctacatgctcacatgggggcacccacactgtacaatgcatcaaactagcatagagaacttatgcagagaaattttaagtcttagtataagctacttaacttgcctttaagacaagtgtaggcatacttctactttgcctgaaaaaaaattaattcagatacttacatgtcaaggcaataggaagttagtcaagattaaagattgcctggttagtcagacatccataataaaatgattcagggctaagcagaagtaatgttggaaaaaaattgcctataggccaaaagtacaaacgtgaaagccctaggaatatagtgttcaaaagtaaaaggccagtagggcatacagaaaatgaaataaaatgtctatgctaatgaaattataaagttgaaatactaataaattgaagctacatgtgtgcaggtgcaggtgcagctgaattagaagttgtaatgtctgatttgccgaagggtgggccagccatagcctttgtaggctggtcggccacctcttcaataggttggcaagccatggtcttgtcaaactatcctgatggtgatcgctcaatctggatggtgattttgtctacctccatcctgctcttatacaatgctttcccttaggccaatgtgctctcaaggaaagaagcataccccatgtaggcaagattagctatggagttgcataacttgaactataaatgagctccaaagacaagccaacatagtcgtaatttatggcctattggccatcaagggtagccttccgcttctcatcactcctcttgagttcagtcactaacctggagttttcagtagtgagcaaagtattctcttgattcctagcattgagcatgagctcaaaagtagaaatcatgtcctaattatgttggaaaaaaa

SEQ ID NO: 230791 - DNA, 1070 bp, Cannabis indica
gtgttacgattgaagccttttctgtctatggtcatctcggaatcgcaaagtgtcttccttcaatctcgccccatcaccaataatgtgtcagttgctttcaaacttcttcactccctaaagcatttgaagagaggaagagaaggatatgcagccatcacgcttgatatgagtaaggcatttgatagggttgaatggaactttattaaaaaaatgatgactgctatggggtttgattatgcagtggtgaaccttatgatttgatgtatcagtactgtttctttctctttctcagtgaatggttctactcatggtcatatcattccctcacgtggtatccgtcagggcgaccccttatccccctatctctttataatttgtgcagaaggtctatcacggttactgcaacatgaagaacatacaagaaatctccaaggaattcaaatttctcgtggtgctcctgctatctcttacctattttttgcagacaacagtcttgtactttctcgtgcaaatagaagatctgctttggctataaggcgttcacttgactattactgtcgtgcttcaggacaatgtctgaatgcagaaaagtctgtgctttccttctcacccaatactttgtctgctatccaaaacgacttccattagatcctccatatggacattaagccttgtcatgagagatacttaggattaccttcctattcggtcagggataagaaagtttgtttggtgaatcaagagaaattgtggaattcgctttcagcttggcaagagtctttgttctctattggtggtaaagaagtcttactcaaagcagtttctcaatcaataccaacttatgctatgagttgctttcgattatcgaagtctcttattaaccaaatagagaccatgtgcaataagttttggtggggttccaattcttcatcctctggtatcaattggaaaacatggaatgcactcactcattctaaagttgaaggaggaatgggttttaaaagctttgttcccttcaatcaagcgttgtttgcaaaccaagcttggatgattttctctaatccaaattc

SEQ ID NO: 230792 - DNA, 1530 bp, Cannabis indica
agtcacaacaaaatttgtgactaaaaggaaaaaaagttgtgactaatgattaattaccattcttatgttgtgactaaaaagtccttgactaaaagaattagttacaaaaattataatttgttgtgactaaatgtggttttactcacaatacttattgtgactaaaagttaattagtgacaatttgtgtttaaatactatgttttagtctcaagtagttttttgttgtgaccaatggtcatatttagtcacaaaaaaattatattgcaactaaaaaattgcaactaaaagtagctgtttttttttatagtgagagctagaatataggtctcattaattgtttataatttcatgcgattaattaattattgtataattattaatgacactatttagtaattccgagtatatttgagtataaatattaattaaatacgtagttatataattaataaataataacttgacttattctaacatatatatatacaaaaataataatataataagatctttgaatccaaaaatatagctttgaagtctttatttagaaaaggtttgattgattatatattctagattttcaagatcaaacaatcaattatctaaccagtcttaattaattaggcgtacgtatatacatactataacatatgtaagaaaataatattttctaaacacacaatacgtgttatttttataaccacatatgtatagtaatttgtttctctctataaatatttaaaatttgcgataattatttttatttatatatatatctttatatataaatgagtaggggacaaagtcaaataaaaaataaataaataaaaacaagtttaactgagtttaatgtaaatccatcataaaaatgcaagttttaaatgaagagcgatggaattttctttttaattgaaaggatggtcattcattcggaaaaattcagatattacaatatttgttaaagcagaatgagcattcaacgcactaaaattataatctcacataaaacagggccctttaacaacataataagagctcgtttagtacgtcgtattgtattaaattgtattgtattgtattgaatcgtattgtagtagtattatttaatacaataatatgtttggcattgaatatttgtataatagattgtgtaatgttataatatataatatattttcaataaactcgacccaaacactgactatgggttgggtccgggtcccggtccagctctgtttctcggtccgggttcatgtttattttcggtccgggtcccgggtcccaggtctagctctcggtctgggtcccgggtttgggtttgggtccgggtctggatccgcgtccaagtacaggtctgggtccgggtctcgggtttgagtccgagactaggtctgtttcccgagtcctaggtccaattcgggtcccgggtctgggttcgggtcccgagtctgggtcaaggttcgggttcgggtccgggtccgagtctgggttcgggtctagatttgggtcatgggtctgggtttgggtcc

SEQ ID NO: 230793 - DNA, 1669 bp, Cannabis indica
caacagccagccaaccatggtaaaaaaaatatattataatatttgttggccccaacccaacttgaaattcgatcctaacccacccagacccatcccaacccacctgaaaacccacaatcttgaataggcgtgttcagtacacacttcttccacatccaaaacccaaaaaactcaaaacccgtaaaacccactcgatgaaccgccctacttcatacaaatactatgtccattaactatacggcaaaaaattattcattaactaatattttaatgaaataattgaaacgttaatgtaagctcaaaataaaaatttaatattgtttttctatcaaacaactattaatccatcaactcataaacgttaagattaaaatctaacattttttttctacaaggcatctcattaccatgtaaaaaatactttaatagcaccgaagaaaaaaaaagaatcgtcacttggatttttggttgttgtagtatcacatcttccagatgaaaaatgtagaaggaaataaagcatgagttcgaatgatggaatatgtaggactagctagtctttttttttaaaaaaaaagaaaaaactataaatttggtggattgtattgagaagaaaaatatttatcaaacttgtggggtttattctctacaatattatgtactctttcaacaatcaataccaatcttttttttttgaaaggaaatcaataccaatctttttttttttttttgaaaggcaatcaataccaatcttgataattaattaagttgaataaataaaactgaaaggttcatctgatgcgatcgtatatgtattattgtatgtttagtcaaagtttgaagtcttccacttacgtggtactagaactagaaggtggggtatgtattaattaaatttgtggaaaaaaatgaaaatctttattggatactttattgcagtcttcgatcaaccatagaaaaatatttgagtatcggattggttgcattgcatttagaaaagtagtataaaagttgttagatgagcgggacagaataataataatttttgcacatgattcatatatattgtttactaatatttatgtatgtgagctttaaagcttaaagttgttttatatatttcattattagaagggtatttgtagagaaattctttttatatttataattattaaatatatgatttgaaaagtaacggtaaaagtattttattttaaaattttattattattgtactatttttttagttgttaagtacgaattaaatttgttaagtgtcagtttaaaaatacatagtgatatattttttttaatttatttaatacgaagtttaataatatgttgttacgtgtttttgagttaacacttgatgaccaaaaaataaccacagctgactataataaaattgtaaaataaaatactgcctcttatatttattaagatcctatgtatataataattgtaaattttttaaaaaaataattcaccgtaaatatctgttattagaagtatgtgtatgctgcctatatgtttttcttttttctttttcttaagttcacaggaatcttccacttatttaatatataactaggtgaatgtacgtgtcgagccacgtattgctagttttatttaaaattttggtctttttaagattttgaatgtattttatttt

SEQ ID NO: 230794 - DNA, 1167 bp, Cannabis indica
ctcaaacataaaaccactgtaaatagattcctaaaggaaatcacacatccctccaactcagctcgaatcacacatttttgattttcaactaaaagaactacaaaagtgcaactctttcaacaagaaaaattcaatcaatgaaatcacaaatacataatcagaccaaagaattgaaattagtgtttccatgatcaataaacaaaaataaatcttacatctgtctaacaaaataacacatacaatcaatccctaacaatgtatcaatatctcaaaaataaaagacgaatctttatcaagattgaactgaactctgtgatcaggcaccgtaaagccatctatgttcagagacccaaataggccttagtgcgttatttcatccaacaactctcttctcccctctctctccagatatatatacatatattacaaatagaatccatctcaatcagatccttcaaacgaccaggagttccaatgacaatatcctgaaagagaataatcttaataaattaagttccagagatatgttctttctcttgaaaatattacagaggaacagtcaaaagatgccatctctaatgcacaaagctggtgatggataaagaagatctcttttcagacaataaagaaatttcaagaataaataaggatatccctgaaagttatttaaattttgaaaaataatataaattcaagctgaaaattacttaaataaattgttataaattctagcttccattatttgaatcaggaagaaaaataagataggtgtagccaatctacttttgtacacaaataccagattaaagctaaaactatataacaattgcggccagcctaggtcaacatacaagtttataaggatacatcttaaatgatagtgtaataactcatctaaaacatgagtcatgactattattttcttaagatgaaaagataaaagagcagcatatcttacaacaccaaaattcagagcagatatttgacgttttttggatgtccctccatacaagacaactaaagtaacaccaaatcgcaaagagaatatgtccacagagatattttttgaaatttgaatgaagcctagtcgtgtaaaaaaatttcaaaaattgggaattaagttaatcgtaaagattatttaattttttgggtttaattattggattt

SEQ ID NO: 230795 - DNA, 1131 bp, Cannabis indica
attgttttgtatagaaaaatgagagaatatatatagacacaaactacagaaaacaaaaaattagattagattaatgttaattaaataaatcccatgtcttattggacggattaattaatgtctgaattttcaagtgagaaagatcaaagggtatagtttgaaaataccaactattttgttggtagtgtgattatataatgttatagtctaatataattgttaccatattttattccactaatcagattatcagtattaattaagttaaaaaagactcagatttgttgacccaatatatgggtcattttttactaattaaattaaagtaataataagatgtatatatgtttgattgaaggaagtccaagaaatggcagttgattgatcaaaacaaacaattaatctgcttccttacaataataaacaaacatgttataatttatgtggtactttttccattaatttaatactgcaagaaacaagaattattttagcaaaataaattgaccaaattgcaacattattaattggggtttttacaaaatattaaatttttagtaaaaatttacaattttactattcgatagaattttttttactaaacatactgtctttttataaaacaacgtattgtaaaacaacaaaacaaaacaattaaaataacagtggaacaactaaaaaataaacgtggaacaactgtgaaaacttgacacagttacatcataaaacttacacagtatttgtgaaaaaaaattcaccctatagtaaaaagtaaaaaaataattaaaaatttcaatatatggtataaaaacttcttattaatttgacgagtagctcgtacctgaccacaaagtcaaccaaaaagtataaatcagagactaaaattattatcaactcatatatacacacaccactacaaaaaaataattacttttagtgataacattttagttacaacataaattttttgtaactaaatgtgacttttagtcgcaacaaaaaattacttgtgttatattatttaataatataatgagtataaattaaaatataataaatatatattaagtgtatggtaaataaatgtgtaacctatggtttacgtacacttttgtaacctacatgttgtaa

SEQ ID NO: 230796 - DNA, 1258 bp, Cannabis indica
ccagtctacaacaacttcatctcctttctgccttcctctttccgaacaaatacttgagccctttcattgaactcagtattgtttttcactgggtgaccatgtagatcatcccatagctcgcctccagcagtggagagatcggtagtgatccctgcctggagagcagtaagctgggtattatcatctaggttcctcacccttgctgcagctatgctaaaatgatttaagtaggccttaaacgtctcgcctgactgctgttttatgttggtgggtgaggaagctttgggttgcctatccctcgcggccgggaactattttttaaagtccttagacaattgttcccaagtagtgattgaatgatgagtaaatttattgaaccagttgctcactgctccaactagcgatgtgcggaacaaaatacagcatagattgttcgtgacattgttagatcgcatgattatcaactttctctctgttatcaaccatggagaaaaggcttttttttatcaggaggctttttctgagattttttcacaaaggctctcaatgaaagcaccaaattattaacgcagatttcgttaactaaattaaagcctatttcatgattaatagtagtaaaaggaaaagaaatgacacaaagcctttttgcatggttttgtagttaaaattctgcatagtccacgagtctatcttattagatttctaatacaaaactagggctttttctctaaaggatttttcatccctttttcagtgtatcttgctcctatttatagttatatatgagggcagttaattacaatcagattgatatcccacaacaataatcccctaaaattatgggatttgattacgttccatgtaaaataaatgcaattattatttaaaaatcacacagctatgatttatccgtttttaccgggtcaatgcggacgtggattaaatacgctacaaagcgtatagtgctgggacatctcactgagaagatagcaataataaccctgatagcaagctagagcttatcccatgtcttttcgaggttgataatgtaaatctcgtcatttctgcaattgaagagataacgcttcatctaacaatcgcagttcttggtgataagatgaactttagcagtcaacataatttgaatatgatcagtttctatctgagaaggctaactcgatggagcagtgaatctcattgaaagatgtttgaagctgattagtgaaggtaccatgagtatgccctcctatagcgagat

SEQ ID NO: 230797 - DNA, 1363 bp, Cannabis indica
ttctcttgttgttagagctacttcgattgtcagcctttgttgagacagtgcttgctgagacagtgttgggtttacttcccgagccaatctttaacaatttcatctcgttcctcgcttccactttttgtacgaacacttgagctctttcattaaactcactgatgttcctcaccgagcaaccttgtacataatcccacagctcgcctccaactgttcagaggtctatcataatccctgcttgaagagcaataagctaaatactatcgttcaagttttgaacattagtagcagcagtactaaaatgacttagctaagccttgagcgactcgcctggttgttgcttcacgttggtaagggaggatgctccaggtggtctatctcttgttgcctgaaactatttctggaaatcattagacagctattcccaagaagtaattgagtgatgggtaaacttattgaatcagctactcgctttctcggtcagcgaggtggggaataaaatataatgtaagttattcgtgacattgctggcgcccatgatggtatcaaagtttttaaggtgagcgtctgggtgcgtagtcccatcgtacggtgagacatgagggttcttaattccctggggaaattcatagttcataatgtctgggtggaaaggctcgggttcttcgttcaagtcataactaggcagtttcccatattccccatcatggtacctcctgaatttatctttcaagtaaatgatttgcaattagattggatcctcttgcttccaattagcattgagttgttgtgtatgcctttctaattaaatgtgctctcgggatcttgaatgtcccgagttggaacttgccttgccctgcacaagccttctcttttaagaagggttaggtatacatcctccactggggtatgtgtatgcctcctcccttcttgttcgagaaggacggtgggggtgcctggtggtaacccacttcgcctaggttgtgttccaagatttctcttgttattacgagggatctcttgttccctagttttgggctgccttaggttctcgcccgtatgagaagattctggtatgtcattgttttcgtttccctgattcgtaaatccctaggctcttcgaggtacccctcgacgaggtgcttgattgttcggttgttcgtcttctagaacgtccctagattccctaggttgtatctcctgggtgttctggggattttccttatttgtctcctgcctcatggttctcgaaccccgaggtctacctcgtgtccttctcactccaggatcagtttgattttgtgtagcgtttccttaagccttttgttggttagccttttccagacgttgctatagttggcaa

SEQ ID NO: 230798 - DNA, 1212 bp, Cannabis indica
gggcgttacaacatggtatcagagcaccaaggtttttagatcctgaagagtggtttgatatgtacattggttgtgaggactcgtttgactcatggttcaataagcttttaattaatagataattttttaattatctgaactgtgttaatactgataatgtgtgggaaggattatgatatatggaaatacttatcagtattgttattacttggaatatgaccacatgtgtatagattatgaacccgaggcggactggtagaggtaactgcgagctaactgggctccgggttgctggtgagggtgagaaccctatacaaccaccaaactgggaagatttatatgctgcgatgcaagagactatccggcagcagggtgaacaaattcgagaactgagagagcaacgagctcagcctcctctaaacctcaatcctgatcctacggtacctcttgtagtgccaccggatgcagggaatcatttggaactattgtatgagcggttcaagaagcaaaacccgacagtgtttgagggtggtgctgatccactcaaggcggagtagtgaaagagtgtgataacatccatttttgatttgatgcgggtcgaggataatggctgggttaggtgtgctatttatatgcggcaagatgattcccgtatctggtgggagattgtgtctcagggtcatgacctaaataacatgacctgggatgccttctggactttgttttatgagaagtactataatgagtctattcggtcagcgaaggcagaagagtttatacaattaactcagggcaacatgacagtaacacagtatgccactaagtttgatcgactggaaaaatttgcttctgatgaagtggctactgaagctgttagaaaagcaaagtttattcgagggttggatgaacatatcacacgggatgtgattgttgcttctaaacaacctggggttgctcggacttatgcccagatagttgaacttacgaaagaaaatattgccagaagagattcatggaagcaaagatcaggtgttggttttggtagggctattgatcccggtgaccgcaagaataggcctaatgaaccatcaattgctggcccaaacaaaaggttccagggtaaccaaggttttgttgggttttatgccttaaataaaactcatttcatagaatctgatttacttataaagatcagaaataacattttatgtt

SEQ ID NO: 230799 - DNA, 671 bp, Cannabis indica
tcagattacaaattgcttaaaatatactttctctatttgagtagttttgatttttggctgaacccttatacatgctaagctgtatgcgaaacaaagaaatgaagggaagacatgttaacaagagtggccatccacatgaatattactctctatttgggagctttaaattgacttatcaaacatccgatttgctactcagtttatttctataaatccataaacagtggatattgggatgcaataaactgcatatttcttccacactggatttttgtcatttatttctcggttgtttatacttttcatgtatgcctttccttttatgatacttttgttgcccattgaggatttggttacaaatggaacagtttgctggaagcttacttttattcttgtctgtttgcaatacactaataggtaattcacaagatcggggggatccaaatgatcctcgagtgaggctaaaacgtgattgtgttggcattatggctgcattcagactcaagtgtcctcatagtcctattgttatagtggcaagcacacatctttattggtaaaatttcaatattattccataatttacaatacaactgctgctaatgtttatttagcttggactatattcgaactaatcaatgtctttgccacagggatccagcctgggccgatgt

SEQ ID NO: 230800 - DNA, 1288 bp, Cannabis indica
acaaaaccaaatcatgccacacatactaagacattcaaaaccatgtcatagagaaaagactaaaacactcaaaattatgtcatacagacaaaactaatcgcagtagcaaaaatcgaattgtaatagcaaaatacaaccccaagtaagttgcacggctggcgggcctggccggagaaaaaagacaacctcttgtagctatatgtgaccctttttttagttctaaagtttaggaaataatttaaataagagtaatttgcgtcataaatatttaagtttaattttaaataattttaaataaataacgattataaataaatacttaagtttaatttttggcaataataaataatatttaaattgtattttggaactttcgtaagtacttgtctattaagtgtcaagttaatggccacataacagtctttgattggtccaattcattaaatttataatttttatttaaaaattaatttaaatatactaataaagaaaatgacacatgaataataatttgacacttaagtattattactattaaaaattaaacttaagtattattatttttctgaaatataacttaagtattattactattaaaaattaaacttatgtattaatttatatgcaaccgaaagttttttttttatttaagcgtagcttttttatttaaaagtttatatgcaattgagatttaaatttaattatttatgctacaaattagtactcttcaaacaaatatgagatccacttctttgtgttttaatttttagtaaataattattttaaaaaaattatggggccacttgtaattgtttccatgtatttattaattaattattactactatttgttattaatgtttattctgttaatttattatctgcatgtgttttttttatcctattttttagtatcataataaggaaaaataaaaggaaaggaatgaggagaagaagtttgtatttattatcttctgtaaaaatatttaatattttctgaaaaaaatataaaataatattaaaatattccataataaatgatattgaaaaacagcaggacacgtagtatagctagagtaattaatggtatataattaaaattaaatgttatctataaataaaattaattatactataatatgtaatatgagtgtgaagatcgaaagaatgttttcaggttattactttatatttgtatatattgtttacttgcacattatttttatggagtttcgtaaaaaataaataaacattgtctatattaaaatgaaatattttaagcatgtgta

SEQ ID NO: 230801 - DNA, 649 bp, Cannabis indica
aaataatttccaacaccattctcactggtaaacgggtcgaaagaatcacatttagagagatctaagagagtatactcaaagatttcactgtaagagctctaagagaggaaacactgtgttcttcgttcttaagttaatacaaattaaggggagtaggctattaccgaactgctcggggccgaacctctttaaaaaccttgtgttctttatttatcttcctattttatacctaaatcatatcctttatcacttattattaagcctcactgtcgttggctaaaagcgaggtcaacattttggtgctttcattgagagcaagaatcataaacttgctctttaatttaagtctactcataaacacgatggttgtacaaactcgtaggggtgtgatcgatcaagtggatccactagcagtagatcccacactgtagactccagggaatgcaatggtcccaccagtcattaatcttgaacaaccaatcacccaaccaccaaccgtgggtcaaggtgtgacgtctcctttggctggaatcacacccggtgtgcaagagactggaaataccagctcagcagccgatctaggtactcccagcactgggattcctttagcgacaaatgcccagacaaccattggagatgacaccgagat

SEQ ID NO: 230802 - DNA, 1329 bp, Cannabis indica
ttgtagcatgaccaacactaaatctccctgctgaaactcaatatccttgcatttcttgttagcttgttgcgtcattctgtgtcgagcgcgctgcagattaactttcaactgctgcagaatagcatctagtgacattaaatcttcctccacagcttgaatggtggtggtaccccgagtggaagctggaatggacggtggaagttggccatatacagcctaaaatggtgtcatgccaatagcagaatgatggctagtattataatgatattcagcctaagcaagaaacttactccattgttttgggtaataaatagtaaaagcctgaaggtactgctccacatacctgttcgtaacttctgttttaccatccgtctgtgggtggtacgcggaactcattttcgacttagtacccatgatttcaaataatttcttccaaaaggcactagtaaaaacaggtcacggtcagaaacaatagtgcaaggcattccatggagacgaatcaccatgtttgtaaacagttcagccactttactaactgaatattgagttggcagcgctccgaaatgagcatacttggtgaatcaatcaatgacaaccagaatgtttgtgacactgttggagttagaaagtccgacgatgaaatccatagcgagatcctcccaaactctctccggtaactcaagaggttgcaataaaccatacggtgttgtgggtgagtacttcacggtttgacaaactaagcaagatcaaacatatttactcacatctaggcgcatgccataccaaaagaaatttgcactcaaacagagaaaagtgcaaactacccctgcctgacccccaattggcgaatcatgaaattctcgaaggacttgttccttgagatgggaatgtcgactaagaaccaacttatgcttatcatagataagaccatccctagctacgtaatttgaaaatttagctgaattcatctcaagttgagtgtgaatatgtcttaaatctagactggtctgattctcaagtcacaattcatctaaaaattcaaaatagcctatactcatggctgccagcaactttgaggaaggtgcttcatgttgtcttgacagaacatcagccaccagattgtttttacccgccttgtactcaatggaaaattgaaaccccagtagcttctgaagaaaatgctgctattctggagtttgtaaaacttgagtaatcaattctttgaggctcttatgatcagttttaatcacaaaatgttggccaagaaggtattgacgccatttggtcactacctctacgataggtctgaactctcgaaggtatgctgat

SEQ ID NO: 230803 - DNA, 1661 bp, Cannabis indica
gagagctgacaccaagcactcccccttaaagagcattctaagcttttagccttctaccaagaacatacatgattatggctctgtagacatatggccaaaccatataccaaatcacagactctctcaaatccgattgcaccattgtattcgtagaacaaaataaataacaaatacctagtcccatcacaatctcgacaatattgaagatatttacaaaaatgccacttccatataaactaagcatcagcatacacaacaacatgcgccaccacttgaccaccacttggccaacttgtgggcatcacctagcttgtaacgtgccatcttgtcatgcatgttacaatctcccccccttcaacatgtcaatgaccccattgacagaccacaggaaaatcttcctaatcttgactcctaagcttactccaagcttcacccaaatcctaagtctgcacttgtctctttaccttcgtagaacgaccctcttagtgacgatctcccttgcccacacttagacttgatcaaagaacctatgccactgttgttattcatagtcacccatggaatagtgcctccacactagaatacttcccctaacatgaacttctttgagtctaccacaatgtccctccaattaacaagtagcccttacaacactaaccctgaagctaacacatcctctgatagtagctcacttgccaatcgtccaatgcatactccttttgacaaggactatgtatggtgcacccctcgaggtgaggttcgcaaatcaaccgtacccaacggcacctacagaacacgcttccactgaagacaagtccctctggacaagtccctccggaaacttcacacgccaactccatggcgcaccatcctcctgatggcaattgcgcaagacattcttaacgcaggctaaaatttgatgcgtcccacctgaacgaggctcgcaagacaactgcacccaatgcagcaccaagtgcactcttgcataaaatctcttcgtgaagttctcaacattggccctctagccctaccgcacacccacagcttcatgcaaaaggccccttgacccactacatacatgctcctctaagcttctttcactttgccaatgatctatcaatcacccaaaaccacgaatttgccctctggctcctgcttgtgttggctcactaacactatgtcacaagtccatctcccaaatcaaccctgcatcctctgattactcttaagacttgaggtcatctcaatccgctatctcccatcggcatatgctctttgaaccatttggcttaaagtgtcccatacaacactagtgtccccataaacgcaaagcacacccataacatgtcgcaaactagctcagtcttaatctcagcctacgcccctacatattgtctatctgcagcttgcagcaatcatgcaagtccttgcactgaacaacccatatgttgtattgtttccctcaggattcacataccaaaactgaacaagtaccctgattcttcaaacataagaattagtaggctcccccacttcaacttgggaaaaagttctctcttataggaatacccctcaaggtatagctcgcaagctaacctcatactcgcatacggtccctccattccaaatgtcactttgatgaagatgttaaactaatgcct

SEQ ID NO: 230804 - DNA, 1724 bp, Cannabis indica
ctttagcagcatcattgacccaagctttgtcctttttttctagtgtaactatctctccaagcatggatgatatatttatctagctccttctatattcttattagtgttagtttgttaaaaaaaatgtaattttattaaataatttgataattcacttataaattcgtgacgctgagctgccattgattttgtgccttgagttgagggatacttcatttgttttcatttttttttttgagttttattacaaatgcactcaatgaaagcaccaaactattaacgcaaatttttgtcaactaaaatattagcctttttgtaataaataaattacataattgattatattgcaattaattttctaataagtagcaaataacaagaaggttttaacgtggctttgaagttaaatcttcatagtccacgagtccatcttatttaagataaatatatttgaatacagaatacaatgatatgatttagtaatggtatctcttttatctctagattgaccgtcccttttactctgggttctgtctctatttatagatatttggggtgatagttattccattgggatctattcattcataaccgctcacgaaatgtagacatttctcacgtttcatctttatgcacataagataatattaaataaccgttcaacccctatttattatctttatccatagacagttatactgactgtgttggatagtcctcgccgattgcatgttatctttcttaactgtctttgtaggaaaaaaagtttagtgttaagatataatacatctcatggtgctcctttgccgtttgaaaagtattagcgaggtggttacttccatatgtcaaaagcgaggtgaatgaatgttgaagttgtttccattccttaagcacactcacgagtatgtgggtcaaagctcttactcacgagtagtgggtcaatgagctacaagctctttgtttatttattcttaatagctttcattgtgcattctatttatcccaagatggacctatttgtcgctggtctcactagttaataattattactcttcatcttttgattgcttatatggcagcgagttcgaatagttctattaactgtatttttcgaggtgagtcatttaatgtgcatttaatactatgcggtttggagctggttcatattccaaccttgatacacgtgtcagcttcttattatattggtcgaaatttaggtataacaactacgtattcgatgcaggaatttttccacatattttttgaaacttttaccagtgcatatttctgctggcaataatctaatttttccactaaaaaatgtgacaattatttttaatgatcttttgcctttgtacatacgctcctgcaaaaggtttccccctgatccattattaacgcggggagttctctctccccttttccaagaccttttgccgacagttgagtgtgtcgacaaaggttaataaacctttggaaatggttcgcgcgaaaaggccgttcacctcgtgctttttaccaatgtaattcacgaattacaccgatatatgtcactttctttggtgcaatagtgtgctgacaaagtgttaacagaatgctttcgcagttcgtttggcctatttatgctgacgacttttgctgacacatttggccaaatgcgttggcaaaaatggcattttttgtggtaagaataaatttttttttttttgtactaattaatttta

SEQ ID NO: 230805 - DNA, 902 bp, Cannabis indica
ataggaataggatgaatgttacctgtgataatgttcatatacttatcaaaaagttttgcactgccaacttaggattagactccacaaccattttcaatgtataatatcaagatgcttgtttctctaataacagaaaagacctgagttgctcaccctaagaaaatgctcttatgacacatccatccaagatcctagtatttgggataaacagatcttagacttttattcctttttaacctgaattactcgtctactattagagatagtctcacattgcttatgtgtgtaaataaattatcatatataagatgaatggactactcctcccattccaattagttttgagatactatcattcaccttatcttaaattctaacacctactcccttaaattgttgtgaaactttcattttaatccatacagaatcatttcaaaatgatctcttaatgtcccaagacaccaaaaaaattaagacaaaatgttgcatagaatatgtgttgatgtttttgaaaagaagagatcaattttagggatatatttctttgctaacacactagtctaatgtctttacagagacagagactcattaaaataactttgttttattcatgtacatgtttgatattgtttgtgtaggtactatgtgttcacaagtacagtggcaacatgggtcttaaaactgcagttataatcggtataagttacttaacatctacagcaagtatgatttatgctcagcacctttcacaagggcttggagagccaaccattgatctgaaatatattgggtcattgttgttcttaattgggcttagtgggaatttctaccaccattatcttctttcccaattaagagaaaagggtgagaagaagtataagattccaaaaggtggtcttttt

SEQ ID NO: 230806 - DNA, 2399 bp, Cannabis indica
aaattctaaactagtctggaataaattctaattccaattcaattcatcctatattgtcgtgacatctttgaccactccgtcaaatttccacggccgtcgggcccgaaaatattttatttcaaaaatggtatctactataccctcttaatccaataaatcttttaatcgtagttaataaattacactttatttgttcctttaatcgtatttaactaattaactcataattagcttaagtatgattataatcctattctaatgcccactttatcacatatttaataaaatatgcccaattaaatatcattatattttctaggatattacaactatcccctccttatggaaattttgtcctcaaaatttgtctaaactactcgggataccgttcccgttcccgcgactgcgacattgattccctagtcacctttaatcttgttgttcattcacagcgttttagctaacgatataatctttgtttcatagtactttctcttttcttgttcaaaaacttgaatcgactattcctcatatgacaagtctatttgaagttccatatttttgtaactcggtatacaaatcgtacatgcctcatcattctgaaacattgaaatataagttgtgaactccaggtaaggcatggagtatggctagctgataagctacctaacctcccctttccaaaaactcaaacggatcgataaatctgggacttaactttcctttcttcccaatttctgagtttccttcattacctgaagaaagataaaattcccaacttggaatttaatatctctacaccttggattagcatagctttttcgtccactctataaagcaaacatacgaactcaaatcctttctatggccttactcgttccttagaccgcatcaggcttaaggttcctccgtttactgacttcattctaatgaatgggtgaacaaaattttcttccataaagcattttttactgtactacatcaacagtattctgataactgttattatatgaagactcaagagggagatgcttatttcaagaacccttaaaatctaatacatacactcgtagcatatcctcagatatcttagtaattctctcagaatgaccatcagtctaagggtgaaaaactataccaaaatctaacttagtacccactgctcgttgcagactttcccagaacttggatgtaaatttaaaatctcaatctaagatgattaactttggagcaccacagagttaaacttcttccttgacatatagattagcgcattcatccaccgtatacatagtctgcactaataaagaaactgtgctaactttgtatatttaagcccaattaccagtttacctagatagaatcatagaaccctactattcttggtgatacgaccacaaagtctatggctacttcttcccatttccactcagatatctttagaggttaaaatactactactggtttctgacgctctgccttgacttgctgaaaacttggacatctgacacatactccacaatgtcatctttcatatctgcccaccaatatagggctttacatcgtgatacatcttggttgtttccagatgtacgtaatatggtagactattagactcatttagaatcttctgtttgataccttcgcctgttggtatataaaccttgcccttacattgtaattattcatctggtaaaattgaaatcctctgttggcccaactttaggtttttctttatgctcctatagttatggattaccttgttgagttgtctcgattccttctaacaaattatactattttgtaatattggctaactttggtgaggttctcctcactagctggcaaaataaacgctggcgtaatcattgacctctatttcaattcttaaatgctaccttcacacttgttaatccaaacaaactttcaattctttcaagttaacttccgcaaagggtgtagaaattttagcatcctaccgaccccaggaaaaattctaaactcatttgcagacctggccaaagccaattctaaattgcttcaatcatcaccgggtctatcaagatactatctatgttcatctcatgtactaagaaacttacttggggccagtaaaactcgcgtttctagcatttagcaaaagcttatgttcctagagacgttgcaacaccatccaaaaatacccctcatatgcttcctttgagtcagaagaaattagaattctactaatgaagataattatgaagtcatcagatacaaaaagctattttgggaatatcttcctctcgaatctccaactggtaataaccagatcgaagattgatcttagagaagacggtctttccttataattgatcaacgtatcatctatccttagcaaaggatacttattccttacc

SEQ ID NO: 230807 - DNA, 1465 bp, Cannabis indica
cctcttacaaaacatcaagaacaacagaactttttcagcaactcgaagaagtatgctgaaagtagtactagctggactgctgtatcacatttgggaggcgaggaacgatgtcttgtggaatcaaaaggtgagacatatcacagcagtggtgaaacgattacaatgggagagcaaactcaggattatagagacaatgcctaggaaaactaataatgtagatagaaaatggattggtaatatatgattccctgctgggaagtgtaatactgtaatggaattgcttacataggcgtacataggtgggaaaagggatgatttctgatgtaatcaagtaagttgtaaacatgttgttgagcaatacaagaaccttattcataaaaaaaaaaaaaattacatttttcatcattagtactcgaaatatttttttgcccccactaaatgtaacgctcccgcttcaagcttccatgggcccttttctgagaaagcgtgcaagtgaagacaaagtacgttgaaaacactcggggtgggtgtgtaaggtcagtcatcactccatgaagtaaccaaagtggcgtatcgtgtataagaaccatgattccatgagggaaggctatatggtggcttgaagcggggacgttacaacacaatgtatacatgaaaaaattctattcctccacgtaaataattattacaattttttttaaaagagaattagttaaaaaaaaataagtaaatgaatttaaagttaaaaaaataaattttaaaataaatagaagaataattttttttaattttttttctttctttcttatagatcagtacacaacagtgaatattgttccttttttttttctattttttccaatttttaatctctcttcttcttcattcttcataccatcactatattatccaccgccaaagccatcactacccaccaccaccttcactgcaccctatgttttatatctattgacctcaaaatttagtcaactgatagcgaaatcgtatttaatgctgatgcttggcacatgttacacaataagaataaaaaagtaaataagacacaaaattttatggaggttcgccccccttagttagcgggtaatgacctatactctctttttagttgtattaatacccagagataatactactcagatcactatattgatgggatctgaagtagctctcttaagattacaatgtatgaatcattaggtaagtctctaacaagagagctagagccttagagacatgtgagagagagggaaagagccctttgggcttgtagcagagagggagaagagaagattaggatttcagacttagagttgagagcttagggagcttggaggcttaaatgacttaggattttaaagataggctaatgctctttatatagtagagcttatatgcctaatatccttagaaataggtaaaataaagttgttatttacatatttaa

SEQ ID NO: 230808 - DNA, 1270 bp, Cannabis indica
ctcaaggtgtgtgtgagattaaatcataatctcagtatattgtctcatgagttagtactgtaatacctaaatttgttcatcctataagatttaatagcccactctattcctgagtgtcgatgttgacttggaagatcaatgtgtgcattcttcaatcaagttcttagattggatgttcgattgttatacgaaaagaattaaggataccctgataggtataaagaggtaattgaatttctttcagtagattagatgtaatctatattcgttatgttgagatacttaggcttatggttcatattagataaaacttattttatcaaaattttacttttgcttttataactctaatatggaccacaaaaattaacaagatttggactcttgccattggaagtaagcacatgtagacattcaggtgtcaaagcccaacaaagtctcttgtatttcttgccatgtgggtcctatctttgcttgagcttccagctgacacacaattgtaagatactctgcatcaaggtcattcaacacatttgaaactaaatgtacttctaaatacagatctccaacaagggcaaaactgttagcccaagaatgcttttgtcgaagatattctgtcatgggagtacttcctttgcgaacggtctgaatcttggttcacacatcatttattttggctcgaaaatgtgtaccataaaggttttccaaggcagtatagagtgtgtttgcaaaggtacaacccataacctctgttgcaatggtctctgtcattgagccatataaccagcccatgagtagttgatcacagactacccactgatcatatactcagggtatagttgacatccaaaccttggtgtgttttctcctagctctctgagagctggaatgaactcaggtggacaaactcttgttccatttacgaaacctccaagtcgatgtcccctaataatggttgacacgaacttctccaaagagtatagttatttctttgaagtataagaaaaaaggttgagtaagagtattaccaaagggtggagtattgaatttaccagattcaatctgaaagcccgattgagagattccattggtgacatgtggggaactgagaaaaatatgactttgagtctgctggcctacaccgcctgctgtagttctttgatctgctcaacgaggagtttgactgtcacaaattgacatggaattagcctgtgcgaagctctaatatcaagtaaagaatttacactaaaggaaatacaaatttcttaaa

SEQ ID NO: 230809 - DNA, 1145 bp, Cannabis indica
attttcagtttggatttgagatacagaaaacgatccttagacaaaggtttagtgagcatatcagctacttgatcacggctaggaacatatcgaactgaaagttgtttgtctaagatttgatcacgaacaaaatgtaagtctatctcaatgtgcttggagcgagcatgaaaaactggattggctgccaaagcagaagcactttgattatccacccatatgataggagaagcatgcaatgaaacttgcaactctgtaagcaatgacacaatccattttaattcggcagctgtattagccaaggcacgaaactcactctcagtgcttgatcgggccaccacattttgtttcttagctgaccaactaataagattgcctcctaaataaaccacataaccaccagtggactttcgatcatccacacagctagcccagtcagcatcggagtagctttcaagagtcattgttgctgctggttggagaaataagccgtcagaaatggtgcctttaagatatctcagcagtcttttgcaagcctcccaatgagccacggtgggagctttcaaaaattggcttaatttgttgatgacaaaggctacatcaggcctggttaacgtgagatactgaagcgcacctatggtgcttctatacaaagtaggttcatcaaacaactcactgtcatgtaatgacagtttagtggtggtactaatgggattagagcaggccttagctccttccatgtgtaaccgtaccagcaaatcagcaatgtactttgattgagaaagaaacattcccttagaatctctgaaaatctcgaccccaagaaaatagtgaacatgtccaagatttttgagagaaaattcagtgttgagatcactgattagctgcgagatgagttgctggtttggtcctgtgaccaagatatcatcaacgtagaccagaaaaatgatgagtgaggaacccgatccatgaacaaaaagagaagtgtcagacttagaagctttgaaacctttctgcaataagctgattctaagtgtgtcattccaagctcgaggagcttgtttgaggccataaagagccttgtgtaggaggcagacatgatcgggtttttcttggtcaataaagccttgtggttgagtcatgaagac

SEQ ID NO: 230810 - DNA, 867 bp, Cannabis indica
aataaaaaaaaaaatgcttcaaaagacttctaaattactaaattcgacagatacggaacttttttttttaaaaaacaaaaacagcaacataacttaaatgagagtaaagattcaacccccttgttttttcaaaaaaagaaaaaaacacaattagaagaagatattaccaaaaacattttgacagaacaatttatcaaagtttttttaatgagacactaaaattttaaaaaagtgaagcttagatacaaaattactctaatagaactctaatatgtgggagtctatagtgtcattctaaaaatagtaggacactatagactacactaaattaccttgcagtctgatttgttagaaagaattaaaacgacccaacaaagtgattttgagctacaaaggtacaaagagaagttagaaacaagattggcaaaagatttttcactttcacctgatgggttattacgatacaaaagcagaatttgtgtaccgaccgacagaaatatcagacaggagattcttgatgagtctcataccacactgtactccttacacccagggacaactaaaatgtatcgtgatatgaaggccctgtactggtggccaggtatgaagagtgacattgttgagtacatgtcaagatgtctaacttgtcaacaaattaaggcagagcatcagagactggcgagtttgcttcaacctctaaagattcctgagtggaagtgggaagacatcgccattgattttgtggtgggattgccaagaacgatagggtactatgactctatttaggtgattgtggatcgatatacgaagtcatcacactttaaccagtacagacaacgtatgtagtggatcagtatgttgatctat

SEQ ID NO: 230811 - DNA, 912 bp, Cannabis indica
gcatatactaatttttaattatacggatcgatgtatcatgttaacaccagatttattttctatagtttttagtacaaaatatatcttacaatactatatatgtattatatatatatataggatattcgttaagttagagcatcacttttgttcacaaacgaggacatttttatatcctctgattttgaatctaatggtagcaatttatttagtcatagtggagtatctcatatagaattaataacttattttattttactttcccacatacacattcttatataagaaaaaaaaacacatatttaataataattcagcccacataattcataaaagagtttttttttttcctttttctttgagactcacgtgagcccattaattcaacaaacatgatgcttttttctggagtggaaaatatataaaagtcccctaatcttcctttctcattatattttttatggccaatgataaaaaaaattatcatcaacaccctttactatcgaagtagccaagaaatatatctgcacccgttaattttaaaatctaataagtctttcttatgattatgaagtttcaaactatttattaaactaactaagcaaccacgtatataagagatttgaaaataaacaaaatataaatcaaggaaaatataataattattgatgcgtaaaatatatattatcttctagaatgcgagccataaattcagtatttttcaaaactgaacaaaatgatgtatcaatctccattaatcttgacagttattcaagcgagcaactaaaattttgaaggttaagaaaatggtgaaataaataaactacatatcgatcccccgcttttttgcaaagataaagtcaacgtttttttttttttttttgtagaaagataaagtcaacttgaatttag

SEQ ID NO: 230812 - DNA, 1134 bp, Cannabis indica
ccacacctcataaagaagtgaggaattacataatttgcctttaataaaaatttaatttccttccaagtagtgtgcgtatacgatgtcataaaatttacacagataataatacaagatcgaggatggttatacattttaataattctcatttaataaatatatatttgaaaattgtgattttgaaataaaaatttgaattttacaattgaaacactacaagaaaagctacttttgtcggcactcaaactcaccgataaaagtaggagtaacgcgtcgacaaagctttgccggcatttttacttgccggcaatggcttgtcggcgtatcaccttttatcagcgagattactaaatgcgccggtaaaagtctttacaccgacacatttatttgctagcataatgacctcaccggtaatagtctttacaccgacacatttatttgctagcataatgacctcgccggtaataggtccgctgtctgatgtgccccttacgaaattttgccggtgtttattgtcgctggcaaaactcttggcgggtattttggcgccaaatgccaatatgacgcctatcttttgctagcgagtttaggcaccggcaaaaataaattaagaaaataaaaaaaaatttacaaaaaaatgtttttccggcgagcaatgcgctggcaaatttttttattaaagaaatataaaattaaaaattattcttatgccgccgacatatgcgctggcaaaagaacttaaaaatattaaaaatttaaaatataatacttttaacggcgcatgttacgcgccggcaaaagtttctttttttttaaaaaaattaaatatataaattaattttaaaattaaatttaaatttaaaatcgaaatagtattaaatataatatcaaatatattataaaactgaaatttatactgttattacaaaactatattaaacttcataaactaagtaaaaatattctgagttcataaacagtaatattatctacagtgtaaactaaaaaaaactacaaatcaacagcatcatcatcgtcatcaccgggaggggcagtctgtgaggaggaaccagttgcatggctagaagactgaaatggtggaatcgaaagcaaatccggcatgttaaatcctgg

SEQ ID NO: 230813 - DNA, 1225 bp, Cannabis indica
gtactcctttaactgccgagaagcataggctattacctttacagcttgcgtaagaacacagttgagaccttgtctcgaggcatcaaataaacaaaaaacttttccttacctaaaggaagagttagcactagagcggtaatcaagcgctgctttaacttaagaaaaattttctcacaccaatcagtcgaaacaaacttcaaattcttttgggtcagctttgttaagggtataacaatatttgagaaaccctcaataaaccgacgataatacccagctaagcccaaaaagcttctaactttaatggctgattttggtgttggccaatctcgaatagcttcgatcttggccggatccaccatgatcctatctttatctactatgtgccccaagaaagagacacgagataaccaaaattcacactttttgaatttagcatacatcttgtgatctcgtaatcatcgcaaaactgacctgagatgcagcccattttcctcttctaattcaaaataaaccaagatttcgtcaataaacataatcacacatttgttcaggtaatcctagaacatccgattcatataatccataacaattatagtacatagccttggcccactattcagcctgatggtgatgcttgcatttcagacattcaaggcgtgacctgaaagaggatccgtgaccttgacggccacctatgatttccttgaaactttctaatactccctgatgttttagaagcttctgactttcgtttgtgatcagggttaccaccgtcagtccccttactgatattaccactaacaggaggattcgacgccatggtggcatcctttacaatctgctcctttattaccgttgctcagcctcctcaacaactaaggctagttcaaccatttttctctataaagtgtcgtgagcagtggtaatcatcaagtcccgactgattatggcattcaatcctcacagcgatgttatgaattcttttttcctcaaatagactcttgaactcttcccaagtcatcacactaacgtcacgaatttgtcccacaatatcccaccagacgcgggcctgatcttgtaacatgaaagctgtaaaattcactctctctgttcccgtcactcccatattgtcaagaatacgggtgattgtactcatccactgctcgactttaattatgttattacctccgagaaaagtcaaaggttgcagctgttgggttttatg

SEQ ID NO: 230814 - DNA, 3959 bp, Cannabis indica
aaattaatacaaataatttcagtaagcgctttctcaaagttgaaaccaagactaaataatcaaactccacaacataaagaggaagactaagagtgtgagaccaatccgacgctaccattaaagctaaaacttctgctaaaacttcagcttaaatgactgaaaagttccctacaacggctattaagcaaacaataaattcaaaaaagaaattaagaaagcaaaaagaccaactaataaaagaaagatattaaaataaagagaaagataaacaacaaacacataaaacaatgaacatgcaccgcagagaaatttctcccactccatgagtccatcgcaagtaaactgtagaaataaactatctcctagactatatttacaagaaagcataccccaccatcgactactacaaaatgcagaattcgcgacagtcccaaaaatgctttttctttttggaccgtcgctaaaaaaattaactgagtgttgaaaacttcaatagctaacagtaataaggtgaaacaagcagcaacttctcaaaattggacgaaacatatgccataaaagggtcaccttttcttaccctcataagaaaaattaccacataaataatcaaagcagaaaagactacacaaaacattaatgttataaaactataccaaataagaatttacatagacgtccgagcacattttctgtagtatctcaaactattgccccaatatctatagtattagaaagaacatttaacaatgcatcaacatttagattaatccatcgttctggagacatgcaatttaactccttagtcacaagattggatctcgaacattgactatactcattaaataacttaaagatttgtgcaagcaaaatatcaggatattggctttacgaccatgaacaatttgattccttccccccaaactattggctcggcctaattaatggcctactccaattcctctaagaggttccactctgagcaagaccctttccctctctctctctacttctatatttcttaacttagaaaatgagactgaacttcaaaatatataggtattagtctgtaaaaaaaaaaaatcaaaaaaaagcccttagagagacttggtacaaatcttaataacccacacaattcttgcaagttgttagatggaacaattagtaacacaccacacttcttatagttatttgcctacaaaaaaaaaaaaaaaaaaaaattttccaaaataaaaattttagaagtcttattaaaaaaatatgtatgtattttttttcttttaggctcttgactgccatagaaacaaacatggccggctttgtaactcttttcatcttggtaatggtaatgggtacatattaagaaaagggcaaactatgacagtagaactaattctctttagccctaactaatgaacaccaaatcaacacttttcagttgtgtattcctaccatatcatacatatttttcagttgtgtattcctaccatatcatacatattttcagttgtgggtgtcttatgtttaataagtttaatacaccatttagctcttaagagtggtaaaaaatctcctaaaaaacctaccgttattttggtaattatttcattaagaaaacactactaaaaactttataaaaagtttaataaagaatctctattaggttattatttttggattaggtgattatataaaatggaatgaaaagaaatttcaccatctaagtggtgtgggatttttatgtttttgtttttcaattttgagtactagggtggtcatctttcacttaagtgttttcatctttgaagttgatgatgtttgacactcatttctctaaaattgtgttcatcttgtgcgtcaaaagaaattcaacataaaacaaaaacatgtaatttgattgggtcccacaaggtatgaggttggagtcccacttggacacctttagattatgctgtaattttcaggtcaccaaatactaatatactataggctaaagtgcagagcctttctttcctcatttcccgtgattttgtgagaggtactgttgataataccttgtttatcaagcacttgcaactaagtatttttgttgcacaaatctatgttgatgacattatttttagatctacatgtgagagagaggttgctaattttgttgttctcataacaagtgaatttgaaatgagtcttataggagatcttagttttttctaaggttgcaagtcaagcaaactgatcgaggtattttcatttctcaatctaaatatgtcaaaaagatgcttgagaagtttgacttagtccacactaaacatgcccctacccctttgagcaccctaactaagttgagtaaagatgagtctggtgagtctgttgatccaactttgtacaggggcatgatagggagtcttctttacctcatagtcagtcaacctgatatttgtgttaatgttggattgtgtgctcggtactaagccaatcccaaaaaaactcatttgtctacaataaaatgtatttccaaatacctatcaagtacttctaagtttggcttatggcactcaagagatactaacatgtccattgttggtttcagtgattcaaattagctggaggtttagatgatcgtaaaagtaccattgggagctgtttttatcttgagaataatcttgtctcctagctgagtaagaagcaaaattctatttctctttccactgtcaaagctgagtatatagcagctgggagtagctgtactcaactcattttgcttaacaaaatggtaacggattatggttttctacgagactctttggttctattttgtgacagcacaagtgctattaatatttctaaaaatcatgtccaacactccgcaccaaacaaattgacctcaaatatcatttcattagacagatggtggaacctaaacttttaaccatttgcatatatccacaaatgctcaacttgctaatcttttcacaaaggcattagatgtccacacttttgcccatctcaaaaattctattggtgtgtgcaccatctaatttcaacagagttgcctatggatatcaattcaattgttgtttatctaatatggttgatagatttcatataaaatgtcaaatgtttttcctcgagtgtatgtgaacaatgtgttatcccaattgaaaaggttaccctccagggatgcaatgggaagagctactcttataccattatgtgacttaaagactgtgctccttttcttgttactctttgtgaaaaacaaataggacgacgactacatctctttggaagcataaaagttacaactagttggaaaaagtcattgagtgtagttatctctaaaatatacttttttaaataaataaaaaatacatatataattacactttttgagatgagtgagattactctcgtttagaaataactggagaacatgatttgtaatttgtttatgtttgcttgatcactcaatagttatggttagcttgttgaactaccaatcaataatgaaatggttctcctactatcgccttattagtctcattaattaattaagctaagcgtctatttatgttcatacatacatcttatttctattcacattacaattatcttttaaaatactctatagttaagaaatttcaacatctaaataatgtgggatttttgtatttctgtttttcaattttgagtattagggtagggtggtcatccaagatgtattttcacttgggtgttttgaactttgaagatgatgatgtttgagtcccacttggacatctctagattatgctgtaattttcaggtcaccaaatactaatatactataggctaaagtgtagagccttgttcattgcaattaataaaggagtttttctttggaaagaagtaaagggaaatattaagaactgaaattaaacttttgtttggctaatatttgggtgattgttaaaggtaagaaa

SEQ ID NO: 230815 - DNA, 847 bp, Cannabis indica
atacttgtgagtagatctaagttccttgtaaaataacttccaacagatagtttcgtctctcgagcattttctccatgagtagctactcgtagtactataccaactatttccttcaaaatattcttcctaagagtgacatgtgtagagggagttgaactgattactcatgttcaccatgtctccgtgcacccatgggaagtattcatattgttggccattagaacctcgagtgaagtacctacactaagcacctcatccatcacagaaatatttttgagtgtggagtagctcgctgatcttgaccctctgaatctcagagtcttcacttttatggtataacttccaggttctttccctaattctgactacaggtccctttccttttatagggtcatggggttgtttacagtcattagacctatgaagagaatcccatggaggagattggttttctgcattgttcgaattgctttaggcagaattgcagttgatcctatcaactgcgtgtggtggacatataggtctgggatcacaagtctatgtccttttggatgctaactcgtagctcattcccctaacatgtgcgctacacatcagggggagaacccatagatctatgtttctgagtgtgagtcctttcggacgctcgctctcactttgcttacctacaggaaatatcatgggcaactgcttgttgtgtagtggcatgactagtaggagtggtagtgttgctctacgcgatcatagatgattgctttcttaaacttattaattcctttcatagcaaagcttctagtaaagaaatcaaactgtaatcgagaactcaagttgtggctctcaatgaaag

SEQ ID NO: 230816 - DNA, 1042 bp, Cannabis indica
tctgttcgagactcaagaaatagataagcgatgtaatcagttgcttctggctaagcaactcccatgaccttcttattggctttttcaagcttgatgaaactttaagctctgtgtagcagctctgaaatggcttatacagatttgagcttcaagtctttccataatggactcattactgttagtctagctgtcatttccatgaccttgacatattcactgagtgtctttatttgtgtggtggtctttaagaatcgttgtaagtaatctctaagaggtttgtcttcttgttgcttgatgcaaaacaaatcgttgggctcaattagtttgtgccttgatggggagaatcggtgattaaatacttgcttaagcgtaacccaagaatcaatatatcatggggaaagcttgaaataccactattgtgctacttccgatagtgtggttggaaagactcgacaacgagaattgtcttgaatgtcttgcaagtcagtttgtactttgaagttgtggatgtgaaagagagggtcttcttttctagtgtatggatgcatactggatttctgaactttgaagggatctccaaagacttgattcaatctgagagaggagaacaccactcttgatctaatccgtactctgttgtctttagagtagtgatacccttaaccagagcggcaagggtgttaaattcggagctacacaatatggtgatgtgtgcattaattggtcgcttcttgctgatgttgttatgcaagctcttttatcttctaagtccattaaaggcattgattaacttaggcctggtggttgtttcctggtagtgtagccttgctggaaactgtggggatctatctcgtatgatgatagaattgtctcttgagtgtttgctttgtgagagctgctcacagtagtatattgactatcccttttgaaatattcttcctcagagtgacatgtgtggagggagttagaccgattactcaagctcaacatgtctctatgcacccatgggaagtattcgtactgttggccatcaggaccttgg

SEQ ID NO: 230817 - DNA, 1240 bp, Cannabis indica
gaactaaagcaccaggcccggatggctactctagctatttcttccaagataaatggaatctagttggagaggatatatgtaatgcagtaagatcttttcttcattctgggaagatcttaaaggaaatcaactgcacgactctcaccatcatccccaaagtcagatgccctaataaccctggtgattatagatcaattgcatgttgcaatgtgatctacaaagctgcaacaaaggtgatttgctccagattaaagcatatccttcctgacattgtggctcaaaatcagggaggttttgtccaagggagatttattgtacacaacatcaatgatttgttaagacttggtgagacactatgggaggaaatctgctaaggctaattgcataatcaaacttgatctgcaaaaggcttatgacaccattgagtggaactttcttgaagaagttctaagggatttactctttccagaacaattcatttctcttataatgaattgtattcgaacaccaaaattctctctctttttcaatggatctcttcatggattttttgaatcaaagagaggattaagacaaggagatccactatccccactcctttttgtcttcggcatggagtatttgacaagaatcatgaagaaagtgggctgcaaaaaggattttgcattccatgagagatgtgatagtcttaagcttaaccatttatgttttgcagatgatgttctactattttgtagaggagacttcaagagtatcattgtatgctataaggtttgaaactcttctcagcaatctctggattgcaacccaataaagccaaatctgccatttattgtagcaacatggaacagcatgagattggaagaattttagaagcatctggtttcacagggtagcaaaccctttttagatatcttggtgttcctatatgcaccaagaaaatctcaaagtaggaatgcaatgtgttgatagaaaagatgacaacaagaatacaaacatggagcactatgaatatctcgttttgcgggcagagctgtactcatcaattcagttctttcagccatccactcttattggcgtcaaattctcaaactcccaaagaagataattcatgagatcgaagctatatgtagggcttttctttggaaaggccaattcatgatgcaaggagcaggattactagcttgggacaaggtttgccaatcaagaacagaaggaggctcgggaattaaaaagattg

SEQ ID NO: 230818 - DNA, 4757 bp, Cannabis indica
aaatgtagttcaaataatttatttcacacatatacaataaaagagattgtgcaataatttgtttgtacattatttttagagtatcaatttttcttgaattcctcaatatatcttaaataattatattttacactaccacataaaaaaaattaaaattaaaacaatttagatatcaaaaacacgaaagatgtgcattggaagggtgcaccataaaatttctcaaaaatatataatgggatttattttttatgtgcaagaaaaatttagcacaacataaacaataaaatgaaaaaaatggaaaattattacttatttccaagtaagttgctctcgagtaggttattaagctaattcataagtaaaatatatttttattttaatggtatgaatcaacttaaccattaaagctaaagtatttattgtaaattattctctaattaattaagaacatataatttaattaataaattatttattttttctctagcaaaaaaggccgccactctcatttttatatgggttgcccttgatttggagtaatttagaatttttattaaaaaataaatccaaagtatggttttcaagtttaacattaatccaagttatttatttattttttaaaaattatattttattgttatttttctttttaataaatagagaggaaataaattgagaggtttatctacaagagcggagaacacactgccatgctctctaaacccttctcttcttgctccaaagctcccgaaaaatgcttctccaaacttgtctgcaaaaccccaatgtctcatcagtctccctctcctcttccctctcctactctcgttctctcccatctcgaaatcccacttgtgcccttcgccaatccctaaactatcacagcttttcactcacctgctctatatcccaagtccaaagctccactgccaactttgagcgtcgcccaccagtgaaatggatcggcatatacaagaggatttcttatatggagaatcctgaacttggttctgggagtgttttgaaccagtgggagaaggagcaaaaattaatctctaaaggggatctttgtagggtcatcaaagagttgaggaaatacaagagttttgagcgagctcttgaggtaataacgagaatgagattctttattcttgcgttttatttttaatgggtatctgctatttttacatgggatgtgtctagatttaatggggttatttttttttctttttgacataaaatgtttgttcaagtactcaagtgagcttataagtatgatgttatgctatttttatgttcataatcttgagaatcttcatgttgggttttattttgtgtcttgagtttaattttgcttaatgaagaaggctaagcttggtttgatatggtttgattgtttgggttagcttgattagttgggattgagatgttttaatcactttgaaaaaaggtggctgctaaattggatgtgggcgaaagtggttaacgagtaaattgaaattgatagaggatggaagcttgaaagtgtaattaccaatgtctgttgttattcatgttgtaaaagagagaaagaaactgtactacatgaattattaaatgtattattgaagaatcaaaataaagtatgtatgacatagaaaattttcagttatagttgctcttcctgatactttgattcttgtgtacttgtttatctctatctatcacttgccatattttcagctctaaacttcttgtgctgtgcaggtctatgactggatgaacagtcgagcagataggtttagattatcctctagtgatgtagcaattcgattagatttaatagcaaaagttcgtggaattgacgcagcagaaagtttatttttaagtctctcggaaacctcaaaggacaagaggatgtatggcgctttgctcaatgtctatgctcgggctaaaatgaaagaaaaggcagaatctttgtttgatcaaatgagaactttaggtcatgcctcacattccattccctttaatgtgatgatgacactttatatgaacctcaaggaatatgagaaggttgagtttttggttactgaaatggtgaagaaaaacattaggttagatatttactcctataacatttggttatcctgttgtggatcacaaggatctgccgataagatggaggaagtatttgaacagctgacaaaagataaggcccttcttcccaactggactacatttagtacaatggctacaatgtatatcaagatggggcagttcgggaaggctgaggagtatttgaaggagcttgagaataaaattacagggcagaatcggattccttatcactatcttttaagtctttatggtagtgttggcaacaaggaggagatttatagggtgtggaatgtttataaatcaatatttcccaaagtcccaaatttggcctaccaatcaattatctcttctcttctcagaataggtgatattgaaggggcagaaaagatctatgaggaatggttactggtcaagtcatattatgaccccagaatagcaaatctgttcatggtttattatactaaaaacagaaatttggaaaaagctttaagttttgttgaccgcgttgttgaagtaggaggaaaacccaattcaggcacatgggagactcttgctgaggggcatgctggagtgaagaaaattcccgaggctttgacttactggaaaaaagcttttgcagccgatggttcgaacaactggaggcccaaacctgtctacgtatctgcttttctcgatctatgtgagcaagaaaatgatctcgaaagcaaagaagttttggttagattgatgagggattcaggctatttaggaggtgagtggtatgcatcgattgccggcttatcacttgacgctaacaatgacaatgaagtagcatttgaggaaggtagtttcaataccgatgacaatgatgacaaagataatgagtctgaaatggttctcaaccaattacagggtaaccaatgaaatgattagtactttttggctccttcaaaaaaattcttttccggatcatttcaaggataccaagatgcattctttgaagtttcaaagagctgtcaccttttttaataatggtaacttggcacctgggttacattctgcttgtagaatcccctggccaggtatgtgaaaagtgatgaagcgccagctggtgtagtgtagttgttacacaattttatttgcagaatcaattccaattcttattttaagctattttagaaacaattcctttaatctgtagtgtttggctattggttgtttacttatgtcaaaaatagggtcgttagtttttccttttttctattgttcaaataatcatattataaagaggatagattgttatccgtcgacgtggataacaatacccaagccacccactgctgattctcatccacccaccgatttgataacaatactcaattgtgtgaatattgagtgggctctctacgatgtctaacgacatgtttgtgacgttatgattttttgaagtttctgtctattttggtttatatgtttggataattttgttagctttttgcattttttcgatttgttgcgatattgtgcgatattttacaatatcagtaatgataaaatagttattgttacacgtcgccaacaatgtcacaagacattgataaaatgcaaaaaaaaccgaaaatactccaaacaaataaaccaaacagtcataaacctcaagaaatcatgctgcaaacatgttagacattgcagtgagccccaaagtgcatttttttgttgttgatatcacaaattgtgtcgctaacattattatttgcgatattttgcaattttattcaacatttttcataaatattttgcgatgcaagattaaaatttagtgaaatgtggttaaacatcatgagtgacctttgagtgacactatcatcacaaaatattgtaaacaacattgcaaaacatcattaattatctaacacaacatattacaaggctatatcgccacacgtcaacaaatgttgtgaaacatcatcattaatctctgactagcactagtatcaaaccaaatgcaattaaatctaacaacaattagtaaagaaattacatacttattttttttgcaaggatttggttcctaaatggcagtttcaatagttcccttagtgcaagttcggtgtgtgtataagtgacgaagggagctccgacgagggtggtccgacaaggtgattgtgtgtgggtgtggtgtggttgtggccttcctacagaaaaagaaaaaagacaagagagggattagtttttaattatagaagggtataattggattaaaaaattattactagcgtatcctttcaatgtgttatataagtagtgtattaagagaccattcacactatttaagcatggtatattaaatttccctaatataatccaattcctcttaagctcaaattttgtccaaacatgggattagataacttagtccaatcttaaataattatctcatgtaccaatcatgccctatatatctatgtaagaatctatattttatgaattcactttaggacattattgtatgataatccttcaaattatttgttcagcccaaatatttcaacctaggaatatttgggataaattgaaaaatactttttttcttgtatccattaatcaaaaatactttcatattatttttttattaaaatatactaattttttgagtggatttcctaatataccctcactct

SEQ ID NO: 230819 - DNA, 1428 bp, Cannabis indica
atgaaacttataaaaaaacacagtaaaaaagtaaaaaataccatctgacagtatttttgtaaaaaaatgacaaaagttagtataccatgtaaatttccctaaatagaagagtaatttgcatcgtaaatacttaaaattaaacttctatttacatataaatatctaagtttaggtgtcgtttagtaacacttttgttttttaatttttaatcacaaaatgaaagtaaaatttttgtttttaaaaatttaattttggaaaacaaaaatacgttctgtaaccacttttggttttcaattttaaaaacagaaaacaaaagtgtgttctgtaaagttcattttcatttttattttttgcttttttttaagtcgggtctaagttcggggtcgggttcaggttcgggtcagaatgggggttcagtaccatggccgtggggaggggatttgggtccgggtctagtcgaagtccaaaatattgattaagaaaaaaactaattaaaaaatattgaaagtgatttttttgcttttaaaattttaatttctaattaaaaactttaaaagtgaaaacaattttatagaacatgtttttaaaaaatattttcacctttttcaattttaaaaacagaaaactgattaaaaaaatgttaccaaacgccaccttaattttgacgataataacaaagttatatttctggaacttattggtaagtattaagaaaatgaacacatgtgttaggctattgttaacctaagttttgggtcacttttttatagttatttttcttctttgttattatttttaaaatagaattaagcttgttttctttagtttcaggtttcgacactttggaatatataaactagtcaaatttaagaaaacgatgatctataaaatatagaaaattttacaagaaaataaagctgaaatttcaagcctaactttgactatgttatgttcagattttgggaaaagttaaaacatagaagttttagatatatttttcatctctccaacgcatccagaattagcttatttggagttcatatgtgaaagttatgtgcattttaccgagagagattgaagtagaaaaaatatgttgttgccgcggcgagacttttggtgttctcacccacccactaaatgaatgagtgtcgtagtttttattcggagggaggtttctctgctaatctggaggtttctatgaattaatctttcaataggtttgtccttggcttgcttggttatgttattctcttttattctaatttgaataattgaggtgtttcaacccaatttttattgaaagatctttgattgattgccattaataagtgtgatttgtcacatgtttatttggtatggaaatctaacattctttgcattcttttgatgcttcacaagtggcagcttatgaatcatttagttgaagat

SEQ ID NO: 230820 - DNA, 560 bp, Cannabis indica
aagctttctctctattctagtttttttattacaagtaacaacagaacattggccataaaagataacaaattataacctgctcgctcaaataggaaccacaacactatacaccctatatttttcaatagcagaacatcagaatatgacccaaaaagagaaaagaaaatcagagaagtagacaaataggacaatcgagttccaatatcaagtgtaatatgtaacacaaacatacgtaaatcaaaaccacaattgtaatcaacaaataaatgtgaagtaatcatctatcaatttacattggattggtttaaagttagcgtcatttgaagaacctagattagagctggtagcaataaacaagattataaataaatgaaagtgcataaaaataagaagaagaaaaagtgtaccataaccaaaaaatctaaggggttcaattaggaagctaactagtacacccaaaaaatcatgtggctagattcgaagggtttcgagtggccagtttcgaaggggacgatcggaagggacgagaggctggttttggagaggacgaccgagaggat

SEQ ID NO: 230821 - DNA, 677 bp, Cannabis indica
acacccacttctcttctcccaacctattcaactattaattaaccttaatcaactattcattaacctttttcttccataaaaattattaaaaaaaaactttaccttattattagaacattggtataaagacaccacttaaaggtggtactttatgattgattaacgatatttcatacagaaaaatactaaaggacattcatgatacctaatatctttgtaatgtgtaatattattattgatttaatttagtatcagatctcatatattttagtttaatatatattatagagatccgttaattaattataagacgctatctcataatagtgctaggcacctggtgtcccatatcaatactctttcataaaagctactactttaaattatagaacattgctacgggcaccaaagtacttagcaccactatgaaatgacgtccaataattagttattgattctctataatctttattaaattaaaataagtaagacctgatattaaattacacttaatagcgatattacatatcacaagagtgctaagcaccatgagtgccctttagtatttctctaaagagcattgctattgggtaccagtagtgcccagcaccttccataggtggcgtcctataattggttaacgatattgtctaaaagctattttgttaagttatatg

SEQ ID NO: 230822 - DNA, 572 bp, Cannabis indica
taagttatgcatgcttgtagggagttcttctctttacttatttctaacatgtgtgttgcaggtttttgttttatctttgtctatcaaattaccaaaaggggagattgtaaaatcttttattggcatattttataaaatagataaaaaaaatgtttgtggtatttttgaaattatttttatttgtttattcattaaattcgaacatttagtttccttttcttgtgtgagaaggattttcaaaatcagattttataccttttgactttgtgtgaattaaatgagtttttcttttatataatatttgattttattttttactttttaagaaaattcttattcatattttattccttttgatctgatttcttgaccaataaaccgtgtacaactatgtgtattaatgtagttaaagttactttatttatttatggaaactttgctgaaattctgtccaggttcagtgtgtctgtttgaacagactgactgcctgtttaaacagattttgactttcctttttaggaagatttttatttaatgacctgattattttttggttgcttgatcacgaccta

SEQ ID NO: 230823 - DNA, 1080 bp, Cannabis indica
ttgtttttaatgaagaccaagaagatacaaaagccagatctctgatcagatacttggaaggtgcccagattgacagattgtcaacctaggcgataggtgctcgaggtccagggtgctcaaaaatcaacttgtttcaattctaactctgatgtctcaaatatgtttgtggtatgtctagttgatgtcccaatgcaagttttgacccttttgcactaagatggccataaactgaaccctagtaaaagatgtcaacctatgcgctgagtgaaaccctaggtgcccaagttggcttctcattgtaggttcgtgtaattttagctcccgaggcttcgattaggatactacaagtcttcctggtaaatatattgaaagagagtaggttggattcaagttattgaagtccaaacttctgtcttgaagatccccaagtcaagttgggtgcagggttagggtcccctccgaggtcgactgctatgactcgggtctactcaaaagcttttattgatgtccactcaaggttttgtccatgtcaccaggaaaagttcccaagttaacacttcctaaaagtttttgcaatatttctgcagaaggtagtccacccaaggttagtcttcaagttttgccaaactccaagcgagttttgtaagaagcacacgattcatgtcttagaatcttctaaatccaagacctttcgaaagtttaggttgacatatgttatcccacaatttgagagccataaatttgtccttttcattatttccctgtcaccaatatattctaaccaaagcattaagtgattggcaagttgtgagggaaattttatttttagacatagcataaacgggtaaggcagatgccaccatttttcaccagagttgttctttctacataggacaaaaagtttcatccttccccccctccaaatgttgttttattttagttcgtagttgttcataatcattaaaagggtaaattgaagtagttctccttgcaactcaaatttaggctataaggactttgaatttggatttttcgtgaaacacaattttgtataaatttaataagctttccagttccatc

SEQ ID NO: 230824 - DNA, 681 bp, Cannabis indica
aaatggattttatttaggtcacaaaacccaacaaaatattaaatagttggggtttttccattaatttagagaggtaaagaaagttgagtcagagatccatattttccatataaaacaattttgatataatgtagaaagtgagaatttttttaattaagtagctaaattaatcataaaaactcaaattcgccttttattattgaccattagatcaatatctaatggtttaatatttctagctatttcttaagtaatcatcaaggagtaatatttattgagaagtgttctatacatatttgataattcataaatattaattcaaatattaaaaggtttaaaaataaattattatctattttaaaaattattgatatatgaaaaaggtgcattcaaaatttagtttctcaaaaatctaggtttgtttaagtaaatataatatttattttagtttaatttttaatttttataaaaataattttgtatgtttattcgatttttaattttgtttttattcttaaaatatgagttttaaaatataaataagttttttttatatataaaatcttaattttttaaaaaatatttattggatttttaataattttttttttgaattttaaaatatgtatttgtgaatataataaagctttaatttgtatttaagaataatctatgcttgta

SEQ ID NO: 230825 - DNA, 987 bp, Cannabis indica
aaataaaaaaataaaaaatttattaggcttttatttaagtaaaatttaagtgtattataagcaacaaatattcatagcttagttggttgaggtagatggcataatgtccaagatcatgggttcaaatcccataacactcttcttttgatatttttttttctctatttttgagggcgccaaaatttaattcgtcttgggcccatatattttcagggccgaccctggaaaagggaaatgtcaaagaatagtgggtgtgcatatctcaaggtttatactccctctctctctaaaggtctcaactttgggtaaatgtcttacctttatctaatgtacgacatagatacgctacaatatatccttccaaattaggaaaacatcttgaatacacatccttgtcattatggttggaatgacatccgagattaagtgacacaaaaacatttggaatatgatctgtcaacaaggtcctcaagatcgaggaaactctcgatcattagcatgtgtgggttcctctagacctagaacatactcctttctatggcgcgttgtatgtagacaagttgagggcatcttcatgtgataccttcccgtggtatgctaagacttgtacatctagtataatcttcaagacctcatttcacgagttgtacggacttattccaaggacgacatgtctttgccacatgtctcttgtggtgggacacatgaccctcaaaaagttgagacaacataacatattaaaatatgtaattttttatgaaggattactagtataatttattaagcactacttagtggtgcatatgtgattttgatttaggtcactaatgtggatagacaatttagtaaaagtattgtgtataacagtgattacacataactggaccaatgtgaactaacatcttttattaaggtgtagttatcataaaagattgaatttatgtcacaaagatgctcattaatagattagtctaaattttaaattct

SEQ ID NO: 230826 - DNA, 792 bp, Cannabis indica
ttttttttttttaaatttcaattcatgttattgttctaagaatgtcaatggttcacactagtactttggctaataattatgttatgttcatactattgagaacaaggtctgatggtctggttttcctaattgtgtataacatcttatatttgttgaagtttcattaataaaatatttattttaatcctcgtttcattatctgttctctctttaggtttattggttttcaggcttttaaggtcaattttttctaaaacaaaatacaaacacaaacacaaagcaatggaaagaatttcattatggagaggtggtttaattaatttaggtcaaaaaattaatatttaaaatacaaagttcaaactgataatatttattattaccaccaagatctgcaccgacagtcgctccgtccaaactcaccttaagttttgtagcaaccgctgctccctcttactcatcagggccaaatataaacctttgtacatgaaaaataaaattttatttatttcttctattactttagctttttataggccatatttggcatgcaatgtagacaatactacatctcactcttaaaaaatatttgttataatacactattttaaaaatatgttaaatatttataatatgatattaatttatattgtaacgtccctgcttcaagtttctattgggtccttatacccacggaatgatggctcttatacacgagtatgccattctagctgcttcctggattgacgactgaccctacaaaccaacacgagtgttttcagcgtgcgagtgagg

SEQ ID NO: 230827 - DNA, 1556 bp, Cannabis indica
tttaattgttcgttaaagttgataaattggatcttcccgatacttatagatggagaacatggtagttcaattgagtcggagctctaatcatagatacaaaatctatagcttctataaatgcatagatgtgaaacgatgattttctttgagtttggcttaatagatataaatggtggagtactcattttagtaattataatagtttattaaaatattctttataggtagctaagtattttaagctttaaatacattgaaggataaaatggtaaatttgttcctacttgttatacccaaaattcagctacactttagaaagtgacacgtatcttgcagtggaatataaacgagctgatataataaaattatattatttgatgcaaaaaaaaagaataactcgttaataaagaattaatagaacatattcataactcgctgactgcatacttttaagcgagataaggataaaattctattgaaacttatattgacgagacacacaccatcctcagagtacactgcccaagaaaatcattcatttcttcaaaggagtgaatacagttatgcaaagcaaccttgggttacgaatagcgagatagccacctcgctattctaaagaaacttggcgaggcgaaccatctactaacacttagcgttttttctacattgtgatagacaaggataacaactcaaagataaacgagatacaattttccaaatcagcattaaccatctataataataagaataaaaagcagttaagcagttattctgtattatcccacatgcattgaaatgaaatgtgggaattgtccacgtttcatgaaggctatatcttaaattgatttaacatttacgattttattactttcttaagctttatgattattttattgccaaaaaatttggtaaacattttagtgcttttattaagatatgaagaaagaaatatgcacggcggttactggtgtgagactgcctggaagaaggttcggcaagaaaaaaaggaagacctcctgaccatttgtcgaggtttggccgaaggccacaaattttcaaatccaaggtgttgctcagaaagagacttgatgcctcagtctactcaagaaaggtggcaaagatgaatgcaagtagtctcaagacacctgatgcaccgacacccgtcctcaaaagctcagatctggccaaccaaatctttttaggtgggatctacccccagtatcctcgggctcaaatccatcgccgtattgttttgcgtagacaaagcagcacaagaggtactatggccaaacaaaagagctatgacccaatacggttacgaagacgaactcaggcagggtcatctaatgtagcgactctatccaactagagactctggcactggtgccggtgtgtgggctggatctatcttccgccaaccacttcccctgccttgtctccaaatggtaaagttggttggaaacagatcctacaatggcacctattgagaggagaccatcagtaccgtcaacgtctactaggtcaccagtgagccttggttatggtactgttggtag

SEQ ID NO: 230828 - DNA, 1002 bp, Cannabis indica
atatttgcacttcttttgcagagctacatgcttctcttttgcctaaccctgcgccgatcttgtgtgagacctggactccacctcctcaggattggataaaaataaattgtgatgttagagtaggcttagagagtatgtgcacagctgttgtagcaaggaatcatctgggtaaggtgatttagattcacacgtctcggctgaatttctcggatgccttatgtggagaagctgcaacctgctctttggctgtctcgtcggctttggagtcaggtacaagtatgttattgtggagagtgactcgagactagttatcaatgcgctcaataggaatgtattccattaggcccttaataactatatctctttttgtattaagtcatctccctcttttattagctgtaactttttaaatgttaatagaacttgtaactttgttgcccataatgtgactaagtgggctttcacccaccaattgtacggttccattttgatttcctcagttgcagaggaactattttgtaatgaccaagaggtctaactagtgtttcggttattaatgcatgaatacgcttagtttcaaaaaaaaaaaaaagtaaaaatgtgtcgatgttaaattcaatcatttatttacttattgaaaaatcgtgttcttgcaaatactaataattttctttaataacagtaaagaaaaaaaatagaaataatagtgcagaatttaaaaacttgacataagagaattgtatgtggtatcagtgttcttttaaacaatactagtacacgaggttacgcatagagaatgaaatcaattagtaaagtatcaaagattacaaaaataattgacttaaacaaatttagactccctctaatgatttgacgcaaccctttgtaattcactttgctaatctgatctctgaactacactaagtagtgaactcccttcaattattgatgtgtgcttaatgttgggttttgtgccctaaataaaacccattacaatctgat

SEQ ID NO: 230829 - DNA, 1000 bp, Cannabis indica
aattgcacacacgtggcgtccctgttggacagggcgttacatggttcatctcttccgatctctaatattggttctttctctatctctactccttcccaccttttcaaattctctaatgtattacatgttccctctatctgttgtaatatattatctatctccaaatttttccaagagaacaacaccacaatagaattcttaccttttctcttttgtgtcaaggaatgtgtgcaagggaaaacacttcttcaaggaccaactaaggctggggtttacgagtggaacccaagtcctccttgagtcttcaccaattataaaaagcccattcacgattggcaccaccggcttgggcatccatcaaatttagttaagtaataatttttctctttccatctcagatttctcaatgtctcattgtaattcttgcaatatcaataaaagtcacaagttgcctttttctacttcatctcttacttccagtgcacctcttgaattaattttcactgatgtatggtcatctcctatttactctcgtgacaattttaaatactatgtgatttttgttgaccactttactaaatatacatggttatatcctcttaaaaagaaatcagatacctttgagacctttattcgttttcgtggtctagtggaaaaattcttcaagaaacaaataatacaagtcttttctgataatggtggggaatatgaaaaacttaatccctacctaacatctcatggtatctcccatcttacctcacctcctcatatgccagaacataatggttttgcggagcgtcgtcacaaacacatagttgaaactggtcttgcattactatctcatgctcatcttcccttgacattttggcctcatgcgtttgctaccgcaacgtatcttataaatcgtctccctactcttacacttaacaatgactcaccatttttacgtttatttggtcatgctccaaattatcacaaactaaagaattttggttgtctt

SEQ ID NO: 230830 - DNA, 3893 bp, Cannabis indica
tctgtctaacagggatgccacgtttgtgcttttataaaaattacatttactattaagtataattatatcaaaagtgaggtaaattaaaaaaaaatcagtttaaataaacacataattttcattaaagataattactaatttttacggggaccccctattttcaaaatatttacaaaccgacttaacaatacttttacaacataagttgatatttcaaaatacaatcaaaatggaatgacctgatcaatgggccgtaacaccatagttgttatgtacattgctgctatgaccttgaaactcatggctactcagccttggccttgcctttatctgcaccatatagcactcgtgagtcacagagactcagcaagaaaagtgtttaaaacaatatccattgtaacatttatcgatatacaatcttatattaacatatttaaacatttacacaacattgtaaccacacaaatccttgtactttataaagtaccatcaccactcgttaaccacgagctgaatatgtcactatcattgcctgagaaagcaaacgataagtaagaaacctatccgcagtttcaagagtaattactcgtaacggtaatgaccgtttcccaaccctcagtcataactgaggcttaacaaacaaataatctggatctcgatcataatcgaggcttacaatacacatgttaatcacttaaccctaagtgatgcataacactttttcttacctcagtccagaactcaagtgtgcaggccaacctgagtggaaaacaagctgggcgatcccggtcctatgtcacgacaactaaaaactcaatgaaaacctttaatcaaatttccagggataaaccctaattctcataaccgcacaaccctatttcccctggatcaaactaacttaaatatccctaaaatactctgaattacacttcggaagatacccaaaaccaaaatcagactcgaggagaaaactcgagatttccccctactagcaaaaccagttgaccgatttgccagttacctggaaaaccagtcgactggttttctgggcagccatgggaaacctagtttttcaccctgaaatccaatccaacctccaccaaacttgctatactctcatagaacagttcaatataacaaataaaatatatccaaatcaccaattcacctcaactcatcaattactcaaaattgcattctcaaataaaagttaacctcaatttaccacttctaactcaaatcaaaccaaacaacccctatctctaaccaaattaaaattaaacaagcttcaatttgaccctaagaaccaattctaacttcagtttttactctagccctgaaatccttaaaacccttaccaaaacctaaacttggctagctcctaggtttaaagatttgatcaagaattgatgaagtgagatgagattttccttggttttcagcttcttctagggctcgacagaaggaaagaaagagaaagaattttttttagctgtatcctaggttatccattattaggtttagttttataaagcttaataagataaaagaaaaaaaaattctatttattaaaatcccaaatccagccattaatttcaaataaaaaaaagttaatattcaacaccaaaatgactaatttaccctccttataacccttaaaccttaaatcaatcctaggggtattttggtcattttctagctaaccccgccaaaccaacaatttaaaattctaaaccattccggaataattccactacaatacaactttaattgtcgtgacatttttgatcactttgtctagtttccacggtcgccgggcccgaaaatattttattctagaaatggtattcacgatacccacacattctaataaaatctgtgtaattaataaattacgctttaattaatcatttactaaagtcacaccaatcaaccctagtaagatcattatctttcctcattacagaaataatttacatatttaataaaatatgcctaattaaatatcataatattttttgggatactacaatcacaaacctcaactacttgaagggaacgcgggcattcctggacctcaagtaggacaagaagaacactgccatgagaaggtcccagttggcgaccaacgtgatggagcgacatcctcgataaccactgcaggagaaggtgtgacttaggggcggaaagtcccttcaccaatcagacatcctctgccctgacactgaaagatctcagaacctcacatcctatagcagggaaggaaaagtgagtctactccattacgtcaagctcccacactcatacgcacaacgatgaaatgaatgaggtaaaaacgaataacttatggttggaagagaccgtggcgaacatgcaaaaggtcctagatgagcttttgtaggggcactccggcgcacccttattcaaacatagggcacctgaagtcactaaaaagggtaagggcagaccggaggacgaggggctgtcaaaatactcaaccagtaacacatcggaggcatcaccgtcaaaggcaaaatctcggagaaacctagaaccattgttgcaacggaagaaaaataactcaaaggtagccctgggagacttgagggagaaactcaaccaataaacaattattgagaagaaggtaccctcatcggcaacgcacaaccataaagaaggtccaagactgacattgcaggaccttcgagaaaagttgaacaagaagagacaactgcttgacagggagatggtacacctctgctgaaggatagccacaactgcattagaggagggcagctgggatgaagatgagtttgatgatgagtcgcccttttcaagagaaatccagtatgaacagctatcccccaatttcaaagagcctaacatatcaccatacaaaggaatcacctatccaaagtatcacttagatgctttcaacaaaattatgaaaatgaaaagggtcatgagtaaagcgaggtaccagtgcttcgagatgacgctctggggcgtgacttacaaatggttcaagagattggcccctggattaataactttatggagacagttcaataatgatttcttgtcccaacatagtgcctcccaagattatgtcgtcccgaggacaagcctggccaatatcaagcaaggggaaactgagagctttaaaagctacatccagcactttgatgctgaagcaactaaggtggggagattgtctaaggatgagcataaaatggctaatgctgtaggggttagaccaagaagcaagctatggaacaacatactcaagaggaagttcgatgaccttgaagacttctatgaaagagccagtagatacatcttagtagaagatgggcatgagaacttaggagctgggaaagatgaacatcctaggaagggtcaagctgaagggtcgcataaaaagagggggttcaaatacaaggatgacagacaagacaagaaagccaagagagaattggagccactgcctctcaaatatacccacaacaaaactaacccactaaagggagcacatcttcctcactaatgagcatcaagtgcctttcaagaggccgccacccttgaaaaaagaaagagcctagagggacccaaacaagtattgtcgcttcaacaaaaatgctggacatctcatagaagagtgcaaacatcttaaggtcaaaattgaagagttgatacaacgtgggtacttaggaggataccgaaaggaaaattaaaggccaaatgagttgcgtcagtgagagtataatgtggaggctctagaagttataagggacatctgaacagtcattgggtgagcagaagttgggggcaacactacaagggaagagagagaggtatgaccacgaagcgaggcatgagccccaagtctggag

SEQ ID NO: 230831 - DNA, 1313 bp, Cannabis indica
ttgcacccagatgaagaaccttcatcagaaatttcattatcacatatgtgacatttcttcttttgttgttggttcaatcttccttctcgctccaatttcagttcttcctctaacatttttattttctccaataattggcgaagggttcttctacaatcttgttcatcatcatcgcgtctcaatagaaatctagtatgaatagccattgtagaatagcttctttctggcaaacaaataagctaagtagtttaaaaattgttattcaatttgaaggagaaaagttttaagagaaaaagagagtagcaggaagtttagggctggggttgagtgaattgatattaaataaattctttttatatagacatatagacaaaaagaagaaaattatgtgtagaatattgattaaagaaaattcaagacgtaaaagaaggtatataattccaaatgatatgttgcacataaagaaaagaaaggtagctatagtatatttgaaaatagaatatgtagttacaacctctataagcaaggaaattagaagaaagggataataaagaaaaaaatgaaaaaggaaaagaaagaaaaaaagagaagaagaagaagaataagagatgactttattactataattcgccatgtaattagcatatttgtttacttagtttaatataaagagcattgctattgggcaccagtggtgcctagcaccttctaaatgtatcgacttgcaattgactagcgatactctataaaaattattatattaaactatatgagacccgatactaaattgcaccaatagcgatattgacacgtaggagggtgctaggcaccagtggtgccctttagcatttctctaatataaattctttcatatttatccgtacttgtactcaaagggctctaatatcaataatcgccatggaagttctcattactaatgagaaaaagagtaagaatgagttgagtgaagtaatgaggctcctcattaatgtatatgtatgtttttgttcagaattaatttcataaatctaaaacatgttgatgtttgtattttggttcacactgactaattttctttcttacatgcttactcatttttatggatattgcaaaagagtattctattaggcactagtggtgtctagcaccttctcgatatgttgcgttgcgattggctagcgatactccctaaaagttattatattaaattatatgggacccgatacttagttggaccaataacgatattgacacatagaaataggagggtgttaggcactactggtgccctcgagcatctctcattgcaaaaa

SEQ ID NO: 230832 - DNA, 1619 bp, Cannabis indica
acttttctgggagaggccttgttcgttcccctagtgccaaagtaacagaggaggtcttcttagtgagagataataaagggttatacactcataggcaattccttgattgccaaggagacaactgatccaaccgccattgggaatttaacagacaaatggtatattaacgagatagctcaaaggtcatatagggttggcttttcgagcatcacgttgtacggagacttcacatccaccactatgaacgtggccatgatacgggtctaccttggggcagtgctaactgtgagtggtagtttgatctttccacatggagatatgctcgctctgctgaatccatacattagttgcttgcatggctctaggtcttcaagtgacaaacccatatggattagggtttatttgaataggatgttcaaagaagctccatcattgatcatcaccctatccaccatcatgttggctatttgcacctcaacaactaagggatcattgtgagggtagctgacatgatgcaagttagagtctccaaatgtaatgggatcacactcatagcgttgagactttagaggacgttctataacttctagtactttggctcttggctcatgtcgcaaagaccttgcatatctttctaaggcctttcttgaattctcagctaggcgtgggcctccaatcataatcttaagcctgcttgcttgcaactagcccaagctggaaaggtgcattgcccccaactggagcttcaagatgtacatatttttgaagagtgacaagcttctgtctgatgaggaattctatctcgtctcgcaactgattacaatcatttgtatcatgatcgtaattgttgtgataacaaaatttatttatgtctctcttccctaactctttcaagagaataagtttgcggtatgacactattgattgtgtggtcgtatagatctcatctcttggagccaagataatggagtaggtggtgaaatgaggttcatactctcgtattggcctacccctagtttcagctttctttccaccagggaagttacctagtttcccactgttgttggctcttttccctccgttcgaatctcttttctttccattaacctgcactgtagtgtcaagggttagggagtttggcgacttcttcttgttaccttttgagcccttggcttgggtgacaacttcttccagcttgataaagccatctagtctatcaagaaaatcattcatggtgtagactgatttgagacaaaggtcagaccacagaggactcatctcattaagtctagttgcaagttccataacccttgcatccttgctaagtatttttgtcttagcgcttgcctccaagcaccaatgtatatagtccttgagggactcatcttcttgttgtgtaacgtctaccagatcattgggctcgatttggcattgtcgggaaggactgaattggttgccaaaagcatgcattagatctttccatgagtcaattgatctaggggaaagcttgaggtaccatcgctgagctaagcctgtcagtgtggcaaggcaaattttgtacctggcattgtctcttactccttgcagatcgatcaacacttcaaagtaatcctctcttt

SEQ ID NO: 230833 - DNA, 1244 bp, Cannabis indica
ccctaaactaaccgtacaaactcctctgcttaggcgacacgaatggaatcgttataataattcttatacaatatttcctagaacatgtctcaagtcatggtattcagatcatggcatttagatacaatctcccaccatattcgggcatcatcacgtaacatgtatacaacacatcggacccgatcattatcctcaacccacataaagtcaaagatagaggtagtcatactcatctactgctctgccttcagtgggtttgagccacccttaaacacaggtggatttggtttcctaaaccgcttataaattggttccataagatctcggccctcatatttttttgcactacatgaggtgccagaataagtgtaggacgagcctattgttctctcaggtctcaaatctgcttccttcactgcctaattatgttatgcatgacagaaaacacgtgttcccagttatgaggcggtggaggattctcttcctcaccacttgcctcgagcctcagctcacggttcaatcgaccagatcgttgttgcatgatctaatgcacctgcgatccagaatttctaactattcagaacttaactagatatcaatatcaatatgcatatatcacacatatattcctatcacaatcatcattatgttactttttcagcatgctttgtaataatctaggcaggtaatccaatagcaaataaatacaaaacacttactatactacgagtcgacatgcctttgcagcaaatgcacatatccaaccagccttcaggacctttaaaactatggttgctctgatactaagttgtaacgccctaacctataaggacaacacatgtgtgtgattttgtaagctggtttagtgatagtagattaattgattatcaaaattcgtgataatataaaaaactccacgaaaataaaagcctaatgatgaataacataaggacactaaaattttgttatggggatccttgttacaaaagttttacaaaagaactatatacaattgtaagtcaaaatacacagcacatacaacctaaaactgttgggttttgtgccctaaataaaagtctatttcaatgtaatctctatcatgtaattatcacagaagtattttcatcacttatttaatgtgtcatttggttcatattatcatttatatgtttgttggatttataaattcatccaaacccttatcacattaatattcttgtttattgtgtcgtcagcacagtgga

SEQ ID NO: 230834 - DNA, 536 bp, Cannabis indica
ttggttcgaaacattctgcgcagtatgtcgcggcctgttggcgtcatctccaatcctttctacccagcgactgggacttggtcaataatggcagtctaaccgagatgcttgaaaggagtctcgctttcggtctctcgatttccttctcctttttgttttgccttttatttcatgaaccctcagaaatacttatgcagtttcatttttcacagcaaaccttccattggagggcgagcttcagagaaccattggccaacgcgaggccattgccaaagagtagaatgaggctcagtcggagatctcccatttaaacaaagaggtcgaggaggtgaagagggcccacaaggctgaacttgagacatcccaggaggctaaggacaagcccgagatgtgactgaaacttcaagaagaacttgatgcaaccactgtgaagcttgagggggctgaggccaatacaaaggaacttcaataatgtcacacaaaggattaacctttaaaagtgggggccacatgtctctcaaagcttgctcctttat

SEQ ID NO: 230835 - DNA, 1732 bp, Cannabis indica
gctgacattccctcaactctggcgtttgctattggcagcaatgatgtgccaccccgtcggccacccaagaagaagaatcaatccactccctcgagcggtttcaaaaggcagctggctacggtggggaatgagcagagggaaatgctgaaaagacacagacctcactcaggacaggacgttgtggaggttgtttcaagtgatgaggcaggccctgtgaactcacaggcctgccaggaggaatgagtctcatcagctggaatgctcgggggcttgggagtgaccgagcattccgaaatctctcccttcttgttagattatataagccctctttactttttgttattgaaactaaattgtgtaagaactctattgatcgttttaaggctaaactgggttttgattttggttttgaagtcccccgtgttggtttaagtgggggactttttcttttgtggactttggatttggatgtaactattattaactactctcttaatcatattcactgttttatctcgtctgatagcttttctagtttcaattttactgctttttatggggctcctaatcctgctaataggtcccagacttgggagttattatccagaattggactctcttgtatttctgttccttggtgtgtgttaggcgatttcaatgacttcttaacttgggaggacaaatctagcagaaatctaggccatggcccctcccctctttttcgcacttttataaacaaatatgattttcaagttctgcagcctactggaccggccctaacctggaccaacaacagccaaggcaatcgcagaaccttggagcgtcttgattgggctgttggcaatagtttctggcattgccagtttccaaatagcaccttaaatcaccttgattttttcggttctgatcatagagccattcaactctccctcaatccaaatttccactctcgttgtcctaggagaaaagataagcattttctttttgaaaatgtgtggctttctgagccacattggaatgatgtcattttagaagcttggtcttccaatcctcctagcaatgacccttcctctgctcttctccgaaagcaatccaattgctccacctttctttcgtcttggaaacacaaggctttctttgggtttcagaataggataaagcaggctcatcaggcccttgagcaggctaggaagactgatgacacgtcttctgagtcctattatcgccaaaagactcttcaagctaatcttgattctctcttgctaaaagaggaaacttattggaagcaacgatcgcgaattcaatggcttcaatcgggagataagaatactcgttttttccataagtttgcttctaacaggaagagaagtaatcgaattgcatcccttactgctgaggatggaactgtttgccaggatcccgagtccattctatctcttatccaatcgttttactccaatttattcacgtctcaatccccccatgagttggatatcgaggctgcgctctctgatcctctacctctgcctgagccatcccattaccaattgcttgaggaagccttctcctcctctgaggttgaaaaagctctcttccaaatgggtcctgacaaagctcctggtatagatgggtttaataacaagttctaccaaaagaattggagtgttgtgggtaaagatgttactgaagctattctcaatgtcctaaacaatgatgctgacatctctccctt

SEQ ID NO: 230836 - DNA, 911 bp, Cannabis indica
aaaaaaataaaagaatcgttaaaccaagaattgccgttagataggcacttttaatatataaagatatgattaagattatagtttctctacgcacaattaatctgctcatagaaaacaattacactattatataaaggaagaacacaatcacacaaaaaacaaaatccaataaaataatgaactaaaaacaaataggaatataaaaactaccgtaaattgcccaaacattgttaatttattaaatgtacaataaatttgaattgaaagagattcatctagcttgaaagtgaaagcattgattgcgtttgaattacaaggtaaacatgtctaaatatataatagtgaatatataagaaatatggcgtagattagatactttgcaggagttctttaatttggaggatttcttaatgttaatggtggtttagagaaagaaatggatacttatttattgagctcatattttacgaatggtatataactgaaagaagttatactccactaacatcttctttttttttttaattaagatcaatatgtataaatcaaaattatatattgcaacacttatttagaaagagctaactatgattattttttattatcaatgaaaacgcttttttataagtgttactattgtttattattatttgttttaaaatgttaggaatttaaatatatgaattctttggcaacactttaattttaagtgtatcctattataaaagtaaataaattaataacacttttttatcaagtgttgttaaataagtgttgctaaatatcttttttgtagtagtgtaacctaaatatcatttcaaaaaattgctaaccatcttttaaatttatgttattttataaattaaatattcactaaaataaaatgataaataaatatccttttctgattt

SEQ ID NO: 230837 - DNA, 882 bp, Cannabis indica
ttattccattcatcagagaaaaaccttagccttctatctaacctagtcaccacctctctttccttcttcttctttgtttgttttaaaccccttagtgatagagtagtgccgacacacagcaagtggtacctcaatcatattgtcgaagatcgtgaagaatctagattcaacaagaaggacattcgggctcagatcttgataatactctgagacagaaagaatacaagggttagagatcttagtggaaggagacatattattccgctgcacccaatgtaaggtttttcatactttatatgtgtttatttataattgttttagaagttcatatttaggatgttaaacaacatacttttgagtagatctaagatcctagtaaaataattcccacacttccttcttagccttggcaagtgcaaggttataacattcccgagcagtctgctggtttcctctcagacaccctaacccattcttcgttggaaacttcaggcacgagtggaatatcgacgtgacagcctttaagtcatacaaagctggacgacctagaattactttaaaagctgaaggaacatctaataccagaaattgtgccataatagtcatgctcgtcaaagctcgtccaacagtgagaggttgacgaatttgtcctagagatgtgactccttggccggagaaaccatatgcaggtaggagagaggggtccgatctttaagctggagccccatcttttcataggtagttttgaataagatgttggaataggctctattatcaatcatggatctggccaccatcttattagctatctggacctccacacccaatgggtccttgtgcagaaacataattttgacagcgtcttcatcgttgaaggttatg

SEQ ID NO: 230838 - DNA, 876 bp, Cannabis indica
aacttttcaaataatctagattatcgcaaataagcttgtgttgagtgttataggaattgataatattagctttaggtatctgatatcttgtaggtgagtataaaatacattgattttggagcattgaatctgtcttttcatttagacgtaatattgattttggtagattttgcctatacaacttcatgtatctatgttttgtgtgtttcagggatttccagaagaattgagacactatgatattatttcaattaaatttgatttctctattgttattccaaaagaaactagacccatgagcttgatggagccattggctatggctagggaaaggctccttcgccgtattactgtcggagcagagatgcggtgatttggctgaggagattttctcacgaggcggtggagatgtgtgattgttagactctggagcatgttctggcgacaattccaggagcgaagaggatgatcatgggtcatacgatccaacaagttgggatcaatggagcttgcgaaggtcgagctataagaatcgatgtgggtatgtctaagggttgcattaatgggcagcctgaggttttgaagatcatccatggaaatcctgagcccagaattttaggtgggaattcctccggtgagtataaatctgtgttgacgaagagaagggttgggattgcttttgccggatcatcgtcaagttcgtgtcaaagcttagggattttatataaagttgagatctttgactcttattcagatcatcatctaataattatttattgttacagattcacttatttacccttaagttgaataataccactcacagggtttgacaaatatacccttacatcagatacaacaaagatcaagactaaa

SEQ ID NO: 230839 - DNA, 2105 bp, Cannabis indica
aagtccaagtttaggttcgggttgggattcggagtttgggtctgagtctaggtcccagtacgggttcaggtttgagtctggattcgggtcccagtcttagtctatgtccatgtttgggtctgaattggggtcacgattcgggtcccagtcaaggtctaggtcccggacgaggttttggtatgggtttgggtccgggttcaggtcctgagtttgggtctaggttcgggtttagatccgggtccaggtctaggtcctgggttccgatctcggtatgggtatgggtctgggcccgtgtcaaggttagggtatagggtttagggttttgggtttattgtttagggatttagggtttagggtttagggcttagggtttaggggtaagtgtaaagagtttaggatttagggtatcaggttcagggtttagggtttaagggtctgcttccagtgccggttccaattttgggtcacagggtacgatttgaggtttgggtgtgggtgtgggtctaagtcctggtctaggtctaggtccgtgtttgggttcaggtttgattccgatatttggtcccggtttgtgtctgggtttgggtctgggaccgagaccaaggtctggtcttaggtcccagtccctttcttgggtcctgattttggttctaatttcgcgtttgggtccccaatctaggtcagggacctaggtctaggtctgagtctccaatcccggttcgggtcctgcgttcgggcctgggtccaagtccgtgtatgggtttgggttcgcgtctcgagtcccaatccaagttttgattcgggtccgcataccggtcttggtctgggtctggttccttgtcagattccagttccaggaccgagatcaggtcttagtcccctggtctggttctcgggtcctagtccgcttccagttccgcttcaagtttcgggtcacggagtacaagtttgggtctgggtccgggtttgggtatgagtttgggtctcagtttgagtccaggtatgggtcccagatccaaacatcgacaatgggttaggtccaagccccgagtctagatcaagatcctggtctcgggtcccaatctagttccactttgggtcccaggtcgtagtccgtgtcgaagttcagggtcttggtcttgggttatgtcctaggtctcggtgtcaatttcgaagctcgggtccctggtccaggtcccccatccaggtctgggtcctatgtcccggtccaagtctaagacctggtcggggttcaagtcctagaccgagttcgggttcgggtttttgatgccggtcatggtcaagatctgtgttcgagtcctgggtttgagtccagatccaggtccacgtctgagtctcgaattccgatccgggtctgggttccgaggctcgggtccaggtcccccatcaaggttcgggtcctaggtcccagtccgagtccatgtttgggttcgggtcctagtcccagttctgatttcgattcagtgtccgggttcgggttcttgtccaggtctgggtcggggtctgagtcctggtccgagtccagggttgggtatgggtttttgtctaggtttgagtgcaagtcttgggtacaggtccaggtttgggtctgggtctcggtccggatccaggtcctaagtttcgatcccggtctgggtctgggttcgagtccaggttcttatccagatccatgtctaggtttgagtctaggtctgggatcggatcccaggttcaggttcgacccgatccgagacccagaactggaattggaataggactgagactagaacccaaacatgggactgtaacaggacccaaacctaaacccaaactcagaccagaacccatactgggacttggacccagaccgggacctgtgacctggtacctaaaccaacaccaggacctggacccagatcgagatccggacccagactcagacaaaaaaactggggccgaaccaaggacccaagaacaagactcgaacatgggacctaaaactcggacacagacttagactgggacccgaaatcggacccgaacccaaatcggggcccaggaccgaacatagatgggggacccatgtcgggttttatgccctaaat

SEQ ID NO: 230840 - DNA, 1898 bp, Cannabis indica
  modified_base (1707)..(1707): a, c, t, g, unknown or other
ttagggtttcataagtatcttgggtagtgtgcctaattatttaggacgttacacataaggacctcatctttacatatggctagtccgaaagactaatgtgttaaacaacctatttggaacttgcaagttctaggttatcattgttggttttacggtactaaattaggtacgctacgaaataattgttattgattattattgtaccatatgccatagatcaccatatttctatataggtgatgcgtgtaatttagaggcccaagattagccaaagcgggcccattcacaagtccaataaagttagtgggtcagttcgtaatggagtcgggccacaactccgggtccaactataatctaatgtaacatggtaaggctgaatcttttttggtatggtaataacgactagtttagaagaaggaagactcaacatagtacacttgataccctcgtgggacaatccgggtgaggtatttaagaggtattcggagacatccccatatcatcctacgtggcacctctctgatactgaaccccaccaaatcaggggcttgccccttgtgtcagacctatgaaatgcgcagatcacctaaaaaggacaagccttttgttcacacgttcttctcaaacgggcactacacacgattggcaacgcatgccacttgtcactgtcaagtggtccccttccgtatggacgactgttgtcccaacaattgggcctcacctaaccagtccaaagtcagtataatattgcattttagcagtagacttagttgacacatgcaaaccttaacgggttcgggtttatccataaactcgactctagcctataaataaaacatgatcccttcatgcaaaaagtttgagaatcagttcatagactcaaggtaaggtttagggttttgcaacttttgcaagaatattcttatgtagaaatactccataacttttcaagctcaatttttgtggactaaaatttattaataccttaactacgtaaaaattcttattacattatttttatattataatttttaagcttaatttctttattaattagtttttgaaaatctcaataaacatttgaatagttaaagtgtactagattaagagaatataaaactctaaatagtagagaaagttaatattatcattaaattaaataatgagacctacttaaaaatacgaactttgttctttaaatttatttaaatgtcaaaattaatcaacaggggtagacatcatataccaaaagtataaattgaacatttcattaaaaccgataaatatatattttttttaaaaaaaaatgcacaattcattaagaaaaatcagctggtacagaagaactcaaaaatcgaggacaaacatttgtccaaacacaatctcctagactagtaacagaggtttccagtgtatgggcaacactatttgctgatcgcaaaatggcactgcaagaaccaccactaataacagctaataaagaataaatatctaataaaatagagtgaaaactaaaattaatgtaaatcttatttatccaactaattgccacagtggaatcattattaacaataaaatattgaaaccaaattgatgcgtaaaaaccaagcttagacgaatggcaagcagctccaccacattaacagagaaatcacctaacacacctgatgaccacaccaaccaaatgcatcccatattacccccccncccccaatccaacaaacgccctcccggaactcaccgaagcatccgtcgctagagcaaaggagtttaggaggaggtggcatccatcgagtagttcagtttctcacgtgggtttgtaaggctcaactcccaaatgaaggcctcgccgatcactactcctttaactctgtcatatggttactggctaagtctag

SEQ ID NO: 230841 - DNA, 2629 bp, Cannabis indica
gaagtggataaggaggtgtcgggttcgaaggggcctgttgttcttcctgggaccgtggtatctaataaaaaaaaagaaaaattaccaatggttgttgatgagataaatgtgatgagtgtgctccctgaagtggagagggtagaagtgttggcgaaggattcttcaaccattgatggttcggcagtgatggagaatgatgtacccgtgggtgtgagtgggatgcgtgtgtcaagtggggagggttctaaggatggggacaaggcttcatctatgattaatgtggaagttgatatcattgatgaagtaattggtcatagtaaggaaaaattgactaaagagcaaaaaggtaaaggggttttagatcatacatctcaagatgagatttcttttcgccatgcgcttcaacaaacgtttgacccgattataaaagcgcaaaaagctaagacatggaagaggttaagctctgcgtcgggccgtggcactaaagggggtactaaactgtcttctttccctattagcccgaagttgtcacatgttatggtagctaatgctaaatacaagttgagtcctaagattagtggtggtgggaagcggaaaatggatatagagggagtaaccgaaagtgtgaaaaagggacgtttggatgagcaatctgacatggtccccatggatatgactacattattggcggagcctgcggagcaggcccgccaagagcaatgagtttactttgttggaacgcccggggactggggaaccctggtgcgttgactgccttgcgtgctgttgtgcgtaagttctccccaagtttagttttcttgtctgaaactaaactttatggtggttgggcggaaggtgttaggcgacatgttaattttcctaatagttttcatgttgattgtgtgggaaagagtggtgggttgttattgttgtggaatgatgattgggaggtttcggttaagtctttctcggttggtcatatagatgcgttggtgcaatgtccgggtaggaggttatggagatttactgggttttatgggaatcctaaggccagctgtagaaccgagtcttggagattgctgtgtcgactcaaggatctttttgatcttccatggatatgtggcggtgattttaatgaagttttgtccattaatgagaaaaagggcggtgcggaccgtagcttatctgctatttctgacttccaacaggcactagatacgtgctccttagctgatatgggatttcaagggcaatgctttacgtggattaataaacgacagggtgcggcacatgtgcaagaacggcttgatcgcttttgttgtaaccaggagtggcataatttatttccttcaggtaatgtcgttactggagattttattcattcagatcataggccagtggtagctattttagaaaatgtggctcgagttcagaagaatgataaacagcgggggttccgatttgaaacgcattggttgaaagatgaggaatgtcatgatattgttactcagacttggttgatgcctgatggtccgttggagagtcaagatggtattattgatatttttgggaggtgtgccgataggttgggggcgtggaataagggtaagtttggttcgatacctaggctcgtgagagagacacagaaacaattggatgatctccttagtgtggcggcgcctttggtccgaatggaggaggttaaacggcttgagactaagcttaatgatctgttatcccgggaggaatgttattggaagctgaggtctcgtgctgattggttagccatgggggatcgaaatactaagtattttcataataaagcgacgggtaggaagaagaagaatgctattgtggagattatgacagatgatggtcggaagttgagtgtcgaagaggatattgttggtgagatcgagagatactttggtacaattttttcttcaacctctcctgcagtgcaacaagtggagaatgggattgccaacattgacacccaaataactcctgaggaaagcgccatgcttgaaacaccttttacttgtgaggatgtgttgtgtgcggttcgtgctattggtgctacaaaggcccccgggccggatgggtttcatgctattttcttccagaaatattggggtattattggccctcgggtttcagctgtatgccttgcaattttaaacggtcatcaatcagtcaggaagtttaacaagtccaatgttgtgttgataccgaaaatcacaaagccttcgtttgtcaaggagtaccggcctattagtctctgtagtgtcatgtataagattgttgcgaaggcaattgctttgaggttgaaaggtacattatcaccactgatctcttcgtttcagagtgcatttgtgccgggtcgggctattcatgataatgttatggtgggatttgagttgttgcattctctctttaagaagaataatggtgttcgggggtttatggccttaaaattagatatgagtaaggcgtatgatagggtggagtggtgctttttacgggcgattatgggtaagtttggctttcctgggcgttgggtggatcttattatggattgtgtgactacggcggaatatgggtttttggtgaatggaaggccacgggg

SEQ ID NO: 230842 - DNA, 996 bp, Cannabis indica
cgttggatcatttggttaggcacagaaggacacacatgctctgtacgatagcgtgtcgttggagacaacctctgacattgtacctaaaaaagcctgatcactaagtccatagtctaacacgtatagatgaggcttccgctggctaaaggcgtagctcggttcagtgtgtctcaaaattccttggccctctaggaaaatccattctgttctcgggagtaagtggctttggttcctagaacagagggggactttagctcatgaatatcctccgtgttgctagcagtcaagagactctcgttcacggggaatcttcccgcaaagttagtgcctatatcttcctaaagcatcaattgaggaagttggttagctaataacttctcagcttttcttgattaaaatccacgtgtcatgcttacaaaaatgggaataacaattacaatgcatcaaaccaaatcctatctttagcatttacatttttgggccaagcacttttgattctactcactacttctattttggttttagtgacaattctattactttgagcacttgttgcattccatagaattccattcctagcttgccatatgttgtatgtaagtgctgccaatgcaacagccattacttgtcttttgaagctacaggtttcggcatttttcaaccatcgcatcaacatgtgaagagagctcgagacaacattctaaatgcagccagttttttaactgttgtaaacatgcttcagataaagtgacaaccaaaaaaacagatgctctaaagtctctgaatctgccccagacaaaaataacaagcatcatctgctatatgtttgaatttgttcagttctttcttttgttcttactgatcctatacaaccatccgtattaggaagctatgtcttggcatgttaagtccaatccatacaacttggctccattgaacattctcttattcaaggtagaatatttttatatcccttttgagattttgatattttcc

SEQ ID NO: 230843 - DNA, 5240 bp, Cannabis indica
acagtttacctgctgaggagcactgtgtttcgatttattaatgtctatatatctgatctgagcctttttttttatttaattagtgaacaggatagtttttacctaactatccttttgttttgggatgaattttgccagatttgcgtgcaaattcccaacctgtaatgcgatatgttgtggatatttgttacaatagaatcataactgtggattaaccaaataatagtctgtttttctcaaaaatgtggtatcttagaatagtgaaatttctacttaccctttctctctcttttctctcactttccagagaaaattgactcggaggcttccttgttattcatctgtcctcatggcttcaggtttgtcatattttatgagctaagctttctgtctagtactctatttgattgattgactcatacattttgctgcaatttgtatttttctttattcataatatcttgaattatggttgatattactattttgtcatacaatatgtttttgaagaatttgttttacaagtttgaatgacatgtttaggcttagcttgacttgcacatttatttaatttatttttttcctttattcttattattaatttttatgaaaaagattgcactatttagagttggggattttgatatatgttaatgtttgtctcttgcagattatgcctcatctagtttgactgaacttgaatcggctttgaagttgaagaatgttcagtacttcgtcactaaaagaccgtggcttggtaggatcctacctccttatatatactgtgtttttgttttagtttccctcttattatttttttaatatggtaactcttaatgtgacaatttggctagattaagtcttcgtatattggtttttattgtttcaggttttatgtttcagatctttatggaatcaatgttagacccgttgctccttttggaagtgtgagtaggaaaccatatgttgatccagcgctgatacaccgtagcttacccgatgagcttctctatgaggtatggcattttagaaactatttttttggtttgctactaagttgaaatgcaacactttttcatctacattacttattagggagtgactggacaaaggtaaggaaattttgtattgaggtaggcattttatgaattgatgtgttagttatgggaaggaacaaatgggagtagagaggagaggggtatgcataaatccaatcactaaatgcctaaggattgtcactgttttgcctttttcattaagaacccttatatcatttcttcttcacttgttttgttactgctatattttttcttgcacaatttagattgtgcataaaagggtgcattagttggtatatagccatacggactggtggtatgacctatatacgaatggaagctcatgttgaatttatggaaggactatagaaatctattcagggtgatatctcatcggatcaagagaggcagaaagtggctgttactcaagaaggtttagagggtgtcactcggagatgttttcaagtggtagatgagcaagatctgatcaagaactggttggaattttgcattatgttgttcaactgttgttgtaaaaccgattatccatttaatcaattgatggctctccgttataaaagtttggtgatggagttctggacttggttcaatcagattgcaacacaaatgtttggtattccgaaaaccttcctccgtgatatattctttgggaatctgccagtggagatggtgattaaggtgcgggcatagacctgcgaccctcattaatgttttggccgaggtgttgctagggactacatattgatctccctgtttttccatcggagatgatagggactacagtgacaaatcatggcttctaactagcagagtatataccaagaagtcagcaacacaactcagtgatcgaaccccctgtttcagagatagttttgccaccgggaaggctgccgattgcagtgagcaagaactcgtcattgccaatcaccgaggaaattgcattcgggtttattttatcgaagacagttactgtagcaatcgagaaagaaatcgttaatatgttacgtgaagccggaaggcccagtcccttcacttatgtcatgtccaagcccgacctacataagcacaatagttaacctaattaatcatagtatagggttggacccattgggtcatgttgttttctcttagagggaggtaggaagtcaatttttactagcccaagatcgacgaagaccaccatggacaactggctctggagagttttacagtgccggagattgagtcaatctgccaattttggggatgaatacacaaacaaccagaccaaacaatacacaaacaaccaaatattacagtaactcgcaggtgttcgagagacctgcactctctaagagctaagctcaacaaaatacaattctggcatcccttttcctagtactcaactcactacatatccccttcccataaacattccttaccacatcattagcaacctgcccagattacccctgctataatctgattactcttttccgcccctcctagcatatgtaaaacgtatcacaggtctatatactgctcatgtgttccattgatgacttttatttataattgcttgtgaaaattattgacatgtcacatgtgctagggcaggattgtgctttctatactattttatattattagagtattttttttttttttgtaaaaagagaaaaaggtcacttgtcttagaccgaccccctctcaaatttattgagaagaaactgtaaattctcttgaaaagcattgttgttttttctcttcctattttgaaagtatccaagagggactcaaacgtcagtccttgtgggagcaaaccatatgacttaaaagtgtacttttacttagaaatgatctaaatcttttttgatgatcttctgatgaagtgattatttgtgacaagttcttatggcacataactttgttcatttgcaggtctttgcacgaatgacaccatatgacttgggaagggcttcttgtgtgtgccgaaaatggcggtatacaattcgcaatcctatgttttggcgcaatgcatgcttaaaggcctggcaggtaactggtactgcttctgttttgagcctatagtttgtcaattgtctgttgtctattttaaagctgggattcattgttttgaagctttctggagtggtcgaaaactataaaattttgcagtcaaagtatgagagttcatggagaagaatgtggcttttgagaccaagggctcgtactgatggtaggagatgccttaattttaattgttgtttgtatctttctgattttattttcactttttgtgctctccaattcatatggtttgtgtttgttaacgtaactctgattcggtgttaccatccgaattcccgttatcgtatttttgactgtttggatttggagagatgttcatgtgaaatttttttggcatgtcaggactttatgtaagcaggaacacttacattcgtgctggagttgcagaatggaaagtcactaatcctgttcatgtggtatgctgttattttgttgttacttcaatttgtgtgatgagccaatcactttctattgattgaatttcatattatgctcttcatctctaaagcctaagcttaggtatctgaaacatatcattaaggttaaattaaagggtaaatagcacttggggttcccgtcatttttttttgtaggggtttccatcccaaatcagtaggaaaaccattttattcatttgtgcatcactgcatcttcaatgttctccactattgaaaaaacttgcatggtccattctagatttaaattatatgttttagttccttgacctgtcttagttcctttggttgttcaggtctgctattaccgttacatcagattctttgcttctggccgattcctgtacaaggttaaatttgttccaactcttgtggaaggtttttttaaaggtgaaatatgattgattatgtttttgtatctgaattactttttctttcttccattaaatctgctgttgcagaattcatctcagaagatcaaagatgtggcaaaatacatgaactttcgtgcagccaaggctgaagctgttttcagtggccattacactttgtcagacgataaggtcagattgttcttctccagaccttagttgcattttccttatgatgaaaatgttgatttcttcatattttattactccattgtagattgaagctgcagttttgtacccaggcacacgccctacagtatggaggatccgattaaggtatgggcatactgtttggatgtaaagcttaaatggccctgcagtgttatttgattggtgataattattcttgttcgggcaatgatttatattttgaacaattcttaacaacaataattttagggcgtactgagataagcccacaattacccacaattagcaccaaaaacattagacagtaaccagtaaaagcacattagtagaaagcttaaaccattatagtcatgctctagattgtatttctcaaaaagaaaagtaataacagaaagaaaggataggggtcctttcaggccttgatgtagagagagaaatctcaattcttacatgacattcccactagcattagctgccactatatccctttcctaaccaactcaacaattaccaaaagaccccccacacgcatcactgcccttacatgtcaatatccttattacccttagcccttctagcgtaagtaaatctgataggagttctaacactggacttttagtttgtttcttttaattatgtttctgcctaaactaaactattagtaagtagtctggagagaggataagcatcgcatcgtattttgttggtttttcagtcaagaaaattccttaataggaagaaattcctgtcatattgattgatacattacaaagaatcttaagtagggaaaaatacttgttattattcccattgatgttcaatttttttccggccttagtgaattcctcaaatcaagggctctttcctaggaaagcttagtcattctcggaaatcatgaattacaaaattcggtatttttccttcgtctttgaatgaattatgtctagatatatgtatatgtgttgagataattgccctgtaatcacaacaccaaacccaacacaataggaaattaaaaataaacaaagctggaactgagaaaccagcaatggatt

SEQ ID NO: 230844 - DNA, 606 bp, Cannabis indica
ccagagtctgctgatggggttggggatgaagaaacaatgggtttaacaatatggaggcttccgggtggtggttttgctgttgggaggtttacaggtggtaggcgagccgctgagcgtgagcttcctatcgttttcactgaaatggatggtggttttaataccactggtgctccaataaggatcgcatttcagtctagtggaagtatttcaagggagaggggccgagtgggacgagcatttcacaattttttctcattttttgggaggctcagaaggtcatccactcggtctggtgctgaaccgaatctaactcgaaggagtccttctagtaccattttcagtagagcaaggcgcagccaacgctggacattagatgatagccgatgaggagtgttttagttcctcttttccttctttggaaccaagtatagaaggggggagtggattctttacttctcaatttgtaggttcactttcttactaagattgttgtacttgtagtgtatttcttaaagttataatttttgttgtatattgtaattgtgttgtttatttgctgtacatagcacacatgactacgaactgaagaatctttccaatgtaatt

SEQ ID NO: 230845 - DNA, 1290 bp, Cannabis indica
aatttttttaagatttactaaaataataatatattgaatctttttatttttattttgaggggatacgatttgatagttgtcaaagtttaaggggtaaaattattaattaacaaagatatgtcaacgtttaaacgaaataataaaacataacttaacagaaggattaaatttctgaaatttaaaagttcaggaggaattcttaacaagctgtatattttagggagcaaaatcaatattatcgaaagtttaaggggctaattattctttttttttaaaaaaaaaaaatatgacaaatcttatgtagatgaaagagaaaaaaaatattttatgttaatgtgtattgtttaccgagtttttcggtaacctaatatttataaagcttaagacagcaatgaaggcgtaaatagcaagattatagacaatagatttttacgtggttcgggtgttaattatccttagtccacgagtccatttcattaagctctttgtccgatgactgtttatacaaatacaaaaaggatggacttttactcctatccactgtgtttctcttgaagaaaaggaagcttagtaggaatattctggagttaataatggggttacagtattgtgttttacaaagaatcgatcttcagtttcaaggtgaagagccaaagaaggagaaaggaagagattagtcttggaatcccccaccttgtgtgtcttcgggggtatttataggccgatcccctctcatgggccacttttgatggatcttcataaggatgaacccccaccgttagattggtaggtagcatattttccatgtgaacttttactgatgtcggattgtactggctgtactagcagtgctttggacgcgtgtcattccagggtcgttcttatttgaattacccttattcttagtcgttggatcgtttgatacagtacacaaggacaggcgtgctctgcatggtagcgtggcatgggagacaacatctgacatcgtacaagcaaaagcctcaccattgggcccgtagcctgacatgcgtgggctgagcttccgcaggtcaatggcgtaccccgaactggtgcgtctcggtggagggcccgtatccttcgcgggagcatagggtcccatcttctataatggaaagagttgttggctcacgggcatctctctcgtggcccgggaagatttctctcgtggaggttagttccgtgaagttggggcctctctcctccgggagcatggagcaaggcactttggcagcttaatgactccttcacctttcccgattgattcccacg

SEQ ID NO: 230846 - DNA, 929 bp, Cannabis indica
attttaaaagagaaaaaaaatttagacccttaagctaggtggacactcagcacagacctagctatgccacgactataaagcattgttattaagtataataatacttactatttagtattattatgagatgacactttaagaatgattagcgatattttataaaatttatcttattaaattatgtgagatattataatatttaattgtaataatagtgatataataatttaaattgtattcaacactactaatatttttttaatatttctcaaaaataataaataaaaaaatttagcacttgctaaaaagatttaattattgataaaaaagcttataatgtgaacgcaatcaacaggttgattattttaacaattaataatgttcattaataccaacaatatttagctttaaaaatacgaaaagttctcgtgatataataaagtttacaataaatatatatttctaaatatattataggcctagctatagacaactaaatatctggatccaaaaaccacatgtttgtttaagaagaagaataataatactattgttatatagttgcgtgttgtagccaaataatgtctttttactagaaatttgtgtagtaattaagttgaagtcctgatgtagtttaatatcaagcattgtcttaaggtaccagtgtctaatatagttagggcttgtttggtatgccatataaaagtcgtattgtattaaataataaataacactatgttttgattaagtaatgtattgtattaattattacgatcaaattttttaatataatgtatgttgtattatttaatacataataaatgctctgtattaacttgtattatactatttacaaagaatttggggtcaacaccaatctccgacccgaacctgaacttggacccggaccccggaccccaaaccccgga

SEQ ID NO: 230847 - DNA, 781 bp, Cannabis indica
gtcctggtcctggtcctagtcctagttgtgtctacttccatttgagattctgtgttcgagtttgggtttgagtttgggtcggagttcgagtcctggtttgagttagggttcggatctgaatttcagtctaggtccagatcaggctccgggcgtgggttcgcgtctgcggtcttgggctaggtggggtgcgagtcccaagttccaatcccgatcttagtctggattcagttctaagtctaagtccttggttctgatctttgtctcggttcgagtttgggtccgggtgcaggtctagctttgggtctgattctacgtgtgggtttgagtttggttctgactctgtatccgggtttgtgttgaggtctggaccccgatctgggtctaggttcgggttcaggtccaagttgaggtcccgagagcgggtccaagtttttgtttgggacaggatcgcggtcaagatctaggtccgagtccaagttcgtatatggatccctatctaggtccaagttagtgtttgggatcgggtctaatatttaggtccaggtccgggtctcagtgccggtccgggtctcagtcccaaatccaaacatcgagtacgggttttgtccaagccctgggtctagatccggatcccaatctcaggtcgcaatctggttccatttctagtgtcgggtaatgagctgggtcctaggttcaaggtcgggtctaggtcgggtactaggtctcggtccttgttctatttcccagttccgtgtcctgattctgggtccaggtcccggtt

SEQ ID NO: 230848 - DNA, 1470 bp, Cannabis indica
aggtttcaaggtatccagagatggcccggcagttacacatctgatgttcgctgacgatgtaatattattcgggaaagcttcggttaaggaagcaacaagtttccttcggtgtcttgaagattattgctcttggtcgggacaagcggttaactaccataagtcaacagtgtttttctctaaaggagtctcctcggggcttgcgggggagatttcggggattcttaacatgaaaagaatgaagaatgatgcaacctacctaggccttcctctcttcagatccctcaaccgttcaaaagatcttcgattcctggtagacagagccttgcaaagggtaaagagttggaagacaaggcttctctcaaaagcgggaaaaacctgcttgatccaatcggttggatccgcgttggccacttatgttgcggctactgaaccaattccattgaatgtcgcaagacaagttgacaaatgccttcgagatttctggtggggagacagttgtgagaagcgtaaactgcatctacttgcgtgggactccttatgccagccaaaactcagaggagggctgggatttagaagtgttgaaacggtgaataaggctttcatgactaaatgggcttggaaagctttgactgataattccagtacgtggagcaaggtagtacaagctaagtatgtaaagggaagaaacttcctaaatcttgaaaaacaaggaggcgaatcggggatgtggaaagcaatattggactccagggaagtgcttgagaaaggtatttgtagaagaattggaaatggagaatcaacttctatttggttcgatccttgggttcctgctgtgaaccgaacccccattcctcagaaggatgtctcatatggggtggcatgggtccatcaattcttacgtccaaataactcgtggaatgtttgtatggtgaaagagtggttccaaagagaagatgctcaaactatcttgaatattgatcttcccaatgacaagattgacgattcttggatgtggttgggtgaacataatgggaatttctctattaaatctgcttatcggatgattaagggccatgatcctaattatgaggaaggtgtgtggaaactcatttggaggtctccaattcactctaggctgaagtttttatggtggcaggtttatagggatattcttcccacaaaaggtagactggcaactattctgcaggatattcaagttacttgtcctctgtgtaaggaagccgctgagactaccttccatcttttctggacctgtagcttcgccaaagctatttggtttagtattgggtgggggatccgtactgagaattacagaatgcaggattggaagatgtggtttgactggtttagaaatgaccataatcgtccaacgtatgtcccatttatggactggatggtcacaaccttatgcatttttgaagtgatttggagcgagagaaatagacgggt

SEQ ID NO: 230849 - DNA, 1072 bp, Cannabis indica
aaaaaatcatttatcaactttattaacaagaaaattattcaagattatattaaaaaatttaaaaaaaacatatctcgactcttaataacacgatcagcaacaaaataagatactcgtgttagaaaataaaaataaacaaagacatcatgcaatcatctattaacatcttacaatcaaatataacacatcaattaagacaacatagagagtggactttggatcgatgacacaactgtaaagctatcagtttcaacaaccactcctaccaagaattcttttttatccagctcaaggcttctcgtacgaccaaagcctctgcaatttcggtagccacctgacaaaacaagaaatcgcttccaccattgcaccatcaacatttctagcaacacaaacgaagctataagttgtagcactagaaataattgtttttcaagccattctcactggtttagtccactgtgtgtggccatcaacaacagtcaagaacactatcttgagctcgagaccattgatcaagtgtacactgagccaagatggagaccccaacaacactctttttaggccaaaccagttcattcctagtcttctaaattcccttacaagtcattgcaagtaacttcctcttctccccatctaacaaatgcaatagattatcaaccaaaggaataatcaaccaaataatgataaatggttggcctacttgtcttgcacaatggaaaaatagaattaacactaacatgccttgatctcaattgagtctttaagggaacatatttttcaaactttgttctgaaaatcagaactatcaatttccatctctacctctttactctcttgcatatgtctatacgtactcttaactagaaaatggcatgacttctctcaaacccaaaaccacacaatcactactttgacttgaggataaggtatttattgagtttttcgaaaatcgattataaaataaatagagtttaagaaataaacaaaattaaaaaagaaaaaacttaagatttttacgtagttgtagtgttaatgagtcttagtttatcagtcaatattataagtttgaaag

SEQ ID NO: 230850 - DNA, 965 bp, Cannabis indica
tcggtcctagttccgttgccctggtcattatcttgattctgggtcaaggtcccaattctggtctgggattgggtcccagtctaggttcgagtttgagtcctagtctcgattcgagcttgggtctttgtcttgattttatctgggttgggttcgggtttaggtcctagtcctagtactagttcggttccagttctagttgcaattctgagttagagtttggattcaagttcatttcggggtttgagtcttggtctgagtttgggttcgggttcagaatttggtctaggtctggatcaagctccgggtgtgggttcgcgtcccggtccgggtctgggtccgagtcccaagttccattctctatctaagtttgggttcagttctgggtctaagtccttggttccgatcctagtctgggttcgagttcaggtccgggtctaggtctaggtttgggtgtgattctaagtctgtgtctgagttcaggtcccgagtaaaggtccgattttgggtttgggtccgggttcgggtttgatcctgcttcgtgtctaggttcctatgctagtttgagtccggggtaggtttcgggtctgggattgggtctgacttcagattctcgggtccaggtcaagtcctagttcaggttggagtccgggattccaatttgggtctgggttctggggcctaggtccctggtctaggtcccccatctatgtctggttcctaggtcttggtcttggtctaggttcaagtttgggtcccgaatcttggttcgagttcgggtccgaattcgggttcaggtccaagtttcattcccagtcttggtccgggttcgggttcgacttcgggtcccagtcccagtgtgcgtctgatttttgggtcccatgtctaagtctggcagttcctgggtgtggtctcagttttttggtctatggtttggctccaggtcctggtattggtgtaggtcgcaa

SEQ ID NO: 230851 - DNA, 879 bp, Cannabis indica
ttaatgagttatttcataaaaagtaattgcatcaatcctattccttttatcttgacatgtgtcccccacttagatggtagcctaatttcaagtataacacttacaaatctaatcaaaaattgaaaaccttcattgtaaattttcttttctcccaacaatattttttttcatttgatgcctccttgttcacacaattaaagttataattatatcaaatttatttgtggctattattgaattttttttctcgatatgatgttttttataacaagagaacttttcaacataatatacttggatcataactctctatacacatacatcatttctaaacgtaattctcaaaaaaaattctcatcccacttacatcatatttttcattagtacacaacaacctatgtttatggtgcaaaatagggcaatgataatttatttgagcgcatgactcataatcaaggataaatattcattttgtttttaacaaagaataaaaattagaaaaattaggctcaaaataggacaacaaaggataatgtattaaggttagctttttggctcaaacgattcaaagaaaattgccttaatcatatctacacaacaaagatttaggattttgcctcaataaattaatcacacaagttctagttatctcaatattaaccaaatcaaaccaagtctacataagcacataaaactacaatatgtatagaacaagtaaaacatcacataattcatacctcaatatcgaaagcaagcctaaaaggttaagcacacaatccaaaagtttgttacacatactaaataatattaaagagtttagcataagttcatcatcgaatcccataggtcacaagtcaattttaatacagtcatccaaca

SEQ ID NO: 230852 - DNA, 1919 bp, Cannabis indica
aaccttggacctacctcaaccaagctatcctcatggacatccctacctcggtggaagtcctcaacggggatagcttgctcaaaatccctctttgggtgcaagttttcaataccccgttccttaaacgaacggagcaattggcacaacttgtttcggctcccctcggtcacctgctcgagatttaccgaccctcccttcgcgaaacatggggcccctatttcagaattagagtcatgtttgatgtggccaatccgcttccgcggggtgtgcctatccatttcaccggcataaacaaagttgtttggctcgaactaaagtacgagaaccttcccgacatttgttttttctgcggccgcatggggcacagttacaataagggatgtgtggattacatgaaagcttgcgacgaagctccgttccccccggagctcaggtatgatatcaaaaccattgtgggtaaagttaaggtttccactaacactatgttgtgctctgaacagcttgcttttgccaatcccccggtagctgtgttcatgacaaacaaccctgcaagtacggtctgtgtcggcccccccgaaaccatacctccatttcccacttataacgctcctgacaaagccatcactcacggccaaacccagcaagttggcctttacaaatcgggacctttaccccctgcccgagaccatgagcaatggaaccaagttgacttacaaacccgcgccccaatcccaaaccaacccgacaccagatctccctcctacacagcccttctcaatgctaccatgagcaacactagtgccctcaaagctccccaagcctccaccccaagccaaactaacacatcccaaaactcaagcagttccaaatccaccaactcgcagttttgtcaagtccccttgcccgaacacatccctctccttgacaccagcaagcggctcgaagcaatgaacctcacctaccaaccgggtgctgtttttcctgtggactcaaaagcctcgaggaagagaaacaaacccgactcaaaggacaagttcaaaagacaagccgaaatggtgaatggagagctccgccaacaaatcaaacgctctcgctcggacaaatcacaagccacgggaaactcctcaggaagcgcaggccttgcccctgagcaggcctgcctgtcgccatgaagattgtgagctggaatgcgcgtggaattgggagtgagcgtgcattccgtaacctctcccgtttagtatctgtctgtaaacccgatattttgtttattatggaatctaggcttactaaacatgctgttgatactcttaggcttaagcttcattttgattcgggtttggaggtccctagaataggtagaagtgggggccttattttgttatggacaaatgatgtaatcgttaacttgctttcgcaatctataagtcattttgattgttatgtctcttgttcctcgcaaagcaatactttccacttaacctgtttttatggctctcctatagagtcgaatagacctcaaacctggaaaattcttgatcgaatcggcagaaacaaccctattgacccgtggcttatcatcggggattttaatgccttcttgttttcaaatgacaaacaagggggtaaccctgacagaggaccttcaattgacttcaggcgatttcttgaccttttcaatctcacccccctcgaccctaaaggcccccctctcacgtggaacaataatgtggctgccccgagaaacatccaggagcgaattgactgggggatcgtaaacaatgcctggatcaacaatttccctaatgctctcctctcccatcttggctttttcggctcggaccatcgtgccttagagttggctacctcaaacccccacatcacctctcagagggctaataacaagcggtttctctttgaaa

SEQ ID NO: 230853 - DNA, 1526 bp, Cannabis indica
agagagagagagaggaaatgctgattaggattccaaataattgtgagaagaagaagaagaaaaataaaatatatattttttattattgttttatttttataatttttaaattaattttttataatatttaaataattaatattacatgtatcactaaaaattcaccacatgtacatttgtgtacacgtgggcaatcaaatgtggtatttaacagagatttttagatggaagtgtgaagagcaaaacgaaacttgggttcagtatgttttaccgtcaaaatttcaatttcgtggttaagtgttaaaaatgtaaaattcaagtggttttgccgtcaatatcctaattaaaaaaaataaaattattaccaaacgccaccttaattagtttaattaagttttgaaaatttgattaatgtatctaactgaatattattactatctataaaatatgagacatggtaagtatatatgaatatatattcaaaaataagttagttatatgagtggaagacttactaaactcatcttaattacactaattatattttcattaatgtttttgcctaactcaccatcatcgtacatacaaggtaaaagtacagaagttttcatcacaaaaataaatattaatattttttttttcatatatagcaaaaatgcagtgcatgcacaagaaatatcacttttaccagcatagttcgctattgcactggtaaacgcattttgcaaactgcgctggcaaaaaggtcaaagttttaccagcatacatttgcagtgattaaaatctaacttttactagcgcgtttacgcgctattaaaagtcatttttaccagcgcttttcattttatgctggaaaaagttccaataccaacattgatttgccaaccccctttaatcaacacatcataagtaaattctatttagtgcttcttataattctaaaccaaaatcaaaatcaagtacttgttaccccatacaatgtaaggtgattaattttcttttatgtatatattttactatgtatattttcaaccaatcactttttaatattctataaataataaaattatttactatattattatatcattaaaaaaataaaagaaacgagccatttgaccggtagtattcgtatttcgttaaataacaatttaaactctgtatttattaaatagattgaattgatacactgagtgttcaattctaaataatttttcaatatgattaaataatccaaagttcttattttgataatattgaaaatcactgttgaaaaattgaggttatgcagagagagagcctcatacaagtcgattaaataagttggagaaagacatggaaaagatgctaattggagaggaaactctttagctcaatttgagctaattgatacaatacaaagacttgaaatatcttatcgttttgagaatgaaattatttctattttgaaagaaaaattcaccaataataataacaaccctaaccttttagttttttttttggagattctaacaaccctaacctta

SEQ ID NO: 230854 - DNA, 762 bp, Cannabis indica
aagctgatttcattaccacaaaacaatacctgtacactcaaagagcaccctcatataaaaaaaagaggatctcaatcaagctatttacaacaccatttacaaggaatcaaaccagattttatccatattggacactttctttggccatatacaagttattctactctttgttacactttggacttgctgaaaaatcacattacaagagccctctttaccttcccacagtttcccattacggcagcaccaaacttggtaaattaaagcagcaaacgcagcagcaaaaactgctcttttgaacttgctgcacttagttttaccaagccaaatcacaattctatccactgttttggcacttgtccgccagcccaaccattgcttgaccaactcaaaacactctctagtaaaagagcaagcaaaaaagagatgttctacactctcttcttcactgttattacacaacacacagccagaatcaatgtgaggattgtatctctttactcggtctttagtcttcaatctctgcaaaatggttagccaaaagatgaagctatgcttgggacaattaagacggctccaaaccactgatggccaatgtttcttctcacctgcaggcacaagtttatgataaccagttgctattgtgtacctattacagcagtcttctctttccttggcatcaaaaagctccaagactttacccttaattgcaactagttttctccaataccaactatcatttgcactagcattgtattgcca

SEQ ID NO: 230855 - DNA, 1563 bp, Cannabis indica
tagtaactcaaaatctaatccactccctaaaaatgcaaattggatcaattattttgaatttgttactttttaatattaaataatttaacatttattaattttttcacatgactaacaacaaaataaaataaattattatttgttcaaacaaagaaaaaataaattattgttgttttatgtcttcaacaaattaaaataaataaaacaaataaaagtaaattcaaagcaagaagaaaaaaattgtacgtttaaaaaaatgtttaagtagatggcaaagaaacggtcttcaagctcctgagcggttctgaattcttcctcacccattcttccatctaatgtttgtcaattttgacggcttgcttcacttcatccgccacaatttcagcaatggcctcctttacattgtctagatcggttctcacattgtctgagataacatcattttgtagactcaattaattgatatatttaataaatcaattaaaattcgaaaataggtcttatttgagaatttttactaaatttgggcaattttgagaagaaaagagaaataagagtttatttgttaattggttgttattgaatcagatagcttactctttattcaagctattcgtagtgattaagtgatgagttccaattttagtttaattattcatcattatcgcattttactttcttctatgtttaatgttagattatcttttgtaagacgatcaacagatcgagctgcacattttattgctaggaattcttgatagtactcttatcgtagcattttctagcataatgttcctgatgaacttagtactattttgtacttggaatgctatacttcatgaagttgatatttcaagataaaaaaaattaaaattgatatttaaataattagatgagataattcgtaaaataggaagggaaatttaattttatatacatacattaattgaaataaagtagcaaaaatataactctataacgtttaagtggaattcgaccttatagtgaatttaagcccaagttttctattttaagcccatctcatctaaacctagccctaagtgatggctatataaaggaagtgatgagagagagtttggtaatgttattctaacctaattattctagatctgacaagaaagctctcttcttcttcttctctttctgctatttttgaaaatcactatgtctatttctctttcaaaatgtgttcaaaggtgagttgagtatcagtccacactattcaaggtgatactcagacctttgtggaagactatgaagaactgtcatttttcgggttaaggaaagagaatccaagtttagtacttgttgttactctacaacagagtactgaatggaaagagacattatattctgttgcaatcaatacaaggtttcttatactttacatgtttatttattgttttaggattattcgtatttaggatgatagattatagttgcataatcaacatacatgattagtaaattaagattcttgtaaaataagtttcaacaagaagccttaaaaaaatatgcctaatcaacagatcaccatttgtg

SEQ ID NO: 230856 - DNA, 2058 bp, Cannabis indica
aatcacgtaatacgcctatgttagttagggtgttacaataacaatataaaatctaattactcatccaaactaaatgaaaatactaattagttcgattggatgttggatgtattggatttttagacaccacatccaccatctgatccgatccaattggatatttaaaaataacatccaatccgatctgatcacaattagatatccaatgtttggcggtcggttgtaattggatcggtcggttctcattggattggatcgatttatgctcacccctaggtatcagagccacaattacattgatcttgaattcacacgacatacacaccatccctgcaaaggatcaacttgtaatcaagtatgtatgttttatttgtgttatgtcttatatgttaagtttggttaatttcaatctagtaattattttgggttgtacagagttaataataaatcaaaacgtaggtaagacaattaagggcttgagacgcttgtcggcatctaacgagagaagtaaacttcggtgaatagtagagaatatggataaaattaatcaaggcatgggggaaattatgaggagagagcttgtgttgttaatggcacacgagaaatatatagttatgtcacactcacttaggtctgaggaagcaagagctcacctagatcgaatatggagacaagtgaacgaaatcggttatatttcagaacataacaaggataaagagtcaattgagagattcctcaacactttctttgtcatggatgtgcgaatgaatgagtaaggtgtgaaaaccttgctcaaccataaactggggacagaatatcatgactactacattgccaacatcctagagacaacagttggcatttacaaggatgcaaatttttttgattatgtgccaatttcaatagacatcttggaggatggttctaatgtggaagattcagatgagcctgaagaagaattacaactaccggtaaatcctgaagacaatctagaagaagagttagaagaggatccagaagaagaggacgaatagacgttttgcttggattagtctttagctttagattttattttagttagctagaagtttaaggtatggttatttgaaacaattaatcgattcttcggagttagagttttagtataactcaaataattttcttattattgttatttttttataaatgaatgaagattatttttacatggtgaattgttgcttgatgatttacgtttttaaagtttatataattttagtgtatagatatttcctttttgtgcgggatacatctttggttattttcttacttctaccatctcctttcttttgaagaacaagacgaaggatttgatggaaaacagtgaacctagaagattaacctggttgaatgaaagagttgttgtaagagaccgagctggaggtcgggggcaaggaggtgctcgcgattgaggtaggggaaaccaatacgtccctgctgaggcagtgatccaggagaatgaaaatgcccctgtaaatggacaacaaccaggtcaaggtgggggcaaccacgaagtccctgctgaggtagttgctcaagaacaacaaaacgcccctgtagtggtgccaccacaacaagatttggtgcaaaaagttgctcgtctcagggaggaacttaggaagtgagatgaagaacttcacaatcgccgcaaataaccaatcaaggacaacattgatttttgccggtacaatacatgccagtgccagagggttggtgggaaccaatatatgaaaggttccacaagcaacacccaccaaattttgaagggggctcaaatggaagctgaggactggttaagaacaatggaaggtattgtcgagtacatacggctcgataacagagatagtgtagcttgtgttgctagtttattgaagaagtatgcccgcatctggtgggacattattaaacaaacacaatgtggccgtaatgacctgggctgactttgtgcaagtttttagcaaaaaatactacagtgaagcaatacgctcaactagagttaatgagttcatgaacctgagg

SEQ ID NO: 230857 - DNA, 1769 bp, Cannabis indica
atctagaacacttagtgaaattaagttcctagccaagttaggaacatatcttacttcacttagtgttctgaccattccatcatacatcttaaagttaatagatccagatccttgaatgtcacaggtttggttgtttccaagtataactcttccaccatttgatttcctaaaatcaaacataaaattcttgttgttagtcatgtggaaagtgcaaccagagtcaaggatccattcatctttgatggatgatccaacttggtacacttcaccactttcatatccatcactcaaatttgcatcatgcatatcaggtttatatagtgtttgagtttttagagtctccctgtccatgagatttgtgtctgttatttcttttcaagaaataacaatctcttttaaaaagcccaagttttccacagttgtaacaatcattagtttcatcaagatttctagtcttagaatttgatctgcctctttgttgtcctcctgttttgcttgaacctttgttctgatttctacctctgttgttccaaggctttcttggacctggtctgcccctactcaaatttacttcaccatttgagtttcctcctttctctgctctcatctctaaatctttagattttagggcagagatcacttcctctagggttattgatgtccttccatacttaatagcagtcttaacttccctataagattcaggcaaagaatttaggataattatagcctggttatcatcacttagagcctcattttccccagaatttgcaagttcaatatgcatccttaagagttcatccaaattctgatcaagggttttggatgaactcatcttaaaaccaaagatcctttccttcaagaatatcttgttggctaaggatttttgttgaaactgctcttttaatttcttccaaattttggcaggggtttcttctttgtcaatcaacctgataatggcatctgataaattgaatatcatgataccagttgcagtttccaagtattcttcttgttgaatcttggttgtcctttctggccattttatagggtcattaagtactctcaatagcttttgttgagccaatagtgactttatctttctcctccaaatcctgtaatcaccagaaccatcaaatttgtcaatgtctaccattaaattgcccatgtttaataaaatcagataaagataaatataataagaaatttatattaagattaatttgagaaatgttcccagaaatcctttgttaaatatttctttagatcaaggttgagttcttaaaattcttgtttgtgcttcttgatttcttgcttgagcgttcttcctccctgattagtttgaacgttgaatcttccagcttaatcaagctctgataccattgtaggaaattagccaattaccaattttgccctacaccaacaatcaatttaatcagtttaaacaaggtcaatttcgacctttacaatcctgacttttcaaagtcagaagggtcaatacgaccccgtttttccttagacaaaacccaattgatcgagaaccttcccattcactttccctcagccctaggttttgctcgaaaccctagcatagagtttctctccgagaaactcgaagccaaccctcaaacaacccagaaatcccagatcaaacacaaacacaagatcagatccaacacgatctgatctatcctcaaacacacacacaaaaatagtaagaatagggttagaaaacaccagatttttctcgaagttcaccaataaattgg

SEQ ID NO: 230858 - DNA, 1648 bp, Cannabis indica
ttttaatttatttttggattaacttaagaacatatttaaatcatcaagctttcttaaacactaaggtggcgtttggttggaggtaatgaaatggaatggaatggaaaggaaataattttcattctattcctttgtttggttgcattttaaagtattggtggaatggttattccattttaaaaagaaaggaatgaccattccaatgtaacaagaaaaaaaattaatgatttttttataattttttttatgcattttaaattttattccattccattcctattcctattcccattcccattcccattcctattcctatattttcattcctcccaaccaaacacctcctaatatattacattcggtattcacttttaattgacagcattataaactataatatttaaatacacataataataatgtaatgaccagaatatttagttattatcttctaaaatagtctagaattctcgatgtggaaatagtaatttcataaatatgttactttatatagtagtactaaactaatattatttcttttttttcaaattaagtaattttagtttttttttttgccataataataattttggaaaatattagattagttcaaagttgtggtatcattatataattttatttatggacgagatatataagtggaaaatcaagagagtattgattagtttaagtgtttggttgagttgaaaaataataataatatatataaaaaaaaaatggaataagtattatctgtatgggagttatgtgagcaaaatgtgggaattaagttgaattagtccaactagttttatgcgaagagataggaggagcccactatctcatcatgaattattaaagaatgaaactttacacattaagcttttgaagttaaacttaaactcttggcagtcttggtgtgcacgtgtggcactcacatatatgaagtacaaaaattaattaaaaatgtttaaatctttatatcatgtgcttgttgtgacgtgtgcatgagatagtgtagtcatcaaatggttagctacattgatattgataagtaggttatgtggcaagaatggagtcaatttctccatgacatacgaagttaaggaaattagtttccatctgttacgcattaaggttgatactcaagattatgtgcatgaaattttgaaataaactatggaccctttgaatgtttctccaaccgatatcacatgaaggatgagtcttggaggctatgtgtcatcctatgattaatccacttacttattaagtaatttttttaaactttaaccttagttaattagtgtatggtggtatggttaagagtgaagtatagtttagtatttaaggcctataaatagagcctagctaagctagctcatttcatttttcatcactcacaaagaagccaacattgtcaagaaaacacttcctagaccttgttgatacttagactaaaatcacctcaaagctccataaacttttgtcatccttcttttcccttcttctatagccaatcacttattctccaagagccaagacagaacatcaacatcattctctacccatgaccaccaccatcctctcataaatatataaatacatatccttcatcatatcagcatcaccatcaccatcattttac

SEQ ID NO: 230859 - DNA, 909 bp, Cannabis indica
aactaaaatttacataataatctacataaaaattactaaaacaataatatatgaagtaattttgttaaaataaatagaaaaacagttttatagtttttaatttataattaggttacgtaactatgctttgcgcggttgttataataattgatttaaaataaaatagtttaattatgacacagttgttataataattgatttaaaaaaatagtttaattgtgattatttaaatttaaagtattttatattgttagtataaaaaaaaaaagtatgctttatatagttgctattaattttattaataaatgctatgataaaaacaatattatgatttgttgtttaataattattttttttattttaaataaataattatttttagtaattatatatttctttgaatatacataaaatatatatgagaaatcactaatataagataagtttgtacttcatgattttatacataacatataatttaaataatattttgaaatacttctttgtaaataatattttttttatgaaggttctatcttccatctcatcatcatcctttaatataatcaattcttttcttgtagtgattcgagagacattaacatataattgactataagtaaatacttacttagaaaaatataacccagcatgttgaagagattgtccttgacttttatttattatcatagcaaaatatggtgctaaaagaagttgtcgtttattaagcttgaatagtcatttcgattcgttgggagacatgataattttttggaattgtgacattttcatcgatatttgtttcagaaataatatcaactctaatgaaccatttttcaagatgtgtaacaatcaatcttgcgtcattacataaattttctgtttgatttatatttctaaggagcatta

SEQ ID NO: 230860 - DNA, 1057 bp, Cannabis indica
gtaagggcaaggctaacgctgagcagctgcgagagcgagtagatggagattgtacatgtcggggtggttaggcctagagtgtacggtctttgggacatcagggtttatatccaggtagatcgtaactgatttcggttcaatttatggtgatgacgccagctcgcagatcactgacgatagggaagacacctctttctacatcaaggaaagcagctcagagaacactaacaccaaaggaaatagtcgtagctccatcgactaatactagcaccagtcaatacttcacctgtaatatcctaagattaagaaaatagattaccgaaccctaacaagtttcgtaattatgatacaagaagggtaaaattatgaatttaatttaattgcatgcttatagactatattgttatgtagtatacttttattttccttttgcaggtgttttttgacaagtcggcccagataggggtgagcatggattggaaatgggccgactaacccgaccaacactacccaaaatgggccgaaacatggtcacatttagtgggccgaacctcacatgggttgaaaagagcccaacccgcaccaaatgggttgataatcgggctgatggtttttcaacccaatcaacccaaacttggccgagcagcccaacccaactaaaaataattttaaaaaaataatatgtatagtatttttgaaatgcaaaccctaaacctaatacaacaacataaatccttcctctctctccaataacaaacccagccgtcactctcactcagccttctttttttttttatttttggaaaaaaaaactcgaacctccaaagctctcttctctctcactcagtcactctcacactcatctccttgcccttttgttgtgcctcccatccactcatccaggctcctgctccaccagtgttctcccaccctagctgcaccaaaaccaccgttcagatctccatccacgccagccatccacacctggaatcaccatcgtccaactctccacacgccagccgcaccaactaagttttcaacttgtaagatttttttc

SEQ ID NO: 230861 - DNA, 2102 bp, Cannabis indica
tgggacatacaagtggaaattaatcacccaagtctaattttcaaatatgaaattaccaccactttagtcacttttagcttcttatttttagtttatttagcttaaaaagttagttctcaagtttagaatcaaggctataaatttttctcgtgaattaatgtgtgactttattttatttttatttgaaattcttggaattacttttagttgatttaacattatttagtaaaaagtccctgtggagacgaactttggttactgatcattgtattacttgtttgtgattgtgtacacttgcacaattataaagcaatataattttcacaataattttgatcatacaacttggcttgcaattcttccttccatataatcttaccaagtcctaacaaattaagacattatgtgcaatgaatctcccatgaacaaagccaccttagttatctgcaatcagatcaggcaatatagttctcaatctattacaaatcaccttggtggcaatcttgtacagcacattacaacaagatattggtctgaaatcagcaacagtttttggacaagtcgacttggggataagagtgatagtggtggtattgatctcttttaagattttccctgagttcaggaaagaaaggacagcaacttccacttcagaacccactagattccaattatcctggaaaaagcactcccaaatccatctggacctggggacttcaaaccaggaatggagaaaagagcctccttcacttccttgggagtatactcagcattcagaatgcctctatgaatctcattaatcttaggaccaagatcaacaacacactgattgactttcctcctttgtgccatggaattccccaacaatccagtataataatcaagaaaggcttcctgcaccccatccaaactatcacaccagatgccattcccatcttcaatggaaagaattctattatgaactcttctaacttttagagatgcatgaaacaaagctaaattttcatccccatatttcatccatgccatcttagctttttgtgaaagaaaaagaacataggccttgtgaacctcagaatacctcctgcaagcttcctgttctgctagcattttttcctcattaagaggatctgtactcaactgtttccgagcttcttataatgcctctttcgaaattttttcagctttatgaatctctgaaaatccttccctatttatgtctttgagcacctgttttagccttcttaacttggtgactattcgaaacattttggatccctctgccaactgattccaactcccagcaactttatcttcatatccttgtgccattttccacatgttaaagtatctaaagggtttttttccaaggtgcctttccatgtaaatagagacaaggatcggactgtggtcaaaaacaccttcaggcagaaacactgcttcagaatcctcaaaagcctctatccaatctgagttcaccaatgccctatctattttagaaaacaccctgtcatctggtttttgtttattattccaggtataaaaattacctgaaaatttcagatcactcaagccacacagatcagtgcagtccctaaatcgctaacagattactccctactctttttccaaccctctcattagcattaagtatttcattaaaatcccccaatactagccaagcttctctaatattcttacttaatccctccaaatcaatccacatctgttctcttttattttcatcattaaatccatataccaaggtaagttgaaattggccagaatgttgtttgagttgtacacagcagtgcatcaattggcttgaacagaaccgaatgtcaactgtgtaaacacttggttgccaagccaatattattcttcccttatccaaccaagaattattattcgaaaaacaccaacccgagaaaagactagcatacaatttccccgtatttttattctgaaccttcgtttcaaggagactaaccaagccaacccgcttagattgaatcaattgcttgatttcttgatgcttatgttaactgttaataccccttacattccaacaaagcaacctatccattggaagtagagggatc

SEQ ID NO: 230862 - DNA, 760 bp, Cannabis indica
tcactagcccttcgtactctgcctcattgtttgtagctttgaacccatttgattgcttggtcgatcttctcgccttgggtgaggtcagaataagtcctaatctgcttcctcttacattgcttgaaccatctacctgtaattcccatgtgccatttgtctgtccctctataaggtggaaaagttctttttccgcctgcacttgagagttaggtgtaaagtctgcaatgaaattagctaatacttgagattttaaggcagtttatggcttgtaggagatgtcgtattcgctgagctccgctgcccacttggtcagtctgccaaacaactctggtttatgtagtatggtcttgaggggaaaggtaatgcgtactgtgattgggtggcattggaagtatggacgtaatttttgggctgcgtgaatgagtgccaatgctaacttctctagctgactgttcctagtttctacatcaagtaagaagttagagacataataaatcggaagttatttaccttcatcctctcttactaggactgcgctgactaccgcctcagagacggttaggtacataaagagggtttcattgtcttttggcttttacaatagtggagggctagtcaagtatcgctttaatttgcctaacgcttcttcacactcggctgtccatttgaatgtctttaattttctaagtgtgttaaagaaagagtggcatcgctctaaagactttcagatgaatcaacctagcgtagtgattcagcctat

SEQ ID NO: 230863 - DNA, 1438 bp, Cannabis indica
attttctaattaaaattttctggttttctgatgttgttttcaggtggaattttagtgttacaaactgaaactttagccctgttggttggtcttaattgggctcatacgtgtggtcttccaattcatgcaatatatttagattcgttagccttggtgacaactatcaacaacgggaagatgtatttcaacaagttaggagcgttgtttgaagatgttatagttttattgtctatatttttgggggcagttttgtctcatgtgactcgctctaagaatttagtggcctatggcttggcaaagcatgctctgctgttagacgatgaactatcctgattcgaagaggttcaagcgtcaatgacggatgtctgtgtcgtaaattcataagttattctaatcagtttgtcaaataaaaacaaaaatatgaggcaaaaggattgaagccgtaatacatgcgcaacagagcccagcccaaatttggtcatttcaattcatatgagaaaggaatacaataaggaaatttacatttatattttcctttacacttatatatttcataattataattatatgcggtcaacacttatcatgatttgttgatttccttaattatattattaggttttaatgataatatctattaaattcctttttaatttaccatattatagccaatttaattcctttttgactccatgattcatgtacacttctgttcataatatcactgtcgttattcatggataaaccaaaagatttaccctttttttttcaataagcaaatacaaatgtttttttgggtattttttttatttgttacaattcaaaatagtttttttttgtttgcattttttacgaaaattttacacaaaaaccctaataataaataacgaaacaacttaaattgcaaaatccaaatagcaagccacatagaaatcaccggagaaactacctgagtaacccaaactgtaaatttaaaaaaaataaataaaaattaatatataaagtaattcctctatttttttatttttttttgtttacctataataatacactaaataattttggtgtgttatttgaggatgtaattgttttattgtctaaatttttgaggtaattttgtgtcatgtggctcgcaataagaattatatacagctcatggtttaacaaatcatgcccttcgattagacgataaactattttaattcgagaagttctaccgccaattgtgtattgatacatcgttaattcatgaataattttgttcattgcctaaaaacaatagatttgttttttaatttattcatcttaagaaacaaactaatttaagtatgtattgtaagtaccttatagcggcacaaagtacttttttagttgcatcaatataaataaaaatctaaataaaaaaaacaactttagctttttttttttttagttacgt

SEQ ID NO: 230864 - DNA, 1209 bp, Cannabis indica
ttagtagaaaattttggtctcaaatgtttgaagttgggcaacaagtgattttttttttatgtttccatctctggccaaaggttctttgtatatttaactgttttctttttcagttaatatattctttttctaatgttattttttttcttaaccggttaattttttagtggtcttatatgtattttgtttgttcattaacttgtttgtcgttatatctattaatgataatcccatgtgttatggtgacaatgttctcttctgtagatggtgtgagtgaaaaagttacgatagttactacattcagacattggggcctaagatttcactgcgatttgatggaaaaaaatacagtgaggtcttgctaaaaggtgggtcgcatgcagctgcaagttttgttttcgaatgtaatagtcaaactgtcgttttttgttcatttaattttggatatgagattgaagatcgtacgattcgtttagttacaccggggagtccctcatgtgcactcccaaaaggatgtacatttgatatctatgcagatggaccttattgtcattcaaaagagcgtacatcaccgtgttcagaaaaacttttagtaaaggataaaactcaatgcaatcctatgccttggttatatgaccctgcttggcataattaagtagttaatttgatacttaatcccactcacaaaataaagagaactgctaaagggtatcagtggtgcctagtactctccttactttcataccgctattggtgtaatgaaatagcgggtgtcatataacttaagaaaataagttttagggaatatcgctaaccaattatagggtgacacctatagatggtgctgggcactactggtgcctaatagcaatgctccaaaataaaacacaactactcctaactacctaccaaagttattaatttgttgtatgtttgtaataatttatgtgatcactaaatatttagtggttttgtatattatgctttcaaaatttaatcatggcacactccattaatgaataattctctttcccaaactcctttctttagagctatttgctctactatcactagggtataggcaacgactagtaactaatcatagaccttatactatcatcaatatgcaaattgaatttctagggaagtttggatataattcaaaaatcaacataatgatctttgtgttggtttttatgccctaaataa

SEQ ID NO: 230865 - DNA, 908 bp, Cannabis indica
tggtaaaataatttccagcagaaaggtatccaactcatgtgtgcaaacttgacaagatcatttatggtctcaaacaagtaccccgtgcttggaatgacaagctgaaaactactctcttccagtggggatttcatagcagccgatctgatacttctttgttcatacatggccacggctctagtcttgttatcttgcttgtctacgtcgatgatatactcatcacaggcccgaactcatcactaatctctaccatcatagctggtttaaacaaagttttttctttgaaagatctcggacctgttcattacttcttgtgggttgaaatttatagagatagttctggcatgtttctctctcaatcaaagtacataaccgatttgcttgttagactacacatggaaggagccaaagctagtcctaatcccacaagtgcagctgccaaattagccttaaatgatggagaaccgcttgaggacttgactctttatcgcagcacaattggtgctcttcagtatttgtccctcacacggcctgatgttgcctacataataaataaacttagtcagtttttacatgctcctacctctacacactgggaagcatgcaaaagggtgcttagatatcttaaagggactctctctcatgggcttcacatcaaaccgagttcctttctttctatcacagcctactccgatgccgattgggcgagttgcatcgatgataggcgttcgacaggaggctacttagtcttcctaggggacaatttggtgagttggtcagcaaaaaagcaacatgttgttgcaaggtcaagtacagaaagcaagttcagggccctcgcaaatgctgcagcagagattcagtggctcaaatctctcttgtctgaactgtatgtttctatgcctcactgt

SEQ ID NO: 230866 - DNA, 641 bp, Cannabis indica
agggtaccttgtatctcggcattcagtcccttcatgaacgccgattccagcagcggttcagccaccgtgcccagcgacgccgtcaacgcttcaaactgttgccggtattcctgcaccgtggacgtctgctgtagtgccagaaatcgatcgtacgccgatccttcgtgagcaggaaggaatcgccggagaaggagatccttcagctcgccccagctccgaatttcacggcgacggttctcccagcgaaaccaacgaagggccggtccctccaaacacagaatcgcagcctccagttgctcctccgccgtgagtcgctgcaacccgaagtatcgttccgctctatacgtccagtcgtcgggatccgtaccagcaaacaatggcaattcaatattcctcgggcgaaattcagatcgtctacccccatatccgccaacctcctctcgattttgatttcccgatccactagacccgatcggaggttgaacggatctcccaattggactccgcgggccgtctgtaagctccgtcgccattctcgcctgtccgcggaggagcaagtccagcttctcactgataacggcaatgccgcgttcatgagattccaccctctccttcattgaatcccaatccccatgaattgg

SEQ ID NO: 230867 - DNA, 748 bp, Cannabis indica
tggtaaaacatattccaacagaagatagaaccaaagacattttcaccaaattcttctaaactcatgatcttaagaagaatgactatattggtatcaaatacatttaatcaagacttattaaattctagcgtatacttacccaatgtcttatcgccttgaatcagtttcacaaaatcctccatatgagttgtacggatggcaatattgtaaaacttttcttcaaaaaagttcttaaactcttcccaagtcacagtattaaggtcttgagactgacctaccaaatcccaccaggtgtgggcatgctcttaaaaaatgaaagcagcacaattaacccgctcagttccaactactcacatattatccaaaatacgagtaacaatactcattgattgttatgcctttatattatcaataccacccaagaatgttggaggttgcagtttgacaaaccgtttaaaaactgaatctctatgtggttgaagagctgatttaggattagctatcactggggccaaaactggagaattcacttgttctaccagagttgcatgaaccagttgcctaatcgggtgaaactcttcttcttgacgaagtatgatcgcatttcggtaaacatttactgtcaatcggcaagaggattagcattattcatatccagagtaatcctagaattttacggaggtgctggtggtgtcgatgaattcgttggattatcatcctgctctacagactctctctgtgatctagt

SEQ ID NO: 230868 - DNA, 1118 bp, Cannabis indica
atatactaaaaatggaattaacaggaattgttttttttttaattgtaaccgttgaaatgaggctggaattttcaccaaatacattgccaccgacaaccactgacgacattgtcattagtggttgattgacacactgcaaggtcagtgaaccattgacgacaatgtcgtcagtggttgccactggcaatgtattgggtgaaaaaaaaaggatgctcgagcccctaaccccatcaaattactcttattttcattttctcatttttgaaacccttcttctaaaaaaaacaccctatcaccttatcactttcttcatctttttcatctaaaaaaaatatcaaatcccctctccatatcaccataccatcttcttcatcctccatatccaaagaaaactgaaacctaaaatttattgtcggaccttcttcatcgtccgaccctctctaatgtcggactaccactactgatctccaccgcctgagactttgccagaccaccacccccgccatctttaggtagtattattgtttttctcgtacttttctctttaatattaatatatattattatttatttatatatatataattgaggttcaggccaggctgcatctcgtaagtaacgacattttccctcagttatctcttgtagaaaatacctatagcgactagcaacttcatcatgattggtttttgttaaatggtccccaatctttgcatcatttatctcaagtttggattgaggtttttgaattttgggtttgaatgggagggccaattccttaagacattttatttctaagaattctggagaataaattccaaaaccagattgggacattttcgcaaaagaagaaccccaatttctcgaagaaattttttaaaaccagaaacttatgaacaatgataaacctaagtttctctctaattaaaaccctagaccaaaaattaaatcgaaattactaaaaccaagcgaagagaacaatgatgcaattagttataaaaaaatataatatataccgggaaagaaaaaaaatgaataacttactggttagagatggacgtttgcacaaggaggaactctgtaactggggttgtaatgaatgactaaatgaaacctga

SEQ ID NO: 230869 - DNA, 1509 bp, Cannabis indica
agtcgtaacctaaacctagactatgcaatcacatctttgactcatagtgcaactttggtaatttttcctcctcaagaaatagctcaatcaagataaagagcaacatatcaaaagagtggttactttacctatttaaaacattacagtgcataagttttactagcgcattgagggccaatttgttacaaccaagatacaacacatactctgtctccttaaacaaatcatcatatttgttgttgtcattgatcgggggttctttgaaagaatcagtagttctagtagagtcgtcaaactcaggatcccctcttaacatgtctgccaacacatatactatttcttcttcgttgttttctagaagttgaatatcgggctgagaaaaagtctccccgtagaaatactaagggttgtacgaaggttagatcctgctgagaaacaaatgagcccttatagttttaagtgtgtggaaattcacattcaaacaccgcatgcaaatgcatcgagataatccgtcaagatttacatggttcctagcaatcgccacaaactcgtcaatgccactttaaaactcaactgagcgccggttatccttcatccaactttggtcggtaggcatcttcctctataaagtaattaaaaaaaaaaatacaacaagaaaatatgcaagaatcctaatccacattctcactccattactaaaagggtaaagaacatatctcattcatgtttataatatacatacagtataatctatgctcttaatattatttcatttttgtaaaacttttggcagtaccctcctacagttctcataagtaagcaaactaatagtaattttgccaacttacaagaatgtgtaaggagacaacgtacaaaaatttctactcacgaaacaattaaataaataatacatcatattataagtataaaataagccaaaactatctatgcagacaatattttttctgaatataatttggaaaagcgtatttaagagtccatactgactcaacatctccaaacaggtctaaggtatttcgtgcatgtgtaaacataaaaaaaaaaaatatcactatgtaataataggaccctgatcgaactgattttttgtcaaaataaaatttaataataattcgatttatgacaaaactgtttatattttctgtatctgttcatgttaggaattgttttcaagttggttatattaaaaaaaaaagttgtcaaaaattaaactcagtgtcctatttttactattttgaaaaatacagggtccattttgtcatttaaaaaaacaaagagtccaattagtaatttttaaaatgatatttaccctataatttttctatcctatctttggtttataaccaaatagatcaagttaagataaaaaaaatcttttttatgctattttacaatatcttatcttactttacaatattttatacttattttatgctaattgataatattctatactaatttataatatcttatgctatttaaaatgac

SEQ ID NO: 230870 - DNA, 1520 bp, Cannabis indica
gcatcatattttttagacatcatgattgattatgttgattataaatacaaatttattatattattggaataaatttaaagtcaagtttatacatttatgttaatgctatatcaacaaattatttccacgaggtcactcatcctgaaattattccaggtcatccacgcttaactatggaattctttcgtaatgggctaccatagttaagtgtgcttaacttaagaaaatttaaagatcggtgacctcctgagaagttttcccaagaagcatgcgaatgaggacaaagtatgctggaaacactcgtattactttgtagggcagtcatcaatccagaaagcaaccaaaagtgtcgtaccgtgtataagagccattagtttgtgggggaatgcctaatggaggcttgaagtggggacgttacaaatgatatcaaagcattgacccagccaaaagtgtggtcgacgaggacgtcggaccctgtaggggtgattttgatagtcagtagtcccgtgatctgtaaggggaaataccgggtaagttgtgcaatgccacattgcctagggaaggtcaagtgtgatgattttgagactgtgtaggtatgagactacacagttgaagaggatttaaatggattgtttggtactacctatatcaataagtgcgtcttgtttacaggtagcccatcacgaagaaaactccataggttaagtgtccttgacctggagtaatttcaggatgggtgacctcttgagaaatttttccaggaagcatgcaagtgaggacaaagcacgctagaaacactcgtgtttgtttgtagggttagtcatcaatccagaaagcaacaaaaagtgacgtacccgtgtataagaacatttattctgtgggggaaggcccaatggaggcttgaagaagtctttccacaaatgatctttggaggagacttaacgccaaaagagaaaaagtcagaactgagaaaggcaaacctcgcggatatgacttaagaaaccatattaacgatcgcattcgtggaaaagaatcaccagatgctacaagtcaatatttggagcataaaattgaatagttaacaaagcacacgaaaaacatctcctagaagcaaaatggaactgtgtcccactcaaaagagaaggacacgaaaccatgtgtgaaaaggattataggtgttgttgttggaggaatttagacaacactaaaataaataatataataaagatataaactaaagatgtgcgaatactcaaccaagaatggcaagtattcaagagtacacagacgtattggaaatataaggaacacaaggaaatatagtggttcagtcagatcacggtcttcttagtccactgttgcaagagttttctgtcttattcatttcacgttggatcactcctttatatacaaagcaagtgtcctttgattacacagagtttgaattcattatcaatttgtttgtacattgaatataacaattatatcaataaaaatcgtaaatacaataaatgaagaac

SEQ ID NO: 230871 - DNA, 1177 bp, Cannabis indica
gttgcaccagtgtcaataatccaagtagatttagacaagtttagcaacgtaccagaaaattgagaaaccataggagtttcagtgggagcaggtggcatttctagcatcttttgggacagcaatgccattagcttttgacactgcacagaggtaagactagaaaccagatcttgaccactatcagctccttcaccagctttgtcatgatttccagcattgtctccagtgatgtttgcagcactaggtttctgtccatgcgtatttccttgagcacttgcatttcgattggggaactttccatgaagcttgtgccctggaggataaccatgtatgcgaaaacacctggaaaattgtgtgtccagtaattccacaatgtgtacaaagcaagttagatcgatgtgtctgcactgcaccagcaaattgattctgattcgatccagctgcagatccaggtttttcactctccacaggtgcactagacaaattcctttgactctcttcttgtatgacagtcgcataagctttgttaatgtttggaataggatcttgcatcaagatctgagatctgactccaatataggactcatttagaccaactaaaaactcaagaacacgatcttcattctgataatcttgaataatcttcattgctccacaagtacaaactggctgaggtctgtattcctgaattaaatcccatagagacttgagtcgagtgaagtatgttgttatactattcgatccttgaaccagagactgtttggttcgaatagcatcaaaaacacgaggagcatttttctgattaaacctttcttcaagatttgaccaaatcgtagtagcattgtccatgtacatgatgctttctgctatctcattcgaaacagcatgtaatatccaagatatcacaatactgttgcatcgattccatagctcaaattcgtcatcatcttcttcaggagcagggagcttgccattgacgaatttaagcttatttctcgcaatcaaagccacttgcatcgcacgcctccatgaactgaaattctcacatccagtcagtatcttcggaactaaactcgctccagggtgatcactattagaaagaaagtaaggatttcttgcatcatcacaaaacgatcgtgttcctggttccaaaacagagaaacgattagaagcatct

SEQ ID NO: 230872 - DNA, 895 bp, Cannabis indica
ccaaacctaacacacttaagaacatttgtgtgtacaacatatgtacactaatctattgataaactggaacctatatctgttaagggaactttcctagattatgccttaggaaccaaggggtataaaattttcatttcgaagaaggaaagaccaaaggttgtgatcgctagaaatgttgttttcaatgagttagaatatcctcacttgacattcgagaaaggtacgtagtgtgtctccaagtgatgcaggaaagtagaaaataaagacattgcaagtgtagaaatggagtatgaaacgaagctcttagaagaaggttgagaggcaaaaattaatgaggaacagaaacataatgttcaaacagaagctgttgtggagccgaaagataaaaaatgaaatagaggtgtcgaaagggtttagacagacaggtttggaaggttatcagttggcttgtgatagacccagaagagtgattcaccctcgagaaaggtttgtgaaagtagacttgatcgcatttgcactggcggtagtttaacagactgaaattgaagagcccaaaagttatgaagaggcaatttcaggtggaaataagtctaaatggcttcaggccatggatggggagatggattcacttccgaaaaataaaacttgggtagttgtgctaaagctgaagaacaagaagattgtgtagtgcaaatagattcttaaggtaaaagagggaatcaatgagaatgaactagtgaggttcaaggccaagttagtggctaagggttttactctggtaaaggaatagaatcatattgaagtcttctacacctgtggtaaagtacaagacaataaggctaatgttagtccccgacagctcaattggagttaaagttgaacaacttgatgttaa

SEQ ID NO: 230873 - DNA, 909 bp, Cannabis indica
aaaactactgaatgacataaaatgcatctcagaattcaataataatagtataaataattatttaaatagctataaataatttttcataattaaacatgataaactgctaatttccaaattaaactaaggggtctttacagtcataatccttatgatcttcttctggttgtggaagtttgtcattaacaaatttcactttgtttcgagcaacaagtgctatgagcatagatctccaccgggtgctataattctcactacctgtgagaattttaggcactaatatagctccttgattgtctccattagaaagaaaatacggattagacagatcaatgaaattagtcgatctcgagttctcaccaacaaatgagaatcgatttgaaacattcgaattatcctcaggatcacgattatttcgagtttgcattcctcctcccctagccatgaacacagaacagaagcggaagcaaaacgaagaagaaaacacgaagaagagagctcactcgaagacaagctctgataccatattatctggtataaaccagtaaacagagaaaatagagaagaagaaagaaagaatcctttattattgagattgagaataaatacaacagtagtcaaaatacaagggatacaagatatatatagctgcaataacagaaaggttacaatcataacaatcataaccaattctaactaacttgagagttaagaccaactaactaactactaacaacttcttgataaaggctaaagtttcacaactcttgcaactgggttccaagacattgaatgttggagacttgaacatcatgcataaatgtattttgaacattcttcgaaaattagaaacaattttttcatggctttttttttttttttttgtatataatagttcacgtagtgaaa

SEQ ID NO: 230874 - DNA, 4617 bp, Cannabis indica
aggttggtgcctcgctttgtatttctaatgtcgtccttatgtcttcatatacaaaatggtttctcgtcaatatgtcaattaatagtttgtacatccgtgtctcgcttaagacttttcaatcaacgagttatagatatactttattcgctccgcatttaatgagttattgtattttaatgtcttgtaatataattgccaatatattcgttgatttgtattctctcaagttgacacgtgtcctcctctgaagtgtcagccaaatttcgagtataacagtcctcaaggcttaataaaataaatttaatgcaaaatagatagaaaagggtaaaaaaatcccataagtttactttgtttaacgttgttagcttgactgcatgttgtgctcatgtgatcttcatgttgagttttctaacaaagactcattccttatgtacctattaatagaatcaaatacattgaatttgagtgtttcaccatcaaattccattctaagtatccatgattttgtgtccaacttcctacttgcagtgagtaagaatggtctcccaaatagagttgatgtaagattgagatcacccttatcttcaatcttaattatgtaagaatcacttggagtgacaagtccattattctgcacaaaaacatcttcaactatccttataggataagtattagtccgactagtcaattgaatcaaaacctatgtttaccttaatgaaccaagatttaaagaagcaaattagaattagacataataataataattgctcctaatcaaacttggttttaccaattgttcattgaattttacttgtcttaggcaacaactttctttggagaacaacagaaacattctctccaacacttattttctcaccaccattcgactttttctcatttggacacaactcctaagaatgttagcacaatgaggctcttctttaattaccttaagacatgaaattttatctcaattttcaaaagagtttcagggattccttgatgggctcctctttcttagattttttcaatctacttggaaatggtggaggagtggcaaaagttggtacaattggtttgtatggctttttcaatgattgtagaccaactaagtaggagattcaacctttggtggagattatccttcaagggacgaattgttgactcctttaatttgaatcagcttatgtacttcttggtgtgatggtgattcaagttgtgaaccactttgaagtgtaatggccttcacattctccattgggttagtatctttttgtgcaggtaaagtatttgaactttgaattttatacccactcatagatgtttccattggctccacaagattctctaacttttgtaaagattgttgaaggctctgtataatttcatgaaagctttgcttaaactgcaaggtattagctgctatcatgtcaatcagctcaccagcaattggcttttcactatatagtgcaacatcaatagtgttatcaaaatttttgcaaaatgatgtggcagaataatcaagtgacacatgtcttgcatttcttatagctgggtggaagtgaatgtcccgaacagactccatattgtatctcagcatgtataacccttgattacccgagcaggatgaaagaaagatcatctgggcaaatataaatctggcttgccaaactacttatcaggagttaattacttcagaatgatcttgtgaagtccagacacgaaggcaatccctacgatcgtgggattgcattagagaaatatagcaacctgttttgatttcctatttcgtaattatgtaataaatgtaatttcctattttatacattgtaagaaaaagggaaaccttccctcatgcattaagctcctataaatagtgacttagcctcattgtgaaagggattgaaagaattacttcagagagagagatctaagagaattacttagagattcattgtaagagcttttagagagaaaaacacttcgttctttctctcgagttaatacaattcacggggagtaggctattaccacactcacgaggccgaacctctttaaaatttggtgttctttattactttgttgtttttttctctattttaattatattcttaaccgcttattaattgactcactctcgttgactaaaagaaaggtcaacattttggtcctttcattgagaggaaaaatccaagttttctatttttcttaagttctaacaggcgtacaggatggtggtgcaaactcgtagaggcctggctgatcagggcgacccaatggtgatagatcctaacatgtagacccctgggaacacgagaggaccactagggaaaaatcccaaacaggccaatacacagccacctactgtgggccatggtgtgacttccatctggctgggatcacaccaggcatgcaagagactgggaacaccagttcattagctgatcaatccactcccaacactgcgatcccgtccaccactaatgctcagaggagaatcagagatgatactcagatccaaaaccttaaaatagcccttagactcaagcaaggtcataataacgctttacaccatgatcatgaggatcttcgtgctgctataaaccttgcatttgacgagcagaaatgttagtttatagaatggagggatcaagagatggaaactttaagggctcagtaagcaaccattgatgattgtacaaggtaggccaccatactcataaggagggcttaccaagtcgtcaatcaatagccagctactgcgtctagtatccctctggagggtgtagaagagtatgttattgggcataccgcccaaactcacaatggtcagccctccaatccacagccacaggtccaacctgtgggccaaatggtagatctccagatccttcctaaccacccttttggtggagttacacctaacaacttcattccaactgaaatctctagccaacctaccggataaacaagtcagacgccgagacaacctggtacctcggtatttaaaaggttgggtgctgcacatgaccttaggactaatttgaatagaagaaggggcctagtcgaatagtacgccccactgactgtccagccaggcatccgcatccagcatctagctcaaagagatactaacgtgacacaggtcggtcagcaagttgaaccagttcatccatttgtgcaagcacaatttgatcaactgaaaaacatggtacaaggcttgactggccaaaaactcactaatctcgagctggaccgagcacgtggatcacccttctccccaaagattgaagtccttgagctactcctagaattcaagatgccaacctaaaagatgtatacagggaaagaagatcccttatcacatcttaaatactttgagatggaaatggatctgcaagggtacgaggtgatgtcagatgtagaatattccatgctacacttacagaagccgcctagcagtggtacttcaagttgcctccaagaaggtttaattcgtggaatgctttctcctcagaattccacgtgcaattttcctcctccccttaactcccctcacatctagaagacctagttgagctaaaacagatgccaggagaacccctcaaagcttatataagcagatttatgacagaggctaccaaggttaaggggttaaccaaagaaggaaggatgggcactatattattggcattgaaccacttggagagcagtggaaagatattaagaggctaaccatagggtccatggagcaagttttagatcaagcaaattggtttatcaagcttgaggaagttgttcgtcgtgtggatactgccagacaaaagaagagccaacaacttaccacttcagtaggaacatccactcagagtccacagtatcttggcagcttaaattcgaatgggaagaggtctattaacaatgtcaggtgtcacaggctcaccttttaaggcagcagaacacccgtgcggcaccttgacttctctaagccaaggtcagtcttctaaccatccgagtaacaatgggctcatttttcgcacgaccgcgtgactcatgcacacttccgtctctcgaacaactcctgcctagtcatgctcgcaagcatccatgagtgcatccatgcatcgaggctctctagccaagataatcacacaatccataggttctcactatgataaggcaaatcccaacaccgacgctcaccttctcactcgtgaccaaggtagcatgtgtggcaagatgtcaacatccaaccaatgtgccaacgcttctatgatgccccattcgatactgtccaaacagtctccctcgttgcctaaggactcccatacgtccatggaccaatcctcaaagctccatgcctccatgcatgttggcaggccctcgatacaagccaccaagctagttgcatacactagacctctgtccctttccagcatggtgcatccgtcccatgcatgcatgcaagctagcccacaaatgactacccgtgtcatctcgtgttgagactcatggccaaggcgcaccacaacgtctcttggaggtatctaggccacgtccccatgcaagcggcataccggcaagccaagggaaacgtaccagtgaacctctggcggc

SEQ ID NO: 230875 - DNA, 2027 bp, Cannabis indica
agcggggttatggaatttgaccattttacccctagttttgaaaaatacctaagtaataggttaaggagcattttagtaaaatatcaaatgaagagttaggtggctgcctaggttgttgacacctagcaagttttatttcagcaagggaataattaggaaaatcctttttgcattttgagaaaaatcaagaaaaacctaaattagagagtttatccttttatctctctctctctctctttctttgttcggccaacccaaaaaccagaagaaaccatccaaattcttcccaaattctgaaatcaagctgattaccaagtgttcttgaggttgaggtaatccctagctctttgctctttgtgtttttaatctttaaatttggtttcaagtagtgatttttagtgttagtggctgttagggttggaaatgattagggttcaaattctaagcttaatttgagttgaatatagcttctcgcaactggttttaatgtatgggatttgatttatgcaagtttgaacttaaaaacctaagctttgatctttaatggcatattgtgatacagtgagtttttctgtgaattgctggttggaaaatattgtgtataccctaaataggtactctggaaggtttggaggcatttggaggagctttgaccaagaaatggagtatttcggtggctagctggttttaccagtacctgtaaaaccggttagccggtttttgtggggttccctgaatgttccactttctcaattctcatgcattttagtgccttagttgggtgtttccctatttcttgagttagagtaatctctagagagtatgatagatcctagagtggtgggttcaggtttctcgaattagggtttcaatcatgtgatttacccagtttcattatgtgatcagagaaagcttggctcacggttcagtaagcccgtacttgtttagtattatatgtgattattattagattataattatttattttaagtgtgttacctttaagtccataagagaagtattgagctttatgaccgctgtctaacctgcctggcttatgggtttgcaggctaagtcctataaaatggacgctcagcgaaatacaagaagtcaggataatatggttgagaccggaggcagttagggaaatcaaattccctagaatccccgtggttgcagccgtggtcgtggcagagcttagggtggtcgtcctataaatccaccacaagctctttcggaatgggagcagaggtttgcgaaaatgcaagatcgaatctacaaacaacatgaataaattctgaggttaaggcagcaggtcatcttgtcgtggctccacaacaggctcaggccgttgtagctccagcggtgccagtagaataacctgttgctggcaactgtatggagccgttatacgaaaggttccgtaagcaagcacctccagtttttctgggaggtccaaatgtgatgaaggctgagcagtggctcatagtgattgaatgaattttgaattttatgggggtggttggaaattatcaggtgacctgcgccacatttcagttctacgaggacactctcgtgtggtgggagttggtgtccctcactcgggacgtcactgttatgacttgggaagagttccgagagctattcaactcaaaatattataatgaagtcatctgtagtgctaagcggaaagagttcactgaactagtacaaattgaggggatgtcagttatagaatatactacaaagtttgatcgattggctaaggtcgtcgtgggtattgtgccaacatatttcagcaaaaaagaaaagtacccggccggtttgaatgtgaagattagacatgatctggtgatcactaccaatgaagcaaccacttatgcggaaatggttaaaaaagctcggagagccaagggtgcggttaaattccttcacgagccccaagtgacttcgagtgttggtggaaaccccacttttcctactcctgcctatggtagggatggtggtgattccaccactgattagaa

SEQ ID NO: 230876 - DNA, 858 bp, Cannabis indica
tctctcttcaaactctctctctttttctctttcaaaatccctagagccgctagggttttgatttttcttcatcaattcaagcaagttacaacaagagtttagtgatctcaagctctaggtaagttcttagcatcatcttctttagttttcttgaactttaaataagaaattttgcatgaattgtaagtttagagttttgtggttgttgttggagtttgatattgttttctgaagttgaattatgtttagatatgttgtttttggctggtttgagtggatgtagtgttgtttgagcaagctttgagttttagaactcaagcttggctctttaatggtgattattgatttttagcttgtgtagttgttttattgcttggaatatatctattggggcataatatgtaggtttggaaggttttgtaaggattggaaatgatttggttagcttttggaatttttggggctttgtggtgtaaaccggttaaccggttttgcaggccctgtaacattggttagccgtatttactgctgggttccccaaaaatttcgtgttgtcaattcgtgatattttcagaggtttggttggttaattccctgttagcttaaggtatttccatgttaacttacagtaggtaggttttcggtttaaaacctaagtctccggttgtgattaagcgtgtcacttatccatgttatgatcgttgtgatttaggagcttgtaattccccgagtagttgttccactgaggttggctggcacacctgaattcagaaacaaggtaagattagtataatgtcatgcatatgtatttacatgtttaacatacatgttgtttatgcctgttagaatacattgata

SEQ ID NO: 230877 - DNA, 2312 bp, Cannabis indica
gtgggcctgtaacccaagtggggccatgtgcgaaatgggtctttgggtcagctcagtgggcctgattcagtgttagctgagagttgggctttgtggatttggaagtccagcccatgggctcacagagcagcaaaattctcggaagaagttgcaaaatacccaatttttttttatacattaactaaatttacgtaaaaaaaaaattaatttaaatataactctttttacgagtattgtacccaaattatcctaacacactcacataaccaagacaaatttatgttctttgtagatagatgtctaggtttgtggagaagtttggacaaaattttgattaaagaaaaatagaaattattatgaaatcataggggtaaaattagtagaatgattgaaaaaagaggtaaacttaatagattttttttaaaaaaagtaaaaattaaaaacatcaagttaaaagagatatataatgtaattttctcaaaattctctcttagctaggatgacgtaccctgtgctacttgggcccactattattcgctagccccaccttaataggactatttccttgaaatttcacaaataaataaataaaaattaaaaaatactaaaaagtatcagtgttgcttagctagcactcttcaacatatgacatcgttagtaatataattaattatcgagttccatacataatttaatattataatttcttactagcaccacctttaagtgttgtgagtctctaatataatataaactataatttaatataatattatacaatacaataatttaattacattttcgcagtcaatcttcctaaagaaagatccagactacctaagctgcaaaaagaaagaatgtagtaaacaaggcaagggaggaaaatgcgaggttacaacatgcagcgccaccgtatcttttcacatcatcaacataagaactgacatttccttcgtattctttggtggcggcttcgacacaccttgcactcttgctaggacaagtcctctcccctttctcaaccccaacatgccattacatgcacatcttaacagcatagattccacatcaacatctgtaagtacaatatttatttttcgtattaattagtataattaagtatcaaattttacgttagtaagtcttgatatattatagttctaattattatacacttctttttttctatattataggactaagggtgtacatgtacactcttaaaattttaatatttaacttcatttatgtataatttaggccagtttttaatgatcttacatttatactttaattttgaaaaattggacattattatagtgatcttatttcaagacactttaccatatttgatattgatatatttatatatagatgttaccaatgaatttatggtttctttgctttatatttgaagatgagagtgacatgggttagtggagataataaacctcaacaagtacaatatggagatgggaaaacacaaacttcactagttaccacttttactcagaaagatatgtgtagtaagttaccacttctactaattttactatggcatttggttctgttttctgttactagttacaataacatgttttttaattatgtgaaaaatcaaaacagaatcggatattctagttagcccagcaaaagattttgggtggcatgaccctggcttcattcattcagctgtaatgactggtcttctgcctttaaccaactacacctatagatatggaaggtattgcaattactataatgtagtcctcttgtcacaatctgttccattttatcatagaattagtgaagtggccatataaatttggaggataaaatagcaggaaaatgctggtatttgaaaaattgaaccaatgagatataaactaatgtgagtttgaattaataaatgcagtgattcagttggttggagtgaacaaatccagttcaagactccaccagaaggaggatcagatgaagttaaatttcttgcatttggtgatatggggaaagctcctaaagatgcctctattgagcattatattcaggttcatacatacatagatacatattgatttgattgtaatatgaaagtttcattctttcttatgatttattttactaaacatgtaaaatgtggtatatatatatatatatgtatgttaatttcatatagccaggatcaatttcagtgacagatgctatggctgaagaagttaaggctggaaatgttgactcaatttttcatattggagacataagttatgccactggctttcttgttgaatgggatttcttccttcatcaaatct

SEQ ID NO: 230878 - DNA, 1639 bp, Cannabis indica
gcttatggaacatggctgaaagtagataatataatcagggatggatttcatgaggaaggacataatacaagcaagaaaatccagttggaggcaacggaaacacaaagaaacttgcaaccaaaacagggactgaaaacttcaaattcctttgctatacttgtcaaacagaatgggcaggagatggaggatcggaatgtggtacaaggagaaaagcaccaagaacaaattcccatgatggcgatggaaagggaagaaactgaacaagggatccgtgaggaaactgagaagagaaatatgggaaatttgacacagcaagatgagaatggtagaggcaaaagaagaattgtggaaagtgaggaagaaatgggtgtgggaaagctccaaaaaacagtgaaccctcccatgaatgtatccggaagctggaatttgtttgaagttcctattgactattcccaggaagttttgagaaagacaggagagccatcctttgtccttggtcctagccaaaaaacaatcccaaaggaacaaagacgtaaggtggctgtcaagaaagattcgaagaataggaagggtaagattgagagtacaccaactaaggtttctcacaatggggattcggtagtcgggttaaatgatgaagaggcgaactctgctatgcagggtcgcctacagatatgaaaaccttactttggaacgttcaagggatggggaacccttggacgatccgttctttaaaatcccttgttgttcgttggaaaccggatttggtgttcatctcggagtctagattgcgaaagtcgaaagctgaagagttacgcgtgatgttgggtttttttggttgctttgtggtggaagccatcggcaagagtggtggtcttatcctcctttggtctacggagatcacttgtaccattcggtctttctcatccttccatattgattctttcattaaggaagatgatgaccaagggtggcgttttacgggattctatggcgacccggaccctaatggaagaacggagtcttggaaacttctcaatagagttggcaagatgtattcgggtccttgggtgattggaggagatttcaatgaaattttgcggaaaaaagagaagttgggaggccaaccgaaaccgggatacttagtgaacaattttcgcaaagctttagatgattgttgcctcagagaaattgattttgaaggtagtaagtacacttggtgcaatggaaggaaaaacaacctcatttttgagagattggatagagcttgtgggaatgaagattggtttgatctctttccagcaactaaagttacacatctagatcgtattaatttggatcactgtcctctcctcttgcaaaatctcaaaagtaatcaagaagaaattcctagaactaaatggcattctaggtttcacttcgaaagtgcgtgggctaaagatgaagactgtgtggagactattcatgattcttggggacctaaaagttgtactgctactgctagagacattcggctgaagctagctagatctggacacgccctgcaacattggaataaaaagaagaaaaaggagcttaacatgaagctgaaagagtacgaagataaaatcaataccctttctcggagaacggatccaca

SEQ ID NO: 230879 - DNA, 1770 bp, Cannabis indica
ttttgaagctcgtaaggattgtcgaaggcttttgtggcttatcaggacttaaagttaacttaagcaaaagccaatttttgggtatttgtatggacgaattagttgtttcccaatatgccgctcaaattggatgtgaggtgggctgctggccgatgaagtatctcggaatgccattggcaggttcacctaggaagaaagttttttgggatcctgttttggagaagtgtgctaaaattcttgatgggtgaaaatgtgcattcctatctaggggaggcagatacactctcattcaatccgttctttcttcccttccaatttatctttatgtcactatttaaagcaccatcttcagtgattaacacattggagaaattgatgagagatttcttatgggaaggtggagatctaggtggtggcgatcacttaatggctcgggattgggtttgcaaaccaagattggaaggcggactaggcattggaagattggctttgagaaataaaagtttgttgatgaaatggttatggcgatttcccttagaatctgagtctctttggcacagggtgattgagagtcgttatggtttggcaaataatttttgggattcaaaaagaggggagcggatgtccccgaggggaccatggaaggacattgcggatctatatgatgaatacttaaggctggtgaagttcaaggtaggaaaaagattcggttctgggaagatgaatggttaggtgactcatctctactacacacttatcctggtttagccctaatttctagggctaaaaacgtaagtataatagatctggtagctgaggaaggtgcagctggagaaagtgtggtaagttgggacttcaagttcagaagaaacctgttggaaagagaaatacctagccttatagggatgttacaacagttggaacaggttaaattacttaatgtcaacgttgatatcagaatatggaaacctgatgccactggagttttctcaagtaaatcagcgttcgcctggtttaattccaaccaaaatgttgccagacccccttggaccaaatctttatggaaaagtacagccccgtcaagagttaaaatctttatttggttagtagctcatggaaaagttaatgtgcacgacgttctacaacgaagacgacctttcatactcatttctcccgggtggtgtgtatgctgtaagagtagtggagaagaagtggaacatctgtttttgcattgtaaattctcctccaaattatggtcaatgttgttggaggagtttggtttgatatgggctctacctagaagtgttccacaaatgttagtgagtaagataaaaggaagtaaacgtcaggatatactttggaagacggctgtcctagcaacaatttgggctatttggctggagagaaataccaggatttttgaagatgtagagaactctgcagtagtggtttgggacaaaataaaattctagacagcaacatgggttttcagaacaaagcattttgaagacctctcttttctagatttgagtagagattggagagtccttttataattttgtttatgaaatgtaacttttatttttctgcattttgtttttagttttctggttcttaaagtctcctttactttgtcttaatcggttttcctccgccataagtgagggattgaatatattgcagagggtggtcagtctaagacatcgacctctcctcttttttcaaaaaaaaaaagaatacatagctccagcagaagctgccaaagagctt

SEQ ID NO: 230880 - DNA, 1437 bp, Cannabis indica
atatgaacatcttttccccgaatgtgcgccttgacgcattggtgcaatgtcgatagtaagcaatgatgtgtatgaatccactgtcctcccaataagagatggtatgaagtgtctgcttcaatcacatggaaccgagtgggttctttgattgttccaacctctagttcaacagttacataccccatggtttttacatacttagcagcaaatccagtgagcgtgattggttgcgggatcaaccccccttttacctcttttatagcaaaatatattccaagtggcatgagatttattgaagctccattatctactaaagcacgtttaatttttaggccattgatcttcgcctcgacatataacagtcaattgtgaaggaaaggagacgtttgtatgtcatcattggttaaaacaattactccttcagattttttagcaatattatgcattgggcgccacaccatataacaagaagggacgtgttgttggtaaattttaagcaaaacttatgtagcctcaattcttgtatcttgcctgaattccaagcaatcaaagaagttacgaaacaatttagtttttaacaacgaatctaccatgctgtctggtttaggtgattcatatataatttcctcgatatgtatgccccgtgatatccctattcaaatgaggggaaactcttctgtgcatgtcatagcagctcctccattttaatgttggggaaacggcgtttgttccacttcattttgatccaagataattcccctttcgctaatcgctcatgaaaaattttcctcagagtgcagtatcccatggttgggtggttaatctttcggtggaagtgacagtagagttcatgctgcttttccattaaagtaggtagttttgagacaaatggtagtactacctctccatccctgatccatgcctccaataggctacaaattctttctttgttacaagggaactccgccggtttatcattctgtcgaccttttttatgaactttaaaatttcgtttttcttgtgccattgctatgtcaacaccacgttttaaacccttccatggccgattttgattgttttagctagatggcttggccggtcgacagacagtagcttcagtactccttaatttggcgatgagctctgcaaaattgtatatagcatagttttcgatatgtaagagatattcatcaagcatacctttgatacacattttgactagatctttttcagccatggtttcgacacagtcaagagcttcttcttgaaaattttgaacataattaacaagtctttctccaaagctttgtctttctcctgacaagtcagctatgctccatttatcttcaatcatgaagaatttggcgcagaattgagagaccatatcgtcccaactccttacacttcttgaaggcaagcttgcataccaagagtaag

SEQ ID NO: 230881 - DNA, 2187 bp, Cannabis indica
ctgctgttacggttgcacgacattcacatcaatatccatccaggaggaggatgatggctcgcacaaagtagacaatgcggaagggcaacgcatctgatcctcatgtcgcccagcttgccacattgtcaagcgccgaacaagatctgcccaccatggaggaggaagatcatgagggggacattgaggtccaggagattgaggagcaggacgacgtccgtcttggcagccctttcgaggccaaggaggaaggagtggttgaacctccaaactttggagggtataatgaggtcggggctggtgtctgcagatggtgaagtcttggtcaaaggggagagtatgtcaccgaggagttcactgaaggagttcctcacaagaggtaaggtgccttaggttccagatgggtgagccctccgtccaagatcagcgaggcacacatgagggccttggacaaggctggatacctgagtggactagagtgttacatcctttcttcaaatcactgagccacaaacccacagaaagggatgtgtgcttggtcgggcgctcatactaagcaagaggcaatgttgcatttgcactcgtactttaataaggtggcagattatttttgcctttgtctgacctagttcactcccaagggcattaagtacttatctgccgtgttcgtcctccacgccattcaaggatggggtgtgccgtctctgcacgaggtcaattggttctttgacctgaagtctacccccaagcaaagcaggtcggggtacttctacttctatcagccaaatttcaagtggttgacaggcgctgtggacaaggtcattagcaagctccgggcttttgttgacgagaattacttcgtggaaggcatggacaccacctatactcagtttcagcagatcctaatatattaccatccaccccttacactggctactagggacagagctcaaaggattctccaactgccggatgttgctcaaaatatcactttgttgaccttggaggcaaacattgtggagtacgagctttatccaccagactttatacctcagcccataaaggggagaaagaaaaagtccagtgctggccgggctgagggagttgaacaagaggaggagctcattcacctcaattgtgaggctaagttgaagaatgatgcaggagccaagcagtacgctcaggaatattctgagcaggaaaaggagcttattcaacttaagcgtgaggttaagttgaagggtggagctataaccaaacaatatgctcaagaatattctgagtaggacaaggaggctcaggaatattcagagtaggagaggtcgctcaaaaagaagaaaaccctcccgactaggtaaagacccatcgaacatactatctagattaaagagcctgatctacctactcggccatccacccctgtggaaggaaaggggaaagccgtcctggaggagcagaaagattcgtcggatgacgatgccccatccgtgcttgttcgggctaatgctcccctccagccaagaagtccaaaggtagtgagaccctgtccaaagagaaggcaccagctgaagtggtcattgacctttctgaagaacaacctgttgtggaccctcctgcctcaaaagtgaccaagtccaaagattcccgaggaggtagttcagatagtcctgaacaggcgatgggtggatccgagctgattagaagcgggtctgaacaggttaaggaccctgccccacctctaatactgcaccaggagactaaaagaggcagagatatgctcacccactatgtgagtcactcggtccctgaggtgaacgaacaactgactggggcggacaacaacctgtctctagagctggttatgggaggagtcctgaaagagctttcgagggtaagccttttctgacatttttcctttgttcttctttaactcattcggtatttaatgtcttctgtctgcacaaactagtctgaagatggcttatgcctattcccgagctaagtcggctgctgctaagaaccttgccatttccaacccaatgcgaacggaagtggacttggccaagaaggacgccgaggaagcccaggttcaacttggggctgtggggatagagttgggagaggtcaataagaagctccttgctgctgagaccaaagtggccgaactaaccaaagatctgcaggacatgc

SEQ ID NO: 230882 - DNA, 964 bp, Cannabis indica
aaaaaattttgttgtaactaaaactaagaatttttataatgaataattggtgctatatcataagagagatctttatagtttaatttatatgagatctttagtgaataactttggtagctctgataccaaactgtaatgcccgtactcaaaaatttactattttgaaataaaattatttattatatttataaaaccttgtagatcgggatcctgagcttaaaactacttgctgaaaatacatgtatcgtaaataaaattacataacatttttttttacaaactacaaaatcccaaagcaaccatgaaacacagttcaaaatgttgaaagaccgaaaccttctaggttgtactaccgcgatatgtacaatccttgccaagctcatctcactgctcctccagcttagctttacctctacctacacaaggtagcaaactgatgagtcgacagactcagtcaaatatgcataacatatatataagcaatgtataccggctttatgcttatgccgtccttagcccaactaccaagctcatcaaattgtaaaaaacgttctcaacggaagtacgaccactataccatatgcactagagtaacgactccatactcgtgttggtagagacattactgtacttttgggagttactaagtcttgtaccacatgcacgacgtaccctctagtattcgtgtttgtaacactgtaactatcctaaaaccttcactgtactaacactcttaaaactatcacttctcaatgttagtagtgtatacaaataataacaagcattcaatcacatatatattttatactatcttacctcgtttccgagctcaggtgtgcccgttagcttgagaggaatcgcagctcgacgttttacagggccctataacacaacatttgtacctctggtgagagacacgctaaaacacttttcgagaacataaaatcaaaaactaaaaatatcc

SEQ ID NO: 230883 - DNA, 1300 bp, Cannabis indica
atagacagctgcagaatgataagaaggaaccaataggaagggacaacggtgcatactggaacaagttatggaatttaaaggtccctgctaaggtgaaaaatgtgttatggagagcttcaacaggttgtttaccaacaaagcaacaactcagaacaaaacatgttaatgtgtcggctctttgtcctttttgtaacctagaaaatgaatccattaaccatgttcttgtcacttttttgtactcgatagcttgctggaagcagttaaattcaaggtccaatactgaagtaaacaacagtttttcctcatggctgcagtcggccttcagcaattcctccagtgcagaatgccaactgatatctacgttggtgtgggctatttggaagagtcgaaatgaactggtgtgggacgataaacaccgtactgtatgtgatgttgtagtgttggcaagaactgtccttgatcaatggaaaaacgctcaagagaaaacttttgaagtttcatcagagttgaaaacatctgatgtcggctatgagcgttggcgaactcctattgatgacatgatcaagtttaacacagatgctgcaatttttgcccatacgaactgctacagcttttctttcgtggctcgtgatcatacaggttccttagtgaaagctaagtcaaagtgcattcaagggaaagtccagccatcaattcatgaagttataggcattagagaggccctaagtcagataaaaaaccagagtggaagcagttttgttatcgaaactgattgtcttactgtcgtccaagctattagaagctcctccacagttttaacttactttggaaggattattgatgaatgtaagaggtttttatctagttttcagcataagaatgtttctttaaattttattaaacagtctgcaaacacagtagctcacttcttagcaaggtctactagtgttatttctgatcgtgattattgtgggagcgatgttccacaagagttcattactgtaatgatgaaagatttgttgatttaatgaagttttatcttctttgtcaaaaaaaaaaagagtagactttttaatttgcttgtagtgtccccaaaaattcttgaatttcttgcaatatgtgattaaatgccgtaactcatatttgtaatttactttttaattggcactgttgagaaatctgcatagataggattgcatacttagtcacctgatgttatggagggtagtgatttaaaaccatatataaaatgttataaaaattatcaactaatctacataagtacagtttttaaattttt

SEQ ID NO: 230884 - DNA, 1040 bp, Cannabis indica
gtgcagaacatcctagcaataaaggaaaggaaaaatggcagtgtgaaagtcatttcggacaactagaaaaaggcgcacgggaaatccccaatttcaactttcttagaaaagggaaaataaccattcgatttcaacaaaaatagaatgacataaaataaataaaaacaaagagcatgagtcatcggacgacgtcaagggcgtcgcattaacagcgaccataatcgtcgttttaaagaaaccaaacaagtcagacgaaaacacattgtcatctatattggtcctaacaagtgaaggaaatgcatgaacaaaaacttacacaaaggcggcaaggtagaagtcgatgacacctggtggtagtattttgcctgacaacggcgaaggaaacactaaagaaaatcagaggtgtctggaattttgttgaatgtgtttgatggactagatactgcagagtggtgaaaattacccagttgggaaaaatgttggcttttatataccattcgagatgcgaggcaacattgatcaggcaccatcgtacggtgaagatttgcaacgattagaattccacaatctgacgaataggatgagcgagtgtgatgagaagaaaggacaattggaacgtttgagtacctttctgacaccggcattgacggaagggtctatcaataggcgggaaatgaaacatttcctgcaaaagaaacaaaagctaatgatggcgatcataaatgatgcccacacgcctagcgcacgtgccactttgataccggagatcgctcacaagtcttatttacatgcgactaaataagacttgggggtaaatgctgccccagttatttcccaatatatgtggcggctgctatgtgtgacatgtggatgagatggacacgtcacccggaggtgagttggaagtagaactaaagaagcaacgagtatggttcaggtcgtttagctctcggacatgagcaaaagattcaccttcccctccaggagtcaagacataggaaggcagggctagaaaggctagaattgaacagtcgtttcgc

SEQ ID NO: 230885 - DNA, 796 bp, Cannabis indica
gacgattgcctactccagcttccacagacttctatgcggccatcactaccatgtgcgagaggcccatgtgcaggcaaaccatttgacaacaaacttgataaagttaaggataaactgaaacatttctgccagcaatgactatttctccatgctaaaacagattggtatgatgttcagtatcagctttcagggtatctaaagccaactagatatgttggggacatcataacatcatagtacttgggaacttttgctgcatcacaataaatattttagaagtaatataaattgaactaggcagtatgagaaaacattgccaaaaaaagaaaaataggacagacaaaaactactttcaaagtacatatatttatatataaaaagtaactgcataccatcagtatcagaatcattattctgatcatgagatataatttcaatacacttgtccctgacatgctgccaaggacattcatcattgttgcactttcctcggagttcatacatgcaaaggggtttaaaggggtcaactgaaatatcacaattgtatcacaattggtaagttggctagccatagagtcaacaaattgaccgactatagcctcctccaaatggccagactatgcctcaatgtggctggtcacctagtcttactctggctagcccgatccactaatagtctgctctcatacttttagtctatagtgactaagaggtaaacatcatcttgagcaagatcccttgacaaaaggaaaagaagaagagaccaaactaattcaaagtagcatggctacccaca

SEQ ID NO: 230886 - DNA, 636 bp, Cannabis indica
ggggagcttgctcggttttgttgatgaactttaccttcttcccatttcgttctctgttattattgttgtaacatttaccatttgagcttgaattatttgggtaatgggggagttgggcggacattccagtggaaggagcttttgacttgccaggcttttgttcaccttcgactcattgaatagcttcttgaagtttaatgaagccttcagcacggtcgagaaaatcactcattgagtctaccgggccgttcttccttatgtccttccaaaggtcaccgaggacttcaaagccccccagtatcgcggacaactttccatcttcagttacccgtgaaactttggttgcctctgtcatgaatctgctgatgtatgctcggagaggctcgcctggtctttgcttgacttcgactaggtctcttagctgcaactgaagttggtgagaggaggagaatggtgcatggaatttcgaggacaaagctttccatgagttaaactttccaggggcaagcttgaaataccattgctgagcggctttcgagagggtggcaggaaaaattttgcaacatgcgtcacctcgtactccctgcaaatccatttgcatctcgaaatactcgaggtgggagagaagatcttctc

SEQ ID NO: 230887 - DNA, 718 bp, Cannabis indica
atggcttcaacttcaccattacaaggtaaatctcttcttctcggtctctatttctctctgtatatttatatggctctcttttcctctctctctatgtatctcgcctctctctctccctatttctccgattttttttgttattccttcgttcttagatttgaaaatgaaaaaatgagaagagcatgacaatgaaagtggtttcttagagagaaagatctttttgctattacaggtatgattttcttttgtattttattttaattttagggtttttatttgagaaaaattgttcttagcttttattaggattttggattcaatctttcaaattagttttgggtttgatttctgaaatgagattttgttgcttaattaaaaaaaaaatagtgagctttgagtatgtgagtgttttttgtcattaattgattcgattggtactcattcattgaatttgaatacatcaatttgttttgttagaaccctcccttcagatgagaggaggcttctgagattaatttggtagatactgttaggtatgtaagtggtggtgttggtgcaattgtggtagaataattggaatttcttcgcctgtaacatcaatgaaactgtgattaggaaaacagggaacaatttcttggtgtcataggtagctatgctagaaccaacatccactctgctcattgttttaggatcagtgagtttaagatagtgaaattga

SEQ ID NO: 230888 - DNA, 1198 bp, Cannabis indica
gatttggatacgaacctagactccaacccagccccagacctagatcgggatcgaaacttgggacctagatccggaccgagaccctgacccagacttagacctggaccaacacccgggacccaaactcggacctggacccgaaccaagacccagaccgggatccgggcctggacccagacccggacccagactcaaactaggactcagacccagacccaaacctgaacccaaacactgaatcgaaatcgaaactgggactaggactcaaacccgactccaacccaaactgagacctaggacccggacctggacctacgcctcggaacccagacccaaatcagaactagagactcaaacccgaacctggaccaagactcgaacccaaattaggacctagaccgagagcggaacctgaacccagactcggaccaggagttgaaccccaaccggctcttagactcggaccgggacctaggacctggacttagatgaggcacctggactcgggaacgggcatcagaactgggaccgagacccaagacccaatcccggatctggaccctgaccttggactcagactgggacctgggacccgaagtggaactagactgggacctggggcttggacctgactcatagtcagtgtttggatctgggacccatacccggactcaaacccagacccaaactcggacctagaaccaaacccaaacccagacccgtaccccagacctaggtccaagtccgagtctaggtttgactccgggaactagaatttgactggacccaaacccaaacctggaccgggacacgaactcgaataaaaaactcagatcgagactcgggacacaaacccgaaccgaaacacagacttggacccaaacccggacccaggacccagaccgggattggagactcagagctggacccagtaccaagacctagattgggggcccaaactctaaattagaaccgaaatcaggacccagaactgggactgggatccaagattaaaccctagtcttggtcccagacccagacctagacacaaacatgggcagggacccaagattcggatcttgaccacgacccaacgcttcaaccaaactcgtagtcagtgtctagatcttggaatcgtaccaagacccgaacctcgaaccatttgaaggacccagacccgaacttgaacccagactag

SEQ ID NO: 230889 - DNA, 1858 bp, Cannabis indica
tcaagttgattaagctttacagccttcggatctccccctcgtggaactctaccaaatatcaatggtagcctattgaaagtccaaggactgccattaataacacgcttaatgtcgatctcatggtaaaactgaaataagaaaaggttcggccccaattccttgacaaacaagcctttgcccggtttccataaccccgccaacgtgtgtttcatagcttcaaaatctatcgatctcgcattcaaaaacctccccaccaaacaccaacgatcatccaccaaaaccgcttcctcaacgtcatcctcaatctcaaaaccacattcttcctcatcatccaattctatatgcccatattgaaactccatatcatccatggttgtactcgtcgaagccataaaaaccagaaaaagtgcactgccccacagtccacttcacaaaacacaatccaaacaatccaagtcgcaagaaaccgtcaatgaaatatcacctccacacagacgcacacccagaaaacaccctccgttcaacccgcaagaaccaatcaccgagggagtatacgcagtcgaatcaatccaatcaaccccagaacacaaccgtgagcctgctggaaacctaggaagatcgacgagagaagctacacacacgacgccgtgctactccggtgaaaacacaacacagagaaccgacgaacccagtcgcaaaaaaaccagtcacaggcgcagaagaaacccagaacctgagtctataccaatcgcagaaaaccttcgagaagccgattgactgtatataccagtcccaaacggaacagaaaaatccaagcgcaataactcagtcgcatacgctgaacaacccaaaccttcttgactcctctgagaaccgatgaggaaacctgcaggctcgacgccgtgctccaccgatgaaaacgcaacaatcggaccagaaaaacaaccagacgcaatacccaggcccagacgcaggaaaccttcgacgaaaatttttttgagagaaaactttgaccatgccagcattaagatctctatcaagtaacacatttgttgccttaatgtctctatgaacaatcttcagaggtgacccttcatgaaggaacaaaaggcctttggctattccaaatgccataaaaaaggggaagagtggatctataaagtcataagctctccatgtttggctaaagctgatgcacgctttcagatctctacagaaggcgttactgatgtcaagcattgattcgattcaagcaattttcagacattttgtattgtaaagcactcctgtttttttatctataaatagttttctaatttttaggtataatctactttatttaaaagtgatacaattaataattgaaaaaaaatattattagttattaagtgattattattatgtaaatctaaataatgtaatttataatgttgacaattaaaagtaaatactgaatgcaatatattagtatttaagaatgcttgataatttaactgtaatatgttcttaagataattcaaaaataaactaaaaattaatgttcaaatactaaagcaaacacagcttaaatgtgtgtaaaataaaaaagaaaattaaaaattaatctctaaattgttgataattgaagataacatatgcctaaaagttgtagataagaaaaataaagatactcttaatgggtggattttaatcttcctttgcttcgacactactacaatatagccttttagtgacactatttagtgacacgcataaaagtgtgggtcactaaaaagttgagagtaatttttagtgacatgcacaattagactctaaatatttgagattggtctcttataatgtgagtcactaaaaatat

SEQ ID NO: 230890 - DNA, 511 bp, Cannabis indica
agcccatcaagccatttatctttaacaaccatttcacactcctcctcatcacaccaagcctcctcaaaatggaatctagagtgcttcctactcctagaaccaacaccattctgattcacatcctggccaaaagaaataagcatcgctttatgtttagaacaccaccagtctaagtactaaaaatccactatgtaaaaggtctcaagccagtccatattagcaaagagcctatccaatttctctgaaataaaaccagcactatcccagtgaccattacaccaagtaaaggtattataatccttagataaatccttcagtgcacaatagtccaaggaccaccgaaaccgagccatagcttcgaaaccccttggaggacctccatgtttttcaaaattatccaagatttcattcatatccccaccacacaaccatggccctcgcacaccctcaccaaagcgatcaagcaactgctaagttaagaatctttgagatgcatcaggattaccataca

SEQ ID NO: 230891 - DNA, 1802 bp, Cannabis indica
ttttatattattattatatatatgttatcgtatttttgcgagcgtgacacgtgggttttaattaaggaaggctaaaatgtagttagttgcccaacttcgtcaatggatacactctgggaagataaagacacccaacttccggggaaggctctccgtgaaggggagctccccgactgctggccacatgaatcgtattcatgagctaaaatctccctccgttccaagaaccaaagacatccactactgtggatacgcattttcccaaaaaggccaaagcactttgagggtgcgtcagtctagggtacgcctttggcctgcggaggctctgcccatgcgtgtcaggctacagacctagtggtcaggctttctcttgcacgatgtcagcagttgtctcccgtgacatgctatcatacaaagcatgcgtgtccttctttattgggctaaatgatccaacggctagggataagggaaattcaaataagagcagccctaggatgacatgcgtccaaggcccagcctgtacagccagtacatctgacacccttaaatgccatatgggaaaaattccacctaccaatccgacagccagatctctccccaataatgatccatccaagggagcacatgcaaagaagttggcctataaataccccagaaaaaacacaaagaaggggaccttttttcggatggaaaactcattcttcatcatcccaagcaaacacattttgtaaccctactattaactccagaatattcctactaagctttctcttcttaaagaggaacacggtggaaggaagttttagtccatggtgtctctacttgtataaagattcaccggtcgatgagcctaataaaatggactcgtggactaaggatagttaacgcttgaaccacataaaaatctcttgtttgttattactctattattacttttcgaagctcaaaaaaatattaagttaccaaaaaactcgataaatattttgatactttcattgagagttgaggaaagaaacatgcacggtggttgtcggtgcaagcctgtaaaaagaagagcccatgcgaagaaagacaaaggaaggccacctgactgcttgtcaaggtctggccaatggacggaaggatctaggccaaaggtcttgtcaagactagatccgtcgccaatggctactcccactgccgtctcagtgcgtcacgaggtagatcgtagactgacgttgcgagatcacgtcatgtcggaaacagagaggagaccgtcagtctcatcactgcccactggatttccagtcaagcctggtgtagcactgttggttggaggaggcaattagggcatgcgctttttggcaaagctcactgacagggatctctgtcattacgatgtaataccaaccctagagttacatcaaagaaagtaactcgtgccattaaaaaccagttagagaatctctactgaagcatcactcatcctactgggggtccgagtctttgctaaaaaagctactaagcgccttgccatttgttggaagaaacaggctgcccaagagatcctggggtgcatgcacgtgtctattggggcttttcggacttcaagagacgcatgcgtattgttttccatgcgtgacagatcattgggtgtatcgcatgtcttcaaccctccttctcggaatgaaaggactgcttgaagcctgctttactcccaatggctctttcaccctttgatattttcaagcgaagtctaaacatgaatttttatgcaacttctgccttccctcgcgaaatccgaagcttgcttcataaaaatt

SEQ ID NO: 230892 - DNA, 676 bp, Cannabis indica
tttttttttttgtatttttttagtaagtaagatgaaatttattgtacaagaacaaagccttcaaaaacgtctttttacaaaatcaactatctctaccataacttagtggaaccaaactctatcaacaacactagttttctctctctttttttcctgaaaaaatctatctataacaacccttttgatgttatttacaactctagaaaacgcacattttgattccataaaactatatttttggctgcccaaatatgatacacaacaacatttatcactgctacattaagcaagagtcatctaaagtgattccaaaactgaacaacttctcaagctgacatgcagaaattatccagtaaataaactgatattttgcaattggaatattaagtctagtccaaactatagaattccaaactctaacttgatttaaggccctcgaatcaactctgccttatccattttggcctttatcaaatccttcaccttcaccacttgaccccaataccagcttgaactttgtggagccacagagcttatcttttaataattattatgtaataggacttcctttcctataaaaggagcactcctcttcttctagcttatttattttttacattcttcgaagtcctcgtaaggttatagcatctctcactagaaatttgagtctcacact

SEQ ID NO: 230893 - DNA, 1510 bp, Cannabis indica
agaattaccaaatttgttaatatacatggtatatatgatattttaactcaaaatataggagtatgaaaaatggtataaaattaattatgcgattttataaaatgatatgtctctttttatataaaaaaaatgtataattttgctcaaaaaattttcaaaaaatatttatatgtgaaaataaataaggagagagaattaattaagatatgtaatatatatgtaatatataccagataaagtaacgagatcagtatcgtcaagacgaaatctagcaaagagtttagaaagagtggtgaaatttgatgatccagcaggcaagtcccttgaagcttctgaagctacggacactcttccgtctctccttcctgtataaactggccacagaggccttttgctctgcaaatacaaatacaaatacaattatatacatatacaatattaatcattagtattataaaatatatattacatacttggaaagacacagcatctctggctgacaaggccagaatatcagcacaagaaacttcggttttagggcattgtgtcttaagagttgtttttaatttcatcaatcacttcgtatccagctacagaccgatttgggggcgcaaacttctctgttgtgttttttcccatctttgggatcgatcaatatcgatgcatcacaaccctagcaccacacacacacacatcttatatatatgaataacaaaatatgaaatatgatataggattttatatgtctatgaccatgtgaccgaataaatatagtgaatacgtttgttttaatgataatatataatgcatgcatttcacgtaatcaacttatacaattaaaagggttgactgatatataagtgcacgtacgtacgcgtatatatgaagttataaaaaaagataaattaaaataaggcttgatatgaatgtacgtatatatatgactcacatattaattaattgtatttgtgtgtacgtgaaagttataaagatgtttgattataagagaaggaatttatagatcaaaaatagagaatgagatcattatagtgttatatctccattgcccacgcatacaagaattgcaatcatatagtggaaaaccaatatacatcatcatataacgatgaatattcatagtccatatatgatctgagtactgcaagtcagtcttggctaaggcaccgtccactaactcttcactacagtaaattaaggctttaggagcgacctatttagaggccacaaaaattcacttctaatagttggggtaatattaagacaactcgtctcgtccctatgaaaaggcctatctcaaaagaaattttaacgaggccccatgtagctgatcctattatatatatgtcatcggtaatgtagtagtgtctatagctccaccatcccaaggatcatatataaatatagaaaagaaatgctaaaatacttcagtggtgtttattatttttctatgtgttaatatcgttatagtggttcaattaagtatcaaatc

SEQ ID NO: 230894 - DNA, 992 bp, Cannabis indica
tagagaattctctattacaaaatgcataactgaaaaacacaatccattcccatacaaaaggtagctcactacaaaagacaattaccaaaataccccttcctaagccaatttaccttgcttaccccttctagcataagtaaacttaataggaggcctcacattcgtatcactttccttcataaaattcagaaattcctattcctctctaaacctctcaaaaaattgtcctttacctgccactctaggaagggccaccggttaataaaggagaataagcattgcagtgaccctaaaagaacactgccaattaggtaaaagtgtgatttggtactcatcttgtataggatgtgggattaaatttaaaatgttaaaatataagaaagctgtttttttcccctaccttctttcataaggcaaggtctctcaaaccagtcaccagaataacttcttgtcctattcagacactattttgttaaactttaatgcattttttctgtcacctaaatatctatccagtgtgattgttttcttaacacatggttttacttgttgatttggatacattatgtgttttcttaaaaataaatgaaaaacagtttatgacatcattttatatagagagcttgtttaactaaaaagtgcttcaggtgaatgtcagtcaaccgattggaattgtgcagtatcctggtgtggcgaaagggttgtatgttgcctctccctcaggtttgtttgctaaatttgtgattagaaaagaaactccttaaacacaatttttgctgataaagttttacatgtgctctctcacacctcttatgatgaaacttgggttttcatctgtagaaaatagtgattcgaattgtgtgttgatttcatagaataatacatatttatatacaaagttaggagactaaatatctactaaatatctaactcttttacagctaatatacatctaatatctaacactccccctcaagctagagcatagatgt

SEQ ID NO: 230895 - DNA, 4483 bp, Cannabis indica
aattcagctaaaattacagtagatacttttttgtctatacttgaagccagttttttcttacgatttaaattagaaggtaaaagacaaataaaattgtgtttttgaaattaaggtggcaaatggtgatgggactaacactattagtgtgggaggctttatcattttagctatgaaattcaagtcagttggcagtgtagactttgcatgtgtaaaggtgtttgttattcataaagtttcttttttagatttctggaattagagaatttcaaattaaattgtagtgttgcatgcccaagtttgtacctccatacatgattcacgaaagtgatgagaagaaaaaatttaggttatatgtcttaaaaaaaaaaaaataagaattcagtctccctcatcattggctcaggaacttcccctcaaaatgtttgcttggtgttgacaacacaagattttgtatttttgtgaaactcctaatcacaaaggagagacaataggcaagtcaaatcaattgccaaattccaataaccacaccattaggaagagattgcaaatttctgcagtttctgatggaagcattttacatttgaggtgtttggcttttatctacagttttagaaactctccctgtatgttttcaagattcataaggtgtaggaaaaataggagaaggctcttgtttactcggatgtgccatgtaggtggatcttttgatgttgcaccatgtattaatatttgtagaaggttttaaattgatagaagaagatggttttttataggctgttttttttttcttagatgatagaattcgtaggaaacttttgtggccactattgtctaaagattgggagaatcttgcaacattttgtaggctttgaatttttctctttaatattttcatgaagcgcgcttagtttcatggaagactaatttaatggtgttctgctaaatcttcaaggttaaaccaattcaaagagatgattccaaagccagtacaagtgctgggtaagggcgctgccataatacttgggggggttgtgactctcaatctggtttcctctgccactgttggtgctcttcgggcggccaacgaagccaaacgggtaaactattttgctaattcttaactattttttcatcttttagatagtaacattgatggttttattcagaaaagtgtagcggaaccttgtcgggtttgtagaggcaaaggcttctacatatgcaaactatgtaaaggaaattccaccattgaatggtcccctttgcatgacccagttgccatcaatccatgcttatgccctacatgtgatggaaataggttagttcatattctcaaacaatttttgcatcgttatttatttatatatctatttatgtatatgcgtttcttttattgataacactgagtagagtgatcataggctatcctagtagtttcacgcatccaagttggaatccctatctgtcaaaagaaacaaaaaaacacttgtggaatagaagaatccattttattgtgagggaatgtatgtcctttgtatcattcaaattttcagcaagaggcgtttcactgttttcattatttaactgcaaaggatcaaataaacatttgctctaatgattttggttatatatacatttatatatagataaaatataattttcagccacatggttgtttcttccttgattgagatgaaactttttgctttttatgttgtgttttgttttttttatatttgttaggaaatgtagctccgatcctagctatgcacaccaaagttcttggaaagttatctctatgccaaaagaagatagcttatgaaaatgtaatttattgcacactggtttagggtgaaaatgtaacttgtttgagacctttgagtgttgacatcccatccccttcatagccagaatcgacaaagccttgtatttcttgctgtgatgaatctcacttatacaagagtccatatttgatgtttctttgtggtatctcatgacccactctcctgcattccaatgctcttgttgttgatttttcataaacctgcttattacatttaggttgtgtcacaaatcaggcctagtgcataccataatgtacacgaggcttcccactagattagtgtagggaattgactccatttgcttaagttctttatctgtggaaggtgactgagttttggacaatttgaaatgttgtgctaggtagggcaagacatctgattcgattcaacatttttctcctcatccaatccaatccaattagtaattggatttgaaaaatcaccatccgatccaatccaattagacctcaaaatccaatccaatctaatctattagaatggatcaatttttttaattggatatccaattttacacgtaagttttaatattaacttaaaaatatgaagaaaaatacgtaaaaattaaatatcaccctttatttaagtttaatactccataaaaataccatcattacaagtgtaatgcaactaaaagtttgaaataactaaaacaataacattgctaagtaattaaatagaacaaaaaattatgaaaataaatatacaaaacaactaagtattataaattcaacacaaaaaaaatccactaaaaatataatgaatatattttttattatataaataaatataaataattttttaatgtatataaatgtaattagatttgatcaatttttaattgaattttgaaattgaaatctaataaccgatccaatttaattagaatttaacttttaacatccaatctaattgtaattggatatctaatttttcataattggattggattgggttggttcaattcaattggattggattagatgttgtccacccctattaggagtgtacttactggtttcgcatcttaaaaaccaaacctttaaagtactttgagatgtagagatagcagcaagttcttttctttcctatctctcagtatctcaattcctagaatcttcatagttgcaccaaggtctttcattttaaattcaaaactcattaactgttttaccttcttgttttcctcactgttcttgctcgcaaatagcatatcatctacatagagaagtaggtacaccatagatttgacatttatgtttttgacataaacacagtagtcataaacattctctttgaatcttgatttggtgatgtattcctcaaatctgttgtaccactgtccaagagattatttgagaccataaagtgatcttttgagcaagcatacatagtcttcgttcccctttacctcataaccttcaggcttcttcatgtggatttcctcatccaattccccatgcaaaaaggttgttttcacatccatttgttccaattctaagtcatttatagttgttaaagctaataacatttgaattgagatgagaagatttcaatacttgtgagaagatttcaatgtaatttaaaccctctttttgtgtaaaaccccttgccacctagtcgtgaatctagctgagtcacatcctggaattgagtctttgtgtctgtcagaccacttgcaattaattatcctttgtcttaaggttttctcaccaaaatctaggttatgctctttactaatgaatccatttcattgtccattgcagttccccactttctactattagctgagttcatagcctccttgtttgatcttggttcattatcacttatttatgcaacatttaaagcaaattgaacaataacagcataaccaaatttgcttggagcttttgacactcacttgactatgtccctgaccagttggtagtgctgcaatcctatctcagtgtcttcattttcatcttcttcaacctattcatccatagtgtgagtaccgatttcgtcatcatttcctgtctcataatgatgcatttattggtcagaatttgaaccaagttccacctcaaacttggacctatttcaattttgcactttcatagtcattgctgtagactttaaggtaaccttatagatgctaccttcatcaaacgcaacatccttgctagcccaaaaatatacacttcatagccctttgttccaacttgtcaagcttgatgtgagcatatgctatgtatccaaaagttatgagccttccatagtcaatagtgtgtcctgtccatacctcaactggggtcttgaaatttatggcagaggatgggcatctgtttgtcaaatgacaaactgtcatgatagcctttgcccaaaaatctttaggtaaccaactcaagaatggttcatcttttcagcaaagtcattttgttaagggtttataggtattttttatgccttgcaataccattctttttgcaaaagcttgtaaagtcatctgcacagaattctaaaccatttttaattctcaatttctttatttttctgccaatttgagtttccaacagagttttccaatctttgaatgtgttgaatgcatcattcttattcttaagtatgtgaacccacacata

SEQ ID NO: 230896 - DNA, 1235 bp, Cannabis indica
ctaaatatgtgtggattagattgtgtcggttatttttacatatcaattaacatccaatccgcacaagtgcaaattttagattttctaatccaattcaatccacacaagtacaagtatccacattttgcagattgaattagattgagtatttcatgaacaccgatagtcaaaactaagtaaaaaaatcgtaatacaaaaatatgttgggaagttgatatcattttgtatattgcaatgaggtcaatgtcttgttattttttttgttgctctttgtatctgtcttttgttgttttatagttggtttcatgttgttgttaatgtattttatagttttttttttttttattgaaatacagtaatttgtaattttaaaaatttaagacaattttttaaaaacttagtatagtaaaattataaaatcaaaagtataacagtaaaaatataataaaaaaaattaaatattttttaagaattccttgaagaaaaaaaatatgtcgtaggcaaagcttccaaatttcgagaggataagttgagaaatacctcttgtttgtatccattaatcaaaaatactttcatattatattttattaaaatatatccacttttttgaatgggttgcccaatatatcctcattttctacctaaatatagtatataatttacattaatataaggggtctaataaaggcattatctataaaagtgagtatatcttaaagaatataaaaataaaaataaaaattaaaataagtaaaataaaataggtataaaacgtaatttcctcaattttactagtgtaaattgtactttttttttcttttttgaaatcgtgtaattttaattttaaaattataaaaattgttcaattgggtcgacaaccatattgaagtgtggatgctcacatttgtatggaccaaaaccactgctgtaactaggcccatagcctgtggaatctctataatcttgggccgttgttgaattgttagacattaacaatcataagagtatcaccttgtgttatcaatgaatgtgatgcgtctatttatggaattatttcataaatacacaaaaacaataaaaaaattataaaaatacggtttgacaaaagtttaaatatttttataatttttttaattttatttacagaaaatatagtctttttatgttgcactcttgttaatttattgttaatttttttattatttgtatgttatttttttgttattgttttgatg

SEQ ID NO: 230897 - DNA, 2210 bp, Cannabis indica
tcatgcagagaaattttgtgagaggctctttgacactccgtctcacttacttcaaagaccttacagtttagagatgaaagctgcaccacgaagaaggaatcacaccatcgactcaagatggttacgtaaccgccctgttccaagagctgctgctgcctcacctagtgagacgaatgatgggggtcaagagtatgttcggcggccaccagtggaggaagaggagaggttgtctgagtctgaacgtgatccgaatgtaagtggagggaatcatggtcttcaaggtggcaatcccatgaatcatggtaataaattattgattggcaatggggatactcaatcaattttatttaaagggccagcaattactctccaggatgggaaaggaaagtctcaattaggagggaattctatgtcaaccaatttaattcaaaagaattatatacccactgacgaaacaaaaaggaagagaatgtttatggactcttcatgtgggccaaaaagctacgaaattgggcatgggcaaacttttttaatagctttggattctcataaggggaatggtgactccctacatgaggaggctgttgatgggcttgatgcaattatgcttcctgtcaacgaggaaagttcaaaaaacgtgattggggcgggttctggttctcagacccgccaagcattatgaatgctataagttggaattgccgtgggcttgggaacccgtgggcttttcaattccttaaagagattatctctcaaaagaaacccaagatggtatttttatgtgaaactaagtgtgctaaagaaagagttgaatgggtgggtagaacattgggctttgaaggtgtttttactgtggaggcccaagggagaagtgggggtctagccttattttggaaagctaatcaagaaggtcacgtggtgggcttctctcatcatcatattgattttgtagtcagggaggaaggaaaggaagagtggcgtttgacaggggtgtatggtgaatctcgaaggacccatcgacaagaaacctgggaccttcttcgtactttaaaacaatcctcaagcttgccgtggtgcattttaggcgatctcaacaacgtggtttctcagcaagacaagcgcggtggacagccttatccccgttccctgatcgaaggcttcttgcaagccttaaacgattgtgatttgacggatatggagctcctcggttacccgttcacctgggaaagaggcagagggacatcgaattgggttgaggttcgactagacagagcacttatctcctcggattggtttcgactatttccccaagctaagctaagtaatcttgaaacttcctcttttgatcactccccaattttccttgaacctgttatagaatcctttaatctttatcctcgtaaattccgctttgagaatgcatggcttaaggagcccttatgtgtagaactgataaaagattgttgggattctatgaataatgaagatattgtgaagaaaatccaagcttgtgcagataagttaaccgaatggggcaaggatattacgggttcattcaaagtgaggattaagaagtgcaaacaagaattaaccagtttaaggggcaagagagatgcactttctgtgcaacgttttggagagttaaagaatcaactctctcggattatggaccaacgggagaccttttggaagcagagggccaaacagttttggctcaaggaaggtgataaaaatagcaggtattttcatatggctgctactactagaagaggaaacaatgctattggaaagctcagaaatgggaccggtcaatgggttagttgggagaatggtttatctgagttgattgttgattattattctgccttgttctcagcttcgggtgcctcttgtttggaagtggtggaagacattgaatgttctacttcttatatggtcaatcatgaactgtgtctaccgattaaagaagaagaagtccgtagagcgctttttcagatgcatccttcgaaaagtcctgtccccgatggaatgactccgggattttactagaaatgttggagtatagttaagaaagacgtggtgctagtagtgcaaaatttttttcaagatggacagttggctagtagtactagcaaggcacatgtcgttctcattcccaagaaaaagaatccagagctggttactgatctcaggcctatagcgttgtgtaa

SEQ ID NO: 230898 - DNA, 823 bp, Cannabis indica
tacaaactcaaaactttggtacccgctatttacccttattattattactattccaaattccaactgttctatgaatgggcccagctcagaaaaggcttgggctcttctaactatggatctttatctttgggctaagatttgagaccatatatttttgttggaagtaagcccaaataatatggagagctttgtctatttgttttagcccaagtaataatacaactttttaaagttctcacttcatccatttaccaaaattcttatagatgtatttcaagttgaaaagatgcagacacaattactattgttaattgaatttaagtgatcacttaactacaagagcaataggaaaatcatagtataagaactagctagagtttgaaccattactaagtttcaatagtaattggctgccttgtttccccgatcatttaactcataatttttttaagtgtaaggcactgtgtagatatttttctttttctttcccattacattactttcactccatatatactttggtcctaaggcaaaggaagtatatatgggaataattaatatatgcagggtcggccctaaggcgggctaagctcacgcttaggctcactcattttaagggccaaataaaaatatatattttttaaaaaatatacttattttttaataattttatagtaatggttaattttttattttttttttaacttatgagctattttaacttaggccggccctaaatatatgtttaggtgcacatataagtgtcaataatcaaatagagttggggctttcatataaaaaaagaatttctagacaaaaaaaa

SEQ ID NO: 230899 - DNA, 840 bp, Cannabis indica
atcccttcctcaagcaaagaacaatatatttccatgtgagcatagtatggctccacttctccgccgtgatttgttcccttgcatcttggaaacagatgggatctatctttatcaagattcaacgaacgattatatagttcctgatggggatctcccgttgtgctatcgttattcaaaaaatgatttggctgttgaatatcgttctcgttcgggtgtaatacaaggttggaaagggtggatttcttctgtcgctacacgtttctcaactcctttatcttcagctaagatcttatctcctatgcttgcttcttctgatcttgagatatatcgtgtaaaatcaagtttagatcaattagtgtcatattggagtaaggcaacccacacttttattgtaaattggggagagtttactataactttggaggatgtttatgcattacttcttttgccgatttgtggtacaacttcattggtatctcctttatcaaatgatgaacaatctctgttatcatccttaaccctagccgtagaggatttaaagaaaaggtatatgaaaaagaaacagtacgacttgcttgattgggtgagatattttcaccaagaagatagtcaagatttggtagaattagcatcttgtattgctttatggttgagtagatatattttcccctcgaaaacttctagaagaacagttcaaagcgccatgtttccgttggcctgcagactcgcttacgggaagcactttcctctaggagctgcgtatcttggaactttgtatcataacctcgattccatcattactgatgccaattcttatagtgaaaataaggaggtgataag

SEQ ID NO: 230900 - DNA, 793 bp, Cannabis indica
cagaagttataatgacctgaattacaaataaattaacagaatctattcaactaatagtttggatatcaataatactgcttcaatgaaaagaatgtggcaggcatattcttaagctgatattacttcatgaatagaaaaacaagagtttacattgtttgtaaagttccacagcagaaaaggagtgagtaatagttaaaaatagcttccgagatcatttgccataaactgaccaaattcgctaatgaatacagcagtatagctttgtatgctcaaccaaaaaagggagcgagtagaattccatatatcagaaggaaaagaaaacatcaaattaagtcaaccacttgattttggtttggaattgttacaaatttaagaaagtttgcagtgggtgggtgggtgggtggttgaaattttggggtttttttttttaatgacattgggggagggggattcgaacttggaaactcctctttgtgaggagaagtgtggaaccactaggctatgcctatgaccacagaaattttgggtagttaatttagtcaatggctgggtttaggaaagtacaatagtttaggaaacttttgattacatgagaatctgatatgtttggaaatgtttgaaagaatgaactgcaagggaatgatagtgtgttatgtaggttgcttcttatttgaattgagctacagctactagggagagaacaggctatcggattccctgtgtaaggtaggttgtctttttatatgaatgccctgtggtacccttcacctatgataggaggggaactagccaa

SEQ ID NO: 230901 - DNA, 1442 bp, Cannabis indica
tctctttgagcgggattttgagcgcggattttgggctacacgattggcgcttcaagctggtcgtccaatcctctactcctgttcagatcgtttctgagatcctgagttgcccccagcctatcaaatatataaacacatggctgcctcagtgactgattaatttggccaatttgctaaccggcaccattaacttggttgaaattattgggtatgatttctcctgatgaattactagacaaggtctgcccgcctaccacttgacccacaggtgcaacctgtgaccagggattgggcggctgaccatttatagtctgagaggtgttcatcgctggatcttcgtcggtctcgcccaaagggatgacgtttacaggctattgtccggcagcctgataggcttttcgtatcaacatagtggcctgccgactacggtcgtcaatgactgcttgctgagcccttaacgtttccatcttcttatctctccattcagcaaacatgcccctctgctcttcaaacgcgagattcaccgcagcacggagttcctcctaatcgtgatgcagggtttcggtatgaccctacatgactccaagagcagcacggaggttctagatttcagtgtcatctctaatggttgtttgaacattggtaacgggcggaacggctgtgttatgaatgccctggttggctgctgaactggtattcccaatctcttgcacaccagatgcgatttcaatcacaagagtcatcacaccgcgtcaacctggttggctacaggtgatggctgttcaggattcgtggttggcggaacctttgtgttccctaggttctgcagtgcacgatccactgtctatggattcgtcgcgtcaacctctcctctgcgagtctgtaccaccattgtatttgtgattagatttgagataaagaaagatccttgagttcaactctcaatgaaagcaccgaaatattgacctcgcttttagccaacgacaatgagtctaatttgtaagcaacaaatagtataatataataaagcaaaataaatacacaagaattttatagaggttcagccccgagcagttcggtaatagcctaatcctcgtagtttgtatttacttaagaataaggagaatgattcattttcttagagctcttacaataatatctctgaattcaaattcttagacaagttttcgaccctcttgcccagtgagtatgaatcactatttatagggctataagcttcggaggaaagtatttcccttctggttacaattgatataagtggaaagattgcatagtaaatacataatacaacaattgtgggattcgaacggcttgctatatgttgggttttatgccctaaataaaactcatttcaatataatcaaattaacttattaatataaatcagaaataacattgaatgttgcatggttcacatgatt

SEQ ID NO: 230902 - DNA, 1349 bp, Cannabis indica
atcatgaggttcctagttcgaatttctcatcccccaacgtcgaataataaaagagaaatttgataattattatatctaattatttaatatttttaaaattaatatttataattaaatttgtttaataaccatttatgagttattttcatttaattttctcagtgggtaatactcattgatggttactaaacatatttaattttctcagtggctgctgatgcagctgttattagttggaaaatatggtcagttcgtaataatttggtgtggaatgataaaacttgttcaacttttgaagtggtacggtcggctagactcgttcttgatcaatggattaatgctaaaacacaaaaataaaagaagtgcattgttgatagataatattaacaatgttgttgagtgttggaagaaaccaatgacaaatacgattaagattaatgtcgatggtgctatttttcaaaatgagaataaatttggttatggctgtgtagctcgtgactctaatggccgattaattgaagcaatctcgggtagtcgcttcggggtggttcaacctgaaattgcggagataattggagtcaaagaagcgttgagttggattaagcgaaggcagtgggctgatgtggttattaaaagtgatgctttgatggtggttcaagcaatcaaaagtagcattcagatgccatctcaattcgggatacttgcttatgattgtcgtgttttgttgtcttctttgaagaatgtgtctttattttttgttaaacggtctgcaaacaaggctagctgctcattgtgtggttagagggtcttgtttattgtcagattgtactattagtgagcatgatgctcctgatgatttgaactctattgtacttgctgaaagtatttgaataaacaatcatctttcaaaaaaaaaatatatattaaatcatcaaattatgatccaataactaataataaaagagaaatttaaatttctatatttaatttaattatttacttaaaaaatatctctttttacactatatcaaaaatatgttcatataaaaatacttaagtcaaacttaatttttacttgtcctttttttgctgaaaatttttttcttttaatttttttcctagccgatagaataagttcagtttaatatgatgtaaaaataatttttttttttctaattagatagaaaaattaaacataaaaacttaaataattctaattttatccgttcgataatatccattaaaaattgacctttaattgttaacggaaatttatttatttatataaaaattaacaatctcatcttattattaattaagaatattttattttatgtttgttctatttt

SEQ ID NO: 230903 - DNA, 1628 bp, Cannabis indica
ttaagataaatgataaagtggtttgagaaatattcattctttaattcattgaaaggaaagaatattgaaagttgtcacttaatcggttttgaaagctaaaaaaaatcataacaatactatgacacaataaagaaattactaatctcataaataaaaaaaaaaagaatgcatttcaacttatttaataactatcagcttatatatgtcataattaattataaacataacaattaatatactgctactatcaaataagacaaacctggtacataatgtttctttcaacaagttgatgttattagctaatctaaataagagagtacaagtttatgtgagagctaaggaattttcttctatagatatcgagacatatatttaaaaataagtgtttaattaattgaataatataaaataatataaaattaaatgttgtaccgacccaaaaaaaaaaaataacagtaaaaccaataagaccagcatatatatgagcaacataataaccaacaaaaagtcaacctcaatcttgcctaatcaccattaccaactacaattaattatattgatttgctgacatatatttaattagtttcttgaatgtatatgcgtaaatcttctacaaatcactgtccacaaacaaaacaaaattctcatgaatcatcatagctgaacagatttgattcacatgtcttacaatataaaatatagtgagctctaaattactttttactgagcacaaggagaacaaggagaagtgacataagggaatatagaacatgtatagccttccaaaaaataagtttatagtctggttaattgtgtggaggatgcataacagagacgattatatttttttgatgttataatagtgaaagaatgcttgatttgtgggactcacgaagaaagtcgtgatcagagctcggaacagaatcttttgagaaaccataaatgcaactatctctagaatcaaagatgagattttcacataattattttctttgtgacagaaaattatatctgtaaattgaataaaaaattttacttgagacttctgattcaaagtagcacaaacgtccttatttatatgtatatatatataaaaaaaaaaacattatcactattcctagttcattgtccatagtaatatactatgggcacaaaaattggactcttgaaatataaaatatggttaaaattactgccaacaaaattgaaataagacaaataacaaaatttcaactaaagatgaacaatattatgcattgtaggcaggtaaaaaaaaatccaccatattagaacaatctccaaaatcacacatcatatgttgcactgtagatctataaacaacactaaaataattagatattgatttggggaatatgcatctattatatctttcattcataacttatattctttttgaaagactcattgtttgtgtttagatgaagtttcaggaggctgccaaactccaacattctgctttgaagaacctccagtgatgagttcatcttttacccaacagttcacactctaatctctgtctatgagcaaattaaaatattgaacccaaaaccaaaaattatatttatatatcaaatcaaatatgtgaaagtgataccttaatatat

SEQ ID NO: 230904 - DNA, 610 bp, Cannabis indica
ttatgttatctatgtaaatttcttgtttatctgggattgtgctcggaagcggtggaaagcgacgttgggccatatgagagtcatgcttttatatggtttagaatagtttggttagcagggtattatggttagacattggagtgctgggaaattggcgggattttggaaaagaccaagatacccctttaaagtcattaaatccttattttatgcttggggcatataagtcttttgtttgaaggtttttgtcctttgtgtgcatgatatattcagattagtattattgttttattttaattaatgttagtaagataaatagaagaaaacctagaaaccacttttcctccatttcttcttcttcctctttcgaatcaccctacagccagccaaggattccaattgttctcaactgaaatcaaggaatttttaggagggtttgaagctgaaattaaggtatggagttttgatcttagtgtctttaggttttttcaactcaaaataggttactcatgtatgaatttgaggaatttatggctgtttgctttagaattgtttgaatttgttttctggtgttatatagagattattattgttgctttaagccaagata

SEQ ID NO: 230905 - DNA, 1009 bp, Cannabis indica
ctcattgttactggtaaagtccctagaagagagttcaaaggaaaacatggtacaagtggttacagaggaaaccagcccaggtttagttcaaagaacaacccagagaatcacaattccaatgctacagcagggaagaagtgttactactacaagaaagaagggaattttagagatgattgcttggctttgaaggccaaattaaagagagaaaattagcacaagttcaagaaacatggtgttactgatgttgcagatggctatatgtcatcagatgcacttgttgtgtctagctcgagatcagatggtgaatggatcttggattcagggtgctcattccacatgacaccaaataaagaactgtttgattctacactagtggatcacaggggtacagttctgttagggaacaacaaggcttgtgaaatacaagggattggcacagttcagttaaagaatcatgatggaatcatgaaaagcttgcaggatgtgaggtatgtgccagatcttaaaagaaatcttctttctattggaatgtttgataaattaggatttgttatcaaaattgagaatggagtaatgaaaatttatcgagggtcaaaaactgtgttgaaagaaacacttaagaatggtttatattttctggatattagtgctacagcagggagtgttgcacctgctgtgaaagaaaagctgagtcatgtcaagctttggcatttagattaggacatgttagtcaaagaggaattgaggagttgaataagctaggcttgttcaaggagaaattgacagaagaacttgagttttgtgatgaatgtgtgttgggaaaggcctacagactaaagtttcctaaggctgagcacaacaccactgaaagacttgcctatgtgcattcagacctttggggaccctctagaattcaaaccaaagaaggagctcactatttcataagcatggttgatgatttcagtagaaaagtgtagattcgcctattgaaaagcaaggatgaagc

SEQ ID NO: 230906 - DNA, 1329 bp, Cannabis indica
tttagctttgttggtgaaggcatttcaattaaggccttttttttttggattggcttcaatttctctcgcattaactatgaaacctaaaaaaattcttgaggaaaccccaaaagaacatttcttagggttaagcttcatgtcgtattttttgagtatgttaaaacattctacaaggtcctttgtgtgatcctcactttttactgacttcaccagcatatcgtcgacatagacttccatattttttctaatctggttctcgaacataccatttactagtcgttggtacattgctccaacattttttaatccaaagggtatgactttataataataaagtcctaagtttgttacaaagctcgtatactcttaatcagggacatgtattttaatctggttatatctagagtatgcatccatgaaagtcattaactcgtgtctcgttattgcatccactaactggtcgatcctgggtagtgggaaacaatctttaggacatgtcttgttcaaatttaaaaaatttatacaagtcctctaggtgccgtttggttttacgacaagaactggatttgagatccatgagggataaaacgcctcgcgaataaaatcatgtgttaacaatttgtcaacttcttctttgagcgcaccttgtctctcgaaatctaatggtcgtcacttttgtcgttttacaggataattggggtcgatattcaaatgatggcagattacatttggatttattcccaccatatcgtagtggctccaagaaaactgatcctggtttgcctttggaaagataattaatttctattttagttcttcctccaaacttttcccaatgtaaacacattttttgggatcgtttggatttaaaataacttcttcaagctcttcaattggtttgagttagttattttcatcttgaattcttaggtccaagtcctcttctttcctctcgtcttcttcagttaggattaccattagttgatgattggctctcctactctaaagttctattcgatagcactcccgagccaataactagttgcctctaactactcccactctttcgtgtgttaaaaactttaggaacaagtgtttaattgaacttactgcccccagtccaattagtgctaggcgacccatcaatacattgtatactgatggaatatcaacaactaagaactcatgcatttgtgtcatttataagggtggctctcccaccgctaatggaagctcgatgatgcctaggctagcgacactgttgcttgtaaatccacataggctcaccatgcatggtttcaactttacatcctctaaccccatcttttt

SEQ ID NO: 230907 - DNA, 939 bp, Cannabis indica
ttcccagtgagttcgaacccccaagctctcaaagtgttactgcaatgatgaattttaacaactagagtagaattagcattaacctcccatcagtttttcacaatttgcttacaatacggctcacgactccatgcgttttgatatttaaaaaattgaatgtggttgcctcggttacttacaacaggttgcagaaaaatgggagtatggtcacttgaagaaaaatcatagttggataaaatggcattggggaaaagatcaagccaatgttgggttacaagagctttatctaaccttatttcaacatgatgagtagtccctctccctcgttcccatgtgaaggcataaccgtgaagcttcaaatcgacaaggcagcaatggcgaatgacatcttgaaagccattaatcaagtatgaggggtagggtcggcctccttgtttttcatcttgagaagcaatgctattaaaatcgcctatgatacaccaaggcaaagtcaagcaaggggcaatggtcttgagcaattgccaggtacggtcacgaagtgttcgatttggttcaccatagaagcccgtgagtctccattgtgcagaaccaggagagtgaatttcaatgtcaatgtggttgtccaaatatccaagcagatgggcatcatcagtatttttccaaagaagagcaaggccacctttcctcccttgggcttcaacaacaaagcaactatcaaagcccaacttagtttttatacgatccatagcatcttttttacacaaagtctcacataggaaaagaaaattgggtttcttttggacacaaatgtctgttaggaattgaatagcccgtgggttcccaagcccacgacaattccaactaagagtattcatgatgagcggtgggcctgaacaccagagcccaccacaaaatcgttttttggcatctcctcagtat

SEQ ID NO: 230908 - DNA, 2766 bp, Cannabis indica
aagttttgttggttcattttttttatgtgttatctcattccaaagctttcatgaaagagatttgtaattttgttggccatgttctatatataatttgattattcatacgcactaaaagtgaaacttagaaaattttctataaagagaattaaggattattatttttccttttaaaataggggacctccagaagcaaagtgcatgaataaggctagatttgcttccttttcataatgagaaggataaagaaagtcaatactagtttatagtctaattatcatgatttgaataaagcttaatagtgtatcaaacttacaaatccatatataggtactagtaaaaagtatgctgtcaaattttacaagataagcttccatgataacatagcctacttaacttgagaatttatgaatcaaagacaactacaaaatacaacaatgttgcctattgatatgaaaattaaccaccattagaaaattaaaccatagaggctcaaaatgatgacatctccaacttaattgctatttgcatcaaaaggttagaaaagttaagttaatctaaaagttgagttaatcaaaaggttttcatctccactaaattgttatatattagcatcagcaattcccccagcagtattctccctcagcctttgtttcctcaatctctctttcctcttcttggtttgttcagtttggttaatggatggtggcctttcccttttctttggctaaacagttgcctacaaatcaccaagttttatcttattagttactaaccaataacattaaacaaacatagatgcaactaaaaaaaattcagagataacaaacttgaggaattgttgtttggcattttcttgcaatatggcctgctacaccacaattgccacatttatgcacctgtctatatcttcttgtcttggttgtatttgcaggtggtggttcatcagcatcccttcttctattcttttttggtctccctgacatgtttgtttcctctggcagttcaattgggttaagacctagcatagggtgtatcacacccgcataacccttcaacaacgtatctttcttgtaccagtcatgaatgtaatcccaaacttcatgacctacctcacatatgcatgctaatgcatgaccacaagggattccacttagttggtaccttctgcagcaacaagtcttctcagctaggttgactgcatagctgatagtgcctgggcagtccacttgaaaaatcacttttgttgcccttgtcaccaaacaatttctagtagacttcttgttctactctatgatcttcctgatgttttttcctactggttcattccatctagtgacactctcccttttcttttgaaacctacacatgagccaataccttaacttttccaacaaagttatgattgacttgtccctggcatcagtaatggcattattgaaagactcacacaggttgttcaaaagaacatcacccttcacaccttcagaaaagtaagcctttgtccattctgtacgtggctttgcaaccaaccaattatatgcagcgacattgacttccttgatttctaccattcttctatcaaattcagcaatagtcgttgctcttgcagcaacccacaacatttgtttcatcaacaaaccaggaaaatccttcttgaaattagagtaaagatgcctaacacaatgtttaacatctgaacctgtgaaaactcttccaactgcattgtccaagcctttttgcttgtcactcatgaatgtgtatatatctggcctttcactttccagatctgtcttcagtagatcacaaaaccatgaccaagaatctattgtctccttctcacaaacagcataagcaatagggaaaatggcattctcagcatctatcccaacaaccaccaataatatccccttgcaataaccctttaagaaagtaccatccaaacaaattagcggtctacaactatttctgaatccatctttgcaggctttcaaacaaatatatactctctcaaacactcttttttctccaaccattttagtcttgatcttagcagtactacctacattattaaacaacaacataagcagttgaacgtaacaaacaaaaaagaaacataatatcttgagcaattaaaaaaatagtacataaatgtataacataaattgaatcatagaaaagcattgaaatgttacaaaatgaatggttcaaaaaaggataccagccagcacgctttcaatacatttgaaatgtttacttttattgttttgcttttcttctaatttggcttgagttatgaatgagaatagtatgaaatgtctataattaagatgaaggtgtaattttcattgaaaattatgatataatactatggagatattagctataaaatttagtgaaaatagtccttttagaaacaccatgataacacaataatatttaggaaatctatgacaagattttactgaactgtgaaagcctctaattgagacaaaataccattatatataaagcacaactacctttttgttttgtataacgcttatttgtgtacagagtacactaattctatattttatgtgaaatcatttgtaatcaagaatgaaagaaaaatagtttatacttattaatattataatgaggttttattttagtgacgaggcatgaaacaaaaatagtaattgaaatggatagaactaaggaggcatttggttgggaggaatgaaaatataggaatgggaatgagaatgggaataggaataggaa

SEQ ID NO: 230909 - DNA, 727 bp, Cannabis indica
actacattacgttaaagatagatgacatactaaatccaataaaaatgggattgggaaacacttcagataggaggaacacaatagaaagtaacttaaatgcacgcatataattactcatacaaacacattttctaataatgagatgtattttcacaaacagggaaaagaaaactactcttgccataaattgatacaataaaacggtccacagtacatagtccatacagcctaaattgatctcttctatcataattcaaaaactaaacccagttcagaggttcctcgtacctgcaatatcttgtagaatttgagcttaaattcgttcctttctgcatcatcacattgagctcgaggcccatacaaattgaacagaactgaccaaaaatcacatcataaatcccacatttccacgccataatcaaaagcaagaaacacccttttttttttccttctccctacacatttcatgcttggtagtagtagtagtagcacttaaagcctaactaacgtttaagaatgtgttatatctaagatttttatttttggtttacattaacggtttaattatttcattaaatataggttgataaggaattctttctcattttagcctgtatagttagagatctatagttaatgggcttagcatctttgtacgcacaagtgaccagtctaactagatttcgttgctaggttttatttccaactctataaataaatattgtct

SEQ ID NO: 230910 - DNA, 1070 bp, Cannabis indica
cttccctatgagacttctgtattgtgtaggattggtgagaaggttgccggtttcattgttgagttttgtattgggttccattggagttgaaatcggttttgtaccaagcttgccactgtcttgtaataattgtagggtaaatggtctttgacttacagaaattccatttttgcagcgagctatttcaaggcctaagaaaaatcgaagagggccaagatctttcaatttaaagtgactgtcgagagttgatatgaaagagtgaagggctgtagtgttgttggtggcgactatgatgtcgtcaacgtatataagtaaggcaaggaatgtatcatgggagcgttttatgaacagggagtgatcattctttgattgagtgaaaccttgtgtgatcaaagctgaactgagcttggtgtaccattgcctagaggattgtttgagcccatatatgctcttttgcaatttgcaaacaacattgggagggagagctcctttcggtttgtaaccttggggtaatttcatgtaaatttcttcacggagatcaccatgaagaaatgcgttgtttatgtccatatggtgaaggtgccattggttaatggcagcaagagagaggagtaatttgagtgtgttgaacttagctacgggagcgtaagtttcgaaataatcaacaccttgttgttgagtatatcctttggcaacgagacgtgctttgcatcgttcaaccgagccatcaggattgagtttaatgcgataaacccatttgttactgattgtgtgttgtcccgggggaaggggaacaacaatccatgtttcatttgcttcgagagcgtctatttctgtgtccatggctgtgttccaaacttttattttgcaggcttgtgcaaaagagcttggttcaatgaggtgggagatggcaagggcagcagccctgaactgaggagaaaagttcttgtatgataggtagttggtaatagggtgttgtgtgctggaagtggcacaattgtaatcggttaaatgagcagggaggttttattggttcttcctgatttggttgttgttggcagagtttgggg

SEQ ID NO: 230911 - DNA, 2241 bp, Cannabis indica
ttttatactttatttgtatattatacgctaagggttctaacagtcaacatgtttcatctacatctcttcatacgtagtgaagttgatgcttcactttgtacttctgacatagaatggtttctcgtcaacgcgcgagacaatagtttgtatatccttatctcgcttaagactttacagtcagcaagttgtaaatatactctatcagctctgcatttaatgagttattccatttcaatatcatttaatataattgtcatcatatttgttaattcgtattctcccagcttggaacgtgtcctcctctgaagtgccagccgaattttgggtataacaattgccccttaaaaagtgttttttaataagaagtactttttaaatgattgcatagggtatatttgtcataattctttttgaaaaaatgcatgtcctctgattttagccattttgtggtttcgaggtacataagcatttaatgaccatcttttccacttctttttcaaattctacctgttggatcaattgtctctttgttctaacggaagttaacctaagggtataaaatgaaaaaagaaaccacctttacactacttttgccattttggaaactctagaaattttttaagcttttctgcagaaaaaccattcccagatttgccagaaaccttgcatgccatctctgtgattaacatttttcttgcgagtttcatctgatttgatttttgacttcaagcattcggagggatcttcacgacgtacgttgtttcgtagattgcaaagccgctcgttgtctcgaaaactaacttcaaatagtaagtgacttttcttcttattttcttacatgtttttaacgttgtgtttctgggtttgatttctaatttcttagtcatcacctttgttacttcatctagttttagaaactttagggttgaattttatctgggtaaatgttagggtttaggcagaacataggttttcgagattctccaatttaccaacttttggcttgataaatttctttcaggtattgggattgctttctccttgcagcaatgtcccaatctggttcaaaagtttatcgttaagaagaattagaaatagagtgtccttctgaacttgacatcccatataaacccagaactttagaacctaaatccaaattagagataaatgatgcaagaattagagaaaacttagtgaaaattcaccaagaagataccgctagtccccacagacgcttcttgcaagaaatttcgaaaggcaggcgccgtttcttgcgagatgctgcttggtttgagtcccccagattgtcttctattcctttggctaaacctatgtttttacctaaggtcgcaattgtttttgaagcaggtgacttggattttgaaattatgtcttccaagccacataaatcaaagactcctcgggaccctcacgtcaccttcgaggtagagttaatagagtcgaaggtgcgagccattgcagggtatgtaagagatactttgaggacctttggggtcgaatacaagcaagactactgggttagatcggtaattgctggcgaatttagttgctatctgccagtgcgacttacacgcgacacctcggagggagccagtggcgaggctagtacaagtggctcgactaggattggcgcttggagccttgaacacatcagggctggagcaataatccccctgcaagattatttcaaggactttcctgaaccatctcgggcttgccccattccagctgaatcccatttcatacagaatcctcgcaagtttgagggttctatacaaaattttaaaatgggagtcccccacccctttggaaatagagtatctctattctgtcaaggctaatccagcgaggaagaatgccgcatggttttactatcttgggactcatacatgtgatcgcaagatcattgtggatttgccaaataaaactcccttcaaggatgagttcttttagacgaacggtctctcccgcatcaacacagccactttccgcattatacgtaaatgattattgcacaagacttggttaaattagcccatgtcttttattcaggtttagctgattgtaaatttgtttgtttttgacagctgactggaaaagaccagcccttactcctgagatggctgagcggcgcaggctcctgttgactctcccatatggtcttcgtgttggaatttattttaccaggatcttagatctactcacaagtatgttgtttaa

SEQ ID NO: 230912 - DNA, 1159 bp, Cannabis indica
ggatgaagttgaaatctgcatccatatgtttagatctaaaaagtgggagccccaagtaattaatgttcgtgatagctaagttaagccccagttcttgcatgataccccttttcatcccctcactggtattactgctgaagaaaatagaggtttttagcttattcacacattgcccgaaccaactgtaaaatttctccaggcaactccaatagcctttggcctcgtcaatagttgctctacccacaagaatcacgtcatccgcaaagaaaagatggaataacttggggccattcctactcaatctgatacctttaatagtgctcgtgtcaatggccctttccaagatgcgggaaagaatgtccgcaacccaaatgaataggtacggggagaagggggtcgactttccgtaacccacattcaggagaaaaattgctaacctttcccccattaaggtggatattgaaggaagtagtagtaatgcactgggaaacccacttacgaaaaaatgtctggagctttaaagctactaagtacgtgatcaataaagttccagctaagtttatcgtaagctttcaccagatcaatgttgatggcgaaaaaaccttctttccctttcttacgcttgaacgaatgaataatctcctagaccagtacattattgtcattaatgctttgacccggaacaaaagccacctaagcatggcaaatcagtctaggccgcaccggtcaaattctattagcaatgattttagaaatgaccttgtaaaccacattacacagagagataggcctaaactgagaaactttcttagggttggccaccttagggatgagtattacattcgtagcattaatgcctctatgcatggagccagacagaaaaaaatcctccacagcatcacaaaaatcactaccaacagattccaatagtgtttatagaacagtacatacataccatccggacccggggctttcagactacccatggaaaagagggtttgtctaatttactcgaaattcggaatgcttaccaagtctgtttgctcctggagggtcagatggtctgaagtcaggtggtccagctgttggtattatatttatccaagatcttagatctattgcaagtatgttgatttaacaacctaatattgaacttcta

SEQ ID NO: 230913 - DNA, 2963 bp, Cannabis indica
ttaaatgcaagatggagtactctacacgctggaagaagcatttgcccgaacaagcacggacggggcgtcgtcatccgaagaatttgcctactcttctaggacggctttcccctttccttctacaggggtggatggccgaggaggtagattaggctctctaatctggatagtatgttctatgggtctctacccggtcgagagggttttcttcttcttgagcggcctctcctgctttgaatattcatgagcctccttctccttctcaaaattttcctgagcatattgtttggcttcggctccaccgttcaacttagcgtcacgcttaagttgaataagctccttctcctgctcagtttcctcagcacagccagccctgttgtcttcttcctccccttcacaggttgaggtataaagtctatcggataaagcttgtactccagaaagttggcctccaaggttaacaaagtgatattccgggcagcatctagcagatggataatcctctgagccctgtctctaagtgccaatgagaggggtggacggtaatatatcggcatctgttgaaactgagtataggtggaatccatgccctccacgaagtagtactcgttaacaaaactcccgatcttgctaacatccttgtccacggtgcccgtctgccacttgaagtctggctgagagaagtagaagtaccccaacctactttgcttgggggtagacttgtcaaagaactaattgacctcgtgcggagacgacacaccccatccttgaatggcatagaggacggactgggcagatagatacttaatgcctttggggtgaactgggtccgacaaaggcgaaaataatccgccaccctcttgaagtacgagtgcaaaggtagcatcgccccttgcttagtgtgagcacctgaccaggcacaaaacccttttttgtgggttacttgctcagtgtttcaaagaagggacgtaagactcaagtccgcccagacatccagccttgtctaaggccctcatacgtgcctcgcggatcttggacgaagggcccacccatctggcacctaaggcaccttgcctcttgtgagaaactgcttcagtaagctccttggtgatgtagtcttcccctttgaccaagacttcaccctccgcagacactggctcccgggcctcgttataccctccaaagttatgaggttcagccactccttcctcctcggcctcagaagggctgcaaggacggacgtcgtcctgctcctcaatctcctggacctcaatgttcccctcatgatctccctcctccatggcggatggatcttgttcgacacttggcaatgtggcgagcttggccacatgaggatcaaatgcattgacctttcgcatcctctgctttgtgcgggccatcatcctcctcctggatggatactgattcctatgccgtgcaaccgtaacagcagggacagcaattgggatgtcgaagttacccaaacttggacagccaacaggaagagtatcagcaacgcctggccagacgatgtatgtccagttggacggaagataacgcctccaacccttcttcaattcccaaataaagcggctgtaccactcttcggcgatctgctcagagtaataatggtgttgaactacggattctggagtaggagaatgatcactactcccctccaaatcttcaaaactcgagttagaaagtctgtcactcaaagaggatggactggcgcgaagacgaggctgatcctcatacagaagttaaaacaagtcctgatcaatttggtgctcgcctccccaaaactcaccagggttcatctacaaaagacaacacacgagatgagtgtttggcctagatatcaaacattaaataggaaaatatgccgaccaggagtactcaacagattaaaaagacaaaaaatgtataaaaatcaagtcaaaacccagaagtttgaaatttttgggtttagggttaaatttcacgaagcttcgaatgagcaaggtgaaagactaacaatgtgagattaaaggcaaatgtcgtaaaccctaaagccgtacggactattacagagaaaatcacaaagttttgagcctagattttctatctatcttctacaacaagtcaagaacgcatgtattttctacaatggaaacccagaaattaaacatgcagagttaaaagaagaggagattgaaaacttactcattgttcgatgcctaagtgtagtccagacggagctgctcggatacctttggtggaaatcttgcgacagacttgaagtaaaaatccttttttgctctgagtttgtttagtagagaaatcagtaaaagtaaattatgaagaaaatcaagccttatttataggcaattcggtgaaaaggggtaatcatttcgaaatgcttcagatgcttcgattcccccctaaaagaaaatattgggaaatcaaaactaatcaagtgtaaccgtcaaagcatgaagggaaaaccgggtttcgaagcactaattaggtcagagcattaattagtcgaaaattgaagagatgcctagtccgcctcacatcgaatcgcgaacaaacacacctaacacgtgtcacacatcacatactggtgacacgtggaattgacttcacatatttgctcgaaagagatatgccaaacagaacaccgcacatatctgcacgggcgaagccttcctggccaggcagtggacagtacgaacagcatgccaacacttagcaacttcaacacttacatcgtgaatcactgaagcaatccttataactttgggatcatatcacagatctatggcaagctgtccaaatcacttaattagtgtattctgtatgtaatgtgtaatcttaccaattataaacattgtaaacagaaagaaaactttccctcaagcttatagccctataaatagtgatatattatcacttagcaaggggtcgaaaaacttatc

SEQ ID NO: 230914 - DNA, 691 bp, Cannabis indica
ctgcctcaagtttggacatgcccgtatagatagctctaggagggaaggaagttcttggccttcttgaaagtttccatgacttgttggcagccttggaagagctattagttcttcacatcccataatactcatgtttttcaaggcaacaaggcaatgtggcaattgttttagcttaggacagttttgtattttgattttctgtaggagatgaaactctttgctgctttcaataccagaagaagaagaccagtcttcccaatttaacatattctcaaattttaaggattctaaagatggaaatggtaggacagattgatatccatccccataaagttcaatgccaatactctttaccttatccaccccttctatgacaagatctttcagtgaaggtaattgcccaagagatggtaaataatcacacttcttgcaattactaatatgcaagaatttaatattcaagaacaagggggatccaatccatcttggaaacattgtacctccatagtctttgatagtaatgcttttgatgtttttatgaggttgtagcatctcgagtacgagagtttcaactctttcatcccttgaatcatctagaatatcactgatctccatcctcaaacccatagaagtttgtctataagcattcattgtttccctaaagctcggaaaccttgtacttctgtatcca

SEQ ID NO: 230915 - DNA, 1276 bp, Cannabis indica
tatctttgcctctcttagtctctggatgcaacactttaggtggggcaggggccctgatctgctcaaattcgtttctgaccagctcgaatccgctcttcgactgctcaggcttgtccgagctccctccttgggagtcattagacttaagtcattttttggggcaaaagggttgtattggttggctcctcggagagatcaatagctgcctcggccgacaccttctctctggatggggttgtctcactgcccctggacttcttggtcggaggagataagcccgagcttcctcccactctcttcttcagaacttcgagcattttctgagacatgtctgtattaaatgaaagcaacatggttaggaaaaatcatgagaaatgtgaattcttgataattaggaaagttaaaggcaagatggagtatcttgcacatcaacagaagcatctgcccgagcaagacctgatggagcatcatcatctgacgagtcttcttgttcctccaggacggctttcccctttcctaccataggagtggagagccgagcaagtaaactaggctccctaatctgaatcgtatgttcgataggcctgtgctcggtcaaaagtttcttcttccttttgagaggagtctctggctcttcctcaacctcatcttcctgctcaagatgctccttagcatactgcttggctcccgcacctccctttaacttagctttacgattgagttaaatgagttcattctcgtgatgagctccctcagcccggccagcactggatttcctcttcttctccttcacaggctggggaattaaatcctttgggtagagctcgtactccgtaaagttgttttttgaggtcaacaaagtgatattgatacgaaccacaccaacatttgtgatgaaacccgatagcaattatgacagcctctaagaattctccaaatttggatgtggaactgcgaccaaatgtttggttaagcatgaaccttgtgtttggttttgtgccctaaaacccatttcaatataatatgatttactaattaataaagttaagaaattgcattctatgttgcattattcacatgatttatttcatgattatattataaattctattaagtccacaacatatgtatttatttatgattatagtgttgtcagcacagtggaatataatcatagttatatgttcaaaagtttaattccatgatttgtcacttcactggatttagactggcatgataatcagcgattggtattcttacaccttggataagtgtt

SEQ ID NO: 230916 - DNA, 1151 bp, Cannabis indica
tgttgccatcttagaggggggtagaccttctggttgggggaaagatcatttggtctggactaaggaaagtaatggtcgcttctcttacaagtctgcctacctaatccaagcccttcaacagtgcccccactatgaggttgctccttccctctataataagctctagaacagccaaatcctcgagcgtcataaagtatgtggtggagcattttgtttgacgtgctcccaaccaggttgaccctaagaaatgatttcatattgttgacaattgctacccaatttgtggggttgaggaggaatctcttgagcacctttttctcaattttttcctggcctatcacttatggcgctcatccccgtggggtatcttccctgtctctgacacaggtattggtatgtgggattgggtcaaatttatttagagcattaagcacaaaggcgtgaatgcaaatgaggtcttcctttatgaatctattgttatggacacaatgtggcgagtttaaaatgataagtcataataataagatggacagtgtgaatcattgtattgactctattctacactctttcgcatattacagagctacccgcatcccttctcctccttcaatccactctattgactagtgccccctcctcaagattggctcaaactgaattgtgacgttaaagtggggttggagtatatgtacgtattgcggttgtagctaggaaccacctaggtgaggtgatttgggctactacggcaaaattggatttttcaaatgcactttgcagtgaggttgtcgttgtttgcttggcattggaggtagcaaaggaaaaaggttgcaagtttatcattgtggaaatcaattctaaggtagtaatcaattcttttaatggtgtagaccctaggttgaaaactgagaaccactcctttttttgtaatagaatcatttcttcctttgctagctgtttgttatgtagtactttaagaactggtaattttatggcccataatgtggttaagtggacttttatccacaactggtttggtcgattatctattttttccattcctaagaacatcttttgtaatgaccgcgaggtctagtttttctatctaatgaacatttatttttttaaaaaaaaatctagcgtccaaacaaaaa

SEQ ID NO: 230917 - DNA, 1486 bp, Cannabis indica
accaagatcattggggaatctccacttgggttggccgacatgcataaatttagatcaaaagtaagaaaagtaatgtaccacatggcatgacaggtttcgtaattatcgattatctaattaggcaatgataatgttaatgtgatatacaagctacctgattaggtgatgtgatatatggatgccaaactatggcataggcttatctgatgcaatgtgatatacacgcgcacctaattaggtgatgtgatacatgaacgctaggctatggcatagacttgcttgattaggcaatgcggtatatgaatgccagattatgcaatgaacttgcctgattaggcaatgcgatatatgaatgctaggctagagcatatgcttgcttgattatgcaatgtaccatatagatggttggctatgacataggctcatctaattaggtgatgcgatatatgaatacgtagctatggcatgaatttgcctaagtaggcaatgtgatatgtagataccgatattcaagttctgcctatgaggcaaccgttataaattcatgactataaactgaaactgttgttcggtttcttcctatcggtggtgcttgtgtaggcacgggcaacagttacatgtgagtgccaggctatgggacaaactgaaactgttgttaggtttcttcctgtcagtgatgattatttaggcaagggcagcactgacatgtgagtgccagactatggcaggagctcatttgcttaggcgatgcaatacattagtgccaagttgaggcacgagcccttctgattaggtgactcaatacattagttcaaagttaaggcatgggctcgtctggttagacaatgtgatacattggtgctagattgtggcacgagctcatctgattggtgaagcagaaaaattatgtatgatgccagatgatgatgtgatcttgctttatagaacaatgcaatatatgattacttttatttccatacatatggcttgttttgttatccactcttgaatgttattgtttaatcattttataatagtgaaataaataatttgttatttcatatattatcttttattacttttctcattgaatccttgtgactcatgggtgctctatggagcaggtaaaggcaaagaaaagctagaacagacatgagatgacagtcttctccatcaatgtacatattgaccctatcgacctgtgtgccgagttgccaagagttggtttgggttgtatcagttgtgtattttgatttcatattttgacttgtcaatgtatgtaatatttttgtaaaacttgtacaacagggttcccctgaacacgattttagtgtcattatgatgtccgtttttagtgttttgttttagtgaagtttttaatattatcacggattttaataattaattaatctattagtactaaactagtttatcaaatcacacacgtggcgtccatatagattagggcattacatggatcgtctta

SEQ ID NO: 230918 - DNA, 1700 bp, Cannabis indica
cctcttctgattgagagtacacaaggatatcaacgataaacacgataacatagatatcgagaaaatccttgaatactctattcatcaaatccacaaaagctacgggagcattggttagtccaaaagacataaccagaaaatctcgtctcggaatgtcctcttctcggattctcaactgatgatagcccgatcagagatcaatctttgaaaagaccgtcttcccctgaagttgattgaaaagatcatcgattcaaggtaaatgatacttattcttgattattagcttattcaattctcgatattcaatgcacatgcgcaaagacccatctttcttcttgacaaacagtacatgagctccccagggtaacacactaagtcgtgaaaaccctaagtcatgtaacccctggagttgaattttcagctcttcatgttctgctagagccattctgtaaggggccttagaaaccatttctgctttgggtgccaagtcaatgacaaaatcaatttctctctacggtggtaaacccagaagttcattaggaaaaacatctagaaattcccaaaccaccttgatgtcttctggctgaacagactcaggccgagtggtatccaataccacgaccagaaaccctagacatctttctcgtaacaattcccttgctgttagtattgaaattgttgggatccgagatccttgaatcgatccaacaaaaacaaacgattctttgcctcttggttggaagattaccatcttcctcttacaatcaatactggctgagtatttggacaagacatccattcccattataatatcaaaatccgctaaactcatttttattaaatcaaaactcaactccctatactcaattctgatcggcatagacctaatccaccttttggagatgactaattctccgaaggcagtagggttccaaaccctaattcataactatcgtgcgatctatccaatttacttaaaattctagctgccacatacgaatgtgtggtcgcagagtcaaacaacacagagaaataagagtttttgaccgagagctgacctgttaccactgaaggggtggcttctgcattagcgtgagttattgcgaacacccttgctggagcgggtttcgctacagtcttctgtgctttagttttgatttggggacaatccctcgtataattccctgacatagtacactgaaaagcacctctgccctttacactctcccagatgatgcttcttacaactggggcactctgggtaagtgtatcgagtttcagaactaccctaatgattgcctcgaccctggttcctttggaacctcttgttctgacctaagccactggatgcagtaggtgtctttcttttctgatcagtggtcgagccactacctcccctactaaaacctgatgtaggaggagtaggagccccaccaacaacaggagtccctcgagactctatgctgcactccactgcgccctcagctcgcagtgccatacccaccatatcagcataggtggtgttgtgatcagtagtaatcattaagtcgtgtcttatctttgcattcaacccgtccaggtatttctctttcttgctaatattagttggcacaattcttgaggccaatcttgccaaacggtcaaattgagtcgtgtattcagtaacactcatgttttccttctgagtcagctgagtgaat

SEQ ID NO: 230919 - DNA, 1103 bp, Cannabis indica
gtttacaaaaagactatgtacaacaaaaattcaaaacaaatcaaaataaagtagatatagccagtccaaaataactcttggcaactcggcacacaagctggtggggtcaatatgtacatggctggagaagactgtcatctcatggttgttctaactttttctttcctttacctgcaccacaaagcacccatgagtcacatagactcagcaagaaaagtaataaagtaggatacattaaatagctaatgatacatttcattatcatataatgattaaacctaacattcaacagtaagtaatataaccagccatatgcatagaaatagatatgctcatatatttgcattacctaatcaggtaagcccgtgtcataatgcaacatcatatataatatcattgcaccacctaatcaggtgagcccatgccacaacttggcactaatatatcacatcgtctaatcaggtgagcccatacattatgtccatagtatcatcatattatcattgcctaattagacaatcgataattttaggaactagcaaacaacactttcaattcatagtcacgactttataacggttgccccacaggtacaacctaaatgtcagtatccatatattacattacctactaaagcaagattatgccatggactgacatccatcatatatataatatgtatattgcatcgcctaattaggcaagctaagcctatgccataacttggcatcatatcacctaatcaggtgtacttatatatcatattgcctaatcaggcaaatccatttcacaatctgaaattcatatatcatatcacctaataaggtgaagtcgtatatcacattcatattattactgtctaatcaaacagtcaacgattacaaaacctgtcgtgccatgtggtacattatacttttcttacctttgatccagattcatgtatgttggccaacccaagtggagaaatatccctgatgatctcggccatatgtcacaataatggtaaaccaataagtgtttatccaaaaacattgctttacagttgcaaaggacaacttagggtttcttaccaaatcctgtagcataaatacactaaaataaaa

SEQ ID NO: 230920 - DNA, 1088 bp, Cannabis indica
ggatcaagttccttgtaggtgttaacttctaagaagtgatcaataacaagcaccctcttaattgttatatcgctataggtgcaattaagcatcggctcctatataatttaatgtgataatttttagagagtatctctaaccaattataagacgttacctcttaagtggtgctaagtaccactggtgcccaatagcaatgctcaatatttgttcacttacttgattgaagctatcaactttggtatagttgtgaaacataggcctagttgaatttaggtacttgaacctcttcacttgtgtgatttttgcttatattctagttctaagaagtaatcattaaacagtccttatgttcatgactcatttgtataactgaagctattaacttattctatctgttaaataacatctgatttgtacttgaatctattcacttttgacagtttggtagaaaaatcaattggaaattttatcgatgaggataaagcgcagctgctgagagacaaatctttaccggtagaaggctgtgtcactgttgcaggacgcactgacaaaggagtcacagcccttcaacaagtttgttctttttgtatgttaaattcttgtacaaaagcctaaaatttattgggaatttcgctttgtgccattcattttcttggaacaagtttcatgtgttacatttttcttttgtcaataaaacatcaagaattatttgatctaacctcatcttttttcatgtctctagatacttggagaaaggataataaatgtaaagatattgaagacgcaatcaatagtatggcaccgggaaaactcaaagtcaaatctgtttctgaggtagtgtagatcttatgatgttctttacttgcctttttatccataccttgcttaatcgaactcaatgcaggtatctcgtgccttccatccaaatttctctgcaaaatggaggcggtacctgtatatttccccttaagcaatgaggacgagagtcaattaagtaacgggaatggagagatcttcgaagatcatggaagcaatgaaaattgcagcgacggggcaggtaatgatgagaatgaagagttagaaag

SEQ ID NO: 230921 - DNA, 1956 bp, Cannabis indica
tttttatttatttttatttttcgatgctgtttgttattcttaataattcagataaataccttcattactaaaattgatgtattattaatccaaaattatatatgtacgtctgacaaagtaaactaatgttcttttctacatatctagaaaaatgtctttgcattgttttttatttaatttatactacctgaagagctgaggattgttttgctttgtgttgtcgcttagcttcgtagttgctgttgttgggtggctactaacccttttgttggagttggttgtttgttttgtgacatcatgaacttatatttatgtatttagcaaatttattgtgaatattatgataatgaaatatatttgagtgtagatcattgagtgagtactggatatcgtatcactaacttctggtttcttaaagctattattcagagtacttgtcatcacttcttattctacctcccttagtaccggtggtgatcagttcattaaaggtatttttatttttactgatttatctttccaattgtgaaaaatatattgttttgtatagaaaaatgagattgaaattgaaattcattaaatgtatttttatttttactgatttatctttccaattgtgaataatatattgttttgtatagaaaaacgacagtgaagttgaaatttacatgaaagattaaaagttagaaaaaaaaagcatatatttttattttgatatagtgtgtgagtgttagccacttgtattattatagtccatatgtgatgatagtctaaaattatatatatctaattttcaagttcaaataaataaatactaaaatacaattatagttatcgattaaagtgttgcttttatattgtatatttttactagtgttaattttttaaaaaaataattaaatataagataaatgaatcataaaatataattcataaaattttaagttagtgatacttattgagtctctatttttgttaaatatatttataatgttgaaaattaggaggtaaacatggatcgtcgttggatcaacaatccagataggctgtcattagaatatgctactggtattactgaattcatagatatagcaaagcaatttgttgattctaaagggaatgtgctatgtccttgttgtcgatgcgtaaacaagcaatcacaatctatgcgggtgatcaagctgcacttgattactcatggttttctatgtacttacactaaatggtaccaccatggtgagcaactagaggaagtacaaaataaagagttatttgatagtgaggaagttgataatgaaaatgacaatttagctagaggtctacatgatgctattggtggtgagtactttgacattggtccaactagtgatttcactaatactaaattccaacataatgggggtgacaagtatgatgcattattcgagtctcttcagaagcctttatatgaaaattgtaaaaacttttctgtcttaagtgctgttgtaaagttgatgaatgtgaaggtgcttaacaaattgactgataaagcattcgatgaccttctaaagtgtttgaaagatatattacctgatggcaatcatttcccggatgactattaccagacaaggaagcttctttgtgaagtaggattagggtatgagcaaattgatgtttgccaatatgattgtgcattattctatggtgagcatgcaaatgccttgttctgtcctatatgcaatactagtcgttatgttcgaaacaaaatcccacataaacgattaagatggtttccaataaaagatagacttaagcgattatttagttctaagcatacttctaaggatatgcgttggcataaagaggtacgcaaagaagaagatggaatattgcgtcatcctgctgatggtttggcttggaagcattttgatgaagtatatcctgagtttgcagtagattcaaggagtgtacgaatgg

SEQ ID NO: 230922 - DNA, 1321 bp, Cannabis indica
tagtaaagctgctgcatatgggacatggctgaaagtggagaatgcaactcgggatggatttcaagatggaaagtcagatcaaggaaatcacagttcaaaagaaaagcaagctcatcaggagacgttgggattggaaaaaagaatacctatttccaattcctttgcctcgcttgatgtcactacaacacaagtagacaacatgttacaagaactggcttctaagaccgacttgatacacaaaactacaacagaggggcacggtttagaggcttcggttagtaaagattgtacaggaggtatggtggaattggaaaaggagaaaaggctcgatgatgaaagtgggagagggaagagaagattgatcgatgaccacggcatctcatggcaaggcaagcaacaaaaaataagtacacaggcagacttagaagcacagatgaacagcctacacaatgtcccaataacatatgctcaagacataccatttatggatggaccttcttctttcgtggttggaaaaggggagaaaatgctatctaaggaaaatagaaggaaagtgtcggtcaaaaaggattcaaaagctaagaaggggaagaatggaggtacggtggagacagtttctcagattcgagattcagcagccactacagctatggaagaggcgaaccctgcaagtcagggtcgcctacaacaatgaataccttgctctggaacgtccaagggttggggaacccttggacggttcgttccttaaaatccctagtgatcaatcatactcctcagttggtgtttattatggaatcgagacttaacaatagtcgtgcggaagctttgcgtgtcaagttaggttttgaagggtgctttgtggtggaagccaaagggaagagtgggggtcttatcttgctttggactgaaaaaatagaaacccacattctttccttctcccctttccacatagattctttcattagaatggaggaagggcagtggtggcgttttactggtttttatggtgatccggatccaagtcaacgtactcaatcctggaagttgctaaacagaatctgtcgtatgtactcgggtccatgggctgtgggtggtgacttcaacgaaattctaagtcaacgagaaaaaatgggaggccctccaaaaccgaactaccttattaaaaatttcagaaaggcccttgacaagtgtaaacttcgggaagttgggtttgaaggaagtgacttcacttggtgcaatggaaggaaaaataatctaatctttgaaagacttgatcgagcgtgtggaaacacagaatggtttgacattttcccctttg

SEQ ID NO: 230923 - DNA, 1034 bp, Cannabis indica
aaccgacggcatagggtatttcagaaaaaaaaataaaatttaatttccaactgcctctaaatggtataatgcaattttatacctacggtttttatcaaaaaaccgcctctaaatgtcaatttcgaacatagcgggtattttcacaccctttagcttccctttttataaatggggttgaaaaaactgcctctaaaggctaacattgtagtagtgtttgttatcttctattcttattaggttatcattggattattaggttatcatttaaattagtgtaatttgtggaaattaaaaaatacacactatcaagtagtataactcatgagtcatctcataaaaaaaaactcacgagtcatgacataaatgcccagcgaagagattttattaagtagtataatatgaaagttactcttaattagtgatgatatatgtagtgttaggtttaggttttgtaattagtttaatgacttatgaatccaatgcacaaagaatacatataagcatttctttctttaatatgaagagaaaacctatatctatttatatgaaaaaaattgagaagatattaaaaaaaattaacaatagacttatgttgcataatattttttattcattaaatagaatatatatatatatatatatatatatttatataatggccactctaaaaggttatcatactgtaaatatataaatatattttttcttaaaaaaacaatgtataatttatcaagaagagaaaaaatattcgaacttaagagtgcacttgagaatctaaccttatctacaatgtcttgtgttgaggttaggtcactacatagactaataacttaactttattattcaaatgaaatttaatcatctatttctgttcattattaattaaaaaagaaacacataatttaaaactaaattcatttatgacaaaacatatcaatagaaaaatagaaataatagaaagaatctattcttctataataggtctacttaaatatatatgggataatttcacaaatgcacaaaaacaacaaaaa

SEQ ID NO: 230924 - DNA, 1867 bp, Cannabis indica
aagtcaaagtttgcgaaagctattgaaatttaagaagcgttaagctggatcaagacacaacggtggaagaggatgctctgaagtctgattgtttagttatagttcaggcaactagaagtagtttttctttaatttctccattttttttaatggttaatgattgtaagaaattacttcatttgatgattggcgtcttcttgtatttgtttatcggttctctgctaactagattgttcatagttttgctagaatatccttttttttttatttcaaattattcaatatgagtaatgttcgtactatttggttattttttttttgacgatatttctatgtagtgaagaacttccattcaaaaaaaaaatatatatatatataatttttaggaccaatatagaaatgtaatattctaatattggataactacacaagcagagtagtatattgttgtaaaatttctacacaagcgctctgcgtaaattttcagtgtgtcaaagggtatatattttggtagatgcttaggtttctttttattttattttttttgaaattatatttagttaatgtttaccgagatttttaaaaattgaattaataatagattaagttaaaaggaaaataattcaaagatgaaaaagacaaatatttttacgtaattggggagttaagaagtcttagttcatgagtcaatattattgagctttttagtatggagtatattacacaagtgttcttgtcaaatttctatagagtttctagctaatttttttttataaccctatgcatgaagggttaaagccctatttataggctaaagttgggttctcgggtgaacctgaacccgttagggtcttcatatagaaataagcccactaatggggtaaaatatattataacattgactttaggccgaataagtgaggcccaatttgtggggtaattgttttttgtacggggttgtaccacttgatggtgacaggtgggcgtgcaccattaatcgcatattgaatgttagagcagtggacgttgagaaaaaaggtaatttactctattttgttttgtgccttttcaaggcctgacacatgggacaaaccccttgtcttctcgggattctgtcagagatttgccacgtaagttgatgttcacaaccaatacaggtgtcggacatcccttcgtatcgcgtatccggagactgtctataggtgtttcttctcttgttgtcgtgtatcattgtgagattttcgagggtcatttgacttcgggtctccagctttaggtctccaaattcacgtctctgggtccaccaacagttgacatccaacgtgaatttgccttcagttttctgagttcgctccttgatttggaagatcttcccccaagccagttcagtcgggccttctagtgggcccaacttctaatttggaccttgggtcagttcatctcttagatacccaaaaacacggataacatttatccctaagcctttggggcttgagggtcatggaggcttgctatcgagtttttggtttacgaccatttgtagaggcataaaaatagggataacccttttgtacccaatttgaactcatggcgttgcatattagacccttgctatcctttgagggatacacgtgtccataggtgagtagttcgtgtggattacacaagtgaggtgcgtgctgtctcaaagcgtgaactggcgagtgatgatcttgacacattttccaaaggtggcattattttaaaagcaattctctttggttctgatgagaatttatgtggtgtgcttccgcttcccccaatcgtggatttgtgggttgtgttttgttgcttgagttaagctgttgatctaagcacatggatcccg

SEQ ID NO: 230925 - DNA, 1225 bp, Cannabis indica
aattatatatctccaaaaaaatttaaaaataacaatattttttaaagttttgttttaatggtgcgagataggagctgccatacctgaactaaatattcacgacgttcagagttattagctatgacaatgagagaaagcttcagcgataagagagcttcttctttttttctctttctagaactctaaatgttttgatccatcttcagcgcaataacctcctccctagtttagtttaaagtcacttcagcgtgcgaaatccaataaaaagctaagattatttaaggaataataaatgcccaaccggttacacatcttgttaaatgcccctcaatttttatttggtttattaaattattcttttatctattaatacttaattcaactgtcttgaattgttagatcaaatacatatacatccggatcttatatatacatatctttttaatccttgtattattctacaattaagttgtaatatatcttaatttatttttatagtaataaaatttctaacaaactattcttgtccatgtacaaatctcgataattgttaaatttttattggccccataatttatggtatgattatttgttaattaggattattcttggtcgttttgctatttctttttattttaaaataaataataggattattatttctcaattttcattggaaaatatttagctaatagtcattgataggtgtaatttgtcacatgtttatttggattggagatctaacatacttcgcgcttctttttagtccttgtattattttacaattgagttgtaatatattttaatttatcttccattataataattaaaatctctaacaaactatctttgtccatgttcaaatttgggggattttcaaatttttattggccccatattattatggtgtggttgtttgttaattatgattgtaatagttatggttggttgttttgtcattttcttttattctaaataaatttttattgaaagattttgactgatagttattgataggtatgatttgtcacatattcatttggattgaagatctaacatatttagcacatctttgatgtttcaatgctagcgacttattggaatggtgtaattagaatttttattcctatttttgttaacgatatgatatgatttgtctatctcgttaattctattcttttgggtgattataatatattattggactattttcttcatttttttt

SEQ ID NO: 230926 - DNA, 1068 bp, Cannabis indica
tctctctctctctctctccaagacacaaaagaaaaactcacaaccaccactggcaaccactttttgaccactatccaaccccacacgccaggccattcaaatccccaagcaccgactgttgagattttatgccctaaatagaacttaattttattgtgatcttatttactttcaataaagatcaaaaatcatatcttgaccttgtcatgttttgttcaaagacaaagtaagatgcctaacaaacccaaagttgttcaagattaccaagtctcttttggctacaagttgttgtcctcaactactgatcgagtaaattggagtaaacaagtatggtgcaggatgcaggctggccggccatacaaggtctgcaggttgaggtctggctagccatgttcctactaggatctggcaagtccttttcctggcagggtctagtagttcatgttcctgctagctttatcaagagttggccaggtctttgcatgtgttggccaaccatggtaatgggcaacctttgtagatggaggctagcccttagaggtggaggtcagcctttaaaggtggaggctagcctttagaggtggaggcaagcctttagaggtggaggccagcctttagaggtggaggccagcctttaaaggtggaggccagtatttgtacaccttttccttatagaggtcaagcttccttagtcgaacggacccttccgtggtctgaaaatcaccttttggtcaaccagcttgtgctcaaaccctggctggccatacaagctcatcctagccggcctatagactccccttgggcagccagacatggtggtacagctctttgacagcttgcttaaatcctttcgcttgttgctcaatagttttagcataccttgtaaggagactttgttctgctattggtaaggttgtattccacatgtactctatcttggtttatgtggacttgtcacgttaaatggacaaaatttgagataacatttgcccccaagtccctattcgaacatctggtaagatagggactttctagctctcgtcttatttgtagtagtctctgtcgagc

SEQ ID NO: 230927 - DNA, 999 bp, Cannabis indica
taagtcagctcaaaggctacacggtcaagcaaatcctcaaagaatagaatgccatagcagatgcacttgctcgcctagcgagcagtaccatagctgacaaagcaaacttggtgcccatatagaacctagaataacccaacattattgtcctagaggaggttgacatgctagatgacactccaacatggatgacacctattacagcttacctctaaatcagagccttgctagaaggcaaaaacgaggctgccaaactaggaaaaaaagttgctaggtacttgatcctagatgggattttgtacagatggagtttctctatgcctctccttaggtgtgtcaccaaagccaaagctgaacggcctatgatagaagtgcatgaaggcttcttcggcaatcatgccaggaggcaaagcttgtctaaaaatatactccgacatgggtacttttggccaacgatgatcgaagactcgatggactaggttagaaaatgtgagaagttctagagatttttaaagataccaagagctccacccaatgagcttacgatgatgtaggctccttggcccttcacagtgtgggggatggacctaattggtcaactactaaagggaaaaagaggggtacagtttgctatcgttgcaatagactacttcaccaaatggacagaagctgaacccctggcgacaatcacctcgaagaaggtccttgactttgttgacaagaacatcatatgtcgatttgtccttccccagaagattgtgtcggacaacgacaaatagtttgacagtgacatgttcactaatttctgcaacaaacatggcatcatcaagagcttctttgtcgtggcccatcctcaagcaaatgggcatgtagaagctgtcaacaaaatcctcaaggataccctaaagaagcgccttgaggaagtaaaaggtaaatggaatgaactgctcccagagttcctatggtcgcataggacaactaagaaaatggccactaggc

SEQ ID NO: 230928 - DNA, 1053 bp, Cannabis indica
gtttgatctacagaagggacaaagagaactgaaagttgctgagctatgtgatctcgaacaaagtgaagatcgatttcgatgtgtttgcttcgggcatgaaacacaggtttggcagcaagggatatggcactttgattatcaacccacaaaacaggaggctgaatacttgagacctgcaactcagacaacaaagatgtaatccattttagttcagcagcagcatttgctaatgctctgaactcactttcggttgatgatcgggcaacgacctgctgctttttggcggatcaagacaccaaatttttgctcagaaacattgcatagccccccgtggatcttcgatcatcaaggcaactagctcaatcagcatcactatacccatgaagttgcattgtatcagacggggaaagccataaaccatcattgattgttcctttgagatagcggagaaggcgtttacatgcctcccaatgttttaaccgtgggagcatgaataaactggctaagtttattgatgataaaagctacgtctgggcgtgtgagactaagatattgtaaggcacccaaggtgctgcggtaaagagtaatgtcctccataggttctccatcacaaagactaagtttagtagttgagcttgttagattaggacaagactttgcaccttccatatgaagacgagtgagaatgtcggtgatgtacttgctttgagtaagatacataccagtagtgtcacgataaatttctatcccaagaaaataatgaagagggcccatatcctttaaggagaattctctgttaagatcagaaattagtttagaaatcaatgatgaattaggaccggcgatcaatatgtcatccacatataccaagagatatacaagagagttgcccgagccatgtataaacagactattatcagatcgggaagcagagaatccccactgaaataaagtgcttttgagtcgaccattccatgcccgagggcttgttttaaaccgtatagggctttgtgtaggaggcacacatgaatgggatgagtaggatcaacaaag

SEQ ID NO: 230929 - DNA, 1695 bp, Cannabis indica
cacttgatcatggttgtggtattcttgtgttttagtagcagcaacacaagtgcaaggtatctttgggtgaagttgttgaatttcatcccaaatggcagtcggtttagtgaattaggtactgactgaatcatctccttgatggagaaaagtgaggctttcattaagctcaaaaatccgtggaccattaccttgattgaatctattgtttagttcggtcaacatttcagcagcagtatcaaaatacatgatactgctcttgatctcggatgaaaccgaatgaaggatccaagattggaccatttgattacaacgaatccaagaactatagagaggatcatcaggaggtggtttgggaagcgtatcgtcgaggaacggagtcttgttacgcgcacctatagagagtttgaagtctcgagtcctaggttgaaagttttgatctgtgaagatcggagtgacaagggctaagcctgggtgatctacagtgctgaggtagtagggacttcgtacatcctcatacgccggtcgatcgccattgttgtgatgagtagcagcagctggaacaggaactcgtggtggaatatatgtagaattctgaaatgttggaggagcagaattcgaaggagcttcgtccacgggattgttaatggaggtagctgatgaattggctctcgtgcgcaccattgttgcagatagtggaagctttgaaaaagattactgttctagcttgaatttttgcaattgataccatatagtgaacaaagagagaaacaggaaggagaaacatatatgcggctggctctcttcttgaagcttcctacaggctttgctctggttttgcacaacattggtttgttgtgtctgacttccagttctgttccttcccaggtttgtgtcttcttagtttcgtttctctccatcttctttttctgatttctttctgtttgtgcatttattgttctatctgtttctctttgttttctttgttccctctcgcctcttttcccattccctggctttgatttggttctgttcaacctcattaatactcttggatttgtttcctttatacgtcatcctaatcattatgtattttcccctaatttctcgagcatcctcactgtttaatgccatctctctctctcacacttgcatttaattctggcggctccttcttatcagcatttactttccctgcataatcttctcttccttcgatttttgaatcgtaattatatctctaaaccaaccgtcattttacttattttcctctctcaaccaaaagccatcattgctcttaagcgacgattccagaccttctctctcagccgtgaaatgatggttcagacgccaatcctctctccgaggcgactcttcttctccaggtactcgtctctctcgctcctttccatatttgtctatttatatgtccttttcatttctgtctgcacatcactttcgatccctgctaaaaacccagttactctctactaccacaccttaatggcttcctcttccaccaaccccaaccccattacccctctcgatgacgaggacagcctcgttcatgactttgaccacatctcaatccactcctccactgatactgatgctttctgcttgatcttcaagcttttatctcccaaatcggctaaaccatcctggattgaaaaagccatgactgaagcttggaccctc

SEQ ID NO: 230930 - DNA, 1035 bp, Cannabis indica
actgcccaaagtagacatttgattttgcttgatactaccacaatatttaccttgacaatggtatattctttattttaaccgcttatttttgggtattggtatgtggctgatatagtactctgcatcatgctgtttagtgttgatatgttcctaattttgatgctctttttcttttctgtataagtgactcaacgaagttgcgagctatttttacactagggatgttggtaatgtataagcggtggccttctagtatcgatggctttcaacctgctcttatgggaggaatgcaaactatgatagcattgtcgatggtcccattgattatgggatctttcacaatttaagtaactgggatgtatattatcaataatttaaattatattgctcctcctaattgtttattcaacctcttaaatgataaaggacattaatgtcaaacacgaaaaattaataattcttccattgatctccattttggctttgtagatattatttatgaaattccccatcttattatttaagcgccatattgtttgtcaaggctgtacatgtatgtatattagatattgattagtccacattgaacctctattctacgtagttaagcccactattcgcagataaatttcatgtcctagctactatctttaattatgtcccaagctttcaatcccatcaaagaaatactaaaaaatcaaagaattgaagaaggaagatggtaaccttgctgattattagcttgtaacctcaagatatccttagtttagaggtttttttctttgaagcttttacgtgcttcaagaaaattatttagggatattttttttccttaatggactcttataattatttgaggatatctaattttattggatagccataaaaaaataaaaatataaatctattaaaaaaggaaattaacttgttggtgacttgttataataagtcaccaattgccacatcattataattttagtacccattaatgggtattacccattaagaaatcattcatatatatagggaaatttg

SEQ ID NO: 230931 - DNA, 693 bp, Cannabis indica
atgtacattaattgtgataatactttttcgattatataagtctattattaaaaacattatcatatattattgttgaggtattaacttaagtgttagagaatacacaaaaattgtcaagtgtttcacttagtatgtggtgctttttaagaaggtgttcaaaaacaaatttgttagatccaaagtcaagttggatgaatggaccaagctgagctagtatagtgtactttatatattaaaagtctactttgatatttgatatttgttgtggtagtttctcattagtaattactacgactagagatagagtcattgaatatttagaatatataaatgttctatttattttattagtatgatgtatgatacttttttaaaaaaatatatataagtaaatttaaaatagaaaatattatgtgaaagttaaattaataaaaatgcaacccaacaaattaaaatacatagaaatcccaataactatgtatagtattttgatgtatattttacgtgtacgtgtcattattcttggtatggaagaggtgagccaaatttcattttcattaagcacacacgcgtttgtattttatttatatattgacctaacccaactaagtatatatgtattaaaatctataaatatatacataaatcatattttagaggtaacagattatgacacataagaattatttggta

SEQ ID NO: 230932 - DNA, 1651 bp, Cannabis indica
tttgatccactcatacaaggcacaatcgaattaagctaatttcatccttcagatttttgcattcatttgtagtatgactgatatcgttgtgatagtcaaaccttttattggggcccctcggtagctatccctgtacaaggggggaggctttcagtaatgcgtattttatcgtggcaaaatatacacgttcttgagaatctgtgagcttagtgtactacgtgtattaaggagtataccccctccgttgcctcttgtcctcagtctgtctgctacctttagaagacatgtaacaccctaatttataggaatgccacgtgtgtgattttataaaactagtttaatactaatatattaattaattattaaaactgtgaggataataaaaatttgactaaaataaaaaactacaaacgagcattataatagcagtaaaaaggagttccggggatccctgttataaaatatttatccaaaagactatatacaacaacaatccaaaacacagttcaaaatacagcagacacagtcagtctgaaacaactcctgacaactcaacacgcaggctggtggggtcaatatgtacattgctagagaagaccgccatctcatggttgttctaactttgccttgcccttacctccaccacagagcactcgtgagtcacatagaatcaacaagaaaaatgataaagaatgatacataaatagctaattatatatttcattatcacaaaaatgattaaagtataacattcaacggtaagtaatgtcaccagtcatatgcatagaaatagtaatgctcatattttgcattgcctaattaggcaagcccgtgtcataatataatatcatatataatgtcattgcaccacctaatcaagtgagccccatgccacaactttggcactaatatatcgcatcgtctaagcaaacgatctcgtacctacgcctggtacttatcatatgtcactaaccccgtacctacacccgatacgtcgcaaggaatattgcatcacctaatcaggtgatgcccatatattatgtccattagtatcattacgttatcattgcctaatcagacaatcgataactttggaacccatcatgccatgtggtacattatacttttcttacctcaagttctggttcaggtatgttggccgactttcttggagaacaatcgatgatcctaggccctatgtcataacaataataaactatttagtgtttactcgaaaacactggttaatagttgtaaaggacagcttagggttttccaccgaattccataatacaaatacactaaaatagacttatattttggctctaaaacatacatcatatcgtagagcttgttgcaagcttcaaaatggtatatagaacgtccaaaatggacaccgaagtgaaaagttatggccaaaatacgaatagggattctctcaaaaataacaaaaacagttaaccgtttccttgcggggacgaaaaaatcgaatttcatcttctcgaaattctaccaaaatctaaccaatttattttaaacttcacagaacacttatataatacccatacaatattctctacatagcagaaatcaaaatcatgctcccaaataaaaagtgacattaaagctcaagctcaaagctccataactg

SEQ ID NO: 230933 - DNA, 753 bp, Cannabis indica
tccgggtcgaagtcccagtaatggttctcgtctgaatttgggtttaggtctgagtcttgatctagggtcgggtcccgtgtcttgagtctagggtttagtttttgatctcggtccaagttctggggcccaattttttgttaaagttccccatctagatcccgatccttggtccaggtcttggtcaaggttcaggtttggggcccaagtcccttatctagctccggatcctaggtcccagcctaggtccaagttcaggttcgggtttggatcttgagtttgggtataagtctaggtcccagtacgtgttcaggtttgagtttaggcccaggtcccggtctgagtccaagtccctgttcgagtcagggtcagggtcccgatctgtgtcccactcaaggtctaggtgccagataatgttgtggtctgggtttcggttcgggttcaggtcccgagtttttgtctaggttcaggactagatctgggtctaggtcttggtatggggttccgatctcgatatgggtatttagggttttagggttttcggtttagtgtttagggatttaaggtttagggtttagggcttaggtttagggataagtgtaaagagtttaggatttagggtttaagatttagggtttagggtttaaggtacgatttaaggttcgggtgtgggtttgggtctgagacttggtttgggtctaggtttgtgtttgggttcaggtccgagtcttggtcccaaatccaaacaccaaccac

SEQ ID NO: 230934 - DNA, 1223 bp, Cannabis indica
agatgagaatgagcctttgtgtcttacaatgaaaatgttacgttgaaagagaaagaggacaaagaaaccaagttctgttgtttgcgcttcgtttaaagcttttggaaagaatcactaatggagcatggcttttaagatacataagaaggaaaccaactgctgattaatgtcctatcttgagttcttaaacctgtaattttatattaatcctttaatggtttacttgtagtcaattttttgtgtaatgtgtcaaatattttcacacaaatagtaaagctcacgagctcaggctatcaagtatttttagtgtatgatgttctttaaagtagatttttttttattgaagattcttgttacaatgtcttgtcttttgacatggtatgatcttagctaaaagtcttttatttacaaagtcgattgttcgtgtttgcgcaaggtgattgggtgattatggagtctagaagtaaccaggaagccgatcttgaggaccaatatgcaagaattaacattgaagacgaagaggaggaaagtctggtgtacgaagggggagcggatgatctgcaagagattgatgataggtggctgttggtgggcagatttttaactcacagaggggtggatttccaagctatgcaaaataaaatggcgacactttggcagccgggaaggggtatgtacgttaaagaactcgacagcaacctgtttctctttcaattctaccatgaagttgacattgaacgtgtgatggatgggagcccttggacttttgatcgagtgccattgatatttgaacgtgttcaacaaggacagaacccgagaaccatcatgcttaacaagcttgatttttgggttcaaatacacaatctgtcgacgggttttatgttggaacgggtggtgcgggatcttggaaactatgtgggaacttttattcgggcggatccgaacaatttcatcggggtttggcgagattatttacgtgtccgggtaaagattaacattgacaatcctttgaaaaggaagaagaaggtggaaaaacaaggaggggtattttgttacgcaacttttaagtatgaaggattgcccactttttgtttcatatgtggagttcttggtcattcggagtggttctgcgaacaattatttcatactcccatagaacaaataaagaagccatactcattagaattaaaggcagcgccgaggaggaaaaactatgctacagg

SEQ ID NO: 230935 - DNA, 894 bp, Cannabis indica
aatatgtccatttcagattatgtagataagatcaaaactatatgcgattctttggctattgctggttatcctgttcacgattttgatcttgtgttacatcttcttaatggacttggtcccgagtatgactccgttgtatccagcatcacctctcgaaatgatactttctccctcgaagaagtccaagctctcttgatgtcacatgagtcgagacttgaaaggcattcatctgcactggatctttctgcaaaaatggcagccaatctcacagtgggttcaagaaacggtccatacaggtcctttaatggttcagcaagggatggttctgcgcggggtcaagtgtctgaaaacccctcaagattcttccatcgggccaatggaaacagacctctcaataataatagacctttgtgccaagtctgtatgaaatttgggcatactgcagctacttgtcactatcgatttgatcgaaattgggttactccaaaggcctctaatgctcagcctcaggttcaccttacagaacaaactttcgagtatgaccctcaagcctttatagctcaatctgttcctgactttggtgatgatgttggatggtatgtggattctggtgcaaccaatcatattgctcattctcttgacaatcttgagactgccacccctttcactggtcacgaaactgttgctgtggctaatggtaagaaattgcttatttctaacattggtacagcctctctttcttcaaaatctcaatccttaaaccttaattctgttttgcaaattcctactataactaagaatctagttagtgtatctaaactaactaatgacaatgatgttttcttggaatttcataaaacttgtgtttttgttaaggacaaggaaacgggggca

SEQ ID NO: 230936 - DNA, 860 bp, Cannabis indica
gaaatatattcatttagtatcatgtaattatacgaaaaatatatttggtatcttgtattttcaataatacttatttgggaccttatattttaaaattgtacatatttggtaccctaaaataaaatataattaacaaattttattgatttgaccaaacagttctcaattatatgtaattagataattaaatttgaattcagaatttataaaattgaaggtagtttgattgtattgataaaattttatcacaaaattttgagtttaggataccaaatatgtatgattttaaaacacagggtaccaaataagtattattaaaaatacatgataccaaacttgtatttagataaaaacataaggtaccaaatgtgtatacactctaaattttgttatgtaagacaataacgaaaataatataaatgattcatggttaatgctatagctagataaactgataaaatactaaaagtggtataaaaataaataataaagttgtgcatttatgataatgcaaactttataatagtaaatattgcgctaaatttagcacaaaatttactatgtgctaaatttacattactattttacacgtcattgaagcataaattttgctaaatgagttatgttataggtttacaccacttatccattagagatgttctaaggttacaactcaatagctttacatcacttatttgcatctctaacacttgtgtctgacttcaacttgaatattttattttctgcgccattaaaaatccaatctcttcccttgcgctcccaaacaccattgtacatcaaatagtcgaacagagttgaccctatcaatttaaaaagaaataaaataaataccacaaaaa

SEQ ID NO: 230937 - DNA, 1343 bp, Cannabis indica
ttctcgcaaagagctaaagtttcatccttcttctcctctaagaagctagtatccatgttagggttccaaagctaggccctgtatacagcgcgaaaactaactttatcgcatcgttctatggtctcgatttctttctcagcaagtttttcagcaagcttctcctcaaactcatcggtttggactttgagggccttctcagcctcctcttttgccttcttggattcctgctttgctttccctgcttcctcctttgctttctcggcttcttacttgaggcggataatctgctgttgggcattgtccgttgctcacacacatccttgcattgggatactaatttgtgagtctcacccttcaaatactcgagccgctcagagagtagtcgattagaagcaaaagaagcaaaagaggcctggagaattgcaaacagatgagtataaaagaggtataaaaagataatataattatattaacaaagctgacataccatgaagtgacagtccaaggtccttgaaagcatctcctttgggctcctcagattgagaaaatcccaatctgggggaaagagagtttgaagtttgcgccagcaggcaaccccatatgcctgggaaaattcagacccagcttccccagctgcgatcaaaagagtctcgatggcctgacttaaagaagctgcagcgagggtcgcctcgggatgaggaacattgccatcgagaacaattggaggaggaacttgctcttggatcttgttgtccgaaacctcaagatcaatgggttctgccgataatatcttcttatgagtggtggttttcctttgcttcttcggaggaaccacctcggcagcagcagggactccagggttggatgtcctttacttccccttgcggtctagaatgtctttgtaacaccctaactgttataggcatgttaacgtgatttttaaagtactgtgaaactcgttgctaatcaacgagattattggaaatcgtgaataattaaaatttttcttatttaattaaaacataatatattacatttataaaattctgggatcccatttacaaaatacaattataaaagtttactattcatatacaaaatatttgtcgcctagcgactaaacaacaaaagccctgatgtctcgaggatcgtacgctccaggcctaaccgccccgacatgtacaatcttcacctactcgttctcacagctcctcaactttagctttgcccttacctacacatagcaatagcactgtgagtcgacagactcagtaagaaaagcataacataacaacatactaatatcctgggttataatgacgcgcccatacacctaaccataa

SEQ ID NO: 230938 - DNA, 1475 bp, Cannabis indica
attaaagagttttctcgaaaattatgataaattaaaattttgatttaactttaaacttttataaacatatacatatattcacacaaaattaaaatctcgtttttacactatacattcatatacaaaataacttttacaaacatgtcgcacatcgactacaaattgaagcccaagttgtcgcaagaccgaactctccaagtcgcatcgtctcgacatgtacaatcgtccccaagctctaaactcactgttgttcagctttggcctttctttacctacacatgaaagcaatatttatgagtcaataaagtcagtaagaaaagcatataacatacaatatatatgtattaccgacttgtatttaggtgcccatacacctatccacaagccttatcagatgagtaagaatgttcaataactaaggtacaaccattgtaccacaggcactacatactgctactgtactagtgttggtaaggtttgcaccgtacttcgagtaccactaagtgttgtaccacacacactacgtacttaaccatactagtgttggtaacaccgtattgtacccgttaaacatcatacatcgtaccaatgcactcagtactacaatcgcactagtgttggcagcatacatatcacataatcagcatgcatatattgcacatacacatattcatatataaatacattctatgctagtcttacctcgtctctgaattcaagtgtatcggtcgacttgaacgaaaaatcacgcgttgaatggataccctatgtcacattcacgtaaatgggaaaacaacttgctaaaactccttttcgggaatctaaacacaaaatcaaaagtttttctatcattaactagcatgttaataccctaattatcgataaaacacgaaaattaaggctctgaaaactacccaaaatggtaaaccgaatttcccaaatggataacctgttttggggtcttgcccagtgaaatagttagccggttctacagctccagcagaactagtaaaccgaatcatagcaaaaatcccaaaaaacttcacgactctctcaaatcaaacccaaattctaccaaactttcgagactacctaaaataacacccaacaataatttccaaacaagaacaacaacaaaattgcacaaaatttaaaaacaccattatagagccaaagtcaaacttgctcaaccacacaccaaaccagtaaaaccatctctaatcactcgatttctacttaactaaatcccagaaatcaaactataacaaaacctaatttgaacagtagaaaaaactaaaaattacatgcttaaaccttaagaaaacattaaataaaatataaataatgaagtctagggtttacctcaagattacaccacccaaatcccttgaatccttgaagaagaacacctaagaagcatgaagaattgttggattcttcctagttctagctagcgcagagagagagagagagag

SEQ ID NO: 230939 - DNA, 952 bp, Cannabis indica
atatctttaataactataatgtgaacaattatgaaaaacacagttaaagaatttttctaaatgttatagcagtaaagggtctattggtgcaccttttttttaagggttacaccgtagatactttttacgatatatactactactaaattcttaacctatacttatttaaattaaataatataaaataaaaaaaacttagagaaaatatgtagtacaccacgaaatgagtattttggtaaacccattatttgttttgatattttggagagctttttagtcccatttttttaatgattctctatttttttttttttgagggaattttaatgattctctatgttgtagttatttaagaccacttgtaaaaaaatttcaaaaaattttaaataattttaccatgtcgaaaaataaagttcaaagagttgcttaacacatgtataaaagaaataccgtaatgcgtgcaacaaaatatttaatttttttagcattgtaaactattctaaattttgtgaaagtatagagaagttcttaaatatattattaagcttaataaaaatggtgtctaaattacgtcaaaaaaaatggtgtgtctaaatttgcataataacaattataacatttttaattacaattttaattacaattttattactaattattgattttaaaattttgatacatatttctttttattacaatattatctttaataattattaaatatttaatctattaaatattttttttctttttcatgataattttcatttaaaattttattgtaaatattgtgccaataatatttatttatttattatagatgaagttaacaatatatctaagtctagtaatacaaataatataatccaccgtatttttttaggctgtatatatcactattttttaaaaaaaaaatataatttcaataattaccttatttaagcaacttcac

SEQ ID NO: 230940 - DNA, 1213 bp, Cannabis indica
taaatgaagttaagaaggttttggctgggaagaagtttctcattattctcgatgatgtttgggatgaaaatagcagcagatgggatgttataaaaagtacttttcaatctgggttgcatggaagcaagatcatagtgacaacacgtagcaatagggttgcatcaataatgggaactaagtcatcaacttattccctaagcactatatctttcgacaaaggctggcagttatttgttagatgtgctgcaatcgatgtcaactcacacgagtactcagatttgcaagcaattggtcgaaaaattgttgaaaagtgtaatggtcttcctctagactataaaatcacttgggggacttttacgtgggaagcaaaataaagaggattgggatgacatattaaacaacgatatatgggagttgtatgagagggagagtgttggtattcttccagctttatggctgagctatttttatttaccttcacatttgaagtcttgtttctcctattgtgctttatttcctaaagattatgaatacaatgaagaagagatgatcttattgtggatggctgaaggtcttttacttcctagcaagggaatgagaattgaagaaataggaaagaagtactttaaagatctaatcttaatgtcattttttcaaccatcaaattacaataggaaggagccaacttttctcatgcatgatcttatacacgatttggcaatatttgtttctggtgagttttgttatatgatgaataatagcagtaaattctcacataaggttcgccatttttcgtacatgcaagaatgtgcaaaagctaatgaccctaaggaatttgaggagttatttaaagctaagtgcttgcgtaccatattgtggcaacaaggttcaagccaactaaagttgttaaagattgagcacttggatacatcatttccaagcttgagagtactatccataaacgactgttataccacaaagcttcctaattcaataggaaatttgaagtatttaaggtatttgaagttagattgtgaagatattgaagagatacctaatacaatatgtgagttgtataatttggagactttgttgttgaaagaatgtgaaggagttactagactaccgaatgatataggaaatttaatcaagttgcgacatcttactgttccttggaaattagaagagatgccattgcagttggggaagctac

SEQ ID NO: 230941 - DNA, 4540 bp, Cannabis indica
ctcttaggcacccgacccattcttcattggaaacttatggcttgaatgaaatatcgacgtaacaacctttaggtcgtataaggctggatggcctaacatgacattaaaggctaatggaacatctaatataaaatattgtgccattacagttatgctcttcggagcttgcctaatagtgaggggtatgcaaatttgccctagaggtgcaacactctggccggagaaacgatatacgggctgaagacagggggttaaatctttgagttggagccccattttttcatatggtgttttgaacaagatatttgtagaggctccattatctatcttagttcgggtcaccattttgttggatatttgtacttacatgaccaacggatcgttgtgagggaaatttactttgacagcatcctctacgttaaacgttatggtgggttcccctgcccgtggacttttagcgtcttttctttaacggccaggaccacttctttttgttcgggctgtagtgttcgagcatacctttcccgggctttgcctgaatctccagctatgtgtgggcctccaataatgacttgtaaatgcccatctactagtggtggcactaaatcttgattactgtctctttggcggctatctgatcttgattggtcttgacatatttttgcacgtgcaggttattctttcttattaaaaattcaatttctcgcttcaaattgttacattcgtttgtgccatggccataatctccatgaaaacggcaaaacttggacatgtccctcttacttatgtcctttttcatgggaacaggttttttgtacggagctactgactgagtagccatgtagatagtctccaaattgtcagtcaagacaaacaaagcagtgaatttgaaaggattttctctaggggcctattcggctttgccaatgaactttcccttttcccattgccttgcatgttgttgttgttagaccttttaccgccagagcttgaattgcttgcatactaagggtgctgaacagatgttccagcagagggagcttgtgattggttcggtttaagctcgacttctgctcgctgaatggcctcttcaagcttgatgaaaccatctgcacgatcgaggaagtcactcatagaatctactagtctttctctcttgatgtctttccaaagctctctaagaacttcgatgcccccaagtatcgcagttaatttcccttcttcggttaaccatgcaacttttgttgcccccgtcatgaatctgctgatataagctcagagaggttctcctagcctttgcttcactttgaccaggtcctctaaatccaatgggagttggcgagaagaagagaattgtgcatggaattttgaggagaaagccttctaatagttgaacctccccggtgtcaacttaaaatactattgttgggcggcttctgagagtgtgacaggaaaaactctacaacatacatctccttgtactctttgtaggtccatttgcatttcaaaatatttaagatgtgataagggatcttccttccaagtatacatcttccaggtcggcatcttgaacttgtggggcaactctagaacattgatctctagagaaaaaggggacccacgtgctcggtccaactcgaagtcattgttcttccgaccgaccagaccttggagcatgttttttagttcatccaactgtgcttacacagatggattaacttgttcagtctcttggccgacgagagtcacgtcaggatccctttgagatggattttgagcatgggcctcaggctgagtggctggtgagacatactgttcgtctaaccctttccttctattcagatcacccctgagatcatgagttgttcccagtctattaaatacagatgcattaggttgtcttagtgactgatgggtttggccgatcaatttctccaaaaccgttaacctgggtggagttattaggtataacctctcctgacgaattacaagacaaggtctggccgcctaccgcttggcccataggcgaaacttgtaaccggggattgggcacctgaccgttcagagtcctagaagtgttcccagctagatctttgtctggctcgcccagcgggatgctagtcacaggttgctaattagtagcttgataggctctttgtattaggacggtggcctgttttgttcagtcgttaatggctgcttactgagccctcaacgaacagatgccttggctcttcaaatgcaaggttcacagcggcatgaagctcttcctgatcatgatgcagggtattagtatggccttgcatgagtccaagagcatcatggaggttatggatctcggtgacgtctccaacggttgttcaaacatttgttgctggcagaactccagtactgggaatacccagattggctgctgaactagtatttctagtctcttgaacactgggtgcgattccattcaaaggagatgtcataccatgacctacgtttggtggttgcatcattggttgttcaggatttgtcgctggtggaacccttgcatttcccggattctgcagtgcgagatccactgccggtggatttactagattgaccacgcctctacgagtttgtaccaccatcgtgtttattattaaatttgaagtaaacgagcgagtttatgattctggctctcaatgaaagcaccaaaatattggcctcgcttttagccaacgataatgagtgttaactgtaagcgataagtgatataatttagatataatatgaaaagataaataaagaacacagagtttttaaagaagtttgtccccgagcagttcagtaatagcctactccccttgatttgtattgacttaagaacaaaaaatacagtgattcttctcttagagctcttacaatgaaatctctaagtatactcttagataatttttcgaccctttgcctactgagaatagatcactatttatagggctatgtgcttgagggaaggtttcacatttgtttacaatgtctaatattggtacgattacatattacgtacatagagtacactgattgatggatttggaaggcttgccatatctctgtgatacgatcccagatttataaggattgcttttgtgcttcacgatgcaaatgctgaagttgctaagtgttgatacgctattcaaattgtccactgctcggctatgaggacttagtccgtgcaagtatatgtggtgttctgctaggggtgataccaacatgtgatgccacgtcagagtgtgaaaattgggataacattagagatttaacagaaaaatataaataataagaaaagatccaaagtcttttctcttcttctttctctctctaattttccaaaggaatatgagaatataattaggattcaaatccaattaatcctaatgccacaacaaatacaagaaatttcaagttttcaaagaaaaagataaaagataagtgaaaaaatgataactttttcctctttttctttgttacttaattttcgaaaattcccaaggacaaagcaagagagttcaaagtcctaattattttttgaatgcttgaagaacaaaaacaattttcgaagacggtcaatatttatgtccatcttgtggtttcaagagaaacgggctcggttcacatcatcaagtcaactccacacaagtatgaagttgacttggggggaaaatgtttaataagtggcaggagagatgacatggacattaatgcttaataagtggcaggagagatgacatcacagatttgaatagacttaagtgatagcagtcgacctgggaagggtccctagcccttcaccgaagttgactttgggagctcaagtgtggaagttcagagtttaataacatgaatctaacccaatatatttcaacattatgtaccatgaggacagggagcaatcaaatccagaccctaagagctgaaattacacgaacctgcagcccgaaagccaacctgggcacctggggtttcacccagcgccaaggttgacatttccaactagggtttttgttttcaggaccatcttagtgcaaatgggtcaaaatttccatcaaaacataaacagtacataacatagacatatttgagtcatcagaattagattcaaagaaagtttatttttgagaacccagagcaccaagagcccagtcacccaagatgacaatttgtcaaccttggcaccttccaaggattagatcgatgatttgacttttgaatcttcttcttcttcatcaaaaatgggaaaataggtactttcagggaagaaacaacacttcctgggtgccagaagctaggcatactgcccaggtttacacttagggctgggccagcattaagaataaaattttatcaacctgcgccaaatttgatgatgttttctaagagctcttcctagaatcttttctgttttcaacaaagattaagattgaaatatttttggggtaaaacggaatttttgaaatgccataaaggggacacaacgccctagttgtcatattgtcaacttgggctgttt

SEQ ID NO: 230942 - DNA, 1189 bp, Cannabis indica
atgaagattgagtgtgaaagagaaaaatagagttgatgatgacctataggggtgttcattggaccacatctaatgtttttaggcctatccagatccgatccaattatatattggatgttagattttaccatccgatccgatccaattaatttcagtcatccaatcgatccaacatccattggatattggattggattggttctataagttgggtgtatttcatatatatttattggtttaatttgagtttattcaatattttagacatagtattttttgaatcggatcagatccatccaatattttaggtctagtatgtattggattggattggatccatccaatttaagaaaaaaaaagtaaaaattttaatattaatttttatagatacatatatatatttttacgtataacaatataaaattcaattattcattcaaactaaatgaaaatactaattaattcgattggatgttggatgttagattgatgtattagatttttggacacccaatctaacatccaatctgatccaattgggtaatcaaaaataagatacgatctgatccgatcacaatttgatatctaatgtttgacggtcgattataattggatcggccggttgtcattgaattggatcaatttatgcacacccctacctagatgacctagacttatcatcattgcatcacatgctttggaagagagaaaattgatgatgagcttcatgggctaggcttggcctttttgggttgggttgctttggactttaacaaaaatgtcatttttttcttcttttcttttcaactttgcttatttctctttctttcagcaaaaatacacttcaattcctataagaaaatcataaattgaatcaaaattaaatattttcatttataaaatatattataataatttcatgaaaatatcaactaaatcttaacttattttatcatttaaaataaataaaagtgtactttaaccactaatcacaactctcaactagcaatagcaattcaagcagagaaaaataattatcgagttgaataaacaaataaatcaagcaaaaacatccaggcattttaaaaatataaagtagagagtcaaaaattactattgatgttacttcagttgtaactccagagtagttgtgtgtgtgcaccaaagtttatcaatttctttatttttt

SEQ ID NO: 230943 - DNA, 2555 bp, Cannabis indica
cacatcccggagaggcttcatgctatgcgagcttccgggagtaccttgtattccgggtgcctcctccgggacccatgcccatggcgcttccttgtggcgtacaaagacttatcaaatatttacaagttatctgatccacgtgtcccatttcgactggttcacgtattttgggcgaattcaggggcaacaagttcttttactagtaacaatgtacctcattctcttaacaatttaatacatggtctaacaccctatcatgaaatgaatttaaatatagtcttcctctttaggaaaaatatctttcactatcaaacatttcggtaagcttatcgatcttatttccattctaatagaaactttagtactctaaaatttctaactgagacccacatctagaaggttatctaaatttctcctttcaatcatcggggttataacccctacctcactaaatacagagtggagacctctaagaaactcctcaagtgttattattattagtaactagtactctgtcaatctcattaaaatacatctcaattacttgggtgtatctccttcattcacatgttatgtacttctccacattctgagtaaatcttacctttcccaggatttctatggccattccatatacaagattcaccatctaatcaaaccattaaaagtattttccatcatcatcatcatcatcatcattatcataccattttcagcaatccagatagtctcatttgtcttagtaatatcaatgttctcgtcattacctccttatagatcatcaactgagttattccttaattaacatggttcaactcacgtgcctcgggatctatcatttgctatctgaacatcctttctgtagcacaaaataacacaactcatttaatcataatttctagtccacctcgaatctcaaatggatacaattatacttatttatttaatgttccaccttcaggggtcagaaccacctctaggacaagaagattctattcttcaaaccacttaaacgactgcccttaacgatttctcatatttcacgactcacatgacatatcgaatactcatcttactttcaactattttattgttttatcaattcattaagttgtctattttgtcaactaatttaacgcacaacaacacacatcacttcgtgatcatagtagcgataaatttctcattgaactgcacaaatttccttattgagttccacactcaatacttcactaatcatcttttcacactacttatatttcttaaacaacaacaatactaataagcatttctttacatatcaatcagtcatatagctctactgaactatctcagttaatacataatcataacatactacaattaacttaacttgggcttattctatatatactgctaacgacatcagataataatcaatcatataacaggtaaataatacttactatccatgagtcgagcttgtcttcactgcaaatgtacatatccagccagtctttaggatatttaaaactatagctgctctaataccatgttgtaatgccctaatccttatggacaccacgtgtgtgcgtttataaattaataaacacacacatgtgtcgtctctaaggattagaatgttacatgttacctcaatgtgattagttccgtatagtcatcttctttgtaccctttgaagtcatcatgaccttctgtatactcggtgtcgatggtatctcattccctttcaacatccactcaagatgccacatcctcgtctggacgcttcagggcttcaggttggtttggaggacacaaattatttcttgttaacaccatttatagtatagaattgattaaggttatctttttagaaagcttcctacaactctcaatgaaagcaccaaaatgttaattgagatttttgacaataattaattcaggttatgtagtgtatgtaatgtgaatttaagaagagcatttttacgtggttaggggattaaagagccttagtccataagtcatttttatttcgatattgttttacagagaatgtttttttttatccccatttcctttacattcttgaggtatttataggctcataatggtggcaaaaagagcacaattgtcttgcttgttcgattctacgggtttactttatacaattcccacatgtatggccatagggcatgatttcctatcctatgggggtgtgcttgagtctaatgtaggtatttggtgagacaagacttttttctcatactgatgatttgacagtatgtaaggctactgtcaagagatgcatgggatgtcgtgaagttagagaattatgaatttaaacccttaaacacactttccctaactgagagtaggttggccttccccatgccgaattaattatatatagttctttagccttgggcagagttctgaggctatgccatgcaattgtactgtctccgaggcacatctttccccgacggagaagactaacacactcctaatcctggaaggtccactcaaaaaagactaaactcctggagtcttcaatcttttacttactgtcgtat

SEQ ID NO: 230944 - DNA, 999 bp, Cannabis indica
aaaatatataggataaaccgcccaaaccgaccgatgtacaaccctagttgggatactaaaattattcatgatatgtttaactatccagatgcacctagtgacggacctactgctatcaatgtaggggctatggcccccactaacaaaagtattgtcttttaaaaaattaaatataattatagaccaaaataataaaaaaaaatcccacaaaattaaataaatttagtaagagtgattataatacaagtataaatattttttaataataaataaaccccacaaaataaaaattctgagttcatcactgcatacacatataattatgagattcatttgagtctaaatggtactgttgatttctggtcctggtaaaaaaataggtgcatttttgaagctcaaatacaaccgttcattaatgatattgaatcatttatgacaagcaataaattttttcaaaaaattatgtgtatttattttctttccccaaagaaagtaaaatgaaaatgaatatcttatttgatttttcctaatattaacatatatttttgaaataaccacttgaggctagctcaagtggccatagatgggtgtgtaagtgttggaagtcctgagttcgagtcctagataaaacatattgtaatatataaacgcttaaataaaaagaaaaaacatatatttttaaaataatattattaattagaaaataggcgataaataagggaggagaaggtagattaataattagaaaaatataataatattattaatttcttaattacttgaaaagtgtaatatatatagtgtaccttgttctgatttctttctattactcgactcttccttctcttttcaaatcaccacctttgttttttttcctaaagtattatttttgcacagtaacttttttgggagattcctaggcaaattatcactttttgtttttaatatacctttactttttgactcaaaaaaaaaaaaaaaaaaataaaaaataactta

SEQ ID NO: 230945 - DNA, 926 bp, Cannabis indica
ttttttaacacttaatcacaaaatttatgttatactatttatccctccgtttaaaaatctcagttaaataacacggtggacataccacagtgtaccataatatacaaatgacaaatttttaatgatccacgtcattttaattttaaaagatataaaaaagtattaaaattataaaattaaataaataatttgttttaccataattaaatttttgcatggagagttataaatgatgctttaccagtagctacttctcttgtcaagaggaaaattatcaccgattcgacatgttcagtatgtcgtcaagcttaggaaaccattgcgatgcacttttcacttgtaaatatgccaagaaggtgtggacttattcaacgctttctttcgactggcatgcttgctcttcaatgaaaaacggtgattacttattgtatctccattcaattcattctaaatctgaaatggaacaaatattttgtacgctgtggtcgatttggagtgaaaggaacaaagttgtgcatggacaaagacagaaactagcaagagatttagcgtcatatgttcacacctactgccagaattttcttgctgcaaccacaaagtaccatcctgttgcttctcaagcccaaacgcagccacctccacaagttgtccctgcccctgctccatggaagccgccgcttggtgatgggtttaaattaaatgtcgatatcgctgtagacgtcaacaacaatgtgctgggagtaggtgctttaattcgtgattcaaatggtcttgttaaggctgctctttcaatgccagctattgggaatttttcttcccatgaaatggaggccaaagcacttttccatagccttaattggacattacaacacgatctcccagtttcacacattgagacagacgcacttatggttgttaatgcattg

SEQ ID NO: 230946 - DNA, 915 bp, Cannabis indica
gggtgagtaggaggtgtattggagtttgggaatgggggataagtagcacaaggcataggtggtcgagatgtattccccacatctggaacaaaaatgttagagaagttgatggtagtggaacaattggagttactacagtttgtgacatctgtagtgggtgaagttttaattgatgtggtagggtgattgggtgggaatgcaggcctatcaacagtagtatatgtggctggtggtatgggattatgcagatatgcagtttggttagcagaaacctgatgagatggcaccaaaggtgtggatgattcaccttgaaaaagagtacgaggttgtgggttggtgagtgtgtttagacgagggatagttgaagtaagtgtggttcgagcaagacgtgttaagagcggccaaacattccccttggcaaagtccgtacggtatttgtcatatcccgtagttagaagtttggcccctttcatccacggcccaaaagggaaatcatcatcattacccgagtccattctttccatgaaggcaatacatttttcgaaagggtgaccgagcaaaccacattcaaaacaaaactccggtagtcgttcatatcgaaagtcaatccaaaactcatcctgaactttaggtagactaatcatttggccacggggtagaggtttgttaatattgatattgattcggatacgaagaaagggaccccaaccgtcgtcaagggagtcctcatgaacatctttgaactcaccaatgaggttcccccagagcaatagccaaaggtttagacttgcttaagaaaggtaagcgataaatttgaacccaaaaaggtacaaaagctaaatctttctttgagacattttacagagcagatggagtgtacatcagtattaaatgattttggaagtgccaaggctc

SEQ ID NO: 230947 - DNA, 605 bp, Cannabis indica
tagaaacaataacataaaatgtttagctgataaatgaataaatttagctgatgtttgcacaaaatttcaataaagatataataggacacaatctttatgcaaggaactgcctagtacaagtgaaaaaacaggacaccgaatgtttcacttacttccactatgacagcatcaccaaacccaaagccacaagcaggaatgtcatcaccaccaaaagtagagagcaacctatcatatcgtccacccccacaaatggctcttaattttccatccctatcaaagccctacataataacaaaaggtagaatgtatttagctcaagatcattcttccatagtccatactactacttataggccaccaaaaaacagccccaatctaacctcaaagacgataccagtgtagtaggccagaccacggacaatggatgcatcaaactgaatccattcagagtaaccaaacttttcagcaagtgagaatagctgtttcagttcaacaactgcctccccagcatctccaagtatctctacatgttagaggaatgcacacagtttgctatatctgagtaggaaaacaagcagataatgacactactatcttcaatgttt

SEQ ID NO: 230948 - DNA, 997 bp, Cannabis indica
gtataaaaaatgcatagaaaattaaatttccctattaaacatttacctaattatactttttgaccctcttattcaaaatacccttaagttgtttttcacatcaaataaacttctccctctctttctcttctctttcctctttcttttcccatttctctatatcagccaccatgaaaaacaacttaagaaatacaccccatcgcattttcaggacccttctgaagccaactgctatcttttagtatcctctttggggcctttctgaactccaaaattggtgttcggattccataagtcgtatcaaactcactatcttttagtattttgtaccatgaagacataaaaaaaatcaagtacaggtctcgaaagctaaaaatacacgaaccagcacctcagaagtcaacttgggcacctagggttttacccatcacacaaattgacagtcccaactagggtttcagttttcgggaccgtcttagtgaaaatgggtcaaactttggactggggcgtgaactagacataccacgaacaaattgacgtattagaatcagactttgagaactttcatttttgagcacccagcacccaactagacaatctatcaacttgggccactttcaagcatcagattaaaaatctgactcgttcatcttctttgtcttcatcaaaaatggagaaacaagtactttcgagacagcccatcctgtgtgccagaatgagggaccagcgcccaagttgacattttgtcaacatgggcaaatttcgaggagttttcccgaaaattcttccaagcatattctctattttcgtcaaagattaagattcaactatttttggggaccaaccagaacttccgggtggtctaaaactggcacagcgcccaggttgacatattgtcaacctaggctgtttctaatcagttaatagaaaaagtgtaccacacatttttttcttcatcagaaataagaaagatgcaagcaaactcgagaagaaaacc

SEQ ID NO: 230949 - DNA, 7196 bp, Cannabis indica
ttagtgcaagaaaactaatttttctctcaacgtgtccaaaagaaaagtgatgcacaacggtcttggcttggtccccgtgaaatttcatataggttattgtgtaaatgtttcactttttgtttttctttttgatagctcatttaatgtagttcaatgtccagtttgtatcacacattggggtgggtgctctgttgtaattttcacataggcttttttaatcatatgtgtaaattgatcatcttgacatccacttgtttgattcagaatcaaacactaaacatatatttgtcccatctggtctatgaccaaaattcctgtgataactaactaaaacaaaacttgtgagttgataaattacaagccaaccccgctagagttgcctcaccatcaggataaaatctagtcataagtctctctctactcttgggaagaagcttattccaagaataatatagaatggcttgcttattccaagggcatcacacatcgtataaaaataagtatagttacagaaattaaaataaggcattgaaggtctccgtctgccagtggctctatttgcgatggttgacgttgactcgatggcttgctgggtgctgccgtgaaggtctagatatggacctctagtcatggtggtctggtggatcttgtgttttagagagagttaagtaaaggagcagagagagagagaatgttgttagtctcttagggtttcattttagtagatagagagatagagagaaatgaggaatggatctattatttattagggttacaggttaggaaaatcaaaatgtaaaatatatatatatttattaaaggaggcgggccgggttggattgaacggtccacaaatggtccagcccaattcccttcatcattctccgcaatgttaaacctattcccatgaaacctcataccaaaaaagggcccttaggatgcacagagaccaattttcttcaggtcgggtcgggagccggagctactttgtgagattctttctttggtattaaaaaggagagagtagagattcttaggtttgaaattgaaatgatgtttcttggtaacaagctaatatattattattattgactcatccgtcgttgccgttgtcgttgccgttcagtgacattgacaggtacttactactgactttcttctcttgtcaaaaatagttcagaagaagaagagccacccaccattactctactttactttacttactgacttatttgttttttaattcttgtataggaattcatttcatcatcatatttgactttgattctgttttgttctgttttgtatagagaatagagtttagagttgttctgctctgtcaggtttgtcataagtagtagtagtagttctatgattattattattattaccctttcaaacgttataataatatgaatttatgtaatgtgttaataatcattatgaatatgtcaagtttcaaatgatgaactaatttataatgaaacttggaattccaatcttcatttgggaacagattaaacagacatgccttcttcaaaggggaagaataagaagcaatccaagaccccatcaaggatctcagcccctgatcggaattcatctcctcaaacaccttcctcaactcttgattttgaaaccaatgacgactatctcatcaccattctccaagaagcttctatcaaatatcctaatctcatagcaaaacacgccttcattggtaggatcgctgatattgaacataatgcttctccaggatcccaaatttggctttctcactcctccatacttgcctcttcattcaaagcagactctaaagtatcggtaatcatcatacaattcaatgaaactgatgaagatggaatgatacttaaataattgtctttttgcaggtgtcatgtccttccaatagtaaattttcacgcagctttcctcttagctccttagcaaataaatttggtagtgatttagctgatcaatgtactggtgaagcaggaaactattttgctcttgcaactattcgttcatccagtaaggtttgagcaatgatccccttttactatttcttacataattctgttatttatatcacaatagatactaagggtcacaaaggtttgtaatgtttgcctaggtactcaaattgactgaccttttaataatgttcttcctctttgggattcttgaaaatgttcatttcaggttgcaaagaatgaaatcaagctatcttcaagcctttcaaacacaatggggaatccttcattaggagccattgtatttatatatcctgtacaaagtcatatacccgaatgcaatgaattatttctagagctggtgcaccctaagaatatggtggcaaggaacacaaattctggtgaaacaccttatgatcatatgggaaatggagttgttggatctcctaagacaccaaggaaccagttaaagttgagctcttcgaatattaagcagtcgtcgtcctcatctacatataaggattctacaacaaagttagataacctgaaggctgtgtttgatgattcatatgacattacgaagttcttaggggatgaacatgttagaaggattcttgaaacacgtgctagtacttggttgtcttctagatgtttacttcgaggaaatcttgtgaccatgccaattatttcacagctatgtagcttccgagtagttgctgctagaatgttattagataaggataacttctatataacatataagagtgatggtctccaagatgaagcttctaactctgtcaaatattccaatgatgcctttatagtgaagtgtgagacaaaaatatgcttttctttaccatcagaactggcaccgaaagcccttgaaagacaaattactacaatagaatttgaacctacaattgtcaaaactgatgtgggagataggaagtcacaattgggtggattatcgaacgaatacgcaattttaaaggatatcattgtttcctcatcagcaaacgttctatctaggtatgtttatgctattctaacttgagtctgtgtggtatagttttatagggaatggctacagagctgaactagtattattccatacagtcctgttcgtacacattttcgggaaattctggatagtttaggatgctaaaaataaggtcccaacagagtactgagcacatggtaatactagaagtttggaatcctgggcatatattctaaactattcaattataagcaaaacactgtcatgtaaaacaagtagggtcaaaatttgtcaatctctaagattacatcatcatcaaaatattaaggtggtgtttggttaaaggaatgaaaacataggaataagaataggaatgagaatgagaataacaataagaatggaatggaatcaaatttacaacacatagaaaagttaaataaaaacaataaaagtggttatatttattgaaatgtaatagcttcgcgacagttcttgtacaatcattcaagcattacagagaatgtaacattataaatgtcagatttattgaactttcatgttcaaataaatgtacacttttgtacttcaagtgttttaaatcttcatattttgcattcactacttctgtccttatgaaaactaatcagcagttttttatggtaaatatattatcttttcatcttgaagatatattagctaattctgtcctgtagtatgttatcaatttattgtttttctcttctcctaaatgcatttttgtatttttgtatttgacatttgagtattgatcattgatgtaactactcagttttggtttacgaactacaaaaggagtgcttcttcacggtcccccgggtactggaaagtcttctttggctcaactttgcatccgtgatgctggtgtcaatctcttctctattaatggacctgagattgttggtcagtattatggagaaagcgagcaagctttgcatgaagtttttgagtcagcccgtcaagctgcaccagctgtggttagacttgacaaaaatcgctgaacaaaatttatcatttcttgtttgttaactttcggtaaaatgattactataattggttttgtttacaggtattcattgatgagttggatgccatagcacctgcgagaaaagatggtggagaggaactctcacaaagaatggttgctacgttgttgaatttgatggacggggtcagtagagatgaagggatccttgtaattgctgctaccaataggcctgatagtatcgaagctgcacttagacggcctggaagacttgacagagaaatagagataggtgattcatagtctttattttattagcagtagattttccgtgttacattgctctctctctcccccctcaagaaacaagacgtttattagttgattatcaatctaactaagtcaaggatcatgaaaagtgacacaatcattaattcataataggtggaacattagaagctcataaataaattatttcccaattgagctttctgaatctttgacattacaaaatcatcaaggagttcacaccatgtaaaaaagtattctacatattgttactaaattagacaatctaccatggtcattacttcttgtcttttaccagtgaatatctttactttctccccacctaattgtttctgttttattttcttcttaaaattaatgcaggtgttccatctccaaaacaacggttggatatcttgctttgtcttctaagtgaaatggagcattcactttcagatatccaagttcagaaccttgctatttctactcatggttttgtaggtgctgatctagctaccctttgcaatgaggcagctttggtttgccttagacgctatgccaatgtagtaagcacctgtgataacgtgcatggaacatctattcaccatgatgattctgataatgtagcagaatccgattccttaaaagatacaagggacgtgtctagggattactcatattatgcatcttcatctatttcatcttcaagggatgataacatacatgatgttggtgatggcattaaagaagaatgtatgttaaaagtgggttttgaagattttatgaaggctaaaatgaaagttagacccagtgccatgagagaggtacaattagatcttacactttaaattaacattaagattttttatgttatcatagtttaagaaaagaaaagaaaatcttgttctgaattgttactatcttacttatatttaaagaatacagtattactgtcctcagtgtgtaatttgcaaatcaaatctctctaaaaatgataattgtgtagcctttaaaattgtcataaagccaaaagttttgataatattgcagtttgttgaacttctaggtaatacttgagcttcctaaggttcggtgggaagatgttggaggtcaaagtgaggttaagtctcaattaatggaagctgtagagtggcctcaaaagcacaaggatgcttttatacggatagggattcgtccaccatcaggaatattgatgtttggtcctcctggatgcagtaaaactctcatggcacgtgccgtagcttctgaagcaggattgaactttcttgctgttaaaggtccagaactttttagcaagtgggttggtgaatctgagaaggctgtgaaaactctgtttgcgaaggcgagggccaatgccccatccatcattttctttgatgaaattgatggtcttgctggtgttcggggaaaggataatgatggggtttcggtgtcagatagggttatgagtcaactccttgtagaattggatggttagtagtgaatctctggtttctgatatgtttaatctacactgagtttgctatttagtttacagataaactttgttggcttcaggtttgcaccaaagacttgatgttactgttattgctgctactaataggcctgacaagattgactctgccctcctcagaccaggttatcctctctctcgacactgctgtttttcttgcactatttctatccccacaaagataataaaactagtgatcaataaatgtttgggacaggacgttttgaccggctgctatatgtggggcttccaaatgagattgaccgagaagagatattccgcatccatttaagaagaagtccatgttgttaggatgtgagctttaaggatcttgcttttctcactgaaggctttactggggctgacatatcatttatctgcagggaggctgctttaaaagctatggaggttgtttagatgattatattccattctttcctttgagttatatttgttaagtctttaattttactgtttctttataattcatgctgccaggagaatcttgatgcttagaaattaagatgcaacatttgaggcttctattaaacaagtgcagccaacagcaatccattcttatcaggagttatcagaacagtttcaacggcttgttgtttcttgtgatgatgaagaaaaagagaaaaaagcatctcatgaacactcgagtagatcaaattggcttcctgtgcggtaaacttgttttatttcatgtttcgttgcggctttatcataatctgcaaactacctctcacagtcttttttcactacttgataatacaggagtctcatgatagcaatagctttgtttgttcgttgtcggctgcctggaggcttgttcgggtagttgcaatgttggtagcaggttgttgttctatcttcctatgtatagctggaatgtgtgttttaattagggaagttacacacacatccatcatatcaaaggatcaagccaatacaacacaacacaagttagtgatgagaaagaagtattgattactttcatattcttgtaagatgtggtccaatgtctgagatgagcttggttattctgctaatgtagaagaatcataatgtgattagaatagaacagtaggcaggtgaggggagagagtgagttttgcagccattatcagaactacctaatatttttttaagttaagaagtcctttcttttaaagtttattcttaaacccacttgaggattttgcttgactttacttttcatatagcattgggtttcgattgaaacccaatactaaagtagtattagttttcccttgttcatttatttctcttatctaatgcaaaatgtgattttcttattaaaatactattttaaattttatattttataaaattactaattgtacttttattttt

SEQ ID NO: 230950 - DNA, 1021 bp, Cannabis indica
agaagaagtgttttctgagatatattctttactagtattatttttccctcacttttaatatactgtgtgtttagtagaaatataagctctatgattggtgtgaccacttacatatatctgattctaattatacagtctggactggaccacaatgctcattgttttgaatatatatgattctgtatcttatatacacattatagtaggaggatagatcaaacaagaagatgttaacaaaaattttgactaataattttcttaatgtgttgggattgggagactagtcacatgaaaagtgaaacagaaacaaaatgccaccagcaaaacacctttgcatattaacaaccattatttgattagggagctttttcatgcatgtagcttgggttcaatcatctcaaaatcaccacttttcatttgtaaatttcagtgtttttgaaatgagtaaatttcagtgttagaaatgctgttaagttacatgtttcactttaatatccaaaagccttaagatttttatttttgtggttgctattaagttttgattattgatatattattcactagggaccttttcacccctctattgttaaccccatgtgggtccttttttctcctaggggggtggagatacacaccatctcacatgaacttcaaataaagaagtttgtttgctttttacaatgcatgataaaaaaaaaaattggtattgggatacaactttcattgaatagaaactactttgaactaaggaaaaagtgtatgttagttattaaagaaaaaaaaaaaacagaaaagctaatctggttgaaaaagcttacacatcttacttacaggtgtttgcatgaaacacatatataaaaccaccccactttataaatttctcaatactcatttgctaaaacaaaacctctttggcttcatctcttttactagttttgatcttgtaatcctagctaaaactttgcatatccttagaaactaattgataccctttaggctttatctatcactatgcatgatt

SEQ ID NO: 230951 - DNA, 1023 bp, Cannabis indica
gtaattaaaatacttaagaacccgtactgaattggatattacaatatttacatctcacaaatgtggtgaccgcatttctctattatatatgtgatatgtgtgtatttaatcgaacgaaattaagcttcttcagcattaatttaattggtcttagtattctgtaagtaaatatggatgccttatcaagagaccaagcggagatatttgaacacatgttcagctttgtggactcaatggcactaaaatgtgccgtggagcttcgtatagccgacatcattcactcccaagattgcccaatctccttaacccaaatagcttccaaaattattactaattctcataatagtcccatgatctcctcttccccagataataataataataataataatactaccatgctttacctcaaccgcatcatgacctcgctcgtacgcaagaagatcttcacaacacaatatgatcatgatcagacactgtatggggtgacctccaaatcacagtggctactgagagactccaagccaagcttggcaccgcttatactgatggaaaaccaccccatacagatggcgccttggcatttctttagccacatcatcaaggatcaggagggtagcgccaccgcttacgaaaaggcccacggctgcggcatcttcgagttggcgtctgttaatggcgaactgaacaagatttttaacgatggtatggcctgtcttggggagatggtgatgggagcgattctacctgcttacgatgtgttcggttgtatgggatcattggtggacgtgggaggtgggattggtggggatttagctgagattgttaaatctcatccgcatatcaaagggattaactttgatttgccacatgtcactgctacggcgccggagtctaatggtgtcacccacgtcgcaggtaacatgttcgaatctgttcctagcgcagatgccatcttcatcaaggttcgtatactactttaacctctatatatactaactttaaaaaaaaaaaaattaaaaa

SEQ ID NO: 230952 - DNA, 892 bp, Cannabis indica
ttcttttaggcaaacatcgggtgcaagacattcgaagaacaaaaataaggggaaaagaaggagaaaagaggagtgtggaagtcgcttcaaacactcgatgacaaacaaacagaagatcactttttagcctcaaagaaaaacgacaataagcatacaaataaaataacatacgacggtggtcatcgggcaccccccccctttgggaaagcgtcaccatgacattcgccataaccaccatatcacagaaatcaagcgcaaccaaacgagaatgtcaccattcttattttgccctaacataaagaagaaaaaaaaaaattatgaacaaaacttatgcaaaggtggtaaggaagaggcggacagcgtccggtggtagaactttgtctaacaacgacagaggagcagcagaagatggtcggaggtatctggaatttttcgaatatgttggctgggttgaaaattgcaaggtggtgaaagtaacctaacaaagaaaagtgttggcttttataggccagaaggggtgcaaggcagttgtgatcagacaccatcgtatggtgagaatttgtagcaattcgaatctcgtgatccaacggatgggatgaacaggtgtcaagaggagaaaggacggtcgaaatgtttgagtacttctccaacattgacattaatgcaaagttttatcaatggacaggaagcgaatcattgcctgtaaaaggaaataaaaatcaataatgacgatcataaatgtaacccacgcgccaggggcacgtgccactatatttattaaggaccggagtccgcatacaagtctcatttacctattactaaataagacttgggagaaaaatgttgctaaagggttttcccaaaatacgtggccacgactacgtatgacacg

SEQ ID NO: 230953 - DNA, 624 bp, Cannabis indica
aggtttttaaattttggtaaatgtgtaaattattttgagttgcacacgtgtatacaaacgaacagaaagtgaacattgtgcacttttgccactaaaaaaaaagattgggtacttaagtcatataaatatgaaactttaggtacttatgccgctattttaccttttttcttttagtgtgtgtaattataaaaataataaattagcaacactttttattcaagtgttgttaaacataatttttgtagtagtcgaattcattctgtaaacaatgacatctcacacaaaataaattataaggaatgaaataatctcaagatcttaataagagtttagtgacaagctctgataccaattgaaattttatattttaatattacaaaattattaattaattaaatacagaataataaatatacttaaacagttatttagtaactactatacacaactttgtaactacagaataaaaccagaaaacaaaaagtggagaaaaataaaaacacacaaggttgtacgtggtatcaacatccttgtagattattactagtccacagggtcataaccagagataagattaattagatatatctcaaaagtataaagtaattgacttatgcataaata

SEQ ID NO: 230954 - DNA, 961 bp, Cannabis indica
actgccgagctccaaactcactgctcttccgctttagctttttctttacctagacatggtagtgcactggtgagtcaacagactcagtaagatatgcataaatatacgatgaattattgtcttgtactgtagccctcatgagtcaacatacaggactcactgaatggttaagaacgttcttaacagaagtatgacctctattccatatgcactaaagtactgctctagtactagtgttggtagggttgaaacatactcccacgtaccactaggtgttgtaccacatgcaccacgtactcacctcgtacttgtgttggtaacaccgtgatatacctttatattttatacactatactaatacactctatttcatagctatactagtgttggtagtatgtaataacatagctagcatacactctcatacatacacacacactcatatatatattatgctaatcttaccttatttcctaattcaagcgtgtcggccgacatgaatgaaaaattttcgagatgaacggagatcctatgtcacatttacataaacgggtaaataacttggacaaactttctcgaaaacctaaaattataaccaagggtaaccttaaagataaacaacatagtactgccctaaatatcagggaaacaacaaactaggcattggaaataactcagactggaaaaatttagttttctgggggtcctgcctgtgaactggtctaccggttctacaagtcctgtagaaccggtcgaccggttggaaccaagaatcccctaaaaatccaaaactttgccaaaaacttccacaaattcaatcataccttccagaacacctgcataaaaaatctagaccaatttctaaaccttaacagtaggaaaaacgtacaatatcacaatatgccattattgaatcaagtttgagttctatgaactcaaacttgctgtaacaccctaacta

SEQ ID NO: 230955 - DNA, 933 bp, Cannabis indica
ctccatttgatgagagaaagcttcttgctctgctagctttcgttgagattcagctagctcgccaaatactcggaacaccttgaggtcttgctcatagtaataatcatctctaatttcactgttgtcctcttcctcctcttccttgtattcttggtttttctcaacaaattattcctaatgctaagctgtctcagctcttcggctgccagctttggacgcttcttcatccctcatagtgctccacaaggcatgccctggagggatcagatagcatcgtccatgatgacatactagcctagaggagggggtttcttgacaacggtctttcgagtagccaccatttttgcagatgcaaggcagcttcaaatctttcttcaactctcaatgaaaatactaaaatatttatcgagatttttgaaaattaaactaaaaaagagcttaagaaattaaataagtaattaagtaatagagatggagattttcacgtggttcaggtattaattaatcctagtccacgagtcaatgattagccgaaaggctttggtgtattataatggggtcttacaagctaaagaattatagcttcttcttatttttcctcacttgggtttatctggaatagagaagaagaaaccctaaaatatttgaagtgaattgtgtcccctgtacgaaggtgtaatggggtatttatatgctaggatctagatctaggcataatcatgacttgctagggttactgtgtaaactaggcccactattggggtaaatacataaaatacatgactcaaggcccaatggcagaagtttggctcgtggggcgaaggtgtctgtactaatggggcatgcgcagttagggacaagtgtcatgcgcgagcactaccacagtagacaatgatgttagataggcgtcgttggacaaaaaggatgtgtttc

SEQ ID NO: 230956 - DNA, 1595 bp, Cannabis indica
ttagttttaggttaggattttaggattttggggctgagatgttaataaattggaatttagaacaagtttttaggcttgatttagacattgtttaagcttaatttggttaaaaatagggctgttagctttgtgttagaagaattaaggttttaagggcaaaagttttactcaactatggtaatttgcttaaattgatgaattgttgtgaattgatggcttgaatttattgtttttatggtatgaaactgtttcgaagcaattgagtaggtgtggaggagttttggggaagaaaatacccaagatttccttacctaccagatccagtcgaccgattccttctggtatagcagaatcgatcgaatgtttggtctgtaagggagaatcccaattttcttcaaggttggtttttttggcttggggtgatttccaagacctagtttagggtatttaggtgttgcatagcgtattttgggactaatgacagttagggtttgtccgattttggtattagggtttgtgtaagaatttggttaggttatttaccgaattttatttccactcaagtcggcgcgcacacctgattactggattgaggtaagaaaagatttatgcactactgagcatgttaagtgagaaatgattattatcttttgtgacttgattattatcgaggtaacgattgctattgttctcactcgaatatgattgaggaaaagatatggtcattaccattactgtgaatgagtaactactcacctgaagccgcagataggtttcttacttatcatttgctttattgggcaacgatagtgacatatgaagctcgtggatgtcaagtggtaaggatgctttatgaggcatcgagatcggttcgtcttataagatgtacaattgtttatgcattgtttgactatgcattgaatgatgaatgtgtttgttatgtcatgttgtcattacttgcaatatgtatatatactgtttgtgtttttatagcttttcttgatgagtctttgtgactcacgggtgcttcgtggtgcaggtaaaagaaaaggtaaggtggaccaaccatgagtcagaggtcttccaatgatgtacatatcaaccgcaatgcctcggcttccagtggataggatccacccttttgatatattttgaactgtaaccctatgttgtagtactagttttgaaacataatgtaaaatttttaaacaggggatttccatacttaacagtagtttatcttttataaaatttatgtttttattttaattaaaagttttaattaaaccgcaattttattaaattaataaattagatgaaaaataaacttgtaagagcacacacgtggtgtccctgtggaatagggcgttacatgtcaattataaaccgagaccaagttgttggggtggtctttagtgtcaatttttcaaaaaaaaaatgttcctcgaatcgacaccaaaactatattttgtagtagtgaatacatattcaatacaacacataatacatacttatatattattaaagtttacatttttaccttaataccgaaatccggccaccaataccaatcgaaattcggccaccacgcacaa

SEQ ID NO: 230957 - DNA, 1445 bp, Cannabis indica
cataaaagcgacttcacaagggcacatacatcctaaaactcaactagtctcgaatgcatctcaagcctgcgagcttatgcaagaatatgaacagccaactcgcactaaagaagtcgcatacgttgctgtatttagtgaattaaactggaaactgttcttcatttattatgtttacgtttgttagcttaattattgtaaatcaatgtataaaaggattgataatgaatgcagtccttgtgtaaatgataggacagttgatttgtatataaaggagtgatccgccgtgaaataaaagagatagaatctttgcaacagtggactaagcagaccgagatctgactgaaccactatattcctctcgtgttcattatttttccagtcttttgctaagtatttgtgttcctgatttgaatacttgccattctgggtcgagtacttgcacttactatatatttactattattattactatctatttttggtgttgtaaaattccttcaacaacatttggcaccgtttgtgggaacgataatactttgctgatttagaaggaaaatcacaatggctggaaatcagacaaatggagatcttaacaacgaatcaatcaacattgggatgatgaatgtcccactgtcgggaaatagggtacctcccgtggatactatcaacggcgctgtaggacggatgaacgtaacacctctcaacttgttccccgaaactgctgctcctcatgttcgggaaagatccacaccggcagcgatgacgggacattttccacctattacgcctgcagtggtgtctgagggcatcatttaattaaccattgatcagtatacggaatacatgatcaaatatgtgctttgcaggccgaaatcgatggacggaataggaatcgacgtcctcctcgagtgcccaatacccgctcaaataatccctaggtaacaaactctagacgtcgaaataaccgtactcgcagggatcgaaggacagatcaggaagggctcgatttaaatcagccgatgtcgagggatcaatccacaaggaacttcaaccatgaggtgcaaacagaggaagatccagagtgacgtaacccttgcagcagaccccagccacgaaacgaagagaatgacattgagtctggctcctcgtctttgcaaagccgtactcccaacaagtacaccaggtcaggttcggcggaaacaccgcgaggagggaggtaccaagttcataaaggcgatctttgtgatcaccttaacgctcttttcaaggcacgttctcatacgccctggaacgatgaagaacctcgtgatcctcagttgggcgatcaaggcataaataatcgcaccaacccgcctaccgcaccagctgcgactaccggagttaatatcttagaaaatatcgccgctgtagtaacggcatctgcgacgactcaaggcaacactgcc

SEQ ID NO: 230958 - DNA, 2689 bp, Cannabis indica
taataaatctgttgattctgtgtatactctttggcacaacagacttggccatccttcccaaaaggtggtcaaatctgtcttgcattcttgtaacatcacatgtaatccaaccaatcccattgtatgtaaagcttgctgtttaggcaagattcataaaatgccatttcccaagttctctcacactgaatattctgaaccattgcagcttatagtttctgatttatggggcccttcacacacattgtctcacaatggttataagtattacatgagttttgtagatgcttttagtaggttcacctggatctatttactcaaaaacaaatctgaggcattaaagactttcttgcattttaaaacagaagctgaactgcaattaggaaagaaacttaaagtttttcaatcagattggggtggggagtatagaaatttctctgaaccacttaaacaagctggaattgttcataggcacccatgtccaacaactcatgaacagaatgggctagttgaaagaaagcataggcaaattgttgaacatggtttaagcttacttgcacaagcctcttctaaaattttgggatgaggcttttaggtgtgctgtctacctacacaatagattgccaacccctgttctccatcaactctcacccattgagattttgttcaacaacaaacctgactatgctaatctgagaatttttggctgtctttgttacccaaatatcaggccatataataaacacaaattggattttagatcctcaccttgcactttcttgggatatagccttaaccacaaaggctataaatgtttagactcaaatggtcgattatacatctcgagagatgttattttttatgaatccaattttccttatgcctcaatttcaatagatgcatctgaaagtgtatctgagtctcacattcctagtgttattcctctcaatcctctcccatatactgttgagtctctcttttctcttccctctgcatctgttgcaaatcgtgttactgatgctactgttgtggcctcttttggtatggttcatcatgagaattctaccaattctcattctcttatcgatacaccagtaccaacaaatgtttccactggaaacatgtctcaaccacaaccaccagtatctacaagtcccactgaaaccattctccccagtccaaatttttccttgcaacagcctacacctagtcctcccattaacaatcatagcatgaaaactcgagcaaagtctgggatatataagcccaaagcactcttagtttctcaagaacctagtaatgtcaaggctgctctcaaagaagagaaatggtgtaatgctatgtctgaagaaatggtagctttaaagaaaaatggtacatggacctatgttcctcttcctagtggcagaactcctattggctgcaagtgggtttataaagagaaattaaatgctgatggaactgttaacagaaacaaagctcgtctcgttgcaaagggattccaccagcaagcaggcttcgattttacagagacctttagcccagttgtaaagccagttacaattcgaactgttctgtctcttgccgtgactaacaactggactttacaacagttagatgtaaacaatgcatttttgaatggtgacttaaaggaagaggtctatatgacccaacccccgggttttgaacttgttgatgctccacatttagtatgcaaacttcacaaggctttgtatgggcttaagcaagcacctcgtgcttggtttgacaaattgcaccattgccttgatacactcgggtttcagtcctcaaagtcagatcaaagtttattcatcaaacatacagcaagctctatcactcttatacttgtgtatgttgatgatataatcatcactggcagcgactcctcactcatctccactctcatctgtgatctgaattccaagttttcacttaaaaatcttggccagttgcattactttctcggaattgaagttcagcatacatctcaagggattcatttgtctcaggcaaaatacatccgagatttattggttaaagctcaaatggaaggagctaaaccagttcctacaccaatgatcagcactgtcaagttatctgcctatgaaggagaaccagtacctgatccacagctctatcgatcgatagttggtgcgcttcaatacctcaccataacccgtcctgaaatctccttcagcgtcaataaagtttgccaattcatggcaaatcctttatctacacattggcatgctgtaaaacgtatattgagatacttgagtggcactgtgtttcatggtttgcatctaaaaccactcacagaatatgaaatcacagcctttagtgatgccgattgggctagtgatcctgatgatcgtcgttctacatcgggtttcactatcttttttggtcccaacttgatagcttggcaatgtaagaagcagcaaaccgtgtcacggtctagtactgaagcagagtatcgaagtgttgctcaagctgtttctgaacttacatggctcaattcattacttacagaacttcggattaagttggctcgaacaccagtactttggtgtgacaacctcagtacagttctcctcacggctaatcccgttcttcatgcaagaacgaaacatattgaactagatctgtactttgttcgagaaaagatctc

SEQ ID NO: 230959 - DNA, 1201 bp, Cannabis indica
catactaaagatcgcacgagaatacaatttgctcgggttttagttgaaatggagatcacagatgaaccccccgctgcgatatcataccttaatgagtttgggcaattgagtgaacaaaaaatagactatgagtggatgccgactaagtgtaaaaagtgtgctgggtttgggcatatacaagcagattgccgaagagacgaattcaataagaaaactggtggagatgttctcaaacaggggaaaaatgaattgccggttaagagtatgaagaataaagctatgacagagaatacaaatggtgaggaaggaaataagttgcagcagggagagtggtcagtcccgaaaaaaataattggcagcagaggagttcaaagcagagacaggattatgatagctccaattggtgagtctaatgccttcatagctttacaggagcaaagtgtggaacaaggaaaagaagggaactgtgagattgaaggggatcaaggtaatatttctaaatagttatggaagcttgcaatataggttgttggaatgttagaggtgtaaatagtagagagaagcaagatactcttgttgatttttgtaatgtaaagaaaataggaatttgtgctttgttagaaactaaagtgaggggggaaagaataaaggagttgatggaaaataaatttgctaattggaactacttttcgagtcctaatacagagggtaggctgctagttatgtggagaaaaagcgttgttcgggtaattgttattgctgaatcttctcaattagtgcattgctatgtgaagatgacaggggttgttgctgatttctgtgttacttttgtgtatggttttaacactattgagactaggaaaagtctttgggaggagatgagaaatttgaagttccctgtgaaaccgtggcttgtggtgggggatttcaatgctgtttttgaattggatgatagaatagggggaaatagtatcactctgaatgacatagtcgattctaataactggttaatgtatgctaatgttgtgagactaaaaaagacgggatctcattacacttggaccaacaaccaggaggataacagcagaatttattagaagattgatcatgcttttgtgaatgaggattgggttgatattatgccggatgctaaagctcattttgattaggaagtaatgtctgatcattgctcttgtgttat

SEQ ID NO: 230960 - DNA, 915 bp, Cannabis indica
ttttatttttatttttttgcattcgcaaccgacccttgctcttctctctccctttcgtctccttcattctgtgacaaaacctccatagccaccatggtctgaagctccgaccaattttcacccattccactcaccgttctagctctcttggaccctaatctcactagccccacaccatcgcatcaccccaaaattcaggtcttcgtcctcaggttctctagacctttcccttcaatccagcatcaccatcatcacctccattcttactctggttctctcaaatccatttgagccacactaccccaagttcaaccgtcgtctcctatttctccaatgccctgtcgtcctcatgcttccctttcatacccgaccttctcgctgtccaaatctaattttttttaccaaaataggtttctagtgagaggtctaaaaatgcctcgttgtcgaagcctcacccaatagtgactccaatttgggcattttcaaagtccgacgagccaatctccaattttgggttttgaatcgatggtggtggaaagtaggactgaacccgaacccgaacaacccgcccgaacttgaaccggtgaacccgcaaatttttttgaaagaaaatgttcgggcaggtcaggttcaacccggtacccttagggcgggttcgcgggttgagtttttgggagtaccgggtttcgggttgaacccaaacccgccgaccaacccgcaaatttaatatattatatatatatgttattttttattacattttatatatatatattaattaaaaaaataaaaataattaaaaatataaaaccctaaaattgttatattatatatgtttgagttaataaataaaaacaataaaagaaatatttatttgaataaaaaattattttttaaagagttgaccgagttgac

SEQ ID NO: 230961 - DNA, 1282 bp, Cannabis indica
tccttttacacatgtatcatttcagccaatatctccctctcactttcttggcctaacaaactttcctccagctggcatataccctcttccacacgcctcctcttagtatcataaacaactaacccctcttcttaaaatttaaaattatttcctgatataggctcattaatatcaatcccacttttttctccttgattttcaactagcccataaccacctgtaacttcaagattttcgtctcccaagtatgtgcgattccccatcgtcccctccgtgaagcccgaccctggttgctggttgctctggttcgccatggttggagaggaaccctccattggctgccccatactatcccggagccattgagcgccgatttgatgatgttgtctgcggttgggagccttcataaacaaatcgtaaggcttgacaatggaatccagagattcctcaaacaatctatggcaaaacttctccgaatggcctataacgccataaataaagcaaaacgtcagcacccgttcatacttgaaatttgcccagaaccactcttccttgttcttaaatattttcattctccttttaagaggtcgatcgatattgattaacacccaaacccgaaagtaatctctccatatcccagtaaagttcttcgaacatgaagacacgaactttccgacgtaagccctgacagctcttaaaacatgttcactcttgaaccgtacttgtaaatcataaatttggacccatatttccatagtattcaatacacctagtctgggattatcacattccttaagcctttcaatgctcaaaggtatcttgttgaatgtccatggtgtgccctcaagagccctactgatatcaacttcatgaaagaactgacacaagtatttattggtctctaattcctttacatacatgcccttactgggacgccacagtgacgccattacgtttctaagtgaatcgaaatatgccgatttattagacagtattcggcccaccaaacaccaccgagcatcaaagtcatctgccaacccttccacctggtcgaacctgaatcccacctcttcttcatcattcacattcagattttcccacctatcacccaaatcctccatcgtcctactgctagaagccataattaggggtgttcataaaaactgataaaccaaaaccgaacatcaaaccgactagaccgtaaccgaattttcggttccacgtcatcaccaaatttggcggtcggtttcggtttcggtttttttgacatagcggtcggttt

SEQ ID NO: 230962 - DNA, 1122 bp, Cannabis indica
tttcttctcattttcaattcatagtatgaattttaccatttaaacttgaaacaagtagaaaacaagcgtaattctacacaaaataaatacagtcagttgaaacacaacactaaaacacttcataaaataaacctaaaactagcatatcaaagctcacaaatatcttgccagagaagttttgttccatttcgacccttcttcaaaatccagcccaccatatatttgctcccacagaaaatctttgtaaattttatcaatttccttagaaatttttgaaccaagagaaagatgctcatccagcaagtacttctaatcccaatcaacacaaagttaatgagaagtgccctccctgcataagtcgaataccgacttgcccaagtgtgcaatttcattctcaactttgaataatgatctcacaattcgcctatttctattttgttggtttaagatttacccccaaatatttcatcgaaaatgagtcttcctttaaatccaacctctctaagattctttgtttctaaaggttgtttactccagcaaagtaaatactggatttctctttgtttactgccaatctagaacataggccaaactgcttcaatgtttcaacaatacatctaattaaatctgagttaggtacccttacaaaatagaatcaaagtcattaacaaaacataaggtaactagattcagactgttgcacattggatgatgtctaattttttttttccttggcttgtcttcaaagaattctaatcggatactccatgattagaacaaagaggagtgatgagattggatctccccggcataaacctttagcctctttaaattgcctttgatcttttgaatgactaacaagtatgttgtgtcttgaacgcaagacataacaattcacaaattaagtaggtaagaatatgctttgagaagttagaaatctcactttattgtatcatagactttggtcgaatcaatttttaacaagcatataaatcttgtagtataattaaacacgttgtgagcaacaaatttatttttaataaacgcgacttggttttcatttaccaaaaattattattattaggataattaggatttttgccccctgaactttgatatgta

SEQ ID NO: 230963 - DNA, 1489 bp, Cannabis indica
aaagttttgataaagatcaatttaatcttttttgggtttaatttgggccatttggaatgacagaaacagagccatttttaatcctaatcatgtcactgatttctgtgtggagagctatgtcagttattatttgcaggaatacagggacgcgcaaaatcggatatccatatcatctcacacctctcaccatccttcaccgcgtgttcatgttccagatcacacatatcggctttctgtggatgctgctctttctccttcaactaacaagcacgggtacggggcggttgtaactgattccaaaggaacagccattgcaactttcacggctgcttcacatacagctctcgcccctatcttcgccgaagccgaagccctccatcgagctctcctttggtgtcaagcagtccgtttcccaattgctgtcataacctctgactgccaaacttttgtgcaccgtatccagaaattttctccagatcgatcagcgctctcgggtctactcgccctcatagtctcctctttgtcgtcttttccaggtgctgttctccaccacattcccagatctacgaacatcgcagctcacgaccttgccagatcagcccttggaacggacagagagataattcggaaccttttcagttcccctccttgaagatcttcgccttctccagctctcggtttagatcttctttttacaaaaaaaaaaaaaaagtccaaactatatttaatttaacaatattttattacaccaataataatataatactttacatcactttgaatatttttttttgaataatgcttaaattcattatctcaaatcatccaaaactaagatgcagctacaaaaagtagggtatcctcactaaaaatacagtcagccttacaaaaagaagatcgcgccaaagcattcgcaaccttattagcagaccgcttaacaaaattaaaagaaacatcaacaaaatcagcaatcaaattcttacaataaaaaagaatatggccataaggagaaatcatatgtttaaactttagcaaatcattaataactcttaaacaatccgactcaatgaccaccttaggccatccattcgctttgctccaagataacgcctccttgatgccaatggcttcgaccacatgaagctgcaaagagccacttttggaaagaactctcactaccaacaccaaaccagcagcagtccttacaacaagacccacaccataacgcccctgagtaataaacattgcaccatcaacattaactttaacataagggagatcaggagcagtccaatggtcaacactttggacatgcaggccaccaataggtacatcaataccattatgttgttgagcattaaacaagtctacataattcagtttagccaatgtcaccacatcactaggagctggttgcttggagttccaaaccaggtcattacggtgagtccaaattgaccaacaagtcatagcagcctcaatgatttcg

SEQ ID NO: 230964 - DNA, 2649 bp, Cannabis indica
ctgtcgtaagcagatgccccgagtaaacgctgcccaaacttcttgctaaagtaagcaagcggatgaccatcttgaagcaacaccccaccgaacccaatattggaggcatccgtttcaacaacaaactgtttagtaaaatctggcaactgtaacacaggagtagagaccatagaatccttgagttgctggaaggccaaagtagctgctggcgtccatgagaaactgtcctttttgagcaagtcagtaagaggagcggcaatggaggcataatgagcgacgaaacggcggtaataccctgtcaaacccaaaaaaccccgcagctgtttgagattacgcggcaaaggccattccaccatagccgagaccttcgaagggtcggcggccaccccttgatccgacacgatgtggcctaagtactcaatggattgctgaaataaaaaacacttggatgccttggcaaaaaattgatgttgagatagcaactgaaaaaccaatcgtaagtgtgcaagatgctcggacatggaaccactgtaaaccagaatatcatcaaagaaaactatgacaaagcggcgtaaataaggctgaaaaacctggttcattgctgcctgaaaagttgccggagcattagtgagcccaaagggcatcacaagaaactcataatgcccttcgtgtgttcgaaaagcggtcttgtggacatcccgaccatccatccgaatttgatggtaccccgctcgtaaatccagttttgaaaaaaccttagcggcccccagctcgaccaataattcttcaatggtgggaataggaaagcgatctttaaccgtaatgccattgagagcacggtaatccacgcaaaagcgccaagagccatctttcttcttgacgagaagaaccggtgaggaataaggacttgtactatggcgaataaaaccggcatccttcatttcaagaactagcttctcaataatatccttctggaaataaggataacgatacggccgtacgttaactgggcttgaacctggctgtaaaaaaatacgatgatcaactgtgcggaatggtggcaactgtgtcggagtagcaaaaaccgaagagaactgcccaatcaacttgctagcagcggcgttccaaggcggagatagatcgggcaaggccaactcgttaaccaacggtgtagacagtaaaagagattgctctcgagcggtcgaaacatgagtcatacacccgagccaactgacttgaccctcatgcaacggtgaagtgagttgggtaaaagaaatctgtttcgcagaccaagtgggatttccatcgagtttcattgtttgtcccttcagtttaaattccatcgtcaaggcacggtggtcatgaatacacggccccagcgtttgcaaccattgcataccgaggacaacatcaaatccctaaatcagaaggacgtagagatcaacgctgaacgagtgtccctgcaaaataaggtccactgcacggcatatcttagaacaagtcaaaaattgcccgttacccatgtaaaccttgaaggtgcgagtggtttcgtaaggcaactgtaaggaatcagcgagggactcttggatgaaattattgttactgccagtatcgattaacacctcgagagacttggagccatgctgagcacgcaagcgaaagatgtgcgggttcgctgaattagacagtgcgtgtaggctaacttcctcatccagttcgtcaccctcggtaggtaaatcagcgacatgggtttcgtcctcaccttcatgaccacacaacaacaagacccgattcttacacttatgcccaggatgaaatttctcatcacaggaaaagcacaatcccttatcacggcgatctttcagttccagcggagagagacgcttgacaggtaggtgttgatacgaactaggaggttgaaccgaaggagccccactaggatgagaaagtgcgctcggagtagcagaccgagaacttcccacagaatcgacccctgaaaaacgacgacccaccgagcccaatggcaccgaagcagaacgaaaacgacccgtcaactcctcatggcgatcctcaaacagctgggccttggacatagcatccgctaaatcagtcggagccaccagcaacaattccctgcgtatgggcagctttaatccccaaataaaaaaattaaggaacatagtatcgggcacaccagaaatttgggtcatgagttcctcaaacgcagtgcggtattgatcgatcgtccccgtttgggtcagcttggcaatacgacccaatggatcctcatacaccgaagtgccataacgtttccgtagctccgccaaaaaaacggaccaagaagtgagcaaaccaccacgctccatccattgataccaggtggccggaccaccctccaaatggaacgccaccaccgcgaggcgcaattcagaatcgatccgatgcagatcaaagaacttcgaaatcttataaatccaggtctccacattcgaaccatcaaaccggggaactttgacacgaagagtcttcaaaagggattccaggtccttcggagaagacgcagacgcaggacgccgaccactagccgactgttgatcaccttcaggaagagggggcgaacccataactttcgacccagagagaggttgt

SEQ ID NO: 230965 - DNA, 1634 bp, Cannabis indica
gtttcggttcttgaaataaaaaataatttaaccaaaaaaccgtcaaaaccgccgaaaaccgtctaaaaccgccaaaccgaaaactgccaaaaactgtacggtcggttttatactgttataatttctaaacggtcggttataaaattttaaaaaccgaccataaccgatcgattttcatccctacatacaatctcccaaacgagttgcactaatcttatctttttatcaatttgtatcgtccaacttgtgtagtatctcatcattcaagtgtttcaccaaaggttcttattaaaggtaataactcttactattatgcccttttatctatcaacaccctgcaaccatcaagttccaagaaacaacatctccagtcggcatctcatcaagaacttgtcgtgcctccaataatatggaaactagaccattcccaacaaaaaaatttatatcaagtccaattttcacaacagcagcatgaatttgcaacccaacccacaaataatgggatgttgaacatgccttgaagacacaagggtatgtgtaattatccagttttaaaaacaagaagaccatcatcatacaggtaattgttacaatgctttctgatcatgacattaaagaagacaacattcttcagaggcatttcatcaaatatgttgtgggtaatccttgtttctccattggctgcataagccctcataaccttaatacctagtgttggattctaatgaagatgctggtcgaaaaagatcttggaatggaatttctagagtgttttgatatctgggcactcatcaaaaagtctttcaagcaagtcatcagccagaaatgggctatcatgcacaagcaagtttaaacattaattatggtgtatattccatgattctcttgaaattgtttactcataatatttaaaaaattaaaatggtactgaccaataaaattatatcacatgtacacttgtatacacataaacaatacaagttggcatttaactactcactatagtaaataccaaaacaaaattaaagtttgattttgctccaaaaaaaaaaactgtaaaattaagcatagcataaattgtaactcggatagttttactacaattttcccgtttttatttttcatttttgataaatttatattatataattgaaataacttcaaacaccaaacgaaattgcacatactgtatccaagcaaaatccaacagaagaaaatattgcatttttatttccctacattttctttcctacaaaaaaaaaaaaaatccacactccaagcaaaccttagaaattgatggggaaaaaataataaataaactataaactaaatcccatcagctgcacaaacgtctcacatataaaatcccagaattatatcttctccctggaaaaagaaaatggtatacttcccttgacaccctctgtcaccggtgagtacattcgcaagaatgaaactcaagtaaaagcagtggagtatgtgatttaattcgatgcaaagcaaaatatacgattaaattccgacaaaacttacatgctgcaacaacacaatgagccttgcaaacctgagaaaagagcattaaaagaaagaaatcatttgaggccaaaaacgcaagaatggattataagaaaata

SEQ ID NO: 230966 - DNA, 938 bp, Cannabis indica
agtacgtgaaaagatagggccacggatactaccagcccaattagcccaataattaagtaaccaggggttacaacctattcctctggaaggagaggacatcctgattatttcgggagggccacatatcgccggggaaagcaataacgcccagaaaagatatgtgaaggagataaagaacgagcagtcggtctttgctctagaacctgctaagaaggtggaaactgaggagccccccattacattcacagaggaagacgagtgtaaagactacttaagatcaatattctggaatattgaataattagagttaattacaatattgagtttttaattatgatttgcatgtttgtggagattcatttaaattcagaatgtattaattatgctatatgtgaaattctcgttttctgtgattgtgtttggtggcagtggaaagtgacgttgggccagtagagagtcacgtttcgtataggatagaattattttaatagcggggtattattgttgaatattgaaggtgtcgggttttatcggggtttgtaatgaccaaactacccttagattttgttttaaccttagatttaggttaaagggcaaaaaggtcttttcctagaggtctctttctatcatttagtaaccatttagatgttgttttatttagaaaaggggttactaaatattaagttagaaatagttagtaaattagggatttatctagaagtcaccttcttcctcaccacactatctctctccctctctctcgaattgtcaagaaccagcaccaagctgggatttttctcagttcaaactagtgggtattagcaaagttggtgcttaactttaaggtatgaaaccctagtttcttcctttgatatattttttagttaaagaagggttttgatgtatggttttgggaattatggaactgtggtggcaat

SEQ ID NO: 230967 - DNA, 697 bp, Cannabis indica
tcaatcgaccatggtgcattccccttgtcaagaaggttgcccgcagaacaaaacagaagtcacttcatgaaattcttaaattttattgcaagacagctaagactaagtattacaccaaggtggacaataggaaattctatatgcagcgaggattagtggcaaatgtagagaacattgacgagttacttgaatgggtgagtgaaatggttcagaagagaaattgtggatttttcgtcaagcagcgagaacaggtagtaatggaagttgtcaaagagttctacgcaaattttttgtcccaagaatggccagctgaagttattgtgcgtgaagtactggtgtcattctcaactgaaacaattaacaacatgtccaggttaacatcagtcgaatgccattacacttccctcaaaggttaagtgagcgatgagacattgtctgacacgaggtctgagctcgccaagctagagtgggacctcgatgagtatggaaaccttcagtttcggcgaactgacctggagcacgatttgaaatgtctctacacattcgtgcaaacttccttgtgccccacctcacatgattccactgtctgccgagatcgcgcgtggatgttgtactgtattaagatggtgtgggatgtcgatgtaaaggctgtcctagcccaagagattgctgactgtgcgcatcgggggaaaggaaa

SEQ ID NO: 230968 - DNA, 1795 bp, Cannabis indica
aaacagatcagtggaaatgcttaaagtattttaaatttgatcaaagtataattgtttaagttgtgaataaaaacacaaacaagcaaatatattaagttcaaatttaaagatgcaaggcataaataaaagataaaataaaagcagagctggccatccaacaatgcaaatttttctttacaaaaaagtgtcacaaggggcaaaccattgtctcggccatatggccattttcctaaataaagaaaatgcaaattaaaaactaagcctacattgtaggagacttggatggatcttcttgttccacttcgacctcttcatcctcacctagttcttctctccttgttttctcgcataaggcaagcatagcatcgactccttcacccaaaaagttgaagcccatctcaggattggccgaccaggtttgataaatggttctcttggcgatgctgtttaccctttccttggtttcagcctccatctccttgagatttttttcatggtcagcctggagggacttgagagaatcctcaaactccttgattttcttttggtcagccagatgctgcttttcagcctcttcctttgcaccagagaactcagcctcggagtcattccacttttttgctaaagtttcctatgctccctggtctagcgaagctcagtctcgagcatttcagcctccttagacgatcgatgatgagtagtaaaggagaggagagaggcctgcgagaaggaggcaaatcaaaattagtaaaggtgataaaataaggaaaagtgagaataagaagaaaaggaaactaacctgaggcaagagttcgtaactcctttttgcaagatcctcaatgctgcctcgcgtgagaagctcccagctgctagactcaagggtgaagaagttgcgccacccattagtagaatgcagcgagcagagttgcgatccttcaattctggcctcgaggggtaatgggcaagagggctcgagaaggaccatctctggacgagaaccagagaacttcacctggtgcactgacacagtgggttgttcatttgcatttgtcgcagcagagacctcattctttggagacttggcaggctcgatggtaagctggcctgatgatttcgttttgttggccatggttttattccttttgggttctttggtagaaccctaggcctcacaaacttgggcgactctcttcttggacttcttgttgactgggggacgactcttgaacatattctccaggtcgggatccatatctacgaggcggaggaaatacattagcagttaagcaaaatgaatagaaatggggaataaactcccacttgagaaggttaccgtagtcttcagaagatgacgagggaggactataatattaactaaactccctagatcctatgatcataaatatatcataaggatttagtggatctaaatcccaacttgaatctatatgacccgatctatccaacatagtcccatactactcggcaatcccatagtatgaactagtacacctaatctgaacatggaattctgggtaccaactatcaaacctatgtgttatgcgatctataagaaaggggttccaagtataaaaaattgtatcgactaactcagaaagaaactagggtgttacgtccggccctaagaactatgggtgaccacccacatttattacctcgggatgctcctttttctcgaggggcagttctctcgagataatgtgcgcaagccacgaagtcctcactttcttcgtcggctagaacccgcacctttttccacaaagaatacttgggt

SEQ ID NO: 230969 - DNA, 945 bp, Cannabis indica
aaacaatgactcttaattccctctacaattcggcccaacaagagaagcagcccacctagataaaaccctaagaaactcaatataaaaggtatcttttctaaccctaatattcactatctacggcagccacaatattccttcaccaaaaattcaaactttttcaaatatcttctctctttctctcaaacgacagcagctagggttctagggttctaaatgtttttcttttatcttcttcttcttttctttacagtaacaactagggttttatgggattctaatttcttcaagcttcttcttcacagccgcacctaatattaggatttctttaagctctcttattttctcttttaatggcagaaataaaattgggtgttctagggttatagattttttttacttcttttcttttctctcttctactgaatatagttctagggttcaaaggggtatttttattttattttcttcttctaaatggcagtagcaaaaatggtgttctagggttttctaggttttattttcttactcctcttttgttctacccgaaaaaacaaacccagaaaacctaagattctacccgaaacactaaacccagaaaactctcttcaactttcggccaaataactacacacccgaaaatagcaagaacacacaatacacacacaaatacaaatataaaaaatatatggattaagatgagagatacaaacagaaatggtaaagatggagacaccaaatttgatctcgaagttcgcccaaaacaaccggctacttctccgtcaagtcgtcagcttgatttcattaatcatcaaataacaggttacactcttgatttacaactgtatgtatttctctctatttttctctctttggatactaacaaaactctcttttctttttacatgaacactcaagagattctctaggaggagctcacatgga

SEQ ID NO: 230970 - DNA, 3063 bp, Cannabis indica
ataaataacagtataataaattgtttaaatagctataaataatttcatgaataatcataattaactgataatttccaaattaactaagcgggctttacaccaaagctaacaaaaatacttgttctaaagtgtaataagccttcctcttcttcttccttccctcagaaagatcctccaacaagacccacaagccaaacttttcttcatgccacattcgaagcctaaatgttcaaaacaattataaatacagggacccaacacaaaatattgattaaaaaaccaaagtatcacattcaattctatcatggagttagatacatattccagtatcagcaatacaactaaaaccaacaccaaagaaacaaagtatcaacctttgtattgatgcgacgttctcgcttagacatgagattattcttctccattttaggtcaccttttagctaccttctaaaataaaagaaaaagagataaaataaaaaatagtaccaaacaagttatacataaatgaaacaacaaaaagcacatgaacttttaaagctatagtaagtcacacacaacattgttccttagttttattgttacaaagttaatgtctattttctgttgatgaaaaaaagaggctattatgtattttgtctttttggcggccaaacagaatcagctaaaggttagttagctaagaaatataaaagaaaaaacagagtctaactcacaaatagtaaatatttatttgttaatatgaaaattaaagaagcgaagtcgaatgtcaaaagagggaacaaactatctatatataaaattttgaatgtcataagtagcttacaaactccaagctagcgttcaaacaaattcttcgaaagatactatcacaattgaacacccaaacaaacttagcaccaaatgataaatcaaatgcttaaacaaaataatctttcaagaagtacaatctttattgtcaataaaattattttagattgagtatattggatatgttctataaattagtatatataattagttttggtttaataattccagcagattttgttcttctcttaatagtatgctatatatacatattaactctatacatctaatagaaataaaatttgccatttttacctattgagtgagaaaatgtataattttgtctctgtatttctttattaccttttcttttggctatttattttcttgtgtgtttaaccatatatgatttttataatgaagaggcaaacaaactttggtcatgtgaacgttaaaatagttatcatcctcatacatgtatttacaatagcttataaagctctgaactcttattaaaagataagcatacatgtcaagaaaaagtgagcaaaatagatccatgacaactagaattttggaactttgtcactaactactcactcctacatgttcttaaggacacaactttagattcaataaagatattaattaagtaaaagtcaattttcagtattatttgcaacagcataatcatgcccataataaattttattgagagtattatatatgtctatttaagaaaattggacacaaataaatagattataaaataagtatggtataataactaataaaaccctattcttcttgtatcgtgaaaataattccaactccttcctcataacagccatcaaaaaatagttccaattatccacatcaaattaacacaagaatcaaatttcatatcccatactcttgttagaaaaaacgataatggtaaaaatagtcaagtctcagtcacacataattgagttcaaagtgaaataaaagtcttttgagtgtctaagtagcatcaagttctaaactctcctataaaattctttaaatacaatttatctatgatcaagttaacagtatttgacttaggcaggctttacttctaatatagttatttcaaacaacaatttattctccaattttcaggttgtcaatcaaatttggcatctctaacccataggtccaaattaatttttacttcaaaatggagcaaaagagaaagagatgtgagaaacgtacctgggtgtggctactgctaggcttggttcgacgccgtggggtgtggccggttactaggcttggtcaccgagatggatagagagaaagagaaataaagtgagagagagagatggatttagggtttgtgaaaatggtaatggggcgactgaaagtggttatatatgtttagggtaagtgaaatgggatttgcccatcgcttattttaatctttttcacgaaggagttattgcgtcagttgggaattgacgcaatgttagcgctagtgtagatctgacgcaaatagtcttgcaactaacgctaatcttgcatcggtgcattgccgacgaaaaattcatgagttctttaataacatcaatttttaaattttcttgacgttagactcgacggaaaatcaagtttttgaagtagtgcaacgcaccaggtcaggtgtcaacctaggcgctgtgtgcttctcgggctctttcacagggcttgctttgatacctctatggaaatcaaaatcgcaaataaggtctcctaccctatttttcacaattttaagaggaattcccatagcaaagtttttatttgaggagccaaaaaatgcaaaccaggttgcatgtcaacctaggcgtacgacccaatgccatgtcaacatgggcgttggggccctgttcaggttccctcaaactctcctttactcctcgagatcacttttattttagttaattttgatggtagaaaaattctaggaacactttttagggaaaattattggaaacaacccaggttgacaaaatgtcaacgtgggtgctagatcaagtttctggccaccagatgactccatttaattcttggagacacttttatcttaatctttgtcgaaagaggataatatgcctagaaaacttctaaaaaaaatccttggaaattgcccaagcagacaaagtgtcaaccttggagctaggcccttcaccaggtaaacctaggcgctggatcccagttctgacccccaaaaggatctatttgtttcccaaaa

SEQ ID NO: 230971 - DNA, 1342 bp, Cannabis indica
cagtgtgtcaactctgttcaagagctagtcacacagtagcaagatgttaccaaagatttaactataattttcctagaacagaagtagcaaacattcccaaacagtctgctgacattgctacagctgacagtgtagtggaggaagcttggtacccagattctagagctacgtacttctcactgtactgctaatgcagctaatttaacacagaagcagcaatactttggacaataataggtgcatatgggtgacggtgttggcttccttatccaaaatattggtaataccctctttcactacaaaatcacacaaacctttatttctaaatataatgctgcacatgtcacatatccaaaagaatcttatatctgtctctcaatttgctgctgacaataatgcattctttaaattccatcctgataaatactttgtcaaagactaggtttcgaaggagacaattctggaaggccatcttagacatggaatttatgtcacagatccaactcaactcaatatgtcctctccaaataaaatgactgcttcaaactctttgtataatgttcagacttgtaatgtgatcaattgcaattctaattctcaatgtacttctttttctttgtgacataaaaagcttgctagcccttctatcaaagttgtaattgccataatggccaaatataacatttctcaaagaaataacaaaacagtgagtgacttttgtgatgcttgttgtaagggttaaatttacgaatttccttttaaaatatcccaaactatttttatataaccacttcaacttgtgcatagtaatatttggggacccttacctatgatatccttttatggatatagatactatattcactttataaatgtctattcaaggtacacatgagtatttctcctcaaagctaaatttgaagctttaccaacattcataaacttcataacacaaatagaaaagggatgaatcttcccattctatctgtccaatctaactggagggtgaatttcaagtttcagatgcttatctaattaaaaatggaataacttagagtgtcttgtcccactactcatcaataaaatggtgttgtttagagaaaacacaggcacttaatagaaactggtctttacttgcacaaacctccatgcctctctccttctgggagaagttgttattagaacaacttgttatgtcatcaataggcttcctacccgagttatagcacatgatactccttcgaacaagttattccacgaacagacagattactccactttaaaagtgtttggttggcttttttcaaagtgtaggatagatgtaaatgattgtttggtgcaa

SEQ ID NO: 230972 - DNA, 2109 bp, Cannabis indica
aggcttaagtccatttttttttttttcatgtcgtactcgtgtgacccgtgctcgtaccagtttcgtgttatgccaaaaagcatagcttgaatatacaacttgaattatgatccgtaaccatcagatcagtagtttcagtctgatttcccctccctgtttgtacaaccatcttgtgtcctgaaaagtcttaaggcaaagatttgtgtttctttgctctcaatgaaaacactaaaatattgaccttacttttagccaactacagtgagtcaaattaaagttagtaagaacaattaaataatgataattgataaagattaaataaagaaaacaccagagtttttatagaattttagccccttgatggtggtaatagtctactcccctttagtttttattgacttatgagtagagaagcaagaaagccttaatctccctcgaatagtgatattatcttaatatttacactatgacgtggcatccgagtaggtgacacgcgtataatatttcataacttggacggatgattctactcctaaaaagctatgcaaattgatatgaagctcaaagtcatacatgaatggtaagatgtccaggcaagattagtggtggacatctgacctgcttgatcacgtaggtaacttgcatgcaccgaccatggggtgcgagttataaatttcagaaatatacatcgttatttccaagcttgcatgacacgaaaaaaaatccttatatttgtgggattaatttgtatctccagaaaataaaggcaatcaacctaaattttccaatctccttattgtaattatggaaacaaactagtttctctttttatttcttatatattaagagaaaccattattcatgtaattaactcctataaatagtggtttaatctcactatccagagacacaaaaataattaagagagaaagcactcaagagtgaaaccttgaactaagattgaattgcttagagatcatattaagaactttcgagagagattagagcattcttgctctcccttctcacaagtcaatacaataaaaaagagagtaagctatcaccaatcataaggggcagaacctctacaaaatctagtattttttttactttatgctctttactttctgttatttatttattcttatagctttaattaagactcactgtcattggctaaaagcgaggtcaacaagttagatgcctcctctatctatatggaggcattacaaccaattagttttccaaaactaataagaaataaaataggaaactgtttactttctataattacaataaataaaatgagaaactaagtaggttttctttctttcttgctactacgaatctatcccataattttagggatattattgtaacttgcaagcttgtaaatatatgggatatatccttgaaaacatacaactcgcattctcttgtcaatgtatgcgagctgcctggacaatgaaagtttgtcgagtgttgttgcatactctgctcggatatccccgacttctatcatgacttgagaattgaatctctctgtacaacacattgcgagtggaattgtccatccaggtcttaggattctcttcacgtgtcacccagaatgataccacatcaccttctgtaaaatttaggataacaagaggagtgaatactcaatataatattagggaattttaattttatgtgtaatattaaaaataactaaggcaatttaattgatctatatagcgtacttttaatccgctaaatcaaaataatctctcccttttattttttttcttgttcagttaattaattcgtcctgttgttattttttttctctttccacatgtgaagaaagtatatgggttttataactttctataatattttattatttttttttctgtctatttcaatcaattctattattttaaatttttttttcgtctattacacttactaattattttggtttgaaaattgataccattgtaatttattttcaaggttaatcatttggactatatgagaagtatatatttttttactatcattttgacatgttgcactcggttgcttgggagaaactgtgttatcctaaagttcatggagatctag

SEQ ID NO: 230973 - DNA, 767 bp, Cannabis indica
atgtcaaaaaatgtgataagtgccaaagattttcaaagataccaagagcttcacctaatgagctcatgatgatataataacctaggccctttatagtgtgggggatagacctaatttgtcaactcccaatgggaaaaggaggggtacagtttgctattgtacagtagactacttcaccaaatggaggaaagctgaacccctagcaacaatcacctccaagaaggtccttgacttagttatcaagaacatcatatgtagtttcggccttccccataagatggtcccaaaaaacggtaagtagtttgacaatgacatgttcatttatttctgcaacagacatgacatcatcaaaagcttctctgccatggcctatcgtcaagaaaatgggcaggtagaagttctcaacaaaaccctcaaggacaccttgaacaagcgcctttaggaagcaaaaggaaattggcctgaactgcttatagaggtcctatggtcgcataggactaccgagaagacgaccactgtacaaaatccgttcgctctagcttatggctatgaggtgaggatgcttatagagctagtgccactgtctcacaaaagaataacctatgaccaacaaacaaacaacaccctgctggtagagtcccttgacgaagaagaagaaagaagagaacaagccaacctaatgctgcaagcctacgagcaaagggtagcaaggcacttcaacaaacatgtcaagagcaaacaattcttcataggagacatggtgctcc

SEQ ID NO: 230974 - DNA, 2406 bp, Cannabis indica
agaaagcctattgtttttcttttatatttaatgaatatcggtcttgtaaagttttgtttctcaaacctaatcaagaatgggtaaataccattttggaccctgtattttataaaaattatcaattggactttttgttttgttaaatgataaaatagaccatctgttttgttaaattgtaaaaataggactctgagctcaattttcaataattttattttttaatataatcaacttctagacaatttctaacacgagcaaaattttgtcataacatctctagatcagattattattaggttttattttaatttggaaaatacaggatctaatttgttatttaacaaaacaaaagatcaaattagtaacttttgcaaaacaaaaggtccaaaatagtatttatcaaactagaatttcttgaattataataactattgaaaatttattctttcaattgcattctattcattttttacacggtttgctcatgtaatcacaagttataagcatagctacactaattacattacaagggtatatttacaggcatagcaacaaaggtatatttataatattaattctaaaaatttatatacactcataatttattattaaactattgtctatatatattatctatagaaccctgaattaagtcatactagcaacacagcattgtgctacttaaaaataagcaatatgcaaatggtaacattaattcaaacacaaaattttaaaagataaaagtgtaaaaagctatagtttaggagtggaaaaaaaaaacaatttggcttatataaatacactaattttttaagtttcaaaaataaaacataataaataatataatactcatgtggtaatgtatctctttaaaaatatattattatattaagctaaaataaaatttgatcactttgaccaaattgctcttagctatatgtaattaaatatttaaaatcaaatgggaaactcatagaattgaaaacaattgatctaataataaagttgtattgataaaattatattgatcatatttaatgtatttagaatacaaaaatatatttaatttcaaaatataaaataccaaataatggcaaacttgtattttgaaccaatcaacacaaagtgtaaaataaaaaagaaatgaaaatctgagcattttcttctctctcactcttgcactcgtcaaaaagttgaaagtggtaagaaagacacatttttatctttatccataaatcccggatggcctttaatgcttaggaaaggtatgttattatgtgttaatgttttgttttgaagaatgtgcaaaattctcatctgacccctcctccaaaaaaatctcccctgtcaaaataaacattaaaaaacaaaaccaattagagatagaggtgatcacaagagggatccacccttgtctctaatctaatttctctagtgattttagaagcaaagcaatccccatctttctgtaagtacttacttttggctagtcttattccattctttccaactttactaggctcctctctctcacacacacacaccttttcataacaagaagaggggcttgaggcttgactcaccttttttttctctctttcaacttcaattgcccaaaactttatgccaaaccttcccatcaaacaaaaaacatcacttcacttcaatatctatctattttttatgatttgatttataaaccaattttcattcttttattatatgaatgtttcatttaccatatctctataattaatggatattttttcctttatatataaaaagacattttgtagtttgagtcacatgttcatcattatatcatgttctacatgcacatttccataattaagatggggtctctaatgaaaccaaacttatcttaattaattaaaatctttagtggaagagtcaagggtcatagattccatgtcattcttagaacaaagagaagtaataagatgatcttattttaattgtattatgtctttatggagctgtctatattatatagacatatattaaattttatgcttccacttgaaatgtttctcactttattttctatttctcaaaataagttatttacttttgtttggttcattatgcaaatataataaggcatgataatgaccagtgacaaagattacaagattttgaaaaatgctaaaagaccataatagaagttgacccatttgcttatcattagtttatgtcattcccaatgccattttggctcattaagtttcatcaaagggtatgcaaatttattagattaaaaaattaaaccccaaaaaaaaccctactacaagtgctaatatacatggattattgtcccactttatagcttttgtttggtcattttaacaaccctcctttacaagtaccatttatttttattcattt

SEQ ID NO: 230975 - DNA, 639 bp, Cannabis indica
aatgaacaaaatttcattgagaaaaaaattagcgttgagtacatcataaagaagagatcaaagatcctccgttcaaattagctcaccatccaccctaagtacgtgcacaactaattcatgcgtagccataatggtcgaatgatatgcataaataagggacgctttagggaaattggacagtaaactaaaaaatacatcaaatagagagcttaaaacaatcagactcaaaagaaaagagaggaagtccaatttcggcaaccaatctaatgcaaccattattaaagctacaactattattaaagctacaacttccttaattttaattttataaacttaattttttgatcttattttttggtggcaatacatttatttttgtttgtaaatttgagacactagttaaattttaccatatatattatttaaattgtcagtgtgtacacatgtgcatacgtaacatgttttcattggatttgaatttttagtgtcacgtgtacagttgttcacattgaaaatttcatttggtatttaatagtaaaatttaactaacacttcaaatttacaggcaaaagtaagtttaaggggtattgtcacaaaaaaatcaagaaattaagtgcataataattaaaacataaacaa

SEQ ID NO: 230976 - DNA, 765 bp, Cannabis indica
tcacttctgtgatcttatcaactgaattcaacaatcaagtttgtcaattaatcagctaagttcttttgtttctagtcttcaaccgattggtttaattcccttagtttcatttctgtgatttgttaatgtcacgttcatttagtttgttcattgaattcttgtctcagcattcttttctctggtttattgctggtgttaatctcggttcttgcacaacaaatggtattagagccaaggtggcttagaaagatcaagaactgttcgatttaattacagagaaatcaagaatgtcaatggccaagctcgaaatggacaaattcacaggagaaaacgagatttccaactgtggagactcaagatgaaagccatgcttgttcatcaaggtcttcatgaagctttggatacagatgcactagctgccgtggaagaccagaagaagaaaaaggaaattcaaatcaaggctcacagtgcaattatactcagccttggtgatgaaattctcagggaggtctctgaagaagagactgttgatggtttatgggaaaagcttgctagaatttacctgaaaaaatcattagccaacaaattgtgtctcaagaagaagctatacacattgaagatggatgaaaataaagaactaaggaagcatcttgatgaattcaacaagatcatcttggaattacataacattggggtcaagattgatgaagaagaccaaagtattatcctcttatcctctctgcctaaatcttttgaacactttgt

SEQ ID NO: 230977 - DNA, 1257 bp, Cannabis indica
gtgaaatatttgcctatgactatgggatatttagatctttatttgttttgattttttattcattattttagaaaaagatacgggattagaagtgagataccccgaattgtgggggatcacaaacaaatcataggcctatataaagacaacgatagactaaggtttgagacggctcaataaaagacctttgacccgacctttgatcatattctagatcttgaagctctttatagtgcctagaacacataatccctagagaccttctctcttcacgttttccttcagttatttatattggtacgacaccaagcttccatacaattacaattaacatacacacttaccaaaagttaaagaccattctctaatctcgcttccattggtgtattgttcccatgaacattaacaccaccattattattaagtttatggtattgggtctcccatgagccttttattcatgagcttcgatcgatatagattttgcctagaaatctctttttgtactattatccacacactcttgagaacataaatctggtgtgctagaactgaataataaaaaataaagtagacgtagccacattaccatcgcgacatgggggtgaactactataaattcctagtatccttttttatttattgcgattttttttagcaaaattaatttagcgcagtcctattatttttttttttgatcttcttagatcagttgataaaaaattgcgtcaacatttttattgcttatataatggtaatgtagtaaataaagaagataaagttatgtaaaagttaatgaatcataataattaatgacactatagtaaataaaaaaggtgaaatttattatgggccaaatttggcacaatgctaaatcttgtgcataatttggcataatttttagcatgtgacaaatttaccttgggattagccttccaaaacccataaagtacttccgcagcaatagactcgtgatgttttatgtctttagcgtgggcatctctcttagctgcaaacacctcattaacttattttttctcctcttcaagagttgacttctcattctagtgggattcctccttttccatgagagttctagtcagatccttaatatttgtctctttattttggaggagtttctggaggccttctctctcgttggtaagttcacggaaccttttttactcttgttccagatcttcttctaactttgtagcatacgacatgttgtataggttctaccttaaatccttgatc

SEQ ID NO: 230978 - DNA, 1009 bp, Cannabis indica
tacgggtcaagtcaaagcctttggtccgaattcggatcttggtcttgcatctaagtcttgttttagttgaggtctcagatcttgggtcgggtcctaagtttgggtttgggttcaggttcagggttgtgtctcggtagttaggtcctgggttgcgggtacaaggtcgggtcctgtgtctcgagtttggggtcgagttttgggttcggtcctggttgcggagccaatttttgggtccaagtcccccatctaggtcccgattcttagtccaagtttgggtttggggcccaggtcgcccatctaggtctggatcctaggtcccgatctatgtccaagttaaggttcgggtttggatcccaagtttgggtccgagtttaggtcgaagtacgggttaaggtttgagtctgggttctggtcctggtctgagtccaagtcttttttcgggtccgggttggggtcccgatcagggtcctagttttggtctaggtcctggaccaggttctggtctgggtttgggtccgggttttggacccaatcccagggtgggtttgtgtcctagtctggatcctggtccagttatagttttgggtctaggtccatgtcctaatcctagtcctgttcctgggtcctaatctgcttctagtttcagttccagtttcaagtcacgaggtacgggttcggggtgaggttcaggtccgagttcggtctcgagtagggttcgaggctggctctggtttcgggttcaggcctgggtctaggtctcggtcccgttcaaagatctcggtccggttccagttcaagttttagttttgttcccaagtgtgggtttgggtcttggtatgtctccgggtcctgatttgagtttgagtttgggttcgcgctctggtctaagtcctagatctagacatcgacaacgaatcgggtccaaccatcgagtcccggatcccaggtcccgaggtgggtcctttgtccagacttgggtctagggtcgggtccccgatcccgatccaag

SEQ ID NO: 230979 - DNA, 2102 bp, Cannabis indica
attcaaccactcaagatccccttgaataagctagatgaatcccttcagcaagatttgaaatcccttcaaaccagatctgaacctccgacaactctagcagcaagcgtcaccatctttttgtttggcaatccgaggatacattcacacaactaattttgagttttggctctgataccacttgtaaggaccgtcagacaccatctatttctccattggtatgatagtgtccgctttgagcctaagccctcacggatttgtttttgggcaccttcacaaaaggtcttattccaatggagatagtgttcatccttatatacccaagattcttcccatttctaaccaatgtggaactttggatgtacacccaacatattattactagtatatcaatcatgttttgagggtgatcattcaccacataagagttataagaaggcacaaaagttaagcccaacaaggctgatatgaattgcacaatatataagacaaaaccaaaagagaacctaggaagaaacaattagtctaaaacttattatacttttccaaacaaacataacaataagaaataaaataggtcgatatacctattttatttaactgtaattagttatgacaatggggaaacattattatattacttatgtgtagtttcaaaaaattagttgatgtgtcaaacttttattggtttaacacaatatgggacactaatttttaacataaaatcttgattcgaaagggatctggttttggatctcgaaggttctaggattgtttctgatcagctagggttgactcaccttggttcttttgttgctcgggctcaaacgatttgttgtgtggatattaacgacttgtagtttttgtagttttaaacaaattggtttcaattactttggtcattttttaaccctgtcgtatttatcaagagattgagttggtgtagggcattcttgaaaattcaaaaaatcctacaaatctcaagcaagatctccaataagccatagctaattcccgatttccagtggaggctgcaaaggcatcttgtatagatggaccgaaagcggacctaaaggatttgcctggtcaaatttttttcgttcgctataatttcggctatcttcccaaactctaagcgctatacaacatactcatctttttgaagaactatctcattctaagtcttcttgcacctgtaacaaagcatttcaaagaaatcgggtattagtgtcacttgagtggggctcaggcaagtatcgtatacaccttttctactactgggttttgggtttcacccatacccggtacattatgataatcttcattaatatatatatatatatatatattattacaaactaaatactaaaactaaaccctaatctaaacaaactaaattaattgctttgtattattttgtttacacgacgcttttatgtgattccgtaaaaatgtaattataaaatttgataaaaatgtaaaattaaaaatgtgatttgaggtattttataatttctgtaaaaatccctatatatataatttcgaatacacatttttgaaattattaatttttccaaaaaatactcaatagaatggatggtgcgtatacaatattcttataaatcttctaattgttaggtgaagccaattatttcatccacatgctaactaataaaaataatacatataacatttattatttacaaaataataatatggtatatggtacataaatggccacttaatatgaaagagttggtgttcataataataataaataaaactaaatacgcatgagacaaataattttagaggaatatgtacgtacatatatagcattcaaacactatacaccaaaaatattaataattgaattggatcaaattgatgataactcaagctcaccaaaataattaaatggaaatgaataaattgataactcataatgctcatcaatgatgtgtgtgaccatcaacagttcaaaactgtatgcatgaatacgaaattctttatatcaattataaataatatcttatattcttgtaacaaatttttttttctaatttatattttttataaaaataaataataatttaactataaat

SEQ ID NO: 230980 - DNA, 780 bp, Cannabis indica
ggtactacccaagactcagctccatcaccaatctcataaagagaatgtaatgtctcaaaatttgatgcctgagcctttctccattggtcaaggtacccatatgccgaagcaacaatactagtaattccagaaaccttcttattccacaacttctcattcctagctccccaaatgcccaacacaaagttgatactagacaacatttctcattatcagcctgttggaaacacttagaaacccactctaaaaagagtccccaatagttacactagtccctatcccaactctgttttaaattagctaaacactttgacaagtgactaaacagtgcaggatagattcctcttccaagttacagatggggcatagggaactcacctcgactcgcttagtaataagctgggtcatagttggaaggcaacccacaccagcacgccacacaagattcttcaccttaggagggggcttgagcttccaaaaacacttccaaaatcttgagaaatcattctcctgccagcgcccttgtgttttctgtagcaggttgtaggcattcttgactgaatacaccctagagacttcttggctctaaacatagtgatctaccccttgattaggatgcaaaaggatgcctaagatgaggttaatatcacactgctcaaacaggtccatgagtagctcttcatcccaacctctcccatccattttcataaaattactaactttagcatgaaataaggttggataagacgataaaactagcagttttgcttcacccggaag

SEQ ID NO: 230981 - DNA, 2092 bp, Cannabis indica
caaatgatacgttagaggcataatccgagcctcccacattcacctccttctgtacctgactgtggaggccaatgcccgatgaaggaaggtacttgttaggcccctgcatttcaacatcttttaatggatcaacaaaaagagtgggcttcgactttgcaacatctccctccccctcatcatggccccctaaggaggcatgtcgggacatgcgacgagcatattcgttggtaggatatcgaaggagggcatgttcgactaccctaggcaggccatagtctttttacgacgacacatatagctgccaatgatatgcttggtagtcaggccctttttgagcttggaaaggagggatgggctggcttctagagcggggttgtcagaagtgcaggaaggaggtacacctttcttcgatgcagtcggggcttcaagcaagggccgctcttagggataaccccctcgtgtcgaatagccgcgattgatgtaggggtcacgatttcttcagtgttgtcatctttgcaccgcgagtcagcggaggacccatgagggacattgggagaataggcaccatcccctcgagaaaggagctctgtaattaaaatgagagcccctgcaggaagtagaatgtctgtaaggccattcttttttaggcatcgcgaagctaggagattcttggcagccctcgcgttctcaagaaggtcaaaatatttttgcaatgcacttactcattgctcaaaacagggattcctttggtaactaggaagacaaaggtgaaagagcgagttaggagaaaaaatttgcgagtatgcaacaagaaaaaaaggaagaaagtggcatgcaacacaacccatacctcgaaccttgaacccagaatacatgccagtaggcatcccgttgacaataaaaaactctgaaggctaaaatgggatctttgaagacattctaaccaccccatgtaccttgggagaggggatcttcgagaagtgataggttcgaggagatttatgtgtatggtggatgttgaagacagattggaactcattggcggtggggaggcaaccgttcacccctttgaaggcaatatcaaagcacaacaagatcgcataggccatggggaaagttggagaggtgccagaccaaaatatgccaagacatcgacaaaaagtgggtgtaggggcaaagtggcacaagccgccatgatgtgcctgctaaaggcaactccccttcggtgggggacaaaagcaaactcatcctgccaagtgctacgaagaataagatcatttgtggcacgcaccctgaaggtgtccattatcttacggatgctatctatggataaagtgcttcgaatatttgagtacacgaaggctacttctctgggtaatgaagggatgtgtcccttgggtaggtaataggatgcatgcttgtagggtacagtggaagccattgactacttgggatgagacatacctgcagacatatagaaacaataataagcacgaaccacttgctttctattgcctacaaaccttttgaaagctcaagtcttgatcgtaggcacccccaagagtgggggcgacggaagaaactaactgttcctcaggcataggaggctcaacacccacagagtatgaaagaatgttaggcatgggaggaagagagacctcaaggaaatcatagtggagttgggattcaacaagagaggctctaagtctggaaaggtacacacaaggattggcaactaggtcatgctgctcttcgctcaagaccgagagaatttcaacctgaatcccctcgacacgctctcaacaggcaattatatgttcaaagtgattagccctctcaaacattaatctagcgtatctagtgtacagattatgtgaagtgtcttctgaattagaggacgaaatgtcaatgattttggtagaaggagacattgctttagtagctgacactagatgtgacctaggacgaaatgaatcaaagaagacatgctgccttgacagctccacctaggaggtaaaatcaaggtgttgagttcactagacattattcacgaaggacatgcgccctgacgaagatgcaaataatgcgaccg

SEQ ID NO: 230982 - DNA, 966 bp, Cannabis indica
tttgtagggtccttcccatgtttcatctaaagaaggcttttaatattacattcacttcatagatgatcatactaggtacacttggatttatcctttaactctaaagtcataagcctttgatgtctttattaaattcaaaagcacggcaaaaaaacagtttaacttgcccatcaaaagtgttcaaactgactagggaggggagtatagaccatttgctagatttctaagtgatcaagggatatattttcaacatccttgtccacatgatcatgaacaaaattggagagctaaaagaaaacataggcacataactgaaactggtttggtgcttcttgcttaagctagtttatctttgtcatattggtggtatgcttttcaaagtgttgtgtttactatcaattgacttcttacagcagttcttggttttaaaagtccttatgaatgcttgtttggaagtctacaagattacaagatactcaagccctttggttgtgcttgttttccacacttgaggccatacaacaatcacaaattggaatatagatctgattaatgcatttttcttggttactcttcttatcacaaaggttatctttgtgaaaattccaaaggcagaatatacagagctaggaatgtagtctttcatgagagctacatccctgctttcactatctccaatgctaatcaggttctaactcatctccatttactacttcttcattttctaataatgttactagtgctaacaatgttcctggttgtgttactgtctcaaccaacactcccttgcccaaccaaaattctataatgcccacccaagcacctagatctaatcaccctatacccttgcagcatctaaacaggtcaatgcccatcattgctcctaccctgcatcactcaccaatacagttgcccacaccagaaataaaccaacaaagccctgaaattaaccaacaaagcccagaa

SEQ ID NO: 230983 - DNA, 929 bp, Cannabis indica
aacaattgcaaattgcatcgatgaggaggaagaggaagatgaagacgagggacttaccttaaaaatcatagagatcaattatggtggaaatagaaaagaagcaagataaaatctaaacagaagcttcaacaattggcaacaggctggaggcaaagctcgaacacgtttgggacaaaaagaaggggtcttaggagactaagaaataacaagaagaaacttctcttctgggaatgaggctcaggacccccaatctcaacaataaaaatcttcttccacataggttcctccaatcgtgaaggctaaattaagccttccacctcttccaactttaaaaataaattttcctatctggaccatggaggttttagaacaagatcaaacccagctagagtcttataacaaattctttcagacgaagttttagcttgatgcatctaggattcaaaattagaccaccatgatctccacaaggcggggtgttgaactcgctaatttcgcaaaaaggttggacacttcacttctattatttggttattcgtccattacgaagtggctttgtctgaagattggatcatatctggctccatgtatggaagatcttttggatcaatatgctaatacatatagtaagttgggttcaaagaatttttttactgtagctagtgaggacccgtccttcatggctgactaccttaagcatcaaactgttggggtaagtaatttaatcttgcttgataatgaccatcgaagtggacaatttgaaggctgagcagactagggctgagcggaggagagaagaagcaatcaaggccctataagataccaaggctcatgttgatgagttggtaaaactcaaggttaagacttctctcaatgatgttatggcctgtctcaaggaggaagccaagaaagagagaaaatgtggggtt

SEQ ID NO: 230984 - DNA, 576 bp, Cannabis indica
ccgttacaacgataatcaaccaaccttagaccctcgcttgaacagccaggtcattccgcttaacaaacttaagattacaaaactcaaacatttttagctttttcactacattatagaacgaaatagccactctccaatccggtactttcctttgttgtaaagcatcaacagccattttgcaattagaggaaacagtgaaagtcctccaattcatctcaacagcccaatccaaagccaaaccgattgcctttaactcagcatccaaggcagatttaccttctccacttccagccattgctttaaattacttaatacatataaaacggataaacaatttacctattctcttcacatattcctaaaagaagaaaattaactattagtttgtttggcagaaaatatataaaaaaaatgcatagttataaatatttagaaaacatatactaaatactaaagaaagaaggtagtaaagaagaatcatcaaattatagaattcaacattgattcgattttttctaaaataaataaaattaagaatttacttacacgttggataaaaaaaaaaagaaaaagaaa

SEQ ID NO: 230985 - DNA, 1732 bp, Cannabis indica
agcccttaaacagaaaatgccattaacattcagacttaagctataaaatgttgtaaactcaatttgtaactcaaaaacacctcaagttcaacaagaaaatattggaaatattcccctgactaaccaagaacaattctataaggtcagaacctccataactattgtaattcatgaaacccctatatgcaaccaattatattaaaattaatatagaattaaacttaccttaagcttttttgctctcggaatctgctatctcgctactatcggaatttagatcgctagttttaggattaaaaatcgaaaaaactgaatatagaaagagaggatttcgtcgaagggagaaaatgagagttcatatcgtactatttttttaaacttaaaaaatattataataataataatataatattaataataaaaatattataataatattaataaaaactttataattaataattatcttacaatttcttagcaactaagaaatctctattcctagggcgttaagtcaaatcccacatactcctaattatcctagtttctacattattaacttatcacaatatttccttcaattttatggattaaacttgttatgacatttttagcccccgatcgagtctccaaagttgccacacctgaaaatatttttatttgacatatagctcagattacattcacatatgctatataaatctccttacttcattaattacgcttatttagcaacttatatcaaatttaaaatttatgttgaactagattagtaggatcataatcccacttattacctaattaacccaaaatataaatatacaccgtaattatttaccattaggcttatcaggatattataaccatcccctccttataaaaattttatcctcgaaatttacctgaataatttggggatacaactcttgcatttatgactctaattcctatgtcgcttcctaataaaataagttgtttggagttcaatatcatcctaactcaaaatacgtgtcgaatctgacacatactttctcaacatagaaatgtgaaagacattatgcaaccagaacaatgagggtggtaaaactaactaatatgccacctggtctatccactcgaatatctaaaaaggaaagatgtatctaaggcttaatcttccattattttcaaatctatgcacctcttttataggtgatactcaaagaaatactgagtctcccacttgaaatttaatatccctatgccttaaatcagcatagcttttctttgtacgcaatgaagcgagtatatatcttgaactcactctatgattttataagttcctttgaaatttttggtccatcatgttcttctatacctgtgttactccagtgaacagatgtccaatctctttctcgtaccacacttattaaagtacctaaccaatcgtaaatttaatcatcacttttagacaaacactttgccaagagaaaagattattccaattaatctaacttttatcaaatatgtccacgacatgtttttaatattccatagatcctcccagattaccccatctctgaagaataaaaatattatgctattttcactttaatccccatagttctcgataccatcattaatccttacatcataaccaagacatcagctttggatttcacaaagtaagctattttttgttatgaattctatatcctcatttatcgtataaatttttctacactgatagaca

SEQ ID NO: 230986 - DNA, 1851 bp, Cannabis indica
atctgtacatttgtggcctttggtgggacctcgaaaaatgattaggaggtcttccttctaatcttgcacggaccttcttccaggcagttttgtgccggtagtcgccgtgcatgtttctttcctcagctctcaatgaaaccaccaaaatgtttaccgaggtttttcgcaactgaataatattagagcttaagaaagtaatgggtgtaaataataaaataacagacaagagatttttacgtggttcaggcgttaattatccttagtccacgagtccatttcattaggctctctggccgataattatttatacaaatacaaaaaggatagactttactccagactattgtgttccatttaaagaagaggaatcttagtaggaatattttggagttgatcgtagggttgcagagatgtgttttcttaggataatgaaaaatgagtcttccatcctgaggttgtcgtttgaaaagaggattacaatcccttgccttgtgtgtcttcaggggtatttataggtcgatcccctcgcatgggccatctcgagtggattttccaacagtgaacccctatcgtcggattggtaggtggcatagtttccatgtggcctttatggatgtcagatcgtactagctatactgactgggcttcagacgcgtgtagccttagggttgccatagtttgaatgtcccttgctcctagccattggaccacttagctctgtacataaggacaatcacgctttgcatgataaggtaacgtgggagacaacctctaacattatacaacgaaaggcatggttattttgtccgtagcttgacacgcattggctgagcttccgtggatcaaaggtctacctcggactggtgcgtcctatctagaaaaagatccattctccctacgagagcaaagggttttgtatctcagaggggagtgaggcactagttcacggatgacttctgcgcgaccagtatctgcggaatctccctttcacggattcccttccctgaggtcgttgcctttatcctcctccttgattgatatctaaatgtcatgcccgtgaaaatgcagataacaccaacgagcaggcatttcaaggccctaggttctaatttgtcttgtctgatataagcataggcaagacatccaaaaacctttaagtgatcataattttgcttggttactgtccaaatgtcttgtcatgctttgaagtttagagcaacatagggacatctattagttaagtaacatgttatttttacagcttcatcccaaaaaagtttttgtagccctacaccctttagcatacacgtaaccctctcaagaatggttctattcattctctcagccaatccattttgttgaggcatcttgattattgatttgtgtcttttaattcaaattttggcacaatattctttgaattcatatgagcagtattctagtccattatctgttctcaacacttttagcttccttcctgttttgtttttcatgagcttcctccaattgttgaatgtttccagagcctagttcctatttctgaacatgaaaacccaaacttttctgctaaaatcatcaatgatactcatgaaggagttagcaactccaagagtttgtgtccttgagggatcccataggtctgaatgaacataatttagtggctctttggtgacatgtataccagtagaaaattttaccctacaagtttttcctagtacacattcttcacaaaactcgaacttacaattcaacttgttccttaacacgccctgtttctctagctgaattagacctctttcactcaaatggcctaatctctgttaggtcttttttttgcaatttagttgtcaa

SEQ ID NO: 230987 - DNA, 4017 bp, Cannabis indica
tctaaattcagcagcattgagacaatcgggacgctgaggtttaaacttccggacccttgaagagctaggggcagtgtttgcagaagaacccacagcgaaacgaagcggctgagatgggtgcaggtccgccaagatggtagaaaaagcttgagagaccggcaccacgtgttgaggagtcccagtggtggctactagagcctcgactgaggtagtaaggggccgaggaagcgaagttgcgagttgctcagccaccgtgacaattgggaaaggtggtagagttgatggagtagtggtatttggtggaggaacaggggagcgagcttgtggagccaagtttgttggagcagcaacatgttggtttgactgccaaatagtagtagtgggaggagagtgattaagattaaaggtaggggaggggttagtggtgtgtaaacccatcaaagtggtttgtggctggctgagatgttgaaatccataggctgaggtaggttcattgaaagggccttcagtgattatgggggcttggtgaaatcggtagggaggggttggagccaaagaagcaggattggcaatatgaggccgcagtctagtacgagaacaggcaatgtagaaaggatttgaagtgattcgaatttttgctcctagggattgatcataatgaagcaaaggaggagctgaagaggagtcacacttagcaagaaactcatggcaatgattcactatatggctaagtcggccacagtagtgacaaaaatcaggtaagttttcgaatcggaattcaagccaaaccggggcaaccattccatggaaatggcccgttccacgcgggagtggctgagtaacatccatttcaattcggactcggagatagggaccccaagtctctttgagggatgcattatctacttcgataaaacgccccaggacttcaccgagcttgtgtgcaagagcacgagatcgtttcaagaaggggatgcctgaaacttgaatccaaaaaggggtggtacttagagtttcagtcgtaaccacagagccaacttctaagggagtcatgactatgagtttatagtcaaaatgccagggttggccaatgagaactcggcacctaactccaaagcaaccaaattccaccgtatagaagttgggttctttttcaagaatgttgatggagaatctttcaggccacatctgtttgagtcggttcttgaaggcttcagagttgaagtggcgagtggtcaatgcttgacggctaagaaggcagaaggttcttcacgaccatcatcctcaggatgatcaggtgtgtcagtgaaggagtggatttgagtttctagggccgtgaggttaagagaggcagtgaatgtgttggacaagtcgtccattctgagaacaggggtgaggatttgtctatgaactaaaacagaaaggctagtgtttgtgcagaagtgaacaatgaaattatgcagaaaaggacatagtgcagcgtgaatcaaggaagtaactggtatatataacctgaaatggtcgagtatatgctctggccaaaggatctcagtgggaagtaacttctccatgtcaggagaataatcgattatacctgcatagatgacagtggctcctagaatttgggtagtgtcctctacaacaatagggctaatcattgcccagggtggttcgggagggatggtttccataaatgcaaaataaaaataggggtttcctttataagaaagttttgaagaaattgaaattggatgcagagcagaatttatcacagatgggacagcagcagaggagttatggtggattagaaagttacctgtaatggagatgacaagggagagtaatggtgggttccgtctgatggcagctaacggaatctgggtgggatgggttgaaccgtcactcatctgggtgggcggaggacggacagtaacgccgatgaacggcgacgatgacaagagcagcttcgacggcactacgcttcgagccctaggttgcattcttcttcagatgtgctttccagaaaatcttatcttttaatatatattgaaagtttcctttaaaaaatcatttttgtgaagtctataaaaagtgccttttttttttttaaaaaaaaaaaagaaaattcttattaagaaaataattatttaccaaattcttcccatatgtatataaatttcaaggtaaatatgagcccctacatcatcataaaataatatataatatattataaagacgaaagtgattcgtgaacacgaataacgtcgattaatttaaaatgatagaatgaactcaattctataatgtcttcataggttttgaaatttacatgttctgatacctaaatgatcaaaggatgttttctctctattgaaatttaagctaccaaataccttttcatcacagtttttttaaaaagtaacttttaactcttctaaaagctattccaaactgacccttaatcattagattttacgctcatgatgtgagatacaaataaagcatatatatatacttttaattataacaaaatttatgattaaaagtaaagaaataatgactacaaaatatttattatatacatgtcagtacaaaaaaaaataatgtgaacgaaaataatggaagaagtcttaggggttaatcccatagagttcttgaagatgagggtagcatcaaggatgctgaagatgaatctgctattcctgagaagactgttacgttgacttcgttgaaataggaggagctgtataataacatcgcaagctttttgcagactactcactaatgtgcagatgctttactgaaaggtaattctaaaaccactcctcccgtactgagatttgctaatgttaaggagagcctagctaattcctttgagaagcaaagagcaaaggttaaggtcaccttcgaggatatacaagatgaggttttcttttggactccttcgattgttagctatgtcattgcagttaacctgcctcttgtgattttagaaggattttctaggaggatttggagggataaggtagataaggtgggaatgttagtatataggatcttcctgattcgttttgagtcaatcgaaattcgagatgggtgctgaatggagtttacatcttcttcaacaaaaggtctgttattatgcaggcatgggatccaaatacgaattttaagaaggaagatataaaaacaatccctatttgggttcacttggataacttggagttgaagtattagggtgaaaagtcattgtttaagataattggccaggttggggattcttttggattcagataccaaaattagggaaaagttgagttttccttgagtgttgatagcaagaactacttgggatgatttggttggaggatgaaaatagagttgatgtttctatttcgatctcgtatgaatagaagccaattgtttgtgataattgctctagaatgggccatgccacaagcgattgtaggaagaaaggagataggaagaaggaatgggtagttaagtatgaggtaaagaagaaacaagttaaggctatcgcatatggagaaggttttataccaacagaaaaaaaaaggtatgaaaactaaaggaaaaagaataggagaggaatgtggctatgacaaatgcttttcaagcccttgctgggagagctgaagatactgcaatttctagtagtaaaggggaatttgaagttaatgttattgtggtaaagcaacctagttcgagtactgctgcacaaaccagtagggtaaaaaacaatgaaacaagattattttattgcaacaacaatggagattgtaagtggaatagaggccagtgataggatagaaaatgcttccagtactaagatgattgaaatggggaatactagaggagggggagtacctcctctacccaatggatagaatcttaagttggaacgtccgagggatcaaccaacaacaaagtagactttagttaagtaatttattgctcaacaataggtgggttcggttggtctcctcgagacgagag

SEQ ID NO: 230988 - DNA, 834 bp, Cannabis indica
aatactctctaaaagctattatattaaattatatggaacccgatacttaattagactaatagcgatattgacacatatgagggtgctaggcactactaatgccctttagcatttctctaaaagttaatatcacatatagttttacatcaaaatattgcataaaatataatttaatataatactatacaatacaacttactaaacgaaaccatagagagttagcttttgctattctattttttcactctaaaattgtgctcaaccttttttccttgttctacatgactgaactttttgtatgacaaatatcattaatcatttattattattttttaaaaaaggaaaaaactataattggtcagaggaaaacgtcgacagcagggttcgaacctgcgcgggcgaagcccaacagatttcaagtctgtctccttaaccactcggacatatcgacattttgatagggttgataatattattatacttaatctaaaccaaatatgcattttttattttttatttttatattttataaaatagaatgattttgaattaaatcaaatatgaaagagaagagtgtacaccactgaaatgatgtgacacatcacaatacattttatcttttatacatttttttagtaagacttatatgaaaacaatttgtgctttgatatgataaaaactgaaatagagaataaattaaaggaggagatttataataagaacctacttttttgatactcacatgtacttatcaattatcatccacacctttgaatttgattattataacgccaacattagtattcttgtatccatcaaaaaataaataaataa

SEQ ID NO: 230989 - DNA, 1645 bp, Cannabis indica
ccaagaatatcagtggcaagttttttcagtactaatatgttgccaacttcaaaggtgtttggacccatcaaagaattattatcagaaaataattctccaaagtataaagaaatcactttgagagattacaatatcttttccttcaataaaggccttgatggtataaaggctttggatcattttaagctttgaactatgtatagaacttcattattaaatacttatttaattatgcctatatcttataatcataatatatatatataaacacatgaatatggatgttaatttgtattttgtaattgagttgatgttgttctctacttgttgtatctcttgttctgagaaaaatacttccttttatactgatctgtgattctgatttaggacagagctctattgatatttgtaactgtttttataactgtttcagttgtaactgattttatgttctttagtcttgatctttgttgtatttgatgtaaggatatatttgtcaaaccctgtgagtagtgttatgtaagtgaatttgtaacaacaatattttatgagaaaattgaaaaaaaaaaagttaaaaaaatatgaaataattaggtaaagataatcaaagggcaggataaccaggtacaggtaaagataatcaaagggcaggataaccaggtaccttattctgttttttatatatatattttaacttttttaaaattttctcataaaacaactcttttgagaaactaccatattttaaaaacttatactttaaaccataaaataaaattctcataatccacttgaccttgatgaaaagaagtccaaccttcaacaagaaatcatttgcatgctgtgccactatattgaccttaatactactaacctgtgccaaaatctaatgctcatccccatctcttgcctgtacactaagccaagacgactctaactcagagttttgagcatatctccattaatcaagataccttttttgcagttacatcaatgtcacccgccctcattacctttttgttctatatccaaggccttaaaagaaattatgcaccagtcaagaaaagagctatctggggtaaagtgataaaaagtgaggtgagaaaacaaatacagttaatattgataaaatagtgtatatgtgtgtgtttgaagttttgtttcatggtttggtttgtcactaatagcaatcaaaatcacactaactaaataatgagaatcaaacaaatgaatcaactttaatgatttgagtcagcactatacaattccagatttaagtctcaattacgcaacaatggtgtcaactccatgggaactgtatgatcaaacacacatgtccacgagtgacctcctcccaagtttattcatagccctcacctaattatggtcgagaaaaatcgtggttacatactgctatgacagcaaattacacaacaccgatataaagaaaacatctcaaacatcataaataataaagaaaatctagataatataagtacacaaataccaaaacaaccaaattataatccaattacatgaacattacttgtttcaggttgtgaaatctcctctatcatctgcaatagcaatactagtctctgcattagaggaaaattgaaggtaaaagatatgcatatgattaagt

SEQ ID NO: 230990 - DNA, 2991 bp, Cannabis indica
aagatgcatgttactgagtgctggaatggatgtcattttggggagaagccatcaagactgcatgctatctaatcaatagatctccctcagaacctaacaactttaaaactcctcaagaaatgttgacaggtaaagctcctaacctagatcatttaagagtctatatatggttgtactgcctttatgcatattaagcaggacaaactccaacctagagcattaagatgcatgtttgtgggataccctgaaggggttaaaggttacacgttatggtgtctagaacctggatttaagaaatgcatgattagtagggatgtagtgttcaaggaagatgaaatgggcctcaagtcagtaagcaactctaagaattgtgagactacatcagataagaatgtacagtttgaggtggagcctcaatctgcaccaacacctgcaatccaaagtgaaattgagacaacaagaggtgatgaaagaggaagccagcatgatctaagtgagtatctgttagcaagagacagagaaagaagacaaaccaaagcccctgacagatttggatatgctgagttcattgcctttgcacttatggttgctgaagagatagatagttcagaaccattaagcttcttagaagccatgaggagtaaagatgttgcagcttggctgcaagcaactcatgaagtgatgcattcacttagagagaacaaaacctgggtagttgtaaagaaaccagaagggtacaaaccagttgggtgcaaatggttattaaagcataaagaaggatcagaaaatgaacctccaaggttcaaggcaaggttggtagcaaaagggtttactcaaaaggagggtggggactacacatagattttctcaccagttgtcaaacaagcttcaataagagcaatggtggcaaaggctgcaagtatgggtctagaaattgaacaaatggatgtgagaacaggtttcttgcatggagaattagaagaagaaatctatatgcaacaacctgaggggtttgaaaatggtaatcctgatgatgtttgcctactcaagaaatctctatatggcctcaaacaagcacctaggcaatggaatttaaggtttgacacctacatgcagagcattagatatatcaaaagtaagtatgactcttgtgtatacttcaataatcaaacatatctactgctctatgttgatgacatactgattttcagtaagtcaaaatcagaaattggtaaactcaaaagaaaactcagtgaggagtttgaaatgaaggacctaggcaaggctaagagaattctaggcatagacattaagagacccccaataggagtgattgttctgtctcaagcctcctatctacaaaaggttctttccaaatttggtatgtctaagagtaaaccagtagctacaccaattgcacagtatttcaaactatctgctgcacaatcacccaaaacagatgttgaaagagaaaaaatgagtaagattccttatgctagttgtgtagggagtcatgtactctgtggtttgttcaagaccagatttagctcatgccatgagcatggtaagcaggtatatctcagatcttggttcagattattgggaagcacttaaatggaccatgagatacctgcaaggtacactgaatacatgaattgtattctgtaaagacagtcagtttcaagaagaaataattggctatgttgactcagattttgcagctaacctagacactagaagaagcttaactggatttgtattcaatgctctatgaggctgcatcaattggaagtctaatctacgaaaagttgttgctctatcttcaacagaagctaaatatatggttgcaactgaggccattaaagaagctatatggttaagaggtttaacagaagaactaggcttcaaatctgaggacattacagtctattgtgacaatcaaagtgctttgcacctcatgaaaaatctaatgtttcatgagaggtcaaagcacattgatatcaaacttcactttattagagacattgtgtcatctaaacaggttcaagttaagaagataagcactcatgacaacccaactgatatcttcactaagagtgtcacaagaaataagttcctacattgcttgaacctactcaacatcagaagttcataagcttcatctctgtcattagctctttggaacaaaccaggtggatttgttgtatgatttgtcccaataagctaatgccacttcatcattctaacctactcttggcattggttagctagttaagttagttatctaacttgacacctaagaaaatctaatgacttgttaaaaccaatgtctataaaaggaagcaccaagacttcattcaaaggggtccaatccaagccactctcacctagaattctttctctctaatttctgttcaagatttgtgagtgtttaggagggttgtaaatgtagaattgctcatcgttagaggtgtcttctactatgtgaggtttgctttgtaatgtgttcaacacttagactcaattgagtactttgctcggattgtaaaagtgcttgatgttggaataaagttccatttaattcaaagctaagtctatttaatctttcattgtttgattctattttgtgtactggtttggagttgtttttgattacttattatgttaatggttgttcttgttgttttggcactatttttggccaacaattaagggtgattttcaccacaatatacaaaaatatttttattgtggaaaaataccataataaatataagagtaatttgcggcataaatacctaaattttatgccgagtaatagataaatacctaagtcatatttttggcggtaaaaataccttccgttacacttttggaacttccgtaggtacctctccgttaactgccaaatcagtacctacgtggcagcccctgataggtccatatcatttaatttttattttttttctaacaatttttaaaaattaaaaa

SEQ ID NO: 230991 - DNA, 1626 bp, Cannabis indica
taaaatttccgtaattaataaattacgcttatttaatcacttatgaataaattccttaattcccacataattagattagtaagatcataatcttacccattaaacccttaacacacatattactccatattttataaaacatgccctaattaatcataattatatttttagggtattacaattatccctttcttatagaaatttcatccttgaaatttattctggttaattcggaacacagcctcccacacctggactctaactcaaaagtggtcttcttaaccttgttgttacatcacattttttttaaccaacaaaattatctggttccgtacctttattccttcttatctagcataaggataggtggatcctctcatatcaaattcatgtgatattctatactcaaataatgtgtcaagtctgacacccacttccccaacatgctctatcattttcctgactaatctctctttttttttttcaaaatttttgaacccccttcagagcatcataaagtctttacatagaatgccattatctctatgcttcaaaccagcgagctttttttattttcacgggtgagcacacgagctcaaattctcccaatgggctcataagttccctggacccttttggtccaatgtaatcttttctcgcaagtttcatttcagtgaacaggtgatcaatattttccctagtaccatattctctagagtgtccagtcaaattattctttaatctctgccatctatcacacatgtccatgacgtattttccattatccaaaatcctctcatttattcatttgaggatgaaaacttatactaaaattcaatttatacccattttattcttgataagttttatcaaatcttaggatcacaatcagaattttcaactttgaaactctatgaagtcaaactgtcttattcatgttgatttactgtatatgtcttctgcactgtcaaacagtgtgttgaatcattttatttaactactattagttggataagatcataacttactgcagtatttgacaatcccactatacagtccatggtttttacctttacattttcattcaaaaatctcacaatgctgatacaaatttcactaatcgttactgtactaatttacttactggcaacctaaacattcggacatgtatctcatcatattattcctcatttccagtcactaatacatcctcgttttaatggctctttgatcttgacacattagaactttactcttaattaattcttggaatgacagctggctttgcattctaatacaaatttttctagcgtacttttttcatactcacacgcttcccaaaaaatatttatagggaggtcccccatcttgagattagtctaagttaagtactcttaactccaaaataagctcatggtgggttaccgtgaagaataaatacatctttgtcattcctaaatgtatttcctattttcctttctttattatctagaatccagttttagtcattatctttcaatgatcatttactttgccgcatcatcttgatccattctaataacttgattgttatgtaatgctgatcaatccttctaatcctaggctcttttctaactttgatcatac

SEQ ID NO: 230992 - DNA, 1067 bp, Cannabis indica
taaggaaaaaaggaggccaaatttacaatagtgcttactttcaatactaaagtcaagactaatatttgggactttttttagtgggaagcaagaagtataaaactaatagtcccaattgtcatacttatacatcacagaactaactggacacaccaagtccttggaatgcctttccaacctatagaaaccaaccttctctcaactgtttctcatattttgggctttgaccttataaaaatataagatctcttccagggttgggacagatttctttttttagaaacaaaaaacataccatccagcgagaaaacgatctacttagggaatgaagttgtaaggggccactccaactactgcaaaaactccacaaagcattatctcaaagaaaggtgagctcccattttaacataaccccaactccaagaccgaagcctccttcagagcactggcttggtttctctcttaaaatagacattctattctagaatagtcttggaaaaggttcaagtcctctttgtgtctagtattttcattggttgtcataagttcagaagttattcttgtactggtccgtctcccacaaagatgaaccaaacacaatctttggggtaggaacttttgccaccttttcaacttctttgatgactttcattactctcctctaagcttgtctcgacataatggaagctgaaaagaatattccaagtagttagttacccaaaccaactaagatagtaagggcaaggggaaatccttccccataactgcttggaagaggtccccacctgatttactatctagaatatcaaaatccctagggagcatttgttgcaggtagaatattggaaacacaagagttagaaataaaagggtcaacaggttaattaagaccataagggacttgaatataggaaaagaaaatattttcatcatttcagcagaaaatgggaatttctcaaaacgatatagtaaaaaatgttaattttcatcaacattcagggcaacctaaatagctgaccaaaaaattctacattaatccacaataatatcctaatcacaatttcaaa

SEQ ID NO: 230993 - DNA, 1477 bp, Cannabis indica
gagtaagtaaattataaggtataccacaagctataggtttagatagtcccaaacctatgatactaggatcgagaagtttgcttaagtatattgaatagacttattatcagaatttctcttcttgtccttgcaatagaaaacttatggttgctccatgtaaatggtttttaccacagttatcttggatttgattcttagtttgtatcctcggggtcattggtgtctccttcaccttcaacattcaccctagaagctgcctcttcttcttctggatcctttgggtaattaggttgttgtggaacgaagtgttccttgtcaccaccattgtaccatgaggctatttatgatttcctcttttggtaagctttctacaactctcaatgaaagtactaaaatattgaccgaggttttcagcaactattaattaaagttgtgtgaagtaattaataaatgttagaagagaggatttttacgtggttggggtattaatgagccttagtccacgagtcattgtattaatgagagtatttattatagagaatttccttatcccctttgctatacatcattggagtatttataggctcttaatggtggtaaaagaccaccattgtcgtgtttgtatgaaccatactttgcacaatttcctaaatttaatcttaggacatgattacctactgcttatggtaaattggggccgtctataggtatttggtgagacttgacttatcccttatttatgatttgaaaactcatttatgcagccatcatttgatgtatggggtctcgtgaagtcaggaaattatggatttaaacccttaagcatgtttgttcaacataaggtgtcagatgctcttccccataccgcattaaatgtgtgtacagtagttttagccttgagcagtgtgttacactccacctgtcctctcttatccctctcctagtcgaattcactcacggagagaaaaagacaagagatatccgttctctagttagaccctctcggagattactaatctgtcattattcttttgaaatattagactcccggagtaatttaggtggcgtgtcccgtagtgtgggtcccattgctacctgcctcgctcctgaattgccacatattttgggagaaattctaggcaaaaacaacaataacaacaacaacaacagtaataataataacaaaagattgggataaaaatcaagggcttacatatgcaagcatgcacttcctaaaacgatgtcccgggtttacttctgtctaagatgttcttgcaatccacaaaatgccatagtaacaattttgaggacccctttcattgacggaaccaatcactcctttcgaccttccacgaccaagctattgtaagaaccctccacgtccattcttctcctaccacgatttgaatcttataagcttcctctcgattttcccttccaaccaccgctactgtaagaacccacacttcgattttac

SEQ ID NO: 230994 - DNA, 1330 bp, Cannabis indica
agaatgattttatttattgacaaatagtcacataaatataaaaaaattaaaaattaaaatatagaataattaagattgtaattataactccatccccatactgtaattatattagaaacaaaaaataattaagattgaaatttatcatggatgataaaaaggaaacctttctcacctcaataataattatttttgaacaaaaaacaaaaataattatttgctgtgccacaattctgcagaagtgtttgctctgaaataaattattagttttagttttagggtatatatatatatataatagggtcgattagggatattttaattttaatattattaataattataagttttagttttagagtatatatgtatataataatacagtagattaattttaatatttataactaactaacaactcaaaagttaaaatatatagaagatacatttctctcaaaaaaaaaagatatagaagatagattaactaacaactcaaaagttaaaatatttttttattaatatgggataaagagtaaagttagtactctctaatcaatatgggataaaactttcaaagacataaaatatgtaatatgagatccaaattacttgctacttagcttccaagtgtaaaatttccaaacaccatttaacaagcagaaaattttttgtactcatcctatttcatttcatgatctatactactctcttattcatgactcaattgcttttgattatttcatttcaggatcgggtgttagggtccgagtccgagttggggctagggttggtggttggatgccgaggtccaagttaggtctgggttcaaaccaaggatagggtctcagcaggaggtcgcggtctaagtccaggaagggttcaacctagggttgacattcggggaaaggtcgagcgtcgcaatttaagtataggggtcgtggtgcaagtttgagggtcagggtctgagggtcgggaatcaagttgggttttgggtctaagtcagggctaaggttcgatctgggctgaggttcaagttcaaattcgagtctgtgtctgggtccagatttgagtcgggtctgggttcaagggtcaggtcaagtcggggtcccgaggctagactgggatcagggtctgagcctaaatccaagtcggggccatggttgaggttcagaccagaagccgagcaggcttcaccccaagcatagactaagcctgtgcctagggtccacctagcccagcaccttaaaaataattatctccttttaaaaattcacatttttttttaaataaaagcccaaaatattttatttttcctataacccactaaatt

SEQ ID NO: 230995 - DNA, 1268 bp, Cannabis indica
accttttgacgatcaaactccacatcatttgtctcaattcccataggcagattgagagcctcagccacatctttcacaataaaggaacaccagtgtcccttcacaaatactttgtcaaacataaaagagtcctcatcgaggcactcatcagtgatgttagcataatattcctttacaattcgatccacatagccatcaaaacagatcaaagtatccatccattttttttctttttaacatgttagaaaccccaaatggcttatgagcaatgacattgaaatttttctcaatagtaaaattctaattctcataaaaaaatttcatgtctctagcattgtcattgtaacaaaaataatgagaatgaggcttgaagttttcaagagtaataccagagggcctttatcttttttgaggaagaatacgacttggaaaaacaatgggtcgttttcctttgtccttctttggaactgtagtagggacaataattggttccgcattggcaggttcagcttcaagctcttcacttttagaccagaatcatcagcagagggttgttctttgggcacaaactcttcacttgaatcagacataccctctgatttgtgatcctcctcggtctcttcttcaggttcacaatccaatgatgagatggaagggggattttcttttagacttttggcctttgaagatgaagacaccacctttttccctttggagacacttttgggcagaaccactttgggtttttgaggtgtggataccttggaccttgttcgagaactcaccgtgggcaagggcactattgatttctcaacatttggagcaccattcgaagaagtagacttcgacaatgtgtgatcagatgaatgagattcatcatgatcaccaaacccgagagttggagtagcaatcggagaggcaatggtcagaggagaaacgaggttgtaagttgactttcgatcttggatcttaaactttctgacagttttcgtcagagtagacgacgatctaggaactctggtcactggagcagctggcgcaggtggggtgatcggagaagcagaggtagagccaagagaaggcttcttggacgattgagcatttttagtttttgccatttttctttgaaaccctagaaagcaaacacactcccaaacttgaaaaagattagtctcttaaaaaaatgatagaggaatgaatagtggtgatcatggatatggtgggtagttgaacatatatagcacttaaaattaaatatccaataatca

SEQ ID NO: 230996 - DNA, 2797 bp, Cannabis indica
gtcctagtttagttccacttcgggtcccaagtcctaggtcccggtccatgtcctaggttagggtgttggtctagggtcaggtattgggtctcggtcctaattttgatgcccatgtcttggtccatgtcctaggttagggtttaagtcccagttcagtttccaatctcggtctaggtcatgatctgggtttgagtcctggtccaagttcgagtttgagtactgtgttcggatctgggtctgcaatctgaggcgcaggtcatgttccgggtcctaggtcttgatctgggtccatgttttggtttgggtcctagtcctagttttgatttcgattcagtgtttgagttcgagtttgggtccgggcctggttggggtctgagtcttggtttgagtctaggtccgagtcttggtctaggtttgggtctgggttcgggtccaggtccgagttttggtcttaggtgcaggtccaggtctgggtcagggtcagcgtctcagtatggatctaggtcctgagtttcgatcccgacctgggtctaagtcttggttcgagtataggttcgtatccgaatccctatctaggtcagagtctgggtcttggatcacatcccaggtctaggtctagatccaggtccggctctcgctcccagtctgggtacacaatcgtgtttgggctcaagttttggtgtcgctttgggtttggggtaggtccgagttcgtctctaggtttgggtccgggtcttggtcacagtcctagtcttgttcaagggtcctggttttgcagttcttgttcaggttccagttctgtctcgtgggtttgggtcagggtccgcgtttgggtcctggtctgggttcaggttcgggtcctggtttgagtccctgatcttgtcctggtcacctgtcccggtctagttctggctcaggtcctgggtcccaagtccgagtttgggttcgggaccgagactggggtgcggttctaggtcccgtgcccaattttgtgtcccgagtctggttccatgtttgggtcagagtttgggtctaggttcggcactgagtataggaatgagttgggatctaggtttgggtctcgattcgggtctaggtcttggttggagtctggcacctggtctggttacagttctgggtctagatttaagtgcggttacggttctaggtctaagtacaaattctagttacgtttctagtcccgttctcgggtcccagtctacttccagttttggttcaaatttttggtctcaaggtacggattcgggtcctagtttgggtttgggacgggttttggtccgggtcttagttcaggtcctggtcttgttctagttctggtctcgggtcttgggccgtgtcctaagtttaggattgggtcccgtctctcgagtttggggttgagttttgggtcttcatcctagttctggtgcctagtttctagtccaagtcctcaatcaagatccggatcctttgttaaaatttgtgtccatgttcgggttcggggcccatgtcccccatctaggtctagatctggtctaggtccgagttatggttcgggtttgaatctcaagtttgggtcctagtctaagtccagtacgggttcaggtgttagtttgggtctgggtccagaatgagtccaagtcgctatttgggtccaggtcgggatcccaaactggggcccagtcaaggcctaggtcacgaaccaggttttggtctgggttttggttccgggtttaggtcttgagtttgcgtctggatctgggtctgggtcttggtcctgggttccaatctcagttttggtatgggtctgggcccgtgtccaggttggggtttagggtttagggtttactatttagggctttagggcttagggtttaggggtaagtgtaaagagtttagaatttagggtttaaggtttaggatttagagtttaatggtccgcttccagatccagttccaatttcgggtcacagggtacgatttaaggttcgggtgtgggtcttggtcagagtcgtggtttaggtctaggtccgtgttttggttcaggtctcaatcttagtcccaaatccaaacacaaaccacatgtcgagtctagtttcaagttttagtacgggttcgagttctggtctgggtctaggtccgagcctaggtccaattactagatttagacaccgaatatgggtcgggtccaaccctcgggtcttgggtccagtcccgggtctaaatctagatccaggtcaagttctagctcatgtcttgggtcctggtctgggtcttatgttcaagtttgggtctaggtttgggtattgggcctgagtcatgggtccgggtccccgattcaggtcaggatcctaggtcccgatctgggttagggtcccagtccgagtcttggtcccggtccatgttcggaactggtccttgtcttgggtcttggcctggtctgggtttatttaacggttcagttctgaggtcccgtgtttgagtatcgggtctcggtcccggtcccagtctgagttctagtcctagtccaagttcatgtctcggtcctagtctgggtctaagtccgagtcctgatatatgtctgggtctgagtcctgagtttgagttcgagttttggtacgagtccgggtctgggtccaggtctaggtcttggtttgggtctgggcctagttttcagtctgtgtatgtgtccaggtcttggtttgggactgggtctgggtctatgttcgagttctggtacgggaatgggttttcatccaagtcttgggtcactggtcctaggtcctggcgcaagtct

SEQ ID NO: 230997 - DNA, 5944 bp, Cannabis indica
aaggaagaacggacgccagggaccatctgtccaaatacaatcgcatcatgcaagtcaccaaggcaagtgatgatgttaaatatttgtgttttcattaacattgagcaagtctgtagaggactggtggaaaaggttgtctctgggatcgatccacaactggaaagatttataggtgatgttctggaaacagtttatagtagcgaaggcttatgacttagaagctagctccctgactagagtcaagcaataacaaggagtaagcttgaagaaatacatccagcggatgatggatgtggctaccaagacaaaagtcactgatgatataaaaatggtagctttcacatcaagactcacaaccagatccctattatggggatatcttcagcgtacaagggcatacactttaagtgaatttttggtacgagcttagggattcataaacctagaggatgcttatgcccaagcgtatggagtacttccggtaccatctgtcgaagcaacaaatgcccaacctttgcaagtggtaaatccctacatctatcctccaccaactgcgcttaccactcccacaatgtgtggaccaagtacttccgtacaggtagctatacaagctagtttctccaggtacagagctacacaaactggataaagtgtcgctcccagacaaacaaaccaaaaagtggaagctctaaaatccaatgtgacctacctaaggaataagaggagttcgaagggaccgaatgggagtgagttcccaaaaaagtgtaagactcaagaattaagatacacagagtatacaagtctcattgatactcgagaaaatgtgtacaaggaaacatgtaatatggtgcattacagaaagcctccgccaatgttcaaaggcagaaagtataggcaagattcgaacaaaaggtgcgaataccatggtgatattagtcacacaaccaatgagtgcgactacttgaaagatgaaatagaagggttggtatggaatgggaatttgaccaactgtgtaagaattcatgtcatttacccaagacaagcagtcgcacatggacaactctttgttctagggtagcagggagccataaaccctcctaagggagtgggcaacttccagcttcctagaatacaagatcccaatgcgcaagtccttttgggaacacaaactgctccagcagcaacagtggtagtggcccccagtcctagaaatccgtatcctccaaaaactgcattaccagccctagactgtcatgtagcaactatttcaggtggaccacatattgtcggaagcacgacgtgtgcatttcccacatattgaccattggttattgaagctcagatagccaacaaaagagtatcctgaatcttagtggataatggaagctctgtgaacatcatcttcaaaggagcctccatgccattggtctagtagaagacaacttgttaccctatccgatttagttgaaaggttcaaatggagtcacattgatccccatgggaaagatacaactcccaatgactataatcgaagatgtctctggaagtaatggagtctcctctttcaaatacagcacctttgtggtggttgattatcctactgcttaaaacgccatcctaggaataccatatctgatggatttcggagtagtgacatcaatctggcatctatgcttaaaattccccagtgatactgggagcataaggactatcaaaggagaacaaagaaacgagcagagttgctataatgtcttaaccaggaccgtacttatggttagggaaggaaattgctctacgtcggaacatcttctcagggcacactgggggtagtcttggaagatgagcttgatccacagatcagtgtggaacatggattagaaccaatggaggagatagaggaggtttgtattgatgatcaagatcctacaaaggtcatccaagtggggaagaacttacccccggtagtaaaagaatagattgtctccatagtcaaagtaaatagtgatgtgttagcctagagtcacgctgatatgactggtattagtcccaaggctatttgccatgcattgaacagagatcccaatgttgaactagtttagtaaaagcggagacctttagacccagcaagatcagaggtggtaaaaatagaggtggataagttgacaaacatattcttcctcaaggaagccttgtacccatatggctttccaaccgagtgttggtcccaaagcctaacaaaacatggaggatctgtatagattttataaatttgaataaggcttatcccatagactttttcccccttcctcgaattgatcaaatggttgatactacttcgggatttatgttgttatcctttatggacgcaaactctggctacaatcaaataataatggatgtggctgactgggaacatactatcttttagacgacaaaggaatttattgctacaaggtcatgccattcgatttgaagaatgtcggggccacatatcaacgaatggtgaacaagatgttcaaaaatgtcctgggtaagaacatggaggtatatgtcgatgacatgttggtgaagtcggagacatctaaaagccattaccaagatctagaagaggcctttaccatcatccgagagtacggaatgaaatccaacccaaaaaagtgtacttttggagtctctttaggaaaaaatttggggttcatagtcagctcttgagaaatcgaagcaaacccagagaaaatcaaagcctttgtagatatgccctctcccaggaagcataaagattttcagaagttgataggaagaatagcaacacttagtaggtttgtctccaaatccacaaacaagtgcataccattcttcaatatactttgaggaaataccaagttcaaacggacaatagaatgtgagatggccttccagaaactaaaggaacatttagtgaaggcccttatactatctaagctagttgacagagaaccgttgtttttatacctgacagtgtccaatcatgacttaagtgccacactcgtgcgagaagaaggaaaggtacaacttccagtatattacgtaagcaagagactgctgggcacggagtccagatatcaatgcttgaaaagctttcctactacttactaattgcttcctggaagttaagaccatactttcaggcccccgccataatggtactaaccaaccaccctcttcatcaagtgttgcaaaagccggagtcatgagggagactcttgaaatgggcaatggagttgagttagtttgacatacaataccaacctagagtgttaattaaaggtcaggtgatggccgacttcatagtagaatgcactaggattaatgacgaccttaaaactttaaccctggaagggaagtctgtagaatatatgttgatgaaccgttaaatgcaaaaggtgtaggtgtcaaaatcatactgatatccccacaacaactccagctttaaagtacatttcgtttcgaattcaaggcctccaacaatgaagttgagcacgaagctaggattactagtttactgttggcgaaggaagttggtgctcaatacatagtactttacaaagactcgtagcttgtggtcaatcaagtgagtggagagtataagacaaaaggagagaagatggccgattacgtaactaaaactcgggaactattgtaacatttcaaacattactctgtgaggcaaatcactatggataaaaatttcttcactgacatgctggaaaaattggaaacatatccagaattcaaaaaatagagactggtccccatcacacatctagtaactcttagcacggaaagattgggggtcttcgccattgactatttaaccttctggatggcaccaatactctagtacttggaaacacgtgcactcctgaaggatagagctgcctcaaggaaagtccagtaccaggccccaaggtatgtaatcatggatggaaggttataccgaagagggtcatcgatgacatacctccgatgcatagctggaaccagaaataagtgttatgcgtgatgtccatgaagggtttgtagagatcacacatttggacccagtctttttaaaaagatcattcaacaaggttaattctagcctaccatgaagaaggcttgcattgaatatgtccgtaggtgcggacagtaccaacgttattcaaaagttcccagagctcccccaacagagatatccctcgaaagcaatccttttcctttcgcagtatggggaataaatttagtgggatcacttccaaccagcaaaggaggagtcaaatttgccattgtcaatgttgactactttactaagtgggtggaagccaagcccatgaatatagtaccttcccaaaaggccctgcactttgttatcaaatatatagtgtgcagatatggacttccacacaaaatagtttctgacaatggaaagcagtttgatagtgactattttagtgattttggtgccaagcatggaataatcaaaagcttttcggttgtggcctgacctcaagcaaatggataggtggaagtcgtcaataaaatcctaaagactactttgaaaaagaagtttcaggcctataaagcacactggcgagaagaactccccggggctcttttggcctacagaacaactgagagaacttttacgggacacactccatactccatgacttatggatgtgaggctatcatcccagtcaaatccattgtatctatacataggatggatacctatgacccgattcagaaccatgctttactcccagaatcttttgatttaatcaaggagctctaggaacagtctcaggtgcaactccaaatgtatcaaaacaaaatttctcaaaatttcaaaagaaaggttaagagcacaaaattcgagattggtgaccttattttgagaagagttttccctgctttttaagaacttagagtgggggtcttacgtcaaaactgggaaggaccttatgaagtaactgacaaaattggtgatgaaacatatcatatggagagactagatggaacaagaattctaagagcttggaacgctgactacctgcaccgatactatcactagactggggtgtcaagttcctttttacatttttggtttgccattttattaatttccatgtacgcctcagggctggaactctttgaataaaaagataattttcatttcatatttggtcttttaaagttttatcatctaacaaatgatcaatagtctcaactactaatcacttgggggtagcacatatatgttattgtacaaaaattcatattcactttcctctaccaaaaaatagctaggttaaaatactcaaatatatgagtaggaagtattgcctgaaaccggaacgtcaaggaatcggaagtaagtcaatgccttattgtattttatgagtgtttaacacttaaccaaatgtgagaaaaggaagtgtgacaaaaccgaagccgcagggaaccggaagtaaatcattgccttggtagattaggaattaattattgaacattaaaatagttaatctatgctaatttaaaacaaggacccaggcctaatagttaatccaggttaacttagaacaaaggctcaggcctaatggttaatgcaggttaacaataccataatatccaagttatttaattgattaattcagatcaattaaaaagttaaggatgccgaaaaagggtaatttctcaaaaaaattaattagttcaagttaattaattattcaaagttttaaataaatccttctacaaaagcatttttcctcaaagagcatttaagtctgggtacttaaaaagtaaaggttcaggcttttggaactagaacccttttaagactgaaaatgtcaaataattaacaaagtatatgatataaaaggtaaatatctaacgaagtcaataaaaggtacgaagtactaag

SEQ ID NO: 230998 - DNA, 602 bp, Cannabis indica
aggttgcaaggcacttcaaaaaacaactcaaggaaaggaaattcttcataggagacctaatgttccaaagagtgtttctgatcaccaaagatcctatagcaggtttgtttggacctaactgggaaggcctttaccaagttatagagatgaaaagtaagggaacctacaagcttggtaggtacatcaagaacatggagctggttctcctaccaagatattagaatggggagcacctccgaagtactactagtgaccaacttgtatgaacactactcttcagtagtagttctattaactaattaataagaattagtttaaaaaagtctaagtactcatcattcttcaacgatggcctctccattgatcttcagcgatggcctttgcctggcatgtcaagcaagggtagccacttgacatctttaatggacttcttattttgtaagcttgtagaatcaattaatgtcagttgcatagcaacaaagactaatcaaggaataaaaatagtgttccagttcaaatataatgtgtctaacccacttgctaacaagataacttcttaaagttattcttttttcagctccacatgtgtacacccagtagca

SEQ ID NO: 230999 - DNA, 1061 bp, Cannabis indica
ggtgctacttccctttccagcaggggcggcaaacattgtgggacgcagcccaagccgccacattgtgggccaccgagttagctgaacgggacagccaaaacacacaaccatgagccacaaaagaaagactgttaaacaaatgcaaaaaaagagaacaaagttgccaaaccgggatagcattcttatgaatagcagcaattaactgaagacaatctgaaaagaagtttgcctccctgcagccccactttgaacacagcgaaaatgcatgacacaaggccaggcattcagcttcaagggcagattcaatagcagcctttgcagaaagagcatccacaaatcccccatccttgtcaaacacaacaacaacgatataggcatcgttcccacggacagcagcgtccacatagaaattgaaatccttaggctcaggaggaataactctacacactcaagaatccttcagcaccgactccgagttatcaccaaagcctgacgaaattccttcactaattcacggttttagccaaaacatccataggccgagacaaagaaccatcatggaaaacaaggtataataaattaattaaaaaatttccagaagtgcaggggagattctttgtacaggtattatatgtacgctattactaaaaaaatgagttagaacttattttttttatttataattttgacataacttagaacgtatttgtatataccaaaaatggaacgagatttttcattaggtcgacaaaggatagaagacatagtcactcccaaaatatatgtacagattatatagtataagataattttaatgttagactatgaaatggtatagggatttattagtaatttgtgaagagggtgaaaaattataaatatgtaattgtgtagttgttgttagatatggaaatagaaaatagaactttaattcaattagggtttgacactaactcgaagagtgcattttaagagatttgtaagagaactatttgttgagaattgacagtcttatccttacacaaagtcaactcacacacacaaaacacaaggtcaatctt

SEQ ID NO: 231000 - DNA, 1067 bp, Cannabis indica
gttacaatgtgaataaaaactcatgcgaacacaattgtattatgttcgaatgaaaatagtacaaggaatttaagataagaaaaaaaaccctagttaggttacaaacttttctttacaaaaatgccactaggagcaaaccattaagtcatcttcctaaaccaaggatgagaggggaagccgatgaactcgagaaagaacgtcttcatatagccttagtaagaccgtatacacatagctcagaataagaccgactacgcatagcttcagaaagaccggctacatgtagagagccttgatctttgcacagacctcattctcctcatcatcaaaagatcctatttcctaaaactgatatctctttcccagcctcaagaaattcctcaataccagaaagaggatggtgtaaaggtgttttggtgcaggtttgggtcttgggttggctggattctatgatggaagctatgtcaatttccttcccaggttcatctggaacaatgccaaccttcctttggaattctttatcagcctgaggaggacgtttaagatcactcacaagatctatatcctcaaagattacttgtcaggatcgcccatggcaggctacggggttcccctggttttgattggtcagaagctcctcaaccttagaatccattgttgccggttccaattgaggcttaaagtctttgggaacaaatggaaaatggttggtgcatctgggtattataagtttggaaggatgaaattctaaactaagaagggacattctagcaggaaaaagatgatccattctaaaaatggacagaggtttgtgaaaaatgagaaggttgagccacccttttatacacaatgtccaatgacaagaaagctaagtattgagaaattcgacggttgggagtagagcagaatatgaagataatgaccctcgaaaccgtacaaccgccagaatcaaaggatgtgctttttccaagaagagatctggacaaaaataccctctgtaattattaaaagctctttttactaaaaagaactttttaaggggcaattgttatatccgaaatttggct

SEQ ID NO: 231001 - DNA, 1081 bp, Cannabis indica
tttcaaaatatagtacaaataccgtagtgtagtattaatttaaacaatatttatagttcttttgtcaaaattaattgtcaagaacatcaataaattaatacctaaagtctgatgttagatttgtagatttggtgaatgccattgttgtaaagattgtagcagcaacatggctgattttacacctattgtggtatgggtgtaaaattttcaatggttacttgtatcacaaaaatttgaatatatttagggacaactccttggcatttttaattttcttgtataaatttggactttctgaagttctcaagaacactatattcgaattaacttaattggactactatacaatgcacaacacaaccctgtttaagttagcagatttataaattttttcaatctttgttgatgtgtacgaaaacatttagaatgcacaaacaataaattaagggctcgtttggtacgccgtataagggttgtattgtattaattaataaataacactatgtttggataaacaatgtattgtattaattatgactaccaaaattttaaatgcaatgtatgttgtattatttaatacataacaaatggtccgtattagcttgtattataatatttacaaaggattcggggtcaacactaatctccaatccagacctgggacccagacatgggccgcagacctggaccccgaccctggacccggacctagactccggaacccagacgccggaccccgacccgggacccgggtcccgtacccagacccagactcaagacccagacccgagacctagaccccgggacccgagacccggagtcggactcgagacccgaacccggacccgggcccgagacccggacccaggaccaggacccagattaaataatactaatacaatacaatacaacacaatctattaatacaagtcaataccaaacatagtattgtattaaataatactaatacgacatactatacaatacaacacaacacaatctaacacattacaatacaatacgacgtaccaaacgagccctaagttttatattttgcgttgattataaagaaaggtttgtt

SEQ ID NO: 231002 - DNA, 572 bp, Cannabis indica
gcagtcatgttaccaaagtcgacagattcagattactcttctttaactccctcttttgtagaactctcttgtggcctaaacaatattcctactgctgggaattcacacaatgcttcacttataactgagaaatgtatcacaacatctactcctagttcgtcctctgtgaagaaggttcctctgccacagtgttcacaaatgaattctattcctgaatcatctggtgttaaacgtttctctagtacagcaactgaccttactcccacaaaaatctcatccaaggctactataactcaccctcagatggtggttttatctactgctacccctccagcctacttccatttaagtgatcatcacttatctggctccacaatgatgactatgccaataccttctgcttcaaacacatttgcttcttcaacaaccactgcagttctagatccctcctcagcaagaataatccaccaaactgaagttgcacctactgcagaaaatagaatggcatctcttttctccaaaagcagtttgttcttcaagtggcaatgtccgccaagtgctcaagcgttgtc

SEQ ID NO: 231003 - DNA, 810 bp, Cannabis indica
aacaagttttttttttattattatttaagcgtttatatattacgaccatgcataatctggaactcgaacccaggacctccaacacaccctcctatggctacttgagttagcctcaagtggttaaaaatcaaacaagtttacataaagacttatttctctgaaatggcaactccaaaaaacatttttaaattttatcacacaatcttgaacttcattataagtttgccaaacatgcttaatttctagcctgcaaagaaatgaccacttttaaaatccattaattgctttacaatgaaaaagagttcatcatgcaacccaaatattagtacttcgatacacatttaatttaatgcaccaaagtaataacaaaaataccttcccatccaattaaaaggaaaattcataacactaattaaagggaattgtttatatgaccaaattattttactatttgatcaagctcaatctttgtacaatcaagctccaataaataactaaagcaatatgttccgaccataagccatctgaccagaagatcaaaaacaagctttcacaacaaattttctctagcttagatcaaatctaatacaaaagtatcaggtgaagaatcattgccaaactctaaataagaatactaactatacaatttactattaaccccttatatcttcttatgtaacactccctaccttttcaaaatcaccttgtcctcaaggtggtaaaaaaaaactaaaaggtaaaaaaataaagcacaagcaaaataatcaaatttcagctccactcagacccacttgtgatccgttgtgagcc

SEQ ID NO: 231004 - DNA, 715 bp, Cannabis indica
ttttttaggaaggattggtttatgctgttgagttttcacacagaagtggtagagatttggttaacatggccaaaaagaggactaatgttattcccattattgaagatgctagacaccctgctaagtacaggatgttggttgggatggttgatgttatcttttccgatgttgctcaacctgatcaggtttgcttgcttgttcaatggggaacacccctttcatgtttctattctaacatttagtattattataatgattctaaaattctttaaacaactcgtatagcttattgtacatttttgcatatgatgatatactcggattcccctacacgatgtaatgaatgatgtaactcgagttttctgatgcgtattttgttgtttttttttgacaatcagatgcccctgtgtttatttgcctgtgttttatgctttatgtttttggtttgtattttgtgtttctgaaaaattgagcttgtgatgagtttctcggattccccatcaagacattgcgagtgatgttaacccgagactctgatgctcaaagcagtcttgcatcatactctgttatttgctattcggtttgttagccttttcctactattaagttcggtttggcaatgtggaaaatgagaattataatcatttgatgaaacataatgtgaactacaatgaatcatgaatggttaactatcttctaatctcaaccattggag

SEQ ID NO: 231005 - DNA, 2389 bp, Cannabis indica
gtttgttttgggtgttgattttactaatgcagttctagattgtcttaataagggagttgatttttctgatgtaaattctaccctaattattctcattcccaaaaagcagcatgctaacatgctgaaagattttagacccattagcctatgtactacgttttacaaggtcattttaaaaacccttgctaatagactcaaattgattattcataggattatttcccctttttaaagtgcttttatatctagtagagtcgtctatgataatattcttattgctaatgagcttattcatgtcattaataatagaaaagttgggaagatagggtggattgcttttaagcttgatatggctaaggctgttgatagagttgaatgggactttctcaggaatattatgtttcatttcaacttcccagttagatttgtctctctcatctagaatgtgtttctactacttccatctctttttctatttatggtcatgtctgaggtaatgtgaagccactagaggtcttaggcagggagatcctctctctccttatttattcatcctttaatctgaagggctttctactatccttaggagttatcaaagcaggggtcttcttcatggtattgctatttctagaattgcccctcccatatctcatcttctttttgttgatgaaaacatcttattatactcttctcattaaaattcaagtcatgctttaaaccatgctttcactgtctactctaaagcttctgaacaggttataaattttgtaaaattctctattttgttctctcccaacactcagaccgctatcagggacctgttctttcacacatccatctagaaaatcggcatttcatcactaaataccttggtctacctcaatgtctctctcgatctaagtatccatcttttacttttctcaaggataaaatttcattgatcattcactaatggcatcataaatggttttctaaagctggcaaagaaaccatgatcaaggttgtccttcaagctattccttcttatgcgttggcttatttttacttatgttttaaatttctgtaaataaatcaaagctcttgtgtccagattttggtggggtcctctatagaaactcgtaaaatccattggaaaaataggaggtctatttgtcagtccaaatttgtaggaggtttaggtttcagatctttagtccacttcaatcaagccatgcttgccaaacaagcttggataattcttaagtgtcctgattctttgcttagtctaacccttaaagcccgatactttcctaattcttctatccttgagactactcttggccataattcttctttctcctagaaaagcattttatgagggagagacttaatgaaacaaggtcttatatgaaaggtgggagaaggtaatgatatttacactgtagaggatcattggattttagatttaaatcgtattcctcttctctttctccccctatgtccactttgtccttttttatctctccgcctggtgcttaggatactcctaagctccatcattatttcgatgatcatatcgttgatagtatccttaatgtacccatctctggtaattgttgcaaagatgatttaatctggggtcaagatcactctggtaatagtttccacctcaccattagcagtagcagcaggatttgcacaaatgaaaaccttaggttgcttgggaaaggctccatcaaagtactccgagggttgaaatatggtgccagtgaggggaggctcgagcatttcatgggaataagccacatccttttgagaggaaagaattttatagattaacttgggaataacaagcttattagtatattttttacctcttcgaaatgaaacaatttgatccaagatataagaacccaaattgatggatgcccctaaggtgatgcgaaaaagaaaatgagccaagtcttgagacaccacagttttattggagtttggaagccaattgctaaaagcaaaccgcatgagtgaagcatggccataagtgagatgagtgatgcaaagactttgtccaggttgccattcaacttgagcaccagtgagatcagtaatcatgaggtgacgatccatattcactagagcatttgttacacctttgtgcagttgcaaagcttcggtaatatcatcctcagtaaaggaaaactaatgtcctcgaacataccctttaccaatgaactcagatttcttatcaagaaaatcatcagacaaattagcataaaattctttgacaattccatcaatatactcttcaaacccaataagagcattctcccaatgatgatattgaacaaactttacaataccatagacacgatgagcatgtaaattaaaatttctttcactctcaaactta

SEQ ID NO: 231006 - DNA, 5502 bp, Cannabis indica
attttataaatataaactaaaaatacatatacacaaatttgtagcacaatttattaagaaaaatgtcacttgtaaggttattatagtactttgctctcactccacagcaaagtttcgtacttttccatcacacttgttagaatttttttatatatttatgctgacgtggcagtgttgtatgacataaaaactagtcgaaaatagaaaaaaagtttgaagataaataaataaaaaatagatatagttaggcggtgatgactatgaatgagatgaggaaaggagggcacacaagccaataaagaagaagaagaagaagaaactcttgactgagaacagaagaagaagaagaagaagtgattttgagagatggctgggatggtggcaactgctgagctatgtgacacaaacgcagggcttgtgggaagtggtgaggtgagaatcatggagccagtgttcaagatgtacggacagaggagatcattctcaggtcccataatgactgtgaaggtgtttgaggacaacacccttgtgagggaggcacttgagaccagaggagatgggagggtggctggtggtcgatggtgggggcagcctgcgttgtgggatgctgggtggcaacctggctctgctggctcacgacatgggttggtctggtattgtgctcaatggttgtatcagagatgtggatgagatcaatggttgtgatattggtgttagagctctcaattctcatcctcttaagtccttcaagagaggtgttggtgagaagcatgttcctcttcatattgctggtgtttttcttagggattctgagtggttgtatgctgatgctgatggcattctcatctccaacactgagctctctctttaattcaaaactcaacacatgtatgtctatgaattcaattgaatagactacaatgcttgtttctttctttctttgtttttggtttatcataataatattaataataatagctattagctacaaatgttttgctcttttctttaaaactttctaatcaaaacatgaagtaaccacatactatttccattttttccatttccaccagtaagaaatggctaagtaagtgaaacacacaaaaaaagatacaaatttccatctctcactctcactctattgttttctaaacaaattgctctaaagccttgttgtatatttcaacaaacaacagcaccaggtaaaaaaaactacttccactccattccattccaactcactgagatagtcaggtgaagagtagaccaaacaatcagaagaaagcagttcgtccacctcttctgctatgccgatcataagaagtgttgaatttgtccactagctcattcattgcactaaatcacacaaaacaaaacaaaaaacataatgagaatatcactatgcaacattagctatcataattgctcacacttcaggcctctcaacatgttaccacaataaaatgataaacatgtaagagtttagttaccttgagcagttggtgaacatggctaggtatgtaatcagcaacgtatcattgtattcctattaagaaaagaaaaaaaaacagcataacaggagacaaggtgagcaataacacgatgattattaattgaatatggttcactatattcatcactactttacaatgttaatttaaaattgaaaaggaaaattgcaacataatgaaactttgacctcttcgtttaatcaaattcaaaccatgtaatcatcaccttatcctccaatctattctgtccaattattagaaagcaacgaggatttcaaatagcaacaatcccccttccttaatcacactcacaaatctcatctatttgacattccaacattgaccggatattttttattttttttcatatatagagacagtaagattgcaactgaacatatagtcattattatataaccaattatgtcatatttttgataaaggcatagtcaagaggttccacattctttttgttttaagttgattaaaattcttatgttccacaaaattgtagaaaatatgctataaatacaagtgaatgttagaaaatgagcacgctgcacttaccatcaagaaatcatccaagaactttccagattcaatggctggcaaccttctcagaagacttgatacttgtctcagcagtgaattctcacaaggtatttcacctaaacatccaaataaaagtaaagaagattaaaaagtgcattgtcaatagtagctatcctctgaccgaaattgtcaaacgactgaaaccttgagtcaaatttgattaaaaattttatgccaaaaatattctagttatcatcgaaaattcagtcacccaatggactcgcagattcgtgcttgttttccgattgagtgcgaactttgactaagggacttttagaagcacaatttctagtgttcaaagacaagctcagggtagttgagttgaaaagagtctagaagagatatagctagagttagagatacaactactagcagctgtattggttaatactaactgaaatatgggggctgatgacagatttccctttatgtactactctttaactcaactcagaaatctatctgagacttttgctctaaatttccaagtgttgaaatcatatattttctcttttatttatttcttacttccctagtcttcaaattattgatcattaatcattgcacgtttttacatttaaggataaatatctatccagtctactactaaatgtctgttcatacctttctgcatcgaaagaaggtagtgatgtagcactctaattctgctattcagcattttgatggcactatgagtgcctgtaaggtgagcagccactgcaaacaactaaattatattaatttacaaagtaacaaaacacaaaaggaaaaaattacttatgctggggtgatcagtgatcaatatttttataatttttaggagaaagaataagataaattataaatccagcaaaatctttaggcaacacgggtaaagagaggatgaagaagggctcacattgtgttgcagcggaacctccatccgaaggtttaagatgagcaacatgatcaactgagattctttctgcttctactgtctataaaacatgtccaacaacaacaacaaaaaaagaaagtgtcagtaactctgattaataatagttaaaagtgttaatagtcgatagatactagtgtctaacctcaatagtgtagcttgaacgaacaaaattagttgtggaatcccatctatgacatgcagctctagagtttgcacacagaaaaagaagtaacaaagttaatagacagagtttctatagagctacttaaactaaataaggaataaacatgaacaaatccacaaaattaaagacaatttcgaagaaaaatgcttataggggaaaatgtaggtcccctgatcctgtaaatacaatgaatgagtaaataaatataagctgtaaggcaaaagaaggtgagtgacataccactctcaaaaatggtcactggaagatccttttgagcatggttgatcgatggattgaggagaacataaagagggctttcattaatatccatcaactgttacaacccaaaaacgttcccagtaaaattattgaatttaagggttagctaagcttagctatacagatagagatataacagaaattgacttacagctttatgaatgttcatgtctgattcctgagcatcacttccagtggagtaccaaccaagtacgtaaaagttagggaaaaccttcttatctgataaaaacaaaaacgaaaaaaaatcagcaaaaccctacgattatactaatagaatatgagaagaagaagaaaggcactgaacagagttcttgcttcttctcgaggaaagcacggtcgagggaattagtggtggaatcgtagagaagctcgaagctattgaagatctcgacggtacggcctctctggactccgataacgcagccgtagaccctaggaggtgtagatgatggaggggacgatgaagaaggggctgcatcagaggaggcagcgttggcgttggcgttgttgttggcgtgacactcggaagaaagatgtggtggttgcatctgagacttaaccctggtgtagtgatcggatatgttgactataaccagtgggtgtagcttgaacgttagtccactgctcgacgacgacgccattgttaccgttcttcttcttcttcttcttcttcttcttattttcgccgatttgcaattgcactttcactgtacccttttcccaaattcagaccaatatttatttattttttagctgggctgtgaaatttggacttggatcaaggtctaataaacagcattttgggctaacttgggccaatatgggccgactcatctatacactccaaaaaattacactctatacccacttttcaatttctattttaatttttacatttgatttaatttatacccaggtcatattcccatgatatgtgttaggaactctaattttaataaattatataagattatatttagtattttgattataaaaaaaaggtatttatcaattaaatttatttttacaattatatttaattaatgtataatatataataaaaaatagttctcaacttattcctctatactctctctaccgtctttaccctttttgtagttttttttgttgttttttatgttatttttatgaataccgtaaaaatgtaaaaagaaaaacttaaaagtgtaaaaaaaagggcagtttatgtaaattttccaaaaaaaaatccataaaaattataaaaaaattccaaatatttggaattgggcctgtcaaatttggaattggatcaaggtctcataagagtgttgggccttattgggccgagagtgcggtcttatatgaatgaatatgacgtcagcagaaagaaagtaaggggtagagctggaatatatatagaatagttatctttttaatttccaatcccaataccaatcaaactatatttatttatttatttgtatttaaattgtagaattatttttatatttatttaaataaatataaataagagagaagagaatagaagaagaagaagaacacgaagaagattttagagtgtgtggagttgagttgaattgaaatcggaagctcttagctatggcgatgcgtgatcttgttactggtggagctgcttgtgctgttcctggctcttcttcttcctccgcaaatcctcttggttctcttgccaacgctcttattggttcttcctccaagactaaggttccctttcctttcactatccacacttcaattccaattccaattccaattccaattccaatttcaatttctcttaataataataattataataataattgcaggaaaggttaaaggagattcctacgtcggctcagggtggttcttcccagagacccttttacgaccaaactatgacaaattgcttcaacttcctggctctgagtttgaccgtccattcctgcaacctggca

SEQ ID NO: 231007 - DNA, 1337 bp, Cannabis indica
aacaaacacatcaatgttaaagtgtgcatagaggggcagccggtttggagattagtgggagtgtatggtgaaccaaatagaagcttaagacacaacacatggagacttattagaaaccaagctcaagatactcggtggccgtgggcaataattggggatttgaacaacgtcacaagccaagatgacaagcatggagggagaccgtacccgacaagtttaattcaaggcttcaatcaagttctttttgattgcgagctaactgatatggatttggtaggacatccttacacttgggagaaatctcgtggaactccgggttgggtggaggttcgtcttgaccgagcgttagtgtcgaaacaatggttagaagtcttcagttcttcaaaactctttaatttgaatttttcttcatcggatcattgcccaatttatttagagccgattattgttaaaaatgttcatggcccgaaaagattcagatttgagaacgcttggttacgggagccactttgtcttcaagtaatcaaagatgtgtgggagagggagccacggttagaggttcaagaaaaaatcaagctgtgtggtgaggcattaagtatctggggagaggattatactggtgatttcaagacaagaataaaagaggtgaaattgactttgaagcatctcaaaggaagacgtgatgaggattcggtcaaccaatatgccgaggctgagaagactttgtttgagattctcactcaacgagaggtgttttggaagcaacgatcaaaacaactctggctaaaagagggggaccaaaacagtaagtattttcatgcttttgctagctctcgaaaacgtcagaatttaattcacaagcttcatgatgagaatggtgtttggtatgattgggatagtggattgggtgatctgattgcagattactattctcagttgtttgctacttcccaatcaatgggagatgaggtacttcaatgtgttgacccttgtatttcacctgagacaaacgaatggcttttaaaggaggtttcagacgaggaggtgcgtagtgcagtgttccaaatgcaccccgataaagcaccagggcctgatggaatgacgccaggcttctatcagaagtactggaaagttgttggtagcgatgtagtcaagttggttcggtctttctttggtacgtctactcttcctatgaacttaaatgatactaatctgattttgatccctaagaagtccaatcctgtttgcttaactgatttgcgaccgatcgctttatgtaatgtggtgtataaagtggtctccaaagttatggcaaatagattgaaaagtatcatgag

SEQ ID NO: 231008 - DNA, 1434 bp, Cannabis indica
gatgttaatgaaacatacttgttagtaaatctggatcctggtaaaatatatccaacacgtccttaccactcggcccacgagctacgtatgtcactattgttgcctgataaagtaatcgataagtaaaatcctacctgcaatttcaagggagtaattactcattcaaataatggtaatgactgcatctttactcattctcaataacggtaatgaccgtatatttactacgatcatagtcgagccacatacgataataatcgtttctcacttaacatgcttagcagtgcaaatagcttttcttacctcaagtccaaagtcaagtgtacgggctgacctgagtggaatgatgctcgacaatctcgggtgttatgtcacgacaacggtaaatcaatgagggtctattccaaaacactgtctaaaacccacataaaataacctaaggttttctaccgaatcttatggtgaaaatatcctaaaataaaatacatcttttggctctaatatatgtctcatactatagagctttttataagcttcgaaacggtacatagaatgtctaaaacggacacctgagtaaaaagttatgactaaaatacaaaaatcggcgattcctaaaaactcaccgaacgaaatttcggttggtacagccctgtaccatccataattctggttcactatagtagtaactcaaaaattttagatcttcaaagtcccaaaacttgctccaaacctaaacaattattcccaaacttcatagagcagatctatatcatgaatacaatgtatacaatgaatcaaaactcaacaattcatcaaaataatcaaaacaccataattgagtgaaacatgagtttttaaactcaatttagccccaactcaaacctaacagccctaatttccatccaattcaagcttaaacaacctaatttatatcttctctgatttgagttatctttgttgtccatcttgataagaaaatacgctaagtgttgggaaggttcccatctcgttatattttcttcgtgatatttgtaatacgaggtgatcttctcgcagtataaaatgtgagacatcttatattgatatactcactctgctcagatgaatgaatgatcctttcttgtcagtatttcccgaggcatgcatatgtctcgttaacctaagatcaatagttactattctcgtatcactattgactataaagtcaacgagttttgaatattttctatttaacctttagttaataaacgagttatttaatatgcatttaatgatactgttgtgtcattttagaattgtttcagattccttctattaaacacatgtcaacttctgaagtgtagctgaatttcaggtataacatctaatatatttaattatttagacatgtttggtgtctaaattagtgtttaattttgatatgcttggtatcaa

SEQ ID NO: 231009 - DNA, 960 bp, Cannabis indica
agatagcggtgcttgcttcctcctgatgcaagacttgtagaaattttctcccaaagatagcagtgtttgcttcctcctaaagcaagacttgtagaaatctcctcccaaaaatagcggtgcttgcttcctccttaaccaagacttgtagaaatcttctcccgaagatagtggtgtttgcttcctcccaaagcaagacttaaatgaaccttagccctaaggttgttctttatgttctttggaattttcttcacataaaagtcatcacaaagacacaaaaactcactaaaaatagcagaataactatcctttacaaaagaaacaccctcttctaaaaatataagaatttaataagtgaaagagaaaccttttgttactggtttaggtcatatttatagtgataaatgacataaaagacttagctcaaaaagtctgaatacaaaaatattaattaattttttaaaaaactcattaaatgacaaaattatgtctgaacagatataggaagtgcagacaaaatactaatttgtttagtcaatactgtaaatttagactccatcaaatttaagttcatccccacaaatttttttttggatatcacacaacctagatggagaaattaaaaggaataaaataaattaattataaagaaatatcgatacaatatttattacataataaaatattttattcttttcatataaaattataacataagtaataatatattatcaattaatataccacgtacgagtcgtgctttacaagtaaaaaaaataatcaaataatatataaatgaaaaatattctcaaaaaaaatgttaaaatctatttaattaatctcatttagatagattcactgtatgtagatagattttcaacaaaagtttcctttataattaaaaaagaaaatatacattaaactcacagcatgtacatggttttttaagaaattaaatagatc

SEQ ID NO: 231010 - DNA, 3256 bp, Cannabis indica
ttgttacgatggatatttgttccttttaaggtctctcactatctctgtatgtttgtttttttagttaccttgttttattttgtatttttgtgacccttttaaactggctagattggatattacttttcaagtttaccttcaataattctatgtatgtttaatttcagctatgtcttctgaagaagaaaggttgtggaacatcgtgaaggcaaattctttagattttaatgcctggactgctttgattgaagagacagagaaagtaacagaggttaagtccatttcttcttgttgcagctatttaactgaaacaaaataacttagcatttcagaatggaatccacatttaagtaaattgttggtactcgtgttagctttaatcaacttcatacacttgatagcacaattttatattattacctcaatatacaactttgtcagaattatttttgtatttaatctttctagccttagaactttagggttgaagcatggccattttttcttcttcttggactcttctgctagccagaaatataagtaaagttcaatttcttctcttaaaccctcgatatgtacatgatgctcttgtattgcaattggatgatctagtttagtgtttgtatcattcttatgcacataaatttatcatttaagatatattaatttttcacaaaattcattaatatataaaatatatgataaatcttcgactcccatgtacttttgatcaaagagctgtctatttaatacaacttcaatcctttctttgctgttaaaagtttctgttattatatatatcttatatccataggtctttggattgaaactgacttattcactcatatctcttgtgcagaacaatatattgaaaatcagaaaagtttatgatgcatttttagcagagtttccattgtgttatggttattggaagaagtatgctgatcatgaggctcactcgggttctattgataaagttgttgaggtttatgagcgagctgttcagggagttacctattcagtcgacatctggctgcattactgtatatttgcaataagcacctatggtgacccagaaactgttagaaggtattagaagtctatttactacttattagtactggtcttgcattgggaattcatgaggacatgatgttttcagttgcaagggtctggttcctttctttgttttgtttttgctattctctcctctctttaacagaacttgtgctgcctttctaacatatttgggtacccctgcaacagtggttcctcacttataaggcgaaaagatttcatggaaatatgctttttgaattatttttcttctaatatgcaacgcccttatctacagtgtagtcaaaaactttttaggattaagccatttgtttcaattaaattttgttagaccctaatttacctttttgtctccccttccctgtggttgcttgagtcattagtaattagtcatcaatgcattatggctgtttttaacattgactccgaagtgcatcttaatgcaatctgctgctgagaagatctcgtcaagttaagggctaagatggcctctatcactgctccatttctcggacatagtatgattttttttcaggaaggtaatgcagcatttggaagtgtcgtgtgctgttaagagtgaattgttccttcaacattactgccactctctcccttttatggatgtgtttgtatgaactgattgatacttgtttcataattgtgcttcatgttcgtatggcttttcaggttttttgagcgagcacttgcttatgttggaacagattacctttccttccctctttgggataagtatattgagtatgaatatatgcagcaggattggagtcaacttgccatgatttatactagaattttagagaatccaaatcaacaactggaccgctattttaacaggtagccccttttatttgttcgcctctgttgtgttactatttattttcttcatttttatggatctttttttttttaaaaaatattagtactcatgattttttttgtgtaacacgtggtaatgatgacagctttaaagaattggctggtaaccggcctctgtcagaactgaggacttctgaagaggctgctgctgctgcaccttcagaagctgctcctgtagcagatgtgcctttggaggaaactgttgctgaccaagtagacggagaagaggtccatactgatggtgcagatccatctgttaaagctggctcaacagatgctgaggagttggagaagtacattgccgttagagaggagatgtataagaaagctaaagagtttgattcaaagatcattggttttgaaacagctatcaggaggccctactttcacgtgcgcccccttaatgtcgcagaacttgaaaattggcacaactacctggattttatagaaagagaaggagatttgaacaaggtatttgagctgtgtattttttatacctgattacatctttattatgtagtttttagtagttgtactgttattgtattcacttacagttaagtaatattgctgcttcatatgctttattggctaaatcgttggacgaagcaacctttttttaacgggaaattgaactgagactaaagcatgggccttccataagatttctttaaggctaagtatttcaaaccttcatttgtctgagtggacgttctaggttcatgatgtgtttgtatggtaatttattacttttaaagttccaatgttatgtatgcaggtatcttatgttcctaacctatctgtcaggcaaggagggtccctctttcatatttgaggggcttctctgttccactaacggagtacttcttgtgcatatctcctatggtttttttaatatctttttttattattttatcgtctgttggtgcaagaacgaatagaacaatttgttttatctttgttattgttgaatcaggttgtcaagctgtatgaaagatgcctaattgcatgtgcaaattactccgagtactggattcgatatgttttgtgcatggaagccagtaaaagtttggatcatgccaataatgcacttgttcgtgcaacccaagtttttgttaaggtgagattctgtctttttatacctgatccccgccccagctagttgaaatgctatgtgatttttaggtattggacaaactttatttaaaatttaggatgacaacttcaatgttttttttggttgtcatgttatcttatgttacacggctctttgaaaagtaat

SEQ ID NO: 231011 - DNA, 1807 bp, Cannabis indica
aaattgaatagcggtttggtcggttcaaaccgccaaaaccgatttttttttgcaaaaaataaagtccaatttattctataaaccaattattcttaaatctaaagctattgcaaccatatagacactttctttaaaaaaaaatgctacaaccgtacaaattatttgttcaaagaccaattgtaaacacatgattctacatattataagtgcaaccatatatccaaaatatctagttaaaagtctaaagtctaaaacacaaatcaaatataagtccgcattaaatatattattccacaaccaaacaaatgaaatacattaaagcaatagatagaaaatagagtccaatccaacaagcaaagcaaccatggtccctgatcaccacctacacttacaaaaaacaagaatacacaattaaagaaatgatttatgaaagtactattgagagaaataaagcttacaaagtaaaaaaaaaaaaaaaaaatacaatttttcattaataccttgagttttagttgatttctttgtcccacttccacttccagaggcattgtcaagattctcattaatagtaatacatgatcaatcacctgataaagatttcattaacataaaatctaacatatacaaaataatttcaattaacaattaatatataatgattgaacaatatgttacttggaataacttgttcacatgtctctaaaccttcaatttcgtctatgtattgacgaagtacaataggttcctcatactcacaagtataccagttcttacaacaaatcaaaacttccaccatccttggagataaagaactcctaaatgcatctaggattcttccacctgtagaaaaagttgattcagatgctactgtagacatctgaacagccaagacttcttttgccatacgagcaacaattagatatttgaatcaattttgtttccaccattgaagaatatcaaatgcaggatcaagcttctcatgacgatcattcaagtagtatttgagatcacattcttcaacgtcataagttgtagctgcccaagaagaaatgattccgtagttgcactaatagtaggcttagatggttgagatacttgaggctgagattgagatggtggagcttgtgattgttgagcttcaaatggctgagttgtttgttgttgcttataaaatgcatataactgtgccaatatattggtgaccatctttatcattttgtcagcctcacttgggattgtacacaaatctgaaatctcgattcacaacttctaatttatacctcagatcatagaatcttttcaaaaagttgacaaatatttctgctttttcccagtctagattacttggcggatcagtcattctttcttcatcaaagtaccttgtgtaattcacatctccttctaaactgtaaaaagccttcttgaattttatagccgcttctaacatcatgtaggtggagttccatctagtaactacatccaagcataacaaggcttttgattcaatgtttgcatctgtacaactttctttaaaccttttcagtctaactggagatgacctcacatatctcaccgcatttcgaatacttgaaattgcttcatttaactctttcaaaccatcacttactatgagattcaaggtatgagctgaacacctcatatgaaacatttcaccatttaatggaactgtattatccttttccaacaagtgccccttcaattttcttagtgcaacatcatttgaagaagcattgtcaactgtcactacaaatactttagagataccccactcattaagacaatttat

SEQ ID NO: 231012 - DNA, 694 bp, Cannabis indica
gtaaattttagatttttcaatccgcacaagtaaggatatccgcactttgcagattggattagattggatcgtggagattggattggattgggtgttttatgaacactcctagaataaacttaacttgaaaataaatgaatcgtggatttttattgtttgaatagttagtagtacataacacagatatcattaataaagctcttaaactgcttgaaatctttaattagtttctttcccaactctaactctattcaacattcttaacacaattaaaatcccccatcaagacttaaggcttcttttgaatagcagctcgattcttcatattagcaaaaagaacatctctttcattaacctcattatgagcataaatgaaagtagcttcaaacatttggacatgctttggcttcactacagtatgcatatgttaactagaacaatcaaggatatctaaatcaaaagagataggattccaaacaaggatgattcttctattcgggtgataagttgaattagaggtaaagcacccacccccaaataaactaaggtataaagctcccaagttatgagctttaaccctagtctctaagagaaaaaattcctaatttctcttatcgaacataaatctttgaattgttatatgtttctaaggaactctttatccctcggacattctaacataacaccctatcca

SEQ ID NO: 231013 - DNA, 808 bp, Cannabis indica
gggacaagtttaaagacgattttttcactccccgggcccatcctactaacaagggcccggtcccgtataattttcaaaagaatgttaaggagtaccggcactgcttctttctcacttccggcttcaaagccatggatcgcccagagcttctcacggagtgggtaaggatccctcctctacatcgcactgctgctacccagcttttcctctagcatgccaaggttttctccacttatgacagaaacggtcttaacgtgggggacttggtcactgcggagaactgccggaaagccaaagtcatctccgggagccaatccgtggacgactttaacctctccaaggtcctctgcccaaacattcgtactccagatgctgaaacggtgctttgggtggacatcattgcttcagcggaggatcagtactagaagtatctttttaggagggaacaggagttagcctatatcaaggcttaggctgctgctgggaggacccttcgactggaagcgggtaaagaacagacgccttcttgacctaagttgctggtcctggttcctaacacttgggctcctaatgccagcacatctggatccagtgcgtctcccttaatggttcatcatgttccgtctggtcaagattattctcggtgtaggcctataggatttgaaaaacgtcttcttagatttagaatgcccctacttagtagggtgatcatgccaagggcttttatttttccaacttaggtcatattctaggccggtcccggatggggtccggacctcctgcatctattctcctggatcattcagct

SEQ ID NO: 231014 - DNA, 926 bp, Cannabis indica
aaattatatgcttcattgattttatttcctagattagtctatctctataaatctcaaagttttatctaagttaaataaattgcatgcttcgtggatttactgcttaggtaaaagagttaattattgagcgcttcgccttaattacatgtaatagggacattgagataattgactgcttcagctttatcttttgggattaatagtttgattggaaattgaaattacattcattaataggaattaggaatgattgttgatggtggcaaataaccttttaactagtttctcacatcacagtctctaattttaattttatttttatttttatttaactaatttttgagtaattaaataaacattgtcctcgtcggatcgacccttacttacaattatactaaaataattggaggtattggaaagaaatattagtaaatttgttatggcttacgacacgcatcatagtcttccttgaagtggatctctaacgagatcctgccctcttacactagttctctggctgaattgtcttatcatattgctggcctctctgttgcggcaatctaactccacctggcatgatcaaaggatgtactcttgatcattcatccatctcaagaatttgcgtctctactgagcgaatacatcgcgatcagaagcgcgtggttcttcaaggaattcgcgtctctgctgagcaaatacatcgcaatcagcagcacgtggttcttcgattaggtcggcttggtagatggcctctctaagtctggctaactcgaaatcttctcctaagtccacatgagactcaccaattcctggtcctatctctcctgcataataccagggatgagattcggttattgttcttggggattgttctctaaagggtccttctttagtgggaggtgtctgtggagggtcctccattggag

SEQ ID NO: 231015 - DNA, 1973 bp, Cannabis indica
gaagaagacatctacatgactattcctgagagatttgaaagcaatgaccctgaagaagtatgcttgttacagaaatctctatatgggttgaaacaagctccaagacaatggaacttgaggttcaatgaaataatggagaaagtggggtacaccagaagcaaatatggctgctgtgtctacacaaatgaacacctctacctgctattgtatgtcgatgacatactaattgttggccaagacataacagagattgacaaattaaaggcaaaactcaatgctgagtttgacatgaaggacctaggggaagccaagaagatactagggattgatatacaaagacagaggccaaatacaatcactctatcttagaaagaataccttgaaaaagtgattgagaagtatggcatgagtgattctaaacctgtgcagactcctctggccccacatttcaaactgaccaaagatcagtctcccacaattgatgaagaaagagctttcatggacaccataccctatgctaatggggttggtagcctaatgtatgtcatggtgtgtactaggcctgacttggcctactcactaagggtagttagcagatttattgctgatcctggacaagagaattggtcagccttgaaatggattctaaggtatgtcaagggctcacttgacattggtttcacttttggaaataagtctaattctcaagaggaattaactaggtttgtggactctgattatgctgggagcattgacaccagaaaatcactcacaagttatgctttcacagtattgggaggctgtgtaagctggaaatccaatcttcaaaaggttgtggctctctcatctactgaatttgaatatatggcagcaactgaggctgtcaaagaagccatttggctcaagggtctcacaaaagaattggggtttaacacagatgatgtcactgtgtattgtgacaaccaaagtgctctccacctaatgaaaaaccccatgtttcatgagagatccaagcacatagacatcaaacttcattttatcaaatatgttgttgcaaggaaagaagtaaccatgaagaaaatcaacactgctcacaacccaactgacatgctaaccaagtgtgtcacccaggccaagttcagacattgtctgaacttactaaatgttaatggctactgaattcttgttccttcaagtcattgacctctgctgagtttcatcttctctcacttctcaaagtgatcaaaacaaggtggaattgttggtgttttaaccactttgaaaagccaactgtattaattgtttttgacagctcagcctatggttaatgacttgtccaaactgtcgtaattataaatacctcctctccccaactcgatcgagacacagctagagaacaactaccatcacaagtctaagttagtagtgtcccagattgagagagagagcttctgtagtgaagagagaaaccagagaaaaagagaggaaatcaccatgatcattgttgaaattatagctagttcttgagtgaattgagggatgtaaaaagagattgttcactcctgaagtgacttctctcagtgtgagctttaattgtaattcttgtattcaggattggtgatttcaagttgtattctttctctctcagatttcattgcaatgttaagacatatttgattcattcaacttgattaaactcatctcttgttaaatttcttatttctggttttctaattgtttgttattgatgtcattgtgattgttgtccttgaatctttattatgataatcttgatcaggttttctaatccgcaacatgtataatattacatgaaaagttatagggactaatttgtaattattagtattgtctaattagtataaatgtgtaatactattacacaaatgggaaagaatgaaattagagaaaattaggattattcctattggaatttggcactgactcgaagagtg

SEQ ID NO: 231016 - DNA, 933 bp, Cannabis indica
gggcgggaggggtgggcactgtcgtggctggggaaggggaagaagaagaagaagaaaatgttttctatttttttgttttctaaattatttttttgaaattttaaaataatttttattatatgtaaaattaaaattacatggaccactaaaattttttcatgtgtccacgtgggtagtctaccttggcacttaactgagacttttggatgaaagtgtaaagagtaaaacgaaaggtgggtttggtaggttttgccgtcaacaaatcattttgtgtggttaagtgttaaaaaaatataaagttcgggtagttttgctgccaatattagaaaaaaataacgtcataaaatatgataattttatacaacaaaaattaaattaatgggaatttcaaattttgtcgatattttgacctaaatcacatgtggcttattcttaaaaatccaacacgcaacatgcccatctagaataaaaatagttaagtacattccaacccgaacaccttgtcttggaaggtcaaggcttagtccactcgaatgatgatgttaatacgattaagcctgagaatcaactctttcaaaaataacaacaaaaagtaacataacctccctcgaggaagattattattggcgctaaaatcaacactcgcttgctagattccaagatgaaataagaggtgattagattaaatagagagacacataatttatagtagttcactccccatgtcgcgatggtaatggagctacgcctacttcgagtttttatttctcacaagaattacaagagaattgattaagtgtgaaagctctaaatttttagagaaggaaaaactcagggcaggtcctgagttgaaatgggccatagggaaaaaattaggcctttacgataaaaataaatagtactttgtatattttatttgggcccctaaaatga

SEQ ID NO: 231017 - DNA, 1202 bp, Cannabis indica
aacttacacaaagacagcaaggctggggccaaagacgtcttgtggtggtaatactttgcctgacaacggcggaggaagagcggaaggaaatcaagggcgtctggaattttgtcaagtgtgtttgaaaatttgtaaattgaaatgcagtataaatgacccagttgggggaagtgttggcttttatagctcatttggggtgcaagacagtgtcaatcgaacaccatcgaacggtgggggttcacaacgattcagattccttgattcaacggatgagatgaacgggtatgatgaagagaaagggcggttgagatgcttgaatacctttttgacaccgacattaatagaaaggattgtcaataggcaggaaatgaatcgttgcttgtaaaataaacaaaggccaatgatggcgatcataaatactgcccacgtgccaagggcacgtgtcattgtattgacaccggagacgagttacaagtctcattcacgtacgactaaatgagacttggagggtaaatgttactccgcttttctcccaatatacatggcagctgtttagtatgacatgtggctgacatgggcacgtcacctggagatgagttgcagatttaacaaaaccaccttaagaaacaataagtacgattcaaagggctagctcccggacatgagaaaaaaggcccatcttcttctccgggagtcaaagcacggatgggtttctctgggccagtaaggctagagttgaacagtcacttcgcatttagaaaatgtttgggaaagcccataagaggacgtgtcagacatcataaacctgatttagggcaattacacgataatcaaggaagctagtgacaactccattatgaagaatcacatcaatcaagaagggataaagactaatctcacctaacacctaagcagcctactacgtagtaatgcatgctctattttatactttttgggaacttgtgcatgcccatagttggcacttaaagacaagttactcattttcttcttcccaccaatcgctataaataccccctcacaagaactattgggggggggggggatcagaaaaaagacattgaaacattctttatagaaatactctctcattaataacaagactcgtagctatgactcattaatgcctgaaccacgtaaaaactacatgcgttaattatccctaagctctcattattacatta

SEQ ID NO: 231018 - DNA, 1861 bp, Cannabis indica
ctcgctacacgatagtagaaggcaagttgtacaggaggggatatttgatgcctctcctttggtgtgttcttcctgcagaagcaaacgagatcatcaagaaaatccatgaaggcttttatggggatcatgcaagttggcaaagtttatcaaaaaagataattagacaaggatattactagccaattatcaacaaggacacccatgaatttgtcaaaaagtgtgataagtgtcaaagattctcacatatacctcacgtaccaccgacaaaactaagaatgatgaccttgccttacccatttgctatatgggggattgacctcattagggcacctcccacagggcgaggaggagccaagtacccagtggtggcaattgatttcttcactaaatggacagaggctgaacatctcctctccataacctgcaagaaagttctcgactttgttgtcaaaaacctcgtctgtaggtttggaattccaatgaagatagtattcgataacgaaactcagtttgatggtgacttattcactgagttctgcgagaggaacaaaataattaaaaacttctcgtcagtatccagtccttaggcaaatggacaagtggaagttgttaacaaaatcttcaaggatactatcaagaagaagttagatgctgctaaaggtagatgggtggacgaactacctcaagtactgtgggctcatagaactactgagaacacagcaacgggacatactccattctcgctagcgtttgtctcggaagcaatgttacctacggaagtaaacatctgaactcatagacgagagttttataattaagaagaaaaccaagaactcttaaaatttccttggatctgcttgatgaaaaatgtactgaggcgcagattactcatgcagcgtaccaatgccgagtaacaatatacttcaacaaaaagggtcaaaaagaggctattcaatgttggagatttggtgctaaggtgagtatttgcgaatatgagagacgcatctgcaggagtattcaacccaaactgggagggtccttatgtgattgaagcgatagtaggaaatagggttttttttatgagtcagaataggtattgtgtcagaaacactgtgtttacaaactaatagcacccaacaagggcctaaaataatcatctttacatgataatctcaactcttgcttcttttctatacatttacattattcacaaactaaaaaaccattgtctatctttctctaaatttttctttggccaaaatagctcaatcctttgtgttacccccgatttgagctccttaaacatcttgacaggatctggcttttctttgtttcataggcacttgtttctcatcctccatatgttgtaaacaaggttggcaatagcagcaacccttaacattttcgtaaacttgctctcctttgctctcccaatccatttgattaaattggagagagagatatgagaagatttccaattcagcaaggctttcaagttttgtatgcagctcctgatagcaaaacacctattatgaattttataaataatacgcaagtgtacgttatcaagtagtaagctcacacaggtgaggtcgaaccacagggaattggattgagtaccactagattaaatctatgtttctatttggcaaataaatcttttttcaagttcaataatcgaataaaaattcaagaagctgaaagagacaacaaaaattaatcagaaacgagaagatagggaagagaatcctgttgataggtttacccaattgttgatgcctaattactattccagttcttgttgtgaatgacagattattctaattaacctagctcttttcagatcttctaggttctaaat

SEQ ID NO: 231019 - DNA, 594 bp, Cannabis indica
agataaaaaaaataattaaggggtgccaaatactaatttttaaaaaataaaatttttaacattaaattgccttataatttttttgtccaaaattttaggaggggccatgttccaatattaccctaaaaagagtatgtctgacccacatggtctttaggaatccaagcttcttccctaatacgaaccttatctcccttcccaacaagccaacaaatccttttcttccataaaaaagaagttcgcttagtttcaaccacatccatcagagaactacgcgcataatagaacctttcattaccttagcagctaacgaataagagaaattaaacaaatgcggtaccaatttagcaaacagagactaattaaacaagaacatatcctgaaatcccataccatcatctgttttatgctagcataacctcaaccaagtgcactaaagcatcttttgtttatccgagtacccctttagaagcgagcacaaagacgataaatttcattcacaatacctacaaaaaggcataatgaccccataacataagttataatcgaaaataattacttaattatggtggcatttaataataattttatttt

SEQ ID NO: 231020 - DNA, 1150 bp, Cannabis indica
ctgtataagctggtcggccatggagctgcttacatatggctggccagccttggaaaaattatataggggtttggccggtcatagcagtccagtgaggggactggttggctagagctgtaatgtttaacattgatgttgtttttctttgtttttaagccctgatgaagctgagctcagctacgtgatggctcaaaaggggtcttcagacacttcccaggagcgtgtgaaggtcttggaggcttcccttgccacaaaaagacaaaagccaaattctgagctagaggttccttttggcagcgaggaagaaaaatggtctattgattggagatcatgtttagtgccgggaacactgagaatatcaactaggctactctcatctcttggaacactgagaaagttttggaacagtaaaatcccgaagaggctcaagattttatggtggtgcatcctgtccaaagctctccatgtctgtgcggtgattagtaaaaggtttccaatagaggacaatagctgccctctttatggaacagatgttgaatctattgaacacctgttcctttcctgtaatgtgacttttcacttgtggcggtcctctccttggggcattttccccttatgcgatactgggattcggatgtgggactaggttaaattcttgtgggatcttaaaagcaaaggcattaacacagaggaagttttcctttatgcatcttgtattattgatactatatgccggacgcgcaatgacaaggtacacaataattgtcccgttgatattaaaaagtgcattgactctatttgtttatcttttgcatatcaccatgcttatttgctcccttgcccttcttcgagtttaaccaatatctggcatcccccaagattggctggagctgaattgtgacgttagagtggggctggatagcatgtgccctgcggtagttgcaagggatcattttggcaaggtgatctgggtcattacatctaaactggagttttttaatgctctgtgtggggaagcagtgacttgctgtttggctctagagacggctatggctcgcgactcaaaatttattatggttgagagtgattcgagggtagtgatcaacactattaatgggaaggagtcccgttgggagcttgagaactatgt

SEQ ID NO: 231021 - DNA, 1751 bp, Cannabis indica
atcacccactgcaacagattcttggctagagtagggggtgattgtgtccaggggagcttcactataggacatatgatgcgtagcactagtatcaacataccaattctgatcatcaccaaaatcaggaatggtttgagcaacaaaggcagtagggtcatagtcaatgacattttcagtaaggtgagcctgtggagaagggttgccaatgacagatttgggagttacccaatttttgtcaaacctgtaatgacaggtaggggcagtatggccatagcgcatacacacttggcacagaggtctattgggattttgtgacctggaatactgagatggattgtggttcttggtggacattcttgaaaaagaatcagttggagtgcctctaccattgtttgtgtactgtctgtagccaccatttcttgaaccgaaggtaaggtttgctgccatcttagttgagagatccatcatagtcgtatggcgttcaagtcttgtttcatgggacattaacaaggcttgaacctcttcaagagacaagttgtcacttcgggaggtgattccagaaaccaccgaatcaaactcaggtccaagaccattgagtagatgaagaaccaaatcaaaatcagaaattggatggccagcaacagcaagagaatcacaaagaattttgatcttatcaacataatcggagatcgataggttacctttgtgtaaattggacaattgactcttgagttgaaggagtcgagccttagactgactagagaacttttgttcaagagctttccaaacaccattagagctgttgtaactggccacagtaccaagaataccttctgtcatcgaagatcggagccacgaaagtaggagctggtctttcttgcgccattgttgataagctggattcggattaccattaagcagagaacgtgggggagattgatctgtgagaagaatctcatcaagctcgtgaccaataaccgtgggaagaacttgggacttccaagcaaggaagttcgtgcgatcgagtttaatggtgagggaggaagtaagggaatgagaaaacggattccaagaaggggctgccggagcagagggagtagcaccaggatcggagacagtatctggggacgagttgtcgccagaagaagccattgacaaaggtcagtggctctgataccatgaaaactaagaagcagaggaaaagcagggacaaagaaacaagagatacacaaggaatgctttgaactcttacctcagaattgaggcttagcactttatttatagtagcagacttgtacaactttacataacagaattctgttatataacagaaagaaagcaagaaacaaaaactaactaactgttacattgaacacagccaaccaatttaactaatcttggttatcacttccataccaacttagctgcccggcgcagcagaaccaaccaatgggggcagcggacattttgagagcatggaagtgcgttgtgagcaccggtgtgtttgcgtaggcaagtaagttcaaagaccgtttgcggcacgtttgattgcagtgcgccatacaccaagcttgttttagagcggatgtcaagagtggaaaggaagagttctaccgaggacttagtcaagcagttacggtagcaatcctctttggtttcttacatgacagctttcgaagcaagctagccaagcaaggatagcgggaatgagaaagatacatctagaaggactgtattaggatgggccctag

SEQ ID NO: 231022 - DNA, 824 bp, Cannabis indica
gtttagatcggtaaagtctatacacaccccccatgtcccattcgatttaggcactagtaccggattggctagccattccgtataatatacatcctggatcaggccattagctagtagcttgtccacgtccttttctagagcctctgcctttattgaatcaagggggtgcgacttctgttgaacttgcggcatgtctggatcaacgttcaagacatgggtaattacatgcggacttatgccggtcatatctccttggcaccatgcaaaaaacatttgtggctacccttagtactttaactattttatctttctcctccggctctaggctctttcccaggcggaggatcatggtagggtcaaggtcacacactgatacctccgcgacgtcttccataggttctccaattttttcagatcccatacgaggatccaactcatcttcttctgccaattctggctcgatactctctcggaccatcaatattggtaaatgggccgcgacattataacattgcatagcctcaccctgattgcccctaacggtccccactccagcctcctgggtggggaattttaggcataagtgtcggatagacgtaattgcgccaaaatccaccagggccgaccgaccaaggattgcgttgtatgcggttgggcagtctaccaccacgaatgtgcagtacttgaaagtactatggggtgtgtccgggcataaggtgacgggcaacctcacttttcccatcgggataaacgtggttctattaaatcccgtgagctgggaactgcttggtgatagatccaggtccgtgaggcctattgctgtg

SEQ ID NO: 231023 - DNA, 1382 bp, Cannabis indica
tgttagaaatgggcattagagttataatttttcaattctatagattttattaaactctaggtgttttatttgtgttatatatgaattatgttattttttataattttagctcggcgacaacgaaaaatgcaatggatggctagtttgatcacatgggtaagtctagaaccttatttcttagtgggatgcatattggtggaaatagagtactgaggttgagcggggttgtggattttgaccattttacccattgtcttgaaaatgcctaagttataaaagaaagggcattttagtaatttgccacatgggtgatttggtggctaccctagatgttgacacctagcttctactttcagctaagattaatacaaataatcttattttcatttgaggaaaataaaggaaattaagaaagaaaaagccaaaaatcaaagaacctctctctttcccttctctctcttcgaactagctaggaaccaaggaattgctgctggtttttggtgtttccagcaagagttagaggagattttaaccaaggtaaatcctagaagcttttgtcttttgatttctttaggttctttttggtttggttatgaaattttgaaagttaggggctgttaggatttaaaggttgtgtaatttgatttctaagctgattttcagttgattctaggttctggttgctgattttagtgtattgtgttgaaattatacaagtttgagttttgaaactcaaacttaggtctttaatggcatgttttgattcagtgagtttttttgagttgtattggttggaatgtgttgtttatacgctgtttaggtactctggaaagtttggtggcaattggttgagttttgagcaagttggaggttctttggggaaacctggtgcaaaccggcttgccaagtcctacaaaactggttaaccagttttgacagattccccaaataactcattttctcaaatcttgctcatttcagtgccttagttgggtgtttccctgtttcataggatagtgtagttcctagtcataataacaaaaccttgagttataggtttgggtttcctagattagggttttggacatgtgatttacccggttttaatatataatgagggcattcatccagcacgagactttccattcaagtcggccaactcacttgaatatggaaagaaggtaagaactgtgtatagtgtgtaatatgaatatgcgaatgtatgtatatgttgagtgcatatgcatgcttatatgtttgttacactactaacacttgtacagttatggtacagagtgcattggtatagtgtatattgtaaaggagtacattatggtgataccagcacaagtacgggaaagtatagggtgtgtgtggtatat

SEQ ID NO: 231024 - DNA, 1563 bp, Cannabis indica
aatctccattactcaaattggaggaacccagctcgttactcctttgacttgcgacgtatggttgctagaacagggatgatagatttggggtcacaaggaggaaagttttacatggtttcaaaaaatgaaagctacaaatgggggatgcggattaaaaagagctcgtcttgatatagttttggcgtcgattgagtggagaatgctgtacccgaatgccattactcatgtgcttagtgcagctacctcagatcacagaccgattcttcttgatacaaacggaggaatcgattgcaaaaaatcacacattaagtatgagttaatgtggggaagagatcctaaatgctactgggttgtcaagaatgcctggaaggataaacttcatcaacaccctatgattaacttttatcgaaaactcaaaaatacaaaggaacttttggcgaggtggaataaagtaaagtttaagttaattggtaaccaagttagtgaggcgaaagcttctctgcagcagcttgaagatagagtgcatgtaaacggagaggaccttgcaaccgctagagacaaactaaacgaagccctcgcaagggaagagattttttagagataaaaatctcgggttaagttgctgcagcagggagacagatgcacgaaattcttcatggccaccactgtgattcgtcgtagacgaaactacattcagcaggtccggttggaggaccaagggtgggagaaaaatcttagtaatattgctaatctgttcattgcaagatccaacaacacatacactgatagaaaaacagcagctctcccgtctctaaactgcctggaggaatgttttatttctagtcaagataatgagcaattgaaggctttcccaactgaaagagaaattgaaaggtgcatccgctccatgggacaagaaagagcccctggacctgaaggaatgtccacggggttctatttgcagcactgggcgacagtcaaaaatgatgttatagatatggtcaaccacttctttagcaactctgagcttcccccgtgtataaataacaccaacatcgtgcttatcccaaaaaaagagtgccccagtggagtaaacgactataggccgatagctctctgtaatgttgcctataaatgcatctgaaaagttttagctctcaggctcagaagcatcttacccgacatcatctcccctgcccaaacagcttttgtaaagggacgactcatagcagaaaacaatgcggtagcaaaggaaatagtccattcaatgggaaagaaaaggggaaaaaatggatacatgatgattaaactggacatggagaaagcttacgacaagatgagctggatttttattgtggaagtccttcaaagactgaagtttgacgaaagatttgtaaggtgggtgaagaagtgtattgatgtcaagagaatgggactacttctgaatggttctatgcaaggagtgatttccccgacttgtggcttaaggcaaggagatcctttatctcccgccttgttcattattgcagcggatgttctttctcgactcataatggcaaagaa

SEQ ID NO: 231025 - DNA, 922 bp, Cannabis indica
cgtacaatgtggcagtctatctctacttgtttagtacactcatgatagacggggttttctgatatgtggatagcagctgtgttatcgcaaaacagagttgaaggcatggtgatggtgatgttgaaatctttgagaatggagtgtaaccatgttagctcacaagtggtgtttgccatggctcggtattcagcttcagcggaggatctcgacacggtttgctgctttttggacttccaagatatgagggatttgccaaggaatatgcaatagccagttatagaccttcgagtatcgaggcaggcgccccaatccgcatccgtgaaggcttgtaatgtaagattgttgttggaagatgcatggaagtagagtccttgacctggggttcctttaatgtattgaagtacacggatggcagcattcatatgaggttgtcgaggagcttggagatattgactaagtttgtttacggcgaagctgatgtcgggcctggtgatggtgagataaagtaatttgccaatgaggctgcggtattgtgttggattttccaagagtggaccattgtcttggctgagtttagtgttgggttccattggagtggaaacgggttttgtgccaagcgttccagtttcttgtaagagttgaactgtgaatggtctttgtgtaacagagataccattgttgtttcgggcaatctcaaggccgagaaagaaatggaggctgcctaaatctttaagtttgaattgagcatcaagtgttgaaatgaaattgtttaaggcagtcatgttgtttgttgcaactattatgtcatctacatagatgagtagtgcaaggaaggtgccagattgatgtttgatgaacaatgagtgatcattttgagattgtttgaagccttgattgataagggtattgctgagtttagcat

SEQ ID NO: 231026 - DNA, 2158 bp, Cannabis indica
ggcataaaacccaacactttaagcactggaattaacaattaacaaagcaataaagtgtgtaaattatgaactgaaactcaaatagaagactataactattctatttattggcaacagaaaaacagagtaatgagactcatcaagtgaataagaatgagatcaaaaacttaaaatgatctgaacgtaaactaatttatattttcatatgacagatatttagaccttgccagtttaaaatcttccatctttatgcaaatattcagtcacatgttgatggccctgcaataaaccaaatacaaatattcagtcacctgttggacccaatgtgattctctactttttttctacccgaaaatggggtaacatatgtgaatgttattactacctgaataggatcaacagtataaggtgctgtagtttcaagtggcttcattctcggaagtaacttcaacttgggccgctctgaaggttctgaatgtacaaaccatcttatattatatcgatgaaattttctagcattagaactaagtactcacaaccaaacaccataatatttatttaataataaaacatgtgagtaaagactcaaaactacaaatgaagtgactattctggaggttattaggatttcaataagaacttaagtgaaaatcacaaataaaagcgatttctcgaaggacaaaagaaatggtagaacaaaaggctcacagtgcctccagttgcagccttcgcagctctatcccacttatcttgctctcaccttgttggtgctggtctctatttggtcaccgtgctagctttaaactgacaatcaatatttttccataaaataagatacatttgaatatgcgcagctgtagcataaccaagttagacaatagcaactcacataggcattgtacctcagttgtaggctctacttgcagctctatctcatacttggtaggagttgtgagttctttactctgatcaacctccaaactgttaagaatgtccaaaaaatccatacaatacaagttaagaacactaaaaaatcaaaatcaaacattatatctcacgctttgtaggagttgtgaattctttactcagatcaacctccatactgttaagaatgtccagaaaatccatacaatacaagttaagaacactaaaatttcaaaatcaaacattatatctcacgcttggtaggagttgtgagttctttactcagatcaacctccatactgttaagaatgtccagaaaatccatacaatacaagttaagaacactaaaaaatcaaaatcaaacatacaaagatctaaaaacattcatgaatgacacttgaaactacaagttagaacaaacctgtcaagaggcatgactctgttaatgctgagaaacccagaaggcttttcctataatgcattcaacccatttgattacataaaatccattaatttcacaaatgaaaaaaaccaaataagcctcttttttcaaaatactctatttgataatattaggcaataaaatcaattcttcttgatcatttaacagttacaaaaaaagcaattaagagtaagagtaggagaccttaataggaggttgttgaggtggagaagcagagtaactgtaatccacaaatacttttgttaaagttggagatgagcttagattagatatttggaaatataaaaaccgaaactttaaactaaaagctcttcttctgaattactttacaaaatacagagtgacccagattggaaatagagagaaactcacaggtaggtcatcgacggcttttaagagaccatgcattctcttgaaatcaataggattaatggaggcaaccacaaccttgatgagaacctgatcttctctgggttgaggaactggtacgttgggggtcaagcttcaagatattgaaggagttgccataatcggagtaaatccaagctttggaataaataaaaatccataccatggagagtgaaatggaggagtcggtggaaggaagctttggttcgtcgggctggagtgagaatggaagggagatctgcgattaggagtgagaatggaagggaaggtgaagagtccatcggcagagtccatctgcgattgagagagattgtttttttttacattttttttataaagaataataagttaacggcgttaaaa

SEQ ID NO: 231027 - DNA, 706 bp, Cannabis indica
tctttgtcatgaggcgggtcatataagaggacaagtatctggctggccataagctatcttactgagactttaatagtcaaagggacttggagggcaaatgttatcccaatttttaccacatgacgtgacatatccatgtaggcaagattgatgctagtggagtacaatatgtcaataggtgaaccaagtcaccatgcacaacttatcaattgacaaagagtctgaatgctcaagcagaataaagatacattaaaatggccaactaagagggtctatctagaccacccttggccagccaaggaaaagtgtgtgccggccagacctaagcaaagggtaggctagccagcttttgtaataacaaccaaaaagaaatccgtaccattggtgtacttggaaccgtcaccttggacgaagcacgactcactctaagctgcgaaaccattccaacaacccattaaaatagggattcaacttcaaatatctacctattctttaggagcaattaagtggttattttgtataattaaatgtgagaagaagaggtaatatctcctcattttaagagatattagcttattttgaattagaccttttataagctctcacatatataaagagcattaggctaggctataaacctaagtcctatatgttctgagttctaactcttgaaaccctagagcactagtgttctctctctctctct

SEQ ID NO: 231028 - DNA, 983 bp, Cannabis indica
aattatagagaagaaaaggggaaagaaaaaaaaagagaagtgatgaattttgacaaataattaataaaaaaaataaataaataagaaaataatattaaatatgaataataaaataaaacaatgacacaattaaaaaaaaaataaactctacatagcatcctttttaatacatctacttgaatattattttaaatttttaactctttaattttatgaactaatttttttttttttaaaaaaaataagcgtatttaattttatgaacaatttataaagagatatttatgataataatacctaatcattgttaatgtttaattaaatacaactattttttataagagatattgaaatatttatatcaatgctggaccccactactaactagaaattgaaaggattgttttgtcattatatattaaataattaactattttcctctctaaatttttaacactattatgttgactcttaaaatatacaacttattaaaatatttctctaagatataacagtcatataatcacgtccattttgttaatttctgttactttaatcggtaaaaattagtatatttacctcttaaattttaaccgacactaaattttgcccccttttatcaaaaaactataatttcaaaaatttaattttctattaattttgaaaaaagtaaaaaaaaaaaaaactaataaaagttttaaattattcctaaaaaatattttaaaacttaatttattcataaacacatattttaaaaaatcaaaccaaaattatttaaaattcaatgaataacttaaacaaacaaatattttgtgaagagaataatcaagctgtgtttataaattcatatcctaaaatataaagaaaaataattagaaattcaacaaaaacatataattaaaaaaatatatagaaactaaattaaaaaaatatgggaaatttttattagtatacctaatgtacattttattaacataattgac

SEQ ID NO: 231029 - DNA, 1432 bp, Cannabis indica
aaaaaatatcaaaatcaaaacaaaccttcttcaaaaaaaaaaatcaaaacaaacctaaatctaatttcttcctctactgagttcaaaagaaaaaaaaaattgcttcgtctacctcagcaccgacggacgagagggagagccttctctcgagccttttttgaagaaccaccatgagcatcaaggaaccccaaaaagtttggttctccctttctttctcgacttctctctctctgttttctctgcgcagagccagagagcaactccgacagtttatggtcctcgagttctctccattccctctctcctctctttctcgagctctctctgctcagagccaaacggaacgactccgaacttcaccaccttgaaaacccctagatctatatctctgcctctctttctctctcccttgggatccttctctttgtttctctgtgcaaactgacatagatttggctaaggtcttggcggagatttgggcatcgacgggagtcatgggatctattgtacgaaaatttgaatctgaagaaatataaataattttagggaaatttaaagttttattttgtaattttgagatatgagtgcagttgatttggttttattctatattagatgtatatttttaccagattttatttctcaccattaagattctttttatgaattttggtatataaatttgaattttgttagtgcattttattttattttgctgagtaattaatgaaattttggagtctgtttttagttcttccatggtccgacgtgtgtctttggtttttggttttcctggggtgcgactggtgtgtgatccttctagggtagttttcttggggtgcaactggtgctactggtttggtgtttgttcctgggatgtggctttcctggagtgtatgactggtttggcattggtttgtcttactggtttgtcttactggtttgtctttatggtatatatattcattctttgttttttgggttgtcattaatcataaaggagtgattttttttttccatatacgggtttgtcattgtttgttggtgtgggataagtgctgggccgtggtagtcaaaaaaaattatgtttgatttaattaaatttttatatatttttatttttaatattttttatttcaaataatttttaatcaatttcaaataaaaaatataaattaaatgatttggactaatcaaaccatgatacctggacagtgacatggcacttaacagcaggtacctacaaaacttctaaaagtgtgacagaaggtatttttaccgccaaaattttaacttaggtattaaactgcaactgaaagataaacttgtgtatttatgctgcaaattactctttttttattatcactttttttaaaaaaaataataaaaaaagaaccaacactacgtataaatatcattttttaaaaaaaaa

SEQ ID NO: 231030 - DNA, 1144 bp, Cannabis indica
cttcatcaacaagcctgagttttacttgaatgcattcacatctcctcagccatttgatagtgatggaaacttgattgatgaaccctccaaagagaggttgaagcaagttcttctttctcttcaatcattcactttgcgtctcaaagcaaaatgaatatgaagccttattaataattgctgtgaaattatgaaactggtttgtcatttcaagttactatttgatttcacaacattttctctcatatttgtactattttgagatatatgctattaatatgaaaatactctgtttattattttcaatagcaaagaaactagaaatcaagaacaaaagaaaacataattaaaaaattgaaaacaaggtttggatgaacagtactttgcactagttttagtgagaaatgatctaacaaattccacatcagttcttactagaactaaaagaagaatgaaatgccactagggagttcagagttatctagattgtattagccaatttcaattctaagcaagtctttgtaatgatcaaacttgcctagagttacaaccttggttcccatatgaattgtcatacaccttttttattgatctgtccttgagattgagatacttttttctttatgaaaaagtatttgatgtctatgtgtttggttttgtcatgctacatggaattcttgcacaagatatttctgcatcccttgaatttaaacactcttttatggtctcagtagctgccataaattcagattctatagtagaaagagctgccacaaattgtaactgtatttttcaactaacatagtttccacatacaaaaatctgatatgcagatgttgatcttcgagtatccttatcccctcaaaatctgaatcattgaatcctcaacagtgatttttctatgttgatgtttgtacaccaaaccctcatttgttgttcctactacatatctcattaaccatttcattgcttgccaataatctttttctggatttgtcatatatctgctaaggcagttgatagcatgagccaaatcaggttttgaacataccattaaatatatgatcgatcctacagcagcagcataaggtatcttctccgtctctttttttcctttcatagtttcaggactctattagagttagaa

SEQ ID NO: 231031 - DNA, 1334 bp, Cannabis indica
actctcaggatatgcaacctgaagaaactgagggaaatctagagacacagcttgggatatgcggaacattagatggaaaccaccaaccctctctacaggttcatcaaaaagaaactcacgcaaacccgtatagggagaataagttgaatcaaaccttaagaggcagagcaaggtccgactgcattcacaacaggagtgatctacgaatgcatctgaacttgaagaagcctgatcttcgtcaacaactcggtccaaagcaaaaggattcactccatttgcgaatggacgagttgtagaataagtttagaagacatcgagtcacaaagcccataagacaactggggcatgatactcttggagaatttggttcggaagcccatggatgaaagagctaaaatgattccaaaagcctgcctaagcataagaaacacaacaaatatatccctctttatgctgaatataccaagctcaatgaaactcgggagaatatctacctcgctcatgtacaggaggtcgtttttagcgagccaaaacctatgaaacatgtgaggcgtaaaagggatccaactaaatagtgtgaatatcatggagatattggtcataacacggaagagtgtcgccagcagaaagatgagatagaaggtctcatatcgcaaggacactttcgacaatatgtaaaagggcaggatgatgtccgtgataagctccatctgcccaataactcgagcgaccagggattataaccctcccctgtaggaggaatggacacctcagttatctcgataaggagcaagtcacaagagtacaaggggcagttactgcggtaaagcaattttgtaagaaaaaaaatttgcgacgtgagtagactcactatgattgccatatcaagctgccacgaggaaagatggtcatcaaccagtagtagtcaaagacaaaaataggattacttcacctagaaccccaggatatgtcagggattgaccctggatattgaaacaattgagggagtatgtgagggattgaccctgaacatcaaaacccgttttatcaaaaccagatgctcctggaagattgataaaataaacgattgaactggggaagttcttatgagattaatgattgtaaatcacggtgctgatgaaatattttgaacttcagtggtgaataaaataatcatttctctcaaacaagtaattataaagcgtaaaccctttaaaattacttgaggggcatatatgtatgattaaccagaattaatctagaaatacatagtacaatgcaaacccaccatttcaaaaaaaaattagaaaactttttaaaaggtcctcgaccaa

SEQ ID NO: 231032 - DNA, 2723 bp, Cannabis indica
aatttgttaactgctattttagttttttatccaaatttttcccaataaatacacatctagtgggattgtttggatctaaaacaacttcttccagttctttaattggttttaactagtttttcttatcttgaattcaaggatccatatccttttctcgcttctcgctttcttttgttatgaccacattaactgatagttggttcttctattctaaagttctatacgatagcattcgcaagccaatagttggtcacctcgcactacacctactcctgctggtgtttgaaattttaaagataggtgttttattgaactaactgcccctagtccaattaatgtcgggcgacccatcagtatgttataaaatgatggtaggtcaacaaccaaaaaatctttcatcaacgttgtagataatggtggctcgcctatggttaataggagttcaataatgccttgactcgcgacactatctccagtaaatccacacaagttcaccatgcaaggttttaattttgcattttgcaaccccattttcctcagcgtatccttgtaaaggatattcactgagcttccattatccaccaacactttttttattcttttgttggcaagttgaattgtgataacgagaggatcgacgtgtggatacctcacgtgctttgcatcttctgccgagaatacaattggaggttcttcagttttgactttctttgatggttctggagcaaacactaatttttcgttcttaatttcattgtcatatctcttctgggcattactactctctctagcgagatgcgaccctctcgagataactagtatatcctttccttccacaggaggaggttgtaacctttggttgtctgggttattgggcagatttgggtggttttgttcattgccttgacgtcttacacattgccaaaaataacctcgtgagataaggctatctatctcgtctttcaactgtcagcattcttccaatgtatgccatatgttcttatgaaatcaacaaaattttgttgaatctcttttttgtctcgcatgtctcattggctcaggcttgcaaaatgcaactttatactcatttgcgagaaagatgttttctcaagtttcattttgctcggtataaatagagtaaattggtacatatttatcgtgcttcttctattttttttttcttatttttagatgattctcttgagtcatcttttctcttagtgttcgagccacttggtttatcagtctttgttgagatggtacttgttgtggtggtacttgtgctgggtttgcttcctaagccagtctttaacaatttcatctcattcctcgttcctctttctgtacaaacacttgaactctttcattgaacgcattgatatttctcactggatgaccctgtcaatcgtcccacaatttacctctagctgtcgaaaggttagtggtgaggtaatgaccgcgttttagaatatagattagtaagggcaattagcgtgaattattaatatttttttataattattcatgaatttatttaattgtgggtcccattattaaaagtgggctctagagttataatttctcaattccagagattttattaaattctagaagtattatttgtgttatacataaattatgctattttataatttttgctcggtgacgacgaaaaatgcgatggatggccatttgagtcacatgagtaagtctagaatcttttcttagtggaataaatattagagttacatagaataccgcgatcgagtggggttatggtttttgaccctcttaccccagactttaaattgtttagttttaaactaaaagggtattttagtaattttaaatggagattttggtggctgcatgggacagtggcagctggtcattttgtttgttttcagccaaaataattgagattaatcaatttaatttattcatttgaggaataaagaaaaaataaagaaaaattaaggaaaaacctctctttcatcatttcctttgctcgaccaccataagaccaagaggaaccagaaatcttcaccttttttcttctgaattcagcaggaatctaagtgtttccaagtggaggtaagcctagcaccataattctttagtttctttaagcttgaaatttagcttgaatatgcaattttgaagtataggggctgttagggtctgtatgagttgaggttcatttttatatgttcaatttgagtttaatttgagttcttgctgctgatttaggagtttggtgtggtggatgcacaagtttgagtttgaaaactcaatcttggttcatccattgcatgttttagttctgtgtaaatttctgaattttgttgcttggaatatgttgtgggaggtcaatataggtcaactggaagttttggtgaagtttggacacggtttgagcaggttttagattgtttggggaaacctggtacaaaccgattaactgggatgccaggtcctgtaaaaccggttaaccagttttggaacaggtttcccgagcaatccatttcgtcgattcttgtccatttcagagccttggttggggtcgggtttcctagattagggttttgggcatgttatttacccgattatatcatgtgattagggtatctatccagcgtgaaattctccgttcaggtcggccaactcacttaaattcggaaacgatgtaagaactgcataaaatatatataatatatgtatat

SEQ ID NO: 231033 - DNA, 577 bp, Cannabis indica
ttttttttttttgagaagaaatagtatgttatcataaaacaaaagatagttcgtttacaacaacatcgtaaatcggaggagggatattactcatccaaaagcaagcttcatccaaccttaaagcatatctaggtagcctatgggcagccatgttagcattacgcttgacatgactaataaatacattagggagagaggatagaagacaaaaaatgtctacaattaagtctttgaaagaagaaatagcaggacaagaaccaattaaagcattagaaacaatgagcgcatctgtttcgatgtgagtaattggcactttcaattgtaagatccaattgatgctatgaaagattgttttggcttccatttcatgggaagcaaagctaccaataactggttttgacatggcagcaagaacaacaccagctgagtcacggaccaatgctccaactccaataatgtggtgttgcgaatccaaggcagcatcaatgttaagttttaaagatgttgtgggtggaggttgccacggtgcaggaggaatgactagttgatgaggctggtgagacgtagttcattgtct

SEQ ID NO: 231034 - DNA, 1987 bp, Cannabis indica
gttttaagtttaaaaattgtttttaaattattgaaattaaaaattttctaaatattcactcacttttttattttgaaattttcaactaattacaaatttaatatttaaattcataaacattaaatcacactataattaatcacatttttaaaaacaatttattacatataaaatttaatttttgtttccaaattatttttttagaaaatacagttttccaaatcacattgcaaaagaattttttaaaattaaaacatctttaattttttttttatattttattaactaaagagtaactaaaagacgaacaaaatttatttcaccaattactttctgaagttattataaagtaatttattatttatttaaaagttactataattttgataagtaaccaactgtgtttttttttttttggtaataagaagaggatatattattagcactatgaacaaaattacaacctaactcttcaacaccaatacgaatacaaacccaccctcaatcaaaacaattgattaaaccaattaatgtctataccactttttccatagacccctgtatacatcaatctgatatatacgtcaaatttagtattctgtgtagtatgatggactatccacactttcctttcccaaaaagccacatttctaactcttcaaattgtgtaaatcacagccatgtatgcacctttcttgagcttgctcaaccggcttctcttaacccacagaaggagaccttctattgacaactgcctggtatggatgttcagccaatttgtgatgaaatccaaacacaacctgttgtaagaacaagcaaagagcagatgagtatgatcttcatcatcctgaccacacaaaaagcacctggagtcttccatggttattccaaaatgaattagtctgcctttcgttttgagatgctgaagcaaacgatcagccaaacaaaaaaatctatgctttggaacacagtttttattccacaactcagcaaagcaaaatttgtttccttcagcaaaagagatatcgtgataaacaccaccaatggaataatggctcttttctaactctgcttttgaaatctgcattaaaagtctgtcctttatcttgacaatttgctttcagtaccagctactatcattgtgaatactcccattaatcttggtcttttatgtagaaggagtgcacccatttaatccaaaggctatctttttaatagctatagccacacatgttttcctatgggccacattccattgaattatcatgaatttttttcccagttattttaagatatattaatagattaatttatataaaaaaaaatatctataaaatgctaacaaaatcaaaatttaaaatggatcaaccaaaaactatatccataaataatgttatttttcataacaaatggtatcttttgttattaccatgagtgcaaacaataatccttacaaaattttacttccatacatgattaggtacaaccactcccattttggaagtaaaaaattatcacaaatattatcgaggaaaaggttcagtacttgaagcttcattaatagattcgccttttgaatgatttgatgatttagtgttgttacgcataaagaatgccggctcagagggcagtggaagagaaagagagttactgtttagcatgagcacaatagcattcatagttggtcgattttctatattttcttggacacacaatagtcctatatgaatgcatctcattacatcagatgctgacccaactctcattaatggatcaaccatttttgaagtgtttccttctctccatattctccacgtctgcacaccaaaaataatataaataatgttatattcctaataatgatattatagattaatttgtgtacaactcttgagtactcttattataaattgtacttacgtagcttaaaaggtcttctacatactcgccttgacggaaagaactatttttctgaccgcttactatt

SEQ ID NO: 231035 - DNA, 934 bp, Cannabis indica
gtttactcaaatatctttacgttatgttaaagttcttcaatttaatttagactatatgtatttttagcttaaaatatgcataatatatttttatatatatatatatatttttaaatttaattatttaaatactagaaactaacaataataattatatatataaaaaaaaaaagaagtgaaggtcgatttgggccggttaaactatttcttatttttaattggacaagttacgatcaaatatttacaactcgatattcatattaggttggtaaaaatatactataatttgactaaatcggccgacgtacatacaattatatatttaatggtgtcatgttgtgtactagttggtatctaaataaaataataataaaaaaagacttctaattagtatctaactatttagattaattaataattttgttaatttctaattggtatctgataacatagaacgagtaagaaaaattgactacaaactccatattatgttcaggataccaattgtagagtaacctcttgaatggtcatggctaagtgacctaggccaagcatggttgagtggtattctcccttggcttggctgagtgacttcaaggtcatcttggtcgagtgacctcttgaatggtcatgggcgagtgacttagggccaagcatgactgagtgaccctcttcaattgcttggtcatcaagtgacttcaaggtcatcttggtcgaatggccccgagatacatgcgtcgacttggttatttctcaagcaactcttaaagttgatttctttcctttctcaaaactaatcgttgactaatcttacgaataagccttattaattttcgggtttgacaattggtacaatttaatactgtgttctacatattttaatttaataaataatacaagaaattactaatcactcacaacgcactacatcagt

SEQ ID NO: 231036 - DNA, 679 bp, Cannabis indica
gctctcttcgtcggctggaactgagaccttctccaacgaagaatactttgaaaatttgtaatcacaagtgtactcatccgaggtaagaaggccaatactctttaggtttgctttgttaagaagaagctcaaccgattgcagtctgaacagatgacccagtagaattttacgtcgctcggccagctgaggagtaggaattggccttttcgataccgctgtcaacatgataaataaaataagtcagcaagtttgaggctacaaatatgaaataacttaaaaccaagtttttgagacaaaatttacttacgtattatgtgaaatgcagttgtgttgattgggaaaagaccagttgtctagaagaaatcctctttaaaatttgtcttgttttgtaatcccatgatggtcctacgatcatttgtgtgggtcctgaggtaatagaagcccctacacaacgcttcctcataggaactgccttaattgaataaaaataaaatatttccaggggagtgtgacactcccatcctaaaatgaattataaaaccttcaaacttgcaagaattacagaattcttaaagtactctctaagggggagaactgctccagctctgttgtgctcgaggctccaagcgtctatcccaactgagctactagtactggcttcaccacactcctcgcgaat

SEQ ID NO: 231037 - DNA, 825 bp, Cannabis indica
ccagaattgcttagatctctgcttccagtagagttcctgctgagcaaggatctcaaaatagttgtttttctctgttgcatactcctgatagcaattgtcaagaccagagtgtttcaaggcagccattttatttttggatttagcaatacgtttcttaaagttaccagtgagaccttttccccaacttgccaattgagagctacatagtttaattttctcaataagagaaagatgactattattgtcccaacaagctttaacaatctgtgcacacataggctcacggcaccaagaattttcaaaacgaaaatgatatgtattgctactataagaacaatcatgaaattccaaaaaaattggtgtgtgatccgaagaggagatagggaggtttgataaagttacctcatggaaagtatcaagccaaagctgggaaactaaggctcggtcaagccttatttccaccaaattgcctgagttacgtccacgttcccaagtgtagggatgaccgtgaagatccaagtcatgtaaggagcactcgtgaagcaccgactggaacccctcaataagtgcattcgggtacggacggcctccattcttctcactttgattagcaatgttgttgaagtcaccaattaaacaccatgggagaggggaatcagcaaggagggtacgaatgagagcccacgtccgagatcggagactacggtctggctcgccgtaaaaaccagtcaggcgccaagtagtcgtgcctgggactgtgatttcaaaatccacgtgatgctttgagtaaccaattaaccgggcttcttcatcaattttccaaaa

SEQ ID NO: 231038 - DNA, 779 bp, Cannabis indica
ttccattcaggttgaccggtacacttgaatcataaaatgaggtaagattagtataagaatatatatatgtatatgtgtatgtatgtaaattacacgttgttcatgtgattcagatactaccaacactagtatggtagcggtacaaagtgcattggcacaatatatgatgttcaaagggtatgatatggtgttaccatactagtatggtcaagtacgtagtgcatgtggtacaacagtcagtggtactcaaagtactatttgtccctaccaacactagtacgggacaagtactaagtgcatgtggtacagaggtcgtatttttattaagaacgttcttgatcatctgttaagccttgtagataggtgtatgggtacctaaatacaagtcggtaatatgttatgtgttatatgctttttttacagagtttgtcgattcacatattttatttacatgtgtaggtaaatgaaaggctaaggctgagtaccagtgagtcttgagcttggggatgattgtacatgtcaagatggttagccctagagtgttcggtctaaggacaacttgggttttattttgtagtcgcagtgcgatatgtttataaaatatattttgaatatgaatgtaattttaaaaatgggatctcagctttccgtagggatatatatatatatatgtttacaaaagtttaaagtttaattaaaaagttcaaatttgacacgattttagagaagtcctttgattagtaaaggtttgcacagtaattagaaagttactgtagcgt

SEQ ID NO: 231039 - DNA, 1376 bp, Cannabis indica
ttgtcaagaagagtgtcatctgaagtaacatgatgggtggctcctgtgtcagcgaaccattgacaatcatcaccaaaatcttgcaccatagttgtagcataagccaaaggatcacaatcaaattcttgttctgttaagtaagcacggggattgtgtggattcggcttgggaacttgccaagatttatcaaatctataatggcatacaggggcagtatgtccactcttcaaacagacttggcaaacaactcgattttgaggaggtctgtagtaggagcgaccacgaccgtgagtggaattcgaaccatctgtattaccagatttggtttgggaaaatggtcgaacacctccagatctcccagaaccaaaagccagattagcttgaattcgcatggaaagatcatccatttgatgatgatgttcaagcctactttcgtgagaaaagagaagagcttgaacttcttcaatcgtgagattgtcacttctggatgtaataccagaaaccaccgaatcaaactcgggtcctagtccattcagaacttgaaggactaaatcttgatcttggacaggtgaacctgccactgttagagcatctgaaatagattggaccttttcaatgtatagaaatggaaagattacctttatgaacacgagagaattggccttttaattgaagcaatcttgctttggtttggctcgaaaatttctgctccagggcacgccaaacagaagaggaggaagtgtaggtggcaaccgaagcaagaatgacttcagtcattgatgatcttaaccaagaaaggagtaactggtccttctttttccattgagagtactgaggattgggatcaccatttacaagattcttgggtggtggttgaccagtaaacaagatttcatcaagttcatgaccaattacagttggtatgacttgagatttccatgaaagataattgtttctatcgagcttgatcgtgagtgtggaagtaagtgagtgcgagaacggattccatgaagtgggttgagtagcagcagtagctccaatggtggcaccaggatcagaggtagaagacgacattgagaaatgtcacagtagcgattgataccatgtaaagtgatgaaaactttgctggtgcaaagcaccaagaacttagaacaaacctgaagagttctttactggtgcagagcaccaagaacagaacagagattttgtgagaaaagagagtaatgatgtagtaaaaccacaccctctcaacatgacaaagtctttattatataggcactcaaagttgttacaacaatacagaaccaaacagaaaaagaggctaacaactttaacagacacaaaataacggtattaactaccgtgactgtttacat

SEQ ID NO: 231040 - DNA, 987 bp, Cannabis indica
tatgtcaaagattgattgttttcatctttaataattaattcaaatgtggtcttgatcaaaattataatttgaattaacattaacaagttaacaattcaattgacatggtttatacaatttggtaattggttttgtgaaatccattgctgcaagatcaagttggatctgcagtgtgtgttgtcttgtttagtttagtgagtaatgtaggaatccaagaatgaattctaacagtagtattagtgctagaaacttcaagatttgaagatcattgactcaagaatgaattctaacagtagtattagtgctagaacaaattcaacaaaaatctttgacaaataagattttcttgaaagaaataatctttggattcaaggtgagtccctcaaagaccttgcaccacaattttgatgagttcttaagaaagcacataaaacttgcaaattcaggagagaatgaggcccttagtgatgagaattaagccataataatcttgaattcatgctagactcatatagagaggtcaaaacttcaatcaagtatggaaaaacctctatcacacttgagaaagtcatctcagctctcaaaaccaaaggcttagaaataaaggatgagaagaatggttctagtagtggtgagttacattcttaccaaggcagaaacaaatacaagaaaccaagccaaaacaaaggaaggagtcctggaaggggtcaaggaaaggggtataataagggagagggaaatcacaagctggtggtcttaaagattcaaatggatgctttcattgtggaaaactagggcacatgaagaaggattgctatctcttgaccaaagggaacaagggaagatcaagtagtcaagactcaaacgtatctaattacaacaatcatcataagaaaaaaattgaacaacaagtaaatttcagtgatgattatgacagtggggaagtatatgttgttgcaaccaatttcaaggatgattggatccttg

SEQ ID NO: 231041 - DNA, 1553 bp, Cannabis indica
aagcaaattgttaaaaagtgcaagggtcttcctttggctgtaaagtctatggctggacttttacgatctatgccaactcatgaagaatggaggcatgtactgcaaagtgatatctgggagttgccaaatcgccttaccatgggaattgttccagctttatggttgagctaccacttcttaccttcttatttgaaaccatgtttttctcatctttcgatcttccccaaagattatgaatttcaaaaagatgacaaagataaaataattttaatttggatggcagaaggtcttttgcaacctcagacagggaaaagaattgaagatgttggggaagagtactggaatgctttaatatcaagatcgttttttcaaagaaaaacaatatggggtatttctatgcatgatcttctgcatgatttagctatgtatgtatcaggtcaaagctgttttatttatgatagttgtaacgactctcccaagctaattaccagtaggaagattcgccatctatcatacatgaaagacttgaaaggtacaatagaatttgacaacttctctagagtgaagcatttgcgtagcgtgttggctttaccattgcgacatatacgacaatcacacgagacccaattaaagcttgaaatggtgctaaaggatggaggatgcctaagaactctttctttgtcacaatcgtgtatcacaaacttacctgattcaatcggcaatttaaaacaactcaggtatttggatgtctctgacacaaaaattaaggaattacctctttcaatttgtgagttgtacaatttggaaacactcttattggcaagttgtttggtcgaacaattgccaaccaacttttccaaattattcaacttgcgtcatcttgtaactagatggacaaatttaaaagagatgccaccaaatatttgcaatatgacaaatcttcagaggttaagtgattttgttgtgtgtaaaagtgatgcatcgaggatcaaagagttgggcaagttggagaatctgcgtggcagcttacgtatttcaggccttagctgtgttaatgaagtgagtgatgtcttcgaaggcgaactgaagaacaaaaagtatctcaatgagctcattcttgattggagtggtatggcagataactcaacaaaggaaagagaagtacttaatgcactccaaccacatgtaaatttgaagaaactcgaaatacacgggtacaaaggcacaaatttgccagattgggtaacagatccatcgtattgtaacttgaaaaaagtttatctacactgtggaaattgttgcttgtcgttgttatcatttcgacagctaagtacactgagatattttcgtgttttctgtcttggtgtgcttgatgaatcccgtagtatttcttcaaataaaccctttccattcttatcaacactgtggcttcatggaatagatatgttggattggtcatttattaatacaagtgaccaaagatgtgagattttcccttgtttaaaggaatttgatttagaaagatgtgggaagctaaatgtggcattacctgg

SEQ ID NO: 231042 - DNA, 2129 bp, Cannabis indica
aagaaagagacacgagataacaagaactcatacgttttgaacttagcatataacttgtgatctcgtaaccgctacaatactgatctgagatgtagttcatgttcctcttatgacgcagaataaacgagaatgtcatcaatagacacgatcacacatctatctaggtaatccttaaactcttgattcataaggtccatgaatgcacttgggcattggtgagtccaaatgacatcaccaaaaattcataatgtccatactgagtacagaacacagttttcaggatatcttccactcgaattctcagttgatggtaacctgagtgaaggttgatcttggaaaagaccatcttacccttcaattgatcatataggtcatcaatttgtggtagaggatacttgtttagctctcgataatcaatacacattcacagtgacccatctttcttctttacaaatatactggagcaccccaaggagagtaacttggtctaatcaaccccagattcagtaactcctggagttggatctttagttctttcaatcttgctggagccatttgatgcggtgcttttgatacttgctccgctctcgaaactaagtcaatcacaaattcaatctcttaggaaggtggcaatcccagtagatcttcaggaaaaacatcaaggaacttgtacaccaatcttgtattctcaggttcagatgtcactggtttgctggtattcaccgcattgactaggaatcccagacaacctccgcacatcagatctatagcttttaaaagtgttatccttagtatgcgcgtccgctgaatcttacccacaaacactgctggattagcactacagggctcaaacaccaccatcttctgtttgcagtcgatcgttggccaaagacaaaaaaatccattcccaagattatgtcaaaatcaaacaattgtaactcaattagattggcggttaattcacaaccgtcaatatataaagacaaggaccaaatccacctagtggatactattatgtctcccaaagttaacaaagtaccaaaccccaaagcatacacatcacatggcttatgaaaactttctactaccctacacgacacataagagtgagtagctctcaaatcaacaacacagtgtaagaacaacattttatagataactgacctgtcaccactaacggactagcatccacatcagcctgagtcatggtaaatagtcatcccggattctgattagtattcttcttcggctcttttttcttggtttgaggacaatatttggtaaagtggcccaccatgccatacaaaaaaacaagccttggccggacattcaccttgatggtgtttcttgcatttcggacactcaagagtatgatttgaatgaagacccgcgaccttgacagccacctctatttcctcaaaactttctgttaccccctaatattctggaagaatcgactttccgtttatgatcagggttaccactgtcagtccccatactaatgttaccactcacaggaggattcgatgtcgtggcagcatcctttgcagtcttctccttaatcacaagttgctcaacctcctcagcaatcaaggctagttcaaccactttcttatacaaagtatcatgagcagtggtatcttcaagtcccaactgattgtgtcattcaatcctctcacatacttttgttttttggtgagatctataggcaccaaatcaccaccaaatttggatagtcgattaaattctaaagtgtatgcggccacaatcatttttccctgagtcagtttcacaaagtcctccataaatgacattctcacgacgatgttataaaacttttcctcaaataaactcttaaactcatcctaagtcatcacactaaggtctcgagtctatctcgcaatatcccaccagacgcgggcatgatcttgtaacataaaggcagcacaattcactctctctgttccaatcacccccatattataaaggatgtaggtgatagtactcatccatttcttaactttaaatatatcaataactcccaaaaacgttggaggttgcagctttacaaagcgctcaaacactgaatctctgtacgataatatgaacccacggttacccaccactgg

SEQ ID NO: 231043 - DNA, 1171 bp, Cannabis indica
gattagtgtaccgtccaagatttctttgcgagtaatctcttcaaaaaagacaagtcttgaaaagggtctggtcgggtcgtcaacatgtcggccatgataaatgacaccaggaatgtcggacaaggctaaataagccataatttcttcctcaagcaacttttacaaatatctctaactggttcctacagatacggatttgaatgttttacccgatattgtaggaccttcaacagatcgtaactgcaccctagaatatagggatatttacttcctagttagtccttttacggagctaaatgtaacaacttttccctataaatagtgaatgaattcacaagggaagggacctgaaatcataatcttgcatcgaagagcacttctctgaaatatattctatgtaaacatcttaagagttgtaggtggaattcactttgtcttccttagtgataagcggggtaatatctcaatattaatacaactaaaaggagagtaggtcattacccatatataaagaggccgaacctctatatttcctgatgttcttcctatttatttattatttctaactctttattggtgattaactagcataatttagacttcgagttagttggtaatttttccagtcaatagtttggtgctttcattgagacattcaaaatctcacgaagatctcatctcttttcacgtaataatcaccatggctctaacaaggagaagtgtgtccattgaaccccaagatctgatggctatggatcccaatatccaagttccatccactattgataaattgcccaaccttgcgcgaccacctcaagtaaactcatctacagggttttgacctgaaggcctgacaaatgatgagcaggttccaatcaatgttgaatgcctgcccatagtaccacgggggctcttttaacaagagctacccccaggtatatgctggcaaaaccgggcctagagttggtcagcctagtgtcaacgagcccaatataaacgtgggggatgattcagagctagagaaactaagagaggtcatagggcaagtccaagatcatacgaatatcctctatcatgatcaagaagaaacacgcggtgctgttagtgatgctttagcccaatagagacacgaattccaagaatggataatggatcgacaggctgtgatcct

SEQ ID NO: 231044 - DNA, 2358 bp, Cannabis indica
ttggtaatcctacaatgatcctatgatcatttgtatgagtcccaagatagtaaaaaaaccttgacacaatgatacctcggaggaatgccttaacagaataaagataaacaatatcttggggagtaggacactcccatcctaaaatatgataccgaatctgtagacttgcaaggattctgtaggaaataggaaccaattggaaaggagccattccaagatggttgatgaactctttaaaataatctctcagggggagaatttctccagccctgatatgcttgaagctccaagtgcctatcccaaccgagctactagtactggcttcatcactggcctccctacgttcctcgtggataagtcgttctggtggataaaaactgaattcaccaggtgcaacaaatctatcacaacaccctcgcttttggttgatgccacaagtccttaaaacaccaccaacatagtccctcatagctcttgttcttgactcaatgagctcagactcgaaagtgacattaggatcttggggagtctttgacttatgggggttggaagacataatttgaaaatccaggtcacctggtgaaacagcaattgtgactctaggtaaaaacaagggcttagccaaaggaataaaagatcacgacaaaggtccaggccaggctgcatctcgcaagtaatgatgtttacccttagttatttcttgtaggaaatgcctataacgactagcaacttcatcctgattgagttttattaaatggtccctaattgttgcatcgtttatctccattttggacggaggttttagaatttttggtttgtatgggtgagctaactccttaagatattctatttctaaggactctgaagaataaacttcagaaccagattgggagaactctacaaaaagagcaatcccaattactagaagaaatttattaaaccagaaacttataaatacgataaacctaaattttttactctgtctaagcccttaaaattacccaaaaaaataaatcaaaattactaaaaccaaatggaacaagaatgatacaattaacagaataaggatcataacccatgaaaatagaaaagatcagagaaaagggggtgaatcacttaccgttcgaaattgaatttttgtacgacaaaaagctctgaaattgaggacggggtgaaggccgcgaatttttttttgaattcttgaggtcgaacagtatatccaaatagatgcgcaagaagtatgccaatgacaaggagggcatggaaagccttgccaaatcaaaatgggctttttcgtaggaaatctcaaagtttttgttttaaatgtaaaagtggtagaaaaacggttcctttttcagttttataccttgagtttgatcaccgttagattaaaagaatagagatccaatgaataggaacaagagagaattagaaaagactggtcattaaatgctaatgatgtgccttaaaactatgaaccgccaaattcaaaagcatgcaatttttcaaattgagttaagacgaatatactctttgtaatcatttaaaaagtacttttgtttaaaaaaacattttaaaaaaacttttaaggggcaattgttatacataaaatttggctatactttagagagtgacacgtgtcaatcaagtggaatatgaactaacagatataataacgattatatcattaaatgtaaaatagaataactcattaaatatataattaatagagtatattcataactcgctgactgtatagttttaggcgagataaggatacacaaactattaattcctatattgatgaaaaaccatcttcccttagagggcacaatccctagaaaactacgagtaatgtataacaagacatccatctccctacatataagaaaatattgacgagacaaattggctattgaaacacttagtgtataatccacattataataactaagtttaacaacttggaaacatgctggacatgattgtctagtctgcgaggttttatggtcgaagagcagtttttaagtttgctcagtacactagagcgcattccgttgctggaaggcatataattaaaccaagttattatttggtggtcatctatatgcaaagggagatggctcgacccacgtcagtgctaactgccttgaagataggaatgataagtcttagtgcagttatcaattgttatattcacgtgtttaaatagaacgtgatcaaagcccacattttatgataaacaattaggtaattcaaatttaaatgtaaataactgccaatctatattcctataaatacgtgtagattctacagaaaaagggcgaaaaatcttggagagagagagattactaattg

SEQ ID NO: 231045 - DNA, 1132 bp, Cannabis indica
aagtccaaggaaggtgaatttaacatcgttgaagcaaaacccaactctctttcttcttctagtaagaaaatgaagtggagcagtaaggacaacagtaatgtcaagcccaaagtcaaggagtcacccaaggccaagaagaacaaagctacccctaagtccaaagacaagaagggtaaaggcgagtgtttccattatggcgtaatgggacattagaagaaaaactgtaacaagtatctctccgagcttaagaaaggtaaatatactttattcattcttgaagctaaattagtagaagattataaatccttatggattgttgattttggtgccactaatcatatttgttcttcgatacagatacttgaattgtcaagggaactagccgatgggaaagtgactatgcgcgtgggtaatggagcacaagtgtctgccaagggtgttgacagagtctgtctgaaattcgataataaatttttgttattgaacaatgtttatttcattcgtaaatgtaccaggattatttatttatcttttttttcatgaacaattttttgacattggttttattaataatcaggttattatttctaagaatggtatgcctatttgttctgtaaaatagagtaacagactttacgtgctcaagccaggtgagcaattaattttaaataacgaattgtttaaagtagcattgcctcaatcaaataagaggcaaaaggtttctgatgatgatgaagtgtatctatggcatctatgcttaggccatattggcctagacaagataaaccggttaacaaaggatggtcctttgagagaactaaaagttagaactcttccggtatgcgagtcttatctagaaggcaagatggcaaaaagatctttttctacaaaaggaaatagatcgctaaagaacaacttgaatttatacactttaatgtatgcggacctattaatattcaagctcaaggaggttatgaatactttgtcacttttattgaagattattctagatacgatcatacttaccttgtaatgaccgctctagtttatgaattagtaaaggaaattagcactaatttttattattttattattatttgtgaattaaattttaatgtggaccccaatattt

SEQ ID NO: 231046 - DNA, 1193 bp, Cannabis indica
tttagcaaccaagaatcccaatttcacaatctaaaacatacacaaagcaatatctactaactataaacacaaccatgactacaacatcaaaatcaactcaattctcacaagcatgcaactcaagaacacaattcacggcttcacatatatttccacttcacaattacaacaactaaattcaagataaaagtggtagaaacactacctcaagttcttccataatccaagcaccaacaattcaaaaatctcaagcttgaatcaagatcaatttctcaaaaattaacagattaaagggatgagtttagagaaatagagagggttggttcttgggctcaacaacaagaaaaataagtcttttctatttgccaaaaatcacattttttgcaaataatacaaatgatcaaaaagaccaaaatgcccctaaggccatataccacatatacatgcattcaagggcaataaagtcattttcatcgcataaaatattcaaataaatttagattattcatatatcaataacatgccaatacaaaattctaataatgtatttcggccccgaacccaattcggcctgaaatacctgattgtgactataccgcgcgcgacttgtcaaaaaatacctaaaaatgaacaaaacaagtatattatataataatatagtccataagcacgtaattaaattaaatttacattttacccttcttgggtcaaaattacaaaagtgcccctgactcaccaacgggtcttaacatgtcattcatcacattaattcacctataataaattatataataatataatctcaaataatacatattcaactagttaggattcactaatccatttccttaatcttaaattattacagctatgatcactgaaaggacttctcaggatgttgataccatggccgtagagctaaacaaagtccatgccgagaacagagtacaagccgagattttagagatcaaagtccaggcaaattctcaaatagatgatataaaaaaaagcatcctaaggagtaccgccaacaatcctttgaagaggtcgacaagaagtacaacacgatgtatgaaaataaatacaatgagtatgtggaccccgtcgactaatctgaccagaaaatatatcggaggcttaaagctcaagtgaagtatcttactaaaacatccaacgattttacacaggaaaaa

SEQ ID NO: 231047 - DNA, 2287 bp, Cannabis indica
ccaacaagaggcttgagacaaggttgtcctttgtcaccgtatctattcttaatttgcgcagaaggtctatctcggctccttcatcatgaggaagaacttggtaatttacatggtttcaagctcacacggcatgcacctaccatttctcatttacttttcgccgatgatagtcttcttttttgcaaagctgatgagagttcgtgccttgctattaagagggtgttggacatttatcatagagcttctggacaagtactcaatcccgacaagtctgttttatccttttctccgaatacaactttggctgcccaagttttctttcatcgacatctttcaatgccaattagagagtgtcatgaaaagtatcttggtttgccatcttatgcgggacgagataaaaaagagcttttcagtaacataaaggaacggatatggaaattgatgaactcatggagtgaaaagattttttctgctggtggtcgcgaagtgctgcttaaagccgtggtccaatcaattcccacctacgctatgagttgttttcggctgccaggatacttttgtaaacaacttgagagtatgatggctaacttctggtggggtatgaatgaaaatggatcaaaaatacattggcgatcatggaatctgctttgcaaaacaaagggtgaaggtggaatgggttttcggtcttttatacactttaatcaagccttacttgctaaacaagcatggagacttgtggagaaccctcactcacttctcgggcaacttcttaaaagcagatactaccctcacaactccttcttagatgcaagtcttggccattctccatcattaacttggcaaggaattcggtggggtcgagaactattgatcaaagggctgagatggaaagtaggagagggacgatccataagatgcaattcggatccttggcttcctggccattcctcttttcgtccaacttgttatactgggtctcctaatggtgtggttgctaactacattacagaagaacgagaatggcacatctccatgttgcagcaagatttctgcccacttgatgttgagaaaatccttactattcccttgagctacttcggcacacaagacaaactggtttggcatcatcataactcaggggtctataacgttcaaagtggatatcattttgcatctcagcttggagaagaagacctttcttctagctcccacagatcagcggcatggtggaagttcttttggtccttacaaatacctcaaaaggttaagatctttgcttggcgtgtcatccatgatgctcttccagtggctacttctctagtgcgacgcaaagtcattacagattccacatgctctctttgtaaaagtgcttgggaaacaatggggcatgctcttttcagttgcaaatacgccaaggcagtttggaaagcacaaaaactcaattttaattggcaggcgtgtacagcaatgagaaatggcgactatttgttacacctctcatcactttataacaaatctgagatggaacaattattttgtacactttgggctatttggaatgagcgaaacaaggtggttcatgggagtaaagcaagagttgcgactgatctagccatttttgctactgtttttttgcagaattttcgcaatgctcaacacaagcaccctccagtagctgctgtgcccactttttcacaccagtcgggcccttctgtaacagctttttcgcaccagcagcaccattctgtagcagctctccacccgtggtcccctccagctccaaatgtcctcaaactcaacatagatgcagcagttcgttcaccttctaatactactggtgttggggctgttctcagagataatcatggacatgttgttgctgctttagccatgccattcatcggcaacttcaaatcacatgaaatggaggcaaaagcactttttcacagtctcaattgggctcttcaacaacaattacaagtcaaccacattgagacggatgcacttatggttgtgaatgctttgcaagctcccttcaatccaaactcttctttttcagatttaatattagatgttgttagtcttttatcctttttccctaacgttgttgtctctcatgtcaaacgttcggcaaatgaagcggctcatggtcttgctaaatttgctttaggggtggatgaggcttgtacttggttggagattatccctcctccgatttactctgttattgtaaacgaatctttatttgtttaataatagcaagtattttccctcaaaaaaaaaagtt

SEQ ID NO: 231048 - DNA, 4001 bp, Cannabis indica
tacacttcttctacttaataataatttcagtagccaatagccaaatttatagtataatactataattattatataaatattaattaaataatcaataatgtatatataaaatataaattataaaattatataacattaacaaaagtcaagaacggagaaacatatctcggcagttagcgagcaatgagtaggcagacacgggcggacaccagtggggccaccgacgaacacgggcggtcaaattttggaaaaacaaaagaggacagacgaggctttggatgttagggatgaggctcaccggattgagccggccgctgggataagaccccggtggagaagaagcagccaccattgctgagagtttctttaattcttcgaaggctttttggtcgaatgaatattgattagttatagtgtacagtacagtgaaagtgcatatgattattttttaattttaagttttaaatgttaataattaacattattattttttaatgtaataaaaaattatttttaatgttttatttactattgttcgggttacgggttagaacccaactaaaaaagtatacatttttaaaacccgaacccgaaatccgtgtgaggtattttcgggttggacccgacccgaccacacgagttttcaatttttcaatttttttggcagcagaccggggcgggtggtccggtttttcgggtttgcatgtctaaatgtttagccctagttaaagggttggacactttgaaaaatgcttcttgtttctatgaattccttgcaagttgtgtggatgtcctttcaaagtaggatatggaaaattttcttatgttggagaatttggtatcatcgcaatacttttgttcatgacaagaagattctatctgatgagttggttagtcaatgggatttgagttttctttggcgttatcaagatgctcaatctaatttggatctagatgctcatatgaagccgacaggagactgtggttgggctctctaatggtttgattgagactttgaggttaggtgatttcaatctatttgcggatgcgggtatcaatgaggacaataattgtatgggtctcgaggcgacgatgatagactgtaacaggctggttttgtgttcttcaagtgatccattggcaacctcctttcatcctcatgtggcggaggcatcaactatcttaagtgggttgctactgtgtcgtcgtttggggtacaactccattactactttctcaaattgtcttcgtcttatccaagctattaataacaataataaatatcaaaccgagtttgttattattgttcatgatattttatatgtttggttttctttttcttttatttctcttgctcattgtaaaaagactcaaaatgttacgactcattctcttgcatgcttggctttatcccttgactcttctcagatttggtagcttggtttaccgccttgcccttaatccttaattattgtgtagtgtccttaattttggctttttgccttcgattaaaaaaaatcagtacgaagagaaaaaattaataaaatcaaaaagatcacaaaaattgagtcgtacacatataacaaaatagttcaactaattaaacaaaacttttaggactcgtttggtacactgtattgtattgtgttggattgtgttggattatattgtattagtattatttaatacaatactatgtttggtattgacttgtattaatagattgtgttgtattgtattagtattatttaatctgggtccgaattcgggtcctgagtccgggtctggggttcgggtccagtttcagggtccagtttcagggtccgtgttcaggttcgggtccaggtcgaggtctggatttaggtacgagtccagtttcgggtccgagtccgggtccggggtctaggtctgggttcgggtccgggtcccggtctaggtcccggtccgggttcaggtctcggtctgggtcccgggtccagagtccgagttcgtggtcccagtcccggtccgggtctaggtcctgagtcctaggtcggggtcacgggtcccgttccgggtctgggtcgtcggtatcgggtttgagtccaagtcccgagttggggtccgggtctagggtctgggtcccggtcccgttcctgtttcgggtttgggttgtgggtcccgttctgagtctaggtcgcgagtcccgttctgggtttgggtcatgggtccaggtcccgatcctagtccgagtcccgaatccaaattagagattagtattgaccccgaattctttaaatattataatacaagctaatacagaccatttattataatacaacatacattatattaaaaaattttagtcgtaataattaatacaatacattactttatccaaacatagtgttatttattatttaatacaatacgacccttatacagcgtaccaaacgaacccttaaaattttgtattatagctttagttagatactaaataagcatatgaaagtataactaaataatgttatggtatagaggaaaatgaaaaaagagctctgatagtccacacatttgtatactagagaatatctttcaaactgtttccatcaattccgtgacacactatgattcgaagtgaatcgtccaaatatatcttattgctctaaatatacaagccttacaagttacaacaagaaaatccaatataactcaagaaagaatattattaacaaaccaaaatactcaactgtctattatttcaccagtccaaaactaattcaagagcccaaaagtttcttaattccggacttctgctcagaagtcaacctagttggaaatttaataataaacttgatcctaaggttacccctttttgaagggtcctttggtaagggcatgccttccttcggcaccacctcctcgtagtttggactaatcacactgttgatgggaatagtcagattccttccatccagtgtggtgaggttaactgtatagcctgttaatgcttctgcaagtgagatcctctgtgtgacaaccaagtcattaccatcccttgcaaatgtactgtgtggcttttcatcaattatgaacacaagatcagcaggtatcacatttggttgctcatttcctttctctgggaatgtgatttttgttccctttttccagcccggcttgatcactatggataagatttcttcaactggcatggttttcctgcatgaagaagaggaagacacaaatggggtcacgctcaacgttcaacaaaccatagaagttgcagcaaaatattgataagaagtctctacacttaagcttcaaggttatgaactagttttacatatagaaaaatatggaacaaaactgaagttactgagccatgtttgttctatgtaagcaattctgctctaataccaagtatatgcctaccaatgtataaccctcaatcaaggtatacacatacaactaaaccagctcaataaagtggtattatgtttcaagatcaagctagtgtgacttcatggttttcccatcctaaatttgaaggagaattataatgagaatcccctccatgggaacacataaaacaagcaatattattagtcttctttagtttcacctacaaaaatcccaagaaggatattgcaagaaagtacataacttaattaaacaagtactcacccgcttgcatcggcaatctctctagatatcttcatctttttggtagttcccttatagagctcttcaaggctacaaggcagagtattctcaattggaggagccttacgaggactttggctcattggccgaccatccccaaatgcactaaagatgtcatccccaaacaccccaccaaacgatcttgaccccctcataccacctgggaagccacttccaccgcctcccatgcctccaaatgggcttgaagacccaaaaaactcagcaaaaatgtcattggcgttcctggggttgaatctgaacacatttggaccatccccagtttgaaagaaagtagtacc

SEQ ID NO: 231049 - DNA, 1761 bp, Cannabis indica
caggcaaagaagaaagcatatcggaaggcaacctcgagccagtcctaacacatcagccaagtaatagtgaagacaagcaaactttgaaactacatgaggacgggtaagctacagatcagctatctagtgtaggaatcgcccttgtcacacatgggggcaacacctgcatgctgcagtcaagtttgaattcaaggcatctaataacaaagccgagtatgaagctttgatcgctggcctaaaactagcccgggagatgaaagctaaacacatcgaaatctgccgtgattcacagctggtggtaaatcatgtatttggagaatacgaggctcagggagaaaagatgatagcatatctgagcaaaatacatgacctgctcgcacaattcaaaagctacggcgttagacaaattccaagggaagaaaacacaactgcagacgcgttagctcgattggcaagcagtaaggcaaatgacaaagcaaacttggttccaattgagttcctcaaagaacctagcattactggcacgcaagagatcgaaatgattgatacttccccaaactggatgataccaatagcagcctacctcaacactggggaactcccagaaaatcgaaatgaagctcgaaaaatgagaaagaaggttccacggtatatcatagtagggggaattatgtacagatgaggattctccatgccactgcttactcaagaagaagttgcacgacttttatctgaggtgcacgatggattctgtggaaatcatgccgctaggcagagtttatctaagaaattctaaggcaatgttatttctggttgacaatgattgaagattcaaaggcctatgttaagaaatgtgacaaatgctagagatttttgaaaataccttgagctccacccaacgagttaactcagatgcaaagtccatggcctttttccatttagggaatcgacctaatcggacaattacccaaaggcaagggaggagtgcagtatgcagtggttgcagttgattacttcactaagtggacggaagccaaaccactagcatccattacatctaagaaagttcaagactttgttgtgaagaacataatctgccgattcagattgtcgtacaaattaattttggataatggcaaacagttggacagctagtcattcagtgatttttgtgcgaaccatggtatcatcaaaactttctccgcagtggcgcatccccaagcgaatggtcaagttgaagcagtcaacaagaccctgacggatacattaaagaaaagactcgatgatgctaaaggaaactggaaagaggagctccctgaagttcaatggtcgtatcgaacaactgaaaaaacaacaaccgaacagaatccattcgacatggcatatggatataaagctatgctacccgtatagctcgaacaaccatcccacagaagattgacgtacaaccatgaagtaaatcacatactcttggctgaatcacttgatgaaatcaaagagaagcgaaccacaacaaacttaaagttgatagcccatcaacaaaagtagctcggtatttccataaacaagtgaaggctcgaaaattctttgtggaagatatagtcctaaaaagagtatttctaaacaccaaagacagtacggcaggtgtactcggacctaacttggaaggaccatatcaggtggtcgaagttctcgaatcaaaagcatacaaattgggtaagtatgatgaaaaaatacaacttgttctagtaccacggtatt

SEQ ID NO: 231050 - DNA, 1872 bp, Cannabis indica
aagatgcgcttcaaggacaaggagctcaaggaacttcacaaggccaaggagcaagtcaacctcgaggccaagaacgctcagatgaagatggaggaaatgtctcgcgatttggaggttgagaaggagaatggaaaatggcagtatgaccaggcggtctcggactacatctacaccactctctccaagattccagactttgacttttcaatcctcagagcagaagtcgctgaaatggctgaggctttttgcgccatctcgcccacacaaactcaatgtggtggagggaatcttatcgaggaggctgagattgcggatgctgaagaagtcgagaatgaagccgtcagcaaagtcgcggatgggtctgctccttctgctccaaatgtttaaccttccccttatttgcttgtgttaaattctatctctttttttttttgtttacgcggtacaagggtactcgcaccttgtacttacacgaatttatgtttattttgaaagaattttatatcctcgcggggatatctacttataatatttccgcagtacatgggtactcgcggttattatctataaatattttgattgcgattttaattacaacttggtgtggtgcaataagtagaaaattttagaaacttgaaaaaatttcctttatataatcaatagtacattatggtatataccccctatacttaggaatttttttttttgtaaaaaatgactaagtataaatacaaggcgagtacagactataaaatgcgagtactactgataatagaattttaggctttcgccattccaagcccgtggaatcgcagtaccatcgagttctgcgagtcggtatgtagcgtcaccaatcttttctgcgatgagatatggtccctcccaattatccccgaagaccccatgtgttgggttcttggtattcggcattactcttcgaaggaccaagtctcctgttcgcaggacttttgccttgaccttggaattgaaatatcttgcggttcgtcgctggtaagccgcgtttttcaagtatgcctgatcgcgcttttcttccagaaggtcgaggtagagcgactgtttttcttcgttttgtgaaatgttgaaaacgtctcttcgtaaggaacctgccccaatctcgactggtaccatggcctcgcatccataggaaagcgagaaaggagtctcaccagtcgtggatcgaggagttgtgttgtatgaccatagaacttgcggaagctcgtctggccatgtccccttacgctcttcgagttttcctttgatggtgtgctttattattttattgacagcttcagtctgcccgttgctttgtgggtaagcaactgcagagaatgctttcttaattcccaaatcgtcacataattgtcgcatctctttacaatcgaactgctttccattatctgagatgagtttgtaagggatgccaaatcgacaaattatggagttgtagacaaactcgcgcaacttagtcgctgtaatggttgcgagtgctttggcttcggcccattttgtaaaatagtctactgcgactactgcatatttgaccccgccttttcctttaggtagttcgcctattaagtcgatcccccatactgcgaaaggccaaggacttgtgatggaatgtaggttgcttggaggttgatggacatatgcggctattcgctgacatttgtcgcatttctttgcaaaagcgaaagcatcttgtcgcaaggttggccagtaatacccctgtcgcatgatttttagagcaagggagttacctcctgtatgattgccacaaatacccccatgtacctcacgtagtatatagtcgcagtcttccccgtcgatacacttgagtaacggctgactaaa

SEQ ID NO: 231051 - DNA, 830 bp, Cannabis indica
aagaagacagaaatctggcacaagaggcttgggcatatcagcaatggtggactcaagattctcagcaagaaaggtgtgtttgggaaggacaaaatcatggatttagagttctgtgagcaatgtgtacttggaaaggctacaaggataaaatttggaactgggaagcatgtttcaaagggtattctcagctacattcactcagatctatgggggccttcaagaacagtctctagaggtggtgccaggtattttcttacccttatagatgacttctcaagatttgtttgggtccatatattgaaaaccaaagacttggctttgaaaattttcatagaatggaaaacaatgattgagaatcaaactggtaagaaaattaagaaacttagaactgacaatggattagagtattgctcagatgcctttactgatttttgcaaaaaggttggaattagtagacacaagacagtgccaagaacaccacaacaaaatggtttggcagaaagaatgaatagaactattctagaaagggtcaggtgtctactgattcactcaggtttaccaaagaatttctgggctgaagctgtttcaacagcctgctacttaataaatcactgtccctgttctgcaataggtttcaaaacaccaattgaggcatggactggaagagatgcaaagtatgaacacctgagggtatttggttgtgtagcatttgctcatgtgaggcaagataaactcgaaccaagagccagaaaatgcatttttctgggctatcccgagggagttaaaggatacaaaatgtggagtattgagagtggagatcatcaaaagta

SEQ ID NO: 231052 - DNA, 1693 bp, Cannabis indica
gatcctcgtaaaataatttccaacaagccctagcatcactatttcttagttgttgaattttaagttttggttgagtatatcattttgaaaattaggggctgttagcgtttggtttttgtgtagttcaaattgtagggttcatttgagttagtttcagcttctagcagctggttttggtgtatggaattgcttttgctcaagtttgagctttgaactcaaagtttaggtctttaatggtatgtttagtttcattgagtttttctatgaattactagttggaatatattgtgtataccctaattaggtactttggaaagtttgggtgcatttggatgggttttgagcacaaaatgagttattgggggaaacctggtgcaaaccagataactggtttgccatgcctgtaaaactagttagccagttttgacaggatcattgaacaagccattttctcaattctcgtccattccagtgccgtagtggggtgtttccctgtcttctgagttagtgtaatccatagtatttatagcaaagcctagagttataggtttgggtttcccggattagggtttcgatcatgtgatttacccagttttgttatgtgattagggcatccatccagcacgagacttttcgttcaggtcggccagcacacttgaatttggaaagaaggtaagaactttatatatgtgtgatatggatattcgaatgtatgtatatgttaaagtatatgcatgcttgttgtgattcagtcaataccaacacttgtacggtagttgtacagagtgcattggtaaattgtatgatgtttaaaagtacatcgtggtgttaccagcactagtacaggaaggtacaaggtgtctgtggtacaacatttaacagtactcaaggtgcggtctataccctacctacactagtacaatggtttacttagtgcatgcggtacatggtacatgatcgtatcatagttagaatgttcttacacttctgttaagccttgtaaataggtgtatgggcgcctaaatacaagtcggtattatatgatatgttatatgctttttttactaagtctgtcgactcacagttctgcttccatgtgtaggtaaaggaaaggcaaaagctgaattggagtgagcctgagttgggatgaggttgtacatgtcatggttgcgcgacctggagtgttcggtcttgggacatctagggatattattttgtagttactatgcgacctggttatgtattttggcatattttgtataacagtttagaaacgggatcccggtgtttgtaaatgactatgtaaattataaagttaaatatttattatcaaagttttaatatgacacgttttttgagaaaattctttgattatcaaagataacactgtaattgaaaaagcactctagcgtgccttagcatttgggcattataggtcatcacggaggggtcaatttcgaccatgtctctatgtgaccatgcaaaaaggtctaagtttgccctaagaattttatcagtattgatttaattttggcgctaaacctttcccaatctttagtcttctagctgcagaagttggatcaacctccacttcctccaacttttctatagatctattgttgtctataggatccccaaagcgaggatctatgtatgtctccccgctttgggctggacttcatttccctttact

SEQ ID NO: 231053 - DNA, 1355 bp, Cannabis indica
ttgttgcattcattggtgtcatgcccgtaataccgatgaaaatgacaaaattttgtcatatctctcttgctgacatattttttcatgggtgtgggcttcttatacggggctaatgactgagtagcaatatacacactttctatatcttccatcacgacggtaaatgcagtatacttggcaggattctcccggggagcttgttcggtcttgctagtgaactttccctttcccattcctttgcctattattgttgttggatcgttaccacccgagcttaaatttcttgggtaatgggggagttggacggatgtcccaatagaaggagcttttgactggctaggtttttgttcaccctctgctcgctgaatggcttcttcaagcttgataaaaccttttgcgcggtcaagaaaatcactcatcaaggctactggtccgttcttccttatgtccttgcaaagtttgccaaggagttcaatgccccccagtatcgcggacaactttccgtcttcagttacccgtgcaaccttagtcacctctgtcatgaatctgctgatgtaggctcggagaggctcccctggtctttgctttacttcaaccagatctcctaggtgcaacggaagttggcgagaggaggagaattgtgcatggaactctgaggagaaagccttccatgacttgaactttccgggcaccaacttgaaataccattgttgggcggcttctgaaagggttgtaggaaaaaccctgtaacatgcatctcgtcgtactccttgcaggtccatttgtatctcgatctaattgaggtgggataagagatcttccttaccagtatacatcttccaagttggcatcttaaatttatggagcaattccaggatattaatttcgggggagaaaggggttccacgtgctctgtccaactcaagatcgttgttcctctgactggccaatccttagaacatatttttaagttcgtccaactgtgcctgcacagctagactaacttgttcgacctcttggccgacatgagtcacaataacatctctttgagcgagattttgagcgcgagttccgggctgcacaattggcgtgtcaagctggtcgtccacccctctcctcctatatagatcatttttgagatcatgtgttatccccaatctatcaaatacagaaacacccgactgcctcagtgactggttggtttggccaatttgctgaccgacaccaataacttggttggaattattgggtatgacttcttctcatgaattactagacaaggtctgcccgcctaccacttggcccacaagtggaacctgtgaccggggattggacggctgaccatttatagtttg

SEQ ID NO: 231054 - DNA, 786 bp, Cannabis indica
accaagttttggactaagttttgaaaactgaaaatccctccaaaagtgaagaatctggtttggagagctgctcgagaatgtctgccgacactgcagcagctgaagattaagtgagtagacgtacaaacactctgtcctatctgccatggtgaagacgaatccatcatccatgccctcattacttgtacaagagtgaaacaagtgtgggacagagttggcattggaacacatgttgcagcagccgaaccagcaagttttctggactggtttactgctgtgtttgcgactgctgatgcagagaagaagctgcttctcccggttctttgttgggccatttggaacgcccgtaatgatgtcatatggcagaagaaaaatgttactgcagccagcattgtagtgctagcaactggttaccttgaacaatggaagaatgctcaaaattctcgaattgagacgtcatggtcaggtattaaagcggatgacagtgccgagcattggactgtaccaaatgtaaattttatcaaggtaaaatgttgacgctgctctctttgacggtggtaacatatatggatgcggattagtggcaagagatcattatggtatgctaattgaggggaagatggtgctctgttctggttcggttacacccgaagtagcggaatcaattggcattcgtgaagcgctaagttggatcaagagtcataattggcagcatgttacactcgaaacggattgcttaacggtggtccaagcgataagaagtgaggtgaatatgatttcaatgtt

SEQ ID NO: 231055 - DNA, 2832 bp, Cannabis indica
attttgaactaattttttttttaaataataaaaatttaatgaggtcaaaatcccctgggcctgatgggttttcggcaaagttctataagtcacactgggatgtggtgggccatcagacggtacaatttgttcaggaattctttgctgagggcaaattcacaaaggaggtcaaccgaactttcattgtcctcattcccaagaggagtaatgcctgtaagtttgatgactttcgccctattagtttgtgtaatgtttgttataagataattgccaagattctggcaaatcgaatccgtggagttcttgataatttgatatctccgtaccaatctgcctttgttaaggggagatggattgctgagaactcaattatagcccatgagattgtgcatgacatggagcgaagacatggtggggagtctttcatggggattaaatgtgatatgtctaaggcctacgataggcttgagtggaattttgtgagaaaggttcttcatgctttcggctttcatgagaagttctgtgctatgattatggagtgtatcaccacggtctcgtttcaagttctgttaaatggtggattgactaagatgttcagacctgagaggggtttgaggcagggcgatcctctttccccctatttattcattatgtgctctgaagttctttcccgaatggtgtgtgaaaaggaaaggagtgggttaattacgggttataagtgctcttcgaatggcccaagcgtttcgcatcttatgtatgcggatgacactattttctttgtgagagcatcgattgaggaggcaacaactctaaaggaggtgatggatacttactgcctttggtcggggcaacagatcaatgtggggaagtctaaggtcttcttttccaagaattgtaatgtgaacactggaatatgtatctcggattggctcgggtttgacttaatgaatggggacgaaaccttcctaggcaatccgctgtttgtctctgggaacaaatccaaggattttgaatatgttgtggataaagtcaaatctcgcctagatggctggaaagcaaaactcctctcacaggcggctagaacggtcctaataaaaaatgtggcctcagctataccaatctatactatgtcagtttttcttctcccaaagaatattagcaactctctggatgcgctggttcgccggttttggtggacagggagtgtggacggaggtaagtttttagcgcttctaaattgggataagatttgcaagccgaaggtgcttggaggtttggggattcggaaattcagggatatgaatctatgtcttatagcgaaattggggtggatgattgccaaagaccattcggctttgtggattcgtgtaatcacaagcaagtattcattcgaatcctttttttggtgtgacatgccccctcggggtgcgtcaactggggtgcgtggaatttggaagactcggcaatttatccttagtcacagtgcgtggattcttggccatgactcaaatattgacctttggaaatggaattgggtgtgttctgatggagtggttatggggcccaaggactttaatcctagagtttgctctcatctctccctgggcgatctgaaaaggaataatggaaacggttgggacagagagttgatagcaagagtttttctgcctgaagcggccaattctttggtaaattgtaatgctgaagaatctttagagaatgatcgtttgatttggatgtccaactcttcgggggatttctcgctcaaatcggcttattggaatctctgttgtaaggacttatctcctatttctatgttctcttctttgtggcggtcccctcttcatgaaagactcaaacttttcctatggaaagttgcacatgactgtctattgtttggagctagattgagcagaatttttgggaatgttatcggtaagtgccacttatgtaatgaggaaggtgaagattcggcctctcattttttctctcggtgctctattaccagaagtctttggcttcaaagcaaatggaatgtcagggtggatttgattcctctctctagtggggcagaggttgtttcttggattctgaatccaaatgtggtgggtgatgttatctctccttctgattgtaaagaattctccttgtatgcatctgttctttatcactctctttggttttttagaaatgatgctttccataacaatgtccagtggacattgactgagatgaagaaacggattgagaatcaatttatggggttctggaaagtgctggtgagactggatgctggtggggaggaaagagccattgttgtgcacagatggactcatcctcggccgggacgaatacggattaatgtggactatgccactaaagataactgagaagctgtgggagtggtggttcgtgacgaaagtggttcgatacttgctctgtttgcttccaaagtgcatgcctcctctccgatccacggtgagctcctggcgatgtcctggggcctaaaggtggggcggcatctcggggttacggcggcggacattctttcagattgtcaagttctagtgtcggccatgtcttcctccactttgccccattggaaactctggtctctgtttggtagtgttatgaggttgtattcctcctatgatgttgtttctttttggatacctagagagtctaacgaagccgcccatctccttgctaaatgggggcttagtcatgactgtaattgttacttgaacttttgggaggtgagtccccatgtactcaccaacatcatgttgtttgataaataaatggttctccttttcagtagcaaaaaaaaaa

SEQ ID NO: 231056 - DNA, 817 bp, Cannabis indica
cgatgaacatcctcatatatgaataatgccataatgctaattttagtcagttaatgtattcaatgagtaattgtgaattggtatacttaaaatgttgattcatccttgagaacagaattttggaaactagtttttagtgagccaaaacttgataatttgtgtgttgataatctgatttgataaagtgaacttagcctggaataatcattatttttctaaattatgcacaacaagtgtttgaagaaatgccacacagaatttttaaaaggggaaagagaaaagggttaaaattcatgacttgtaaggaattatatgcacacttggtacatgtctgttatgtgttaattagtagtagtgttataatttacttgtaatattcacttatggtcgacacgacattatcctccgagtgttctttgttcttgttcatcaaatctgaaagcattgtaataatgaatgactatatatctatatatagtcatctatatgtttctctgtatatatttagttcattccaaattttaaattgattattgatccatcaagattgtgtacctgagaagtatggttcactaaattagatgcttgacaacatgccaatatattagaaagttatgactgttgcattttttttatctcttcaatatctgtttaatattgttactttagtgtgcaacattaatccaatttaatatttagttactactgctatcaaaagcttcacattataattagctttatatatgcatgatgttcacttcctcacaccacatgagatcctacacctttaatctgcttccattcttcattcatttcg

SEQ ID NO: 231057 - DNA, 1377 bp, Cannabis indica
aaacgagtcttccttgtcaccaccactcttgctttcagctcccttaaaatcagttcccgttgcatttgttgtcaatggaactgaatttttaaccgctacaaaagccacttttcttgacataggcttcggtttcaaagtattggaagaaaaacttgagcatgaaagcaagtcaccttgatggactttattgccagggctatccctatctgcaatgcttgatgcatcttctcctacctttggacaatcttcacctagcctctccttctcgtctctaatggaagggcttggaagcatatcagctgtattctcactaacacgagttggatttttttcgattgtgcattcttcatccactcccttggaaggaagctcaccttctgcataaaccacaaaattacaaccgttcggacatagcttaaactgagcaatgaaactaaagatataaggtaagaaatttccacatatctgtacctccaagaaaagaatcaatacttttatactgtacagatgatggatgtgaagaactttgttctaatacttcatgagttgcaatattactcttttgcatccgttcaactaatatgaatttatctgattcccacacacattccaaagtaagaaattcctcttttgttgggaaaacctccctgaaaacctgagttgatagaaaattatgaaacctgcttccttaaaaggaaaagacacacacacacatttatgaaacagcagaaattatacgagagaagactgatgacctcaagtccatcttcagttatttttacagaatgcttctttcttgagagagaagaaaccgtattgaatactgaaacaacatcaagtaatatctgcagaagcaaaacaaacattagctgaaaccaatatctaaagattacattataaatgctcttaaagaatacaatacatattgttcaggaacaaccgcaaggaatatatttaagtaacaaagatgcctaaaacaatttcggacgtcctaattagaaaacttggattcaacactattactaacattaacacctagctcaagctcaattcacgaaagatattcggccataagtaacatcacattctctttgcatgaaacattcaattctctcctatctcatgaatttttgaagccttgggaaaagaacaagaagtacctgttgaaccaaaactcgaattcgtgcaagcaaagccaaaattgtcaaacaaaatcccatgaagaacgattgagcgagcaagacagatatctcactgtaaaatagtcaaggaaaattcacatatctatcaattgattctcatgtggtgaaagaatgaaacttataaacttaaagtatgaaaccaacaaacaaatgatacatacacagctgccttcag

SEQ ID NO: 231058 - DNA, 1461 bp, Cannabis indica
tacctaattagatgactttttaggtaaacacaattccttaaaaaaaggtaaacaaaatgccttaatttagctaaacaacgtgtctaaataacacatgtcgtttaccgtactttaggcacgttgtttatctaataaggcatgtcgttgaccttattattttaaggtagtaatcattgtttgccttatttaaggcatgttgtttaccttatcttaagcatgttatttacctaaattaacacaagttgtttaccattccatttctgctcatataactgaatgcatttccattctcctatttaggatgttattttaaggtagaaatcattgtgtatatatacatatgtatatgttcaggtatgaaatttagtccaaattactacatggctaggttatactctgttctttacaatttttctcataaagatatttatatttactaggtagaatctacgtgcaatgcacgttatatttgtgtgctatagttaaatttaaattaatatattcatcgaattgaaaattttagatcaatatattgaagttgatttgaattttgaatttaaagaaaaaaaaattaattcattctaaattagaagtttagtataaagatagtaattatattttctaatacaatttagaccaacaaattaggcaattgattttgagttttccttgccaattagtgataaagttcatgtgaaactaatgtatagaattagacattacttcacttgttctgactacatattaagttctcccaaacacacaacaaatctgtaagttaatgactcatcttctccaattaggtaagtatgaagatgctcaattcctatatatatattcctattgtattggacaaacacagaaattggcaatagtaaatacatatatagtatatcgagcaaaagtgttctaaaatagttatattatacattacttgaaatttaacaaaatttttgtacgtataaattgtaagattcatcccctaattaacaatgagaccaaatttaaaatagatttacttttttttttggttctcaatagcatatttttccagaattccttttagatccaatgaacaatattagtaattgttattaactaactatgaattgcttttaagtctctatagtattttcttaagcacatagtcatacaatgctcccaaaagtagtcattttcttcacgtattattttgaactttttcaaaattcaaatggaaaatactcttaaaatttaactgatgcgaaagtacttattggatgagtgtaaatgagcatgttatttggttacgtttggaaactcttttttttttcctctttgaacaatgtgtgatcagaagcaaatatttttcaattggtgagagtagttgttgcttgcttgagtagttcgaattgaaaaggactgacatatgtaacaaaatttgcttgtagttgttgtttgtacaagcaaaatttgtatgta

SEQ ID NO: 231059 - DNA, 2039 bp, Cannabis indica
ggccatataactgcgggcggtctatttatttatttacgttattaaacttatgtcgcaattattttagttattaattattatgtcttttgtaggaaaactggccagttgtgaacattttcaagtattaaataaaaatgcgacattatgattttccgcgtttaacgcttgtgaacaaaattaatatttttataaaagtacggtcgttacaacttttctgttgccatacaacatcatttcgggcgttccaaatggcccaacaaagaaccgagagaagcagctttttttctgcatcaacagcagcaaaaacagcagtaaaccagtccagaaaattttctggtgcggctgctgcaacatatgtgccgataccaactctgtcccacacttgtttcactctcgtacaagtaatgagtgcatggacaatggtttcgtcttcaccatggcagataggacagagtgtttgaacatcgactcgtttaatcttcaattgttgcagagtcggcaggcattctctagcagctctccaaaccagattcttcacctttggaggaattttcagcttccaaaacttagtccaaaacttggtgagatcatcttcattggcactccatcttccataaagcttttgaagtagattataaccacttttaaccgagtaaatgcctgacgtttcatagctccaagtaagcttgtcactgtcgtggcctataatcaaggggatatccaaaatgagctgcttttcacgctcattaaacaaatcattcaggatctcgacatcccaactcccaccctccatggccattaaattacacactttagcttcactcaaactaggatgacttgagtgaacaaaagggtcatcttcactaggcagccacggttcctgaagaacatttatctcctccccattaaagatacaccggcgagtaccttttctaattagatcttgggcttccaacacactccgccacacataacttggattagaccccaactttgccgtgaaaaaggagccattagagtagtatctcgccttgaacactctagcaacaagagtattaggatgggatagtaacctccacccttgtttagcgagcatggctacattgaagtctcacaaatttctaaactccatgcctcctttagacttatgagagcaaagcctatcccatgagaaccaatgaataccatttttagcattacttgcaccttgccaccagaacttgttcatggctttctccatatcacgagtaatatccaaaggcaacagaaagacgctcatcgcatagcttggaagagattgagccaccgttttgatcagaatttctttaccagcccgtgatagaaatttcatctcccaaccttcaatccttttccgaacccgctccttgagataacccaacaccactgacttatttctgcttagagtacttggaagacccaagtacaggattccttcatccgcaatagccatgccttaagtgttacatatgctatcacaaattccttgggtggtgttggtgctatagaaaatggaggatttttaaaaattcaccttttggcctgaagttgcttcaaacttatggaggatgtcttttattctagtagcttcttgggtggtagccttgcaatacaaatagctatcgtccgcaaaaagcatatgtgaaatacgaggtgctccattagccactttacacccatgaatgagaccagccctttcatacttggtcagcaaagccgagagaccctcagcgcaaagaatgaacaagtatggagataacggatctccttgtcggattccccgggaatgtataatcggccccatttccctgttcttatggaccaccagatattcagctgaggttacacacttcatcaacaaagaaatccaccattgatcaaaccccaatttccgtagcattgcttctaaaaaaggccattcgatcctatcataagctttactcatgtctaactttaaagccataaagcattcttttccttttctcttccgctttaggtagtgatgttggaaattattttac

SEQ ID NO: 231060 - DNA, 1426 bp, Cannabis indica
gtaatgggttttatttagggcacaaaacccaacacgtacatccccatgtcttttctaatgaagatgcattatgtaatgaccgtatgatttagaaatggattagtggggcaatagattttaattttattattattaataatcatatgtaaatgtttatgttaaatgtaaaatatgttattcttgtgattctagcttggtggcaatggaaaatgcaacgggcgttattttagtcacacgggtaaatctagaacctttttatagaaaattatagtgtgtgaaattttggaatttgatttaggcggggtagtggctttggaccatcttactcccaagccatttattgagatatgcaataggatggggtaattttgccattttgaactcttgggacatgtgtttattttgctaagtggcagctggccttgtattaattaatcaaggaataatcaaataatctattatactataggttatctaattagaggaatttaggcaaaaaagagaaaaaaaacaccactttattcttcttcttccttgttcggccagcaagaaccagcagcctagggtagagatttcatcaagtttcagaggttattaggtggaatttgagaacttgatctgaggtaaaatcctaagcttactctattatagatttgttatgttgttggaaggtttttcttgaggttagggttgtgagttgggaattttaattatgtttagttgattttcgattagggatgttttcaaatgattctaaatgatgttttatgtctaattgaattgttgttggtgggtgattttgggtttgagcaagtttgagttcttagaactcaaacttgactcaaccatggtatgttgagttttagtgtaattctattgctattgctgcgtgaaaactgctctagaatgttcataaaggtattttggaaagtatggttggatttggggaagttttggccgagttatagaatttttggagttttctggtgccaactggtcgaccagttgctacaagacttgtagaaccggtagactggttcttaggaaggattcccaaaaatgtgatttttccaatttgtgttattttcagagcttagtttggtgttttctctggtatgtacggtagtatttacgtgtgtgtttttaaggctacccttggttttaagtttaggatttcgggaaaggttcactcaagtcatttacccgattgtgtaatgcgacatagaacctccgttcagctcaagaattttccattcaagtcgactgacacgcttgaatctggaaacgaggtaagattagcataaagtaatgtacatgtgtatatgaatgcatgtttatattgtttactactactagcactggaatagttgtagtactgagtgtgtcagtacaatgtatgatgttaaggtaagttacggtgttaccg

SEQ ID NO: 231061 - DNA, 1076 bp, Cannabis indica
attaatcacgatttccataaacctcattgattagcaacgagattcacagtacgtttaaaatcacgtaaacacgcctatgctagttagggtgttatacataaaatcctactgggtcttctgtttgggcagactttctcttgaatgaagccaatctgaggactgatggcctttttggctcaaatgagtacagttgtgactacaagattccaaagtactcttcgtgcgagaaggtcccaattcaagctgatgaggagtggcaagactatgtggctcgcatacactatctctagagagtaacccctcgggaagctgaagaagaagcttcccaagttaatcaatacggatggtcacctactgtgcttagggaaaagtgcacctcgttagtaactttctaggatagtcaatataatttctatacttggaacagtttcctcatagactgtataacacataggtttgatagttggtatcctaggttccacatccagcttagttgcactagctcgtattatgggattgtcgagtagtattggacaaacttggatagggcgtgccaccaaaattcaaattgggatctagctccaataaatccttatgatatattcatgatcacagggtctagggagtttagtaattactatagtcctccctcttcatcatctattgattatggcaactttctttaagtgggagtttattccccatttccctttttatgtatttttgatttagtgttgatgtatctatttgcctcaaagatatggatctgaaaaaccttctaaacacttctagcaaaaaagggaagaagagagttgccaccttggaaaccactttgagagtgaatacagaacctctaaagagatccaagaaaaccactgccaataagaaacatgcctcacagcccaaaaacctcgagtctttagaagatcgggttcaggttcatactccagccattgtacatgctgaggaaccagcctaaggctcaactcaccagggtactatgtctttgggtaaggggactgaaatggttctgcttgaaccttcttgccccttgcccatcgaagcggggaacacta

SEQ ID NO: 231062 - DNA, 2015 bp, Cannabis indica
tggtgagagaaaatcagatttcaaaacatcaattgcgtcagagcatctattagccgaaaaccgaagagacacctagtcagcctcacatcaaatcgccaacagacgcacctgacacttgttacccatccaaacgcaaagatagctcggatgaagtctagacgtaactttggaagtcccgtatagactgtggggaaaattttattcaaattttagcactctaacgtggccccacacgtggattcaagtcttggtactcgcttgcaagacacgggccgaaaaggttaccacatacattttctcggacgaaatcatcttaaccgagtagttagcaattcgtgcaacacaccaacacttagcaaattcacctttcgcatcatgagtcataaaaggaattgctataaatttgagatcagattacaaagatatggcaagctatccaaatcccacgattagtgcattctgtatatattatgtaatctttctacttatatcaattgtaaccagaagggaaatacttccctccaaagcttatacccctatcaatagtgattcatactcgctgggcaaagggtcaaaaatttttgtctaagaattcatattcagagatataattgtaagagctctaggaaaacgaaccattctccttgttcttaagtcaatacaaataacgaggattaggctattacccaactgctcggggctgaacatctaagaaattcttgtgtctttatttgctttaattacactatactttcattaaactacttgtcgcttacaaaccagactcattgtcgttggctaaaagcgaggtcaacacctaggatctcccgggtagttcgtctccttcatcaaagcacagggtatttgagggtctctaatgcagaaactcagacttctaatggcacaagcatgtcgcaagggttccctaattggtttataatgtctcgagttgcttccctctgatgtaactctagggtttcagctacactaggcgacaaggacaacctagagtgaacttttccaaaagtcacctacttctaccaacagaccataactgagcctcactggtaacccagcagcgaccgatggtaccgatggtctcctctcaccagctgccatcataggatctatttttgggaaacttcacacacccagaaaaggcaggggaagtagtcgtcatgagacagatctagccctctcgcccgtgctgatgctggagtttctagctggatagagtcgttgcatctcacgaccctttctgagttagtcttcatgatcgcatcgggtcatagctccttcgtctggccccagtacctcttgaactactctatttacgtatagtgatgtagtggtggatctgagcctgaggatcttggtagttgatcttgcctctagagagttggatggcgtgatttgagcttttagggacggatatcagtgcgtcaagtgctttaagattgtgttcattcactttcgcaacctttcttgggcagactgtcgcatcgagtctttttttgggcaacacctcaaatatgcacatttttgtcccttgttcgaacctcgacaagcgatcaggaggtcttccttctttccttacatggaccttcttgaaacgggcttgcactggtggtagccgtgcatatctttttcttcaactatcaatgatagttccaaaatgtttaccaagtttttcagaaaccaaataatttcagagcttcagaaagtaatgaaggcgtggataatgcaataacaagcaaaatatttttatgtgcttcaggtgttacctatccttagtccatgagtccattatattaggctctttggcaagagattatttatacatatacataatgatggacttttctcgtcttcccccatgttcttgtagaagaagaagcttagtaggaatattctggagttattagtagggttaagtgtgatgtgaaggtcttggatctttaggtgagagtccagaggatgggtttggatcatttcacttgtgcatcagttagagt

SEQ ID NO: 231063 - DNA, 1210 bp, Cannabis indica
taagaagactttaggtgagttttcataagtttggtgagattagagttttagttttgggcttggccaaacacattttgagagaagtgtttttgtttgcttttatggtcgtgttagacctttgtatagattcttgatactttctatttacgaaaactcactgttcttcttttgcagggtttcttcattgttctctcctgaatgcctgtttgctttaactttgtcagaactaatacttatccttattttgtgtcatttgttagcggtatctaaaagtattttgaaactcaagcaaggtacttcatactacaggtgtttcaagttaacctcagacatgcagcttggtttagtgctgttccatggagtgggatggcagtcataggatatcttgctggtttgtggtcagacctgttaatccgtagtggtacatctatcactttaacacggaagatcatgcaggtatggagttcttgttcattaacagccatgttttgtgcaagaaccacctcttattgttttattcatgagctgtttgtttccttggttttgactaaacaattagtttcactatagtacactacacccttaaaaaataccaaagaaagaaaattatattaaattgtctggaccatatagaattaattgtggttcttttatctaaaaaaccaaaagtagaaaaatcccatcaggggatatttttcttcctattcctttggtgcatgtgcatcagtaagcaattaaggtaaaaccttagcactagcacactaccatatctttcttagtcatataaacattaatcttaaaatattttaatcatgcatagaataatcaaaggatccaattgctttctgtgcagtcaattggtttttttggtacggaagttgctcttatgggattaactacagcaaaaagtccagtgaatgcatctgcatggctcacattagctgttggattgaaatcttctggtcattcaggatttcttgtgaatctccaggtttgactagatcaccttaacttgacttatttgaattaactcttctttgtcagaccattttttatatttgtttctgtttcgaggagatcactccacaatattttggtgttttgcattgtagtattcatgacaacatattaatgagggagaaggggaagatagaaaaaaatgagagagttgagtcaaagaaaaaaacgattgacatcagatgtgtgggat

SEQ ID NO: 231064 - DNA, 629 bp, Cannabis indica
ggtgtttgttggttgtagttaaaagatgcagccgttccaacttactatcaaaactcagcaatgtctcctgcatctcctgccatgtgagactaattttggcttgagcttctagctgacaaacaatagtgagatattcagcatcaagaccactcaaaacattagaaattaaatgggcttcagggtaaggatcaccagcgagggcaagactgtcagcccaagcacgcttctgtcgaagatactcaggcatggcagtgcctcctttgcgagtagtctgaattttggttcgagtgtcgtccatttttgctcgagaatgagctccatacaggttttcaagagcaacccaaagggatctcgccgagacacaccccatgacttctgttgcgatgttctcagtcatagacccatacaaccaacccattaggagttggtcacacatgatccattgttcataatcgggatttggttgaacttcaaacccaggtgtgttttctccaccttctccaatggctggaacgaattctggtggacacactcttattccatttacaaagctctcgagcctatggcccctgattacagtggtaacaaggttcctccaaagcgtataattatttctatcaagtttaata

SEQ ID NO: 231065 - DNA, 1781 bp, Cannabis indica
tccagattgtgcttcatcagtttagggtgtttgtccaggaagcgtgatacatgtccagaagagttgacttggaggtctcattataaggagtcaattaagtcggttaagtcttaaccgaattaactacttagttatttgaagccaccacctttgggatattcatattctctgtctataaatacaaccgtcctcttcatttgaaaaagaacatgacacaaaataccagtagtggagtacataagttctttgagagagagtttttgattgagaggtacagagagagggagaggtacagagaaaagagaggtctgggttttgagttttgtaaagaggaagcttctgtagatgaagaagcttctcagggaagagtgttagagagaaaataccttgagagaatccaaacagagaatcgctctcaactgtattgtacttgtgttcttgctctatcaataaaggaagttttggtgatgttccagaactggagtaaagccacagagcatatcaatctatcgaacttgatgaaccagtataattcttggtgttgattttatgattttcttgcattgtttattttttagttttatcgtctctgttctactctgttattattcttccaatttttaaattgtgtttggctgattttgtcattactaattatttgttgattcattttaaattaatttaattttgtacaatagttaaaatttcccacaacataatttttaaaatagtaatattttataggatatacatagtttttttttttttttctatgaaatgtcatatgaaacagaaattaactatttcccattacaaatactttataataaattaagcaaaagataaaaaactttataataagctttatttatttaggaacaaaacaattaaaataatttcaaattaaggttaaattgtactaccaagattcctttttcatatttatgatataaacaagtgtaaaaaaatgggaatgtcaacaacactggcagtagtagtacagcgtgacaccgtccaaatttagtgcttgaaaaattcaaaatgttagttttagcattttccttttaacttcaaaatgttagttattaatattatatgtacaaacttctgtaactatatctatacaaaaccctatagtacttgctttgtccttctcatatataaacccagtcacgtggtatgcatgcttacccatgttcccgcagtcagaaaataataaacgtatatatagatcaactatatatatggccccaaaaaaataaaaaacaaataaaaataaaaaatttggccacacaccatgattataaatacatcagatatgatgaaaacttaagacattttgttgttacatttacataaaaaccgattcatttttatcaagttgaataaataatgtatagagttaggcaaaattattacacttcaaaaaagcataattctacaacgttgttttatcaatgacgagttagctagaaagagtttgtttttttttttttttagttttaccaatacaaaacaaaccacaagatacaaagtcaacaatataataacccctgcccaagactatacaaagtcagcctaataaactcaaactcaaacccccaaattaattgtggattaatttttcttcaaattttcaatcttgatctacatgcattacaagtctaattacacggcatgaccacaaccaatctaatcttaatatcattttgttatgtacagtacttctttatgtgccaaagtttttgagcccaagagtgggaagtaattaccataaataa

SEQ ID NO: 231066 - DNA, 1373 bp, Cannabis indica
ttatgaagcattggaactacaaccatatttacatacgaggaacaatcggtgcaagtacttgatagaagggagaaaatcttgagaaataagacaattgcactagtgttaagtagtcaaaaacgcatatttattagtgtaaaatacaaaataaaattaattttatataatatttttatgaaattaatgtaatatttttttattagaaaatattgtagttttgagttaattttgtatgaaaaataacattttatgacaggaataagagaaagaaagaaataaaaagataaaaagaaaatgcattgtttttatttaaagaaatacaaattaattatatttttaaataaatattttcattgaaattgttatgatatattttatgttgaaaatattttgtttggatttaatattgtttgtgttgaaaatgagaaagtagtatttgtgaaaagaaatataaaatgacgaaaatattgacgaaaatatttttgaagagccaaaatattgcccaagaaatcagccccaatcggcccagcagccatcataactcaacaaccacgacacgtggccggcctccattcgcatgccgtggccccagcaggagcttgtctcccagaccctccacgcgcgtgtgtggtacacgcatagcaccccagctacgggtgctcttcaccgcctagcccgagagtgggcttcgttttctttgcgtggaccacatgctgaaaaagcaattttcagcttctcttcttagtgcgccacgtgtccaataacacatcaaattcagccaacaccacctttctccacttaccacgtgtccacatgcaaccaatccaacagtgacacgtggcagctccaaattagtttattttaattgcaaaaatacatcagcaatttgtaataagtttaattgcgaattaatccttttacccttctatcaatagaagcttaggtttttagaattcaattacagttttagagtttcagacagaaaaatctagagacaacgctctaagcgctcggtgttagtttacttctttccttagttaattttgttatgggtttctaagttcccttattattaaggaggacgatgaaacctatggtatttaattaagtatttatttttattttgattcttagtacaatatatgcttatgattttcgtttcttaaaataatttctttcatctttaatatcatgtatttttgatagttagaaattatttatgcttggttccacattttattaaaaataatattctttgattttttgtatttacattaaattgtttcacatttaatgcttagaagtttataattttaaagagaaagaaaatctatgttttattaaaaaataattggtttgattactggttaaat

SEQ ID NO: 231067 - DNA, 557 bp, Cannabis indica
tttacattacactatatattaacttttttatattttatcaacattattaaaataatatattttaaatataaattaataaaaatatattaagaaagtaaaaataattgaggtagttaaaaaaaaaaaaaaaaacaataagctcactctttctccatagctacatgtaaagatatattttattggaattttatacaaatatgttataactaaattataaagcattttatggaagattttttttttttttaaattaaaaaaattttatggaagatttaatataagccttcggctaaaaattttaagttttagctattatgatgacactaatgggaattaatgacttatcatcaaatatatacatatatgaaagaatttttaatggttacattaaatatgtaactatagttacatttatttttaaccattagatcattgttgaatggttgtgattaatttagaaattaaaataaaaataaaaaataaatacttgtaacctgtaacttgatattttattttcttttaaaaacttaattcaaattaattatatttaaaattaa

SEQ ID NO: 231068 - DNA, 676 bp, Cannabis indica
aagtcagttaagttagttagcataagttgtccttaagtggttgttgttcaagttgttactttcttttatgagcttgagtgaactgtcaatttgtttgtgtaactaactcgctctctctcttgattgccctgtatataatcaagctccttgagtttagttctgtaatgaatcaattctttttgaatctctctttctcagtttcttctctctttttctctactcttttcttaattcattttctttatcatgttaagaagaaacttcaacatggtatcagaactctttccgccattaatggaaaatgttgctgcaagcaatcaaggtaatcatcacactgcagctggtcctggttctgacaacaacagaggcaagaaatcaagtgaatcatccattgtcttcttcaaccacaacctttctgttaagctaaatgatcacaacttcttgctttggaaacatcaagttatggttgtgatcagagttaacagacttcttcctttcattcaaggtgctgctcctgttgggttttgtgccctaaataaaacacatttcaatataatcagacttactaattaataaagatcagaaatcgtattttatgttgcatggttcacataatttatttcatgattatatttaatgtataaattcttttaagtccacaacatatgtatttgtt

SEQ ID NO: 231069 - DNA, 929 bp, Cannabis indica
attcaatttggtaaaagaacacaatcttgtggatctttttatttattttgaggttacacaaaccatttctcagaaataaagatcagcacgagcaacagctgtgttctagcttttcgggcaacaaggaaggagtgcaccgagggaaaacaagaaggaaagtggtggtatgagaaaatttcattgttggttacaatagtaagggatcaaaagaagcgttctttttatacaagagcttaggttgaagataggattttgtgttgtaacttaaaaccacaccacatttagaatctgtacagcattactttttcgcgccttgtttaaagaacgagttcagattcagatccttttgtacatgaactacagtacacctatgttataaaagatgaactattttttaccacttgaaatggagacaaatgcattgctgacttgtaaactctagccattttatctccttaaacttaattaatctatagactttgtttggttgctgtatttttgtcttttttcttagtaagaaaaataataacaataaaatatgaaaaaaaagtggaaagaaattcggcagaaaggaaaagaaagttggtttcttcttcagtttactagaagagaagaaaaaggaaaacaataaaaacgtaaataacaacaatcattatgtaaatttctttcctttcctcccagacagcaactattctacttttctttttcctctttcacttttctctatgtaatttgctttcctctcactttaacctttatccttataatgtaaattagagttctttaccaaacataagaaatcaaggcccagattataacgtgtcaaggggtttttatttttttggagagagaaaatgtcagaattccttataataaatattatttttaaaatgtgtcacgtacttattgaattttcttttttttttttt

SEQ ID NO: 231070 - DNA, 2540 bp, Cannabis indica
aaggttaatgtagacacagctttgtttgatggcaggcgttcttttgggtcgagtatggtggctagagatagtaaaggttggttgatcgaggggcgaacaacttataagatgggcacggttgaaccaatcttggcggaagcaatcaacataaaggaagctctttcatggataaagagacaacagtgggagcatgaaattgtggagagcgatagtcttggggtggtacaagcattgcgtagttctatacatatgatttctttatttggtcaagtcattcaaagctgtaaaaatttgcttgctgagttgtgtaccgttgaggttatttttattaaacaatctgctaatgtagtggcccatagctttgctaggtcagctattttgtatcttgatcgtacattcagtatggagtctgttcctactgatttgttaccttgtttggtaactgaatttgttggttaatagagttaatattttccagtcaaaaaaaaatattggagaattatctcatgtacaataagttacactttttttttttttacatttttttaacttaggttgcgatttggattgtgtgagttgtgatgtggattgtgaattaagttgggttgcgatttgaattgctgtgcgaattgcggtgtagattacaaattgagttagattgcgatttaaatagttgtgtgggttgcaattaggacatttactgtaaagtaccatatattaataatttatactaattttaccgtacaaataaaaagtactttgaaatgcataaatgaacaaattccttaattattttaaaatataattcatccaaaataaaatattttttaataaattatgtcaaagcaatactcaacatagtgaggaagactatatagtccaattgtcactagagggagaattcaggtttagatcttgatcatactctacaacaaaaagaatcaggggttgataatctaaatgaaaggagtcatcttattccactgccatcattgtaaggattccttaatctctaatgtgcttatttattattttaggaattatatatttaggatgttatattatagaattataatcaccatacatgttagtaaatctagattctggtataataagttttcaacaatttatctacctcaggataaatacttcagagacttgttgtgatgaaaaactaagatgcgaatctcgctcaacccttatgaccaatggcctcaagctccctgcttatgaaactgattcagtgaaagatgttcaattacataggtcagttgttgaagatcttcagtatcttgtgattaccagacctgaaatttcatttaatgtaaacaaagtctatcaatttatgcagaatcccttgcaagtgcattggatagctgtgaagagaatcttgaggtgtctcagtgagacaattaaatttggtttgcatatttgaaatccaaatcagctcgagcttacagccttttgtgatgtggattgggaagcagatcctgatgacagaagatcaacttttggttttaccatctaccttggttcgaacctcattgcttggtcgtgtaaaaagcagcacacaatttctcgatcaagcacagaagtagagttcaaaagccttgcgaatattgttgctaaattgtcatggcttaggtctttgtttactgtaaaccttatacttcatgctagaactaagcacattgaattggataagtactttgttcgacagaaagttattcaacagcttgttaaaatcaagcatgtccttgtaattgatcaagttgccaatgggttgacaaaagttgtatccaatgacaggttcaatgttcttagagaaaaactcaaaattgaagatgcttcaattctaagcttgagggagaatgttgagacagtgtagttagttaagcataattaaaattttgttatgtttgttgtatgagctgtatgagctacttgtccattttcagttattttgttagtttgttaagcatggattttatgttatgaatcaacagaaaattactcttcaaatttcttctcttttcttctctttttagacttattctctttcaaaatgtctaaaaaatttaacaaaacataacaaaatttggtcgcattactctatagaaatataacacatgcaacttttgtaattttcataaaatttttaagtaatttgtggcgtaaatacttaaatttaattctctgttgtatataaatacataaatttaatttttgacagaaatattacttaagttatattttagaactttcttagatacatattcgttaagtgttaagtcattattcacatgctatttttttattagtatatttaaattaatttttaaataaaaagtaaaaatttaacgacttagactaattaaaaactattacgtaattattaaacggagatttcactatttgaccctaataaaataccccatatcaaaatttataccctccattaatttgtacaaaacaattccactattactcatttctacccaaaatacccctcaaatttaattttcctattctctctctct

SEQ ID NO: 231071 - DNA, 936 bp, Cannabis indica
agtcgatcaggtggatccactggaagtagatcccacgttccagactccaaggaatgcaagggtcccaccagtcactaaccctgaacagctaatcacccaaccaccaaccgcgggtcatgatgtgatgtcttctttggctggaatcacgctcggtgtgcaagagactggaaataccagttcagcagccgatctaaagactcccagtactggggttccttcagcagcaaatgttcaaacaactattggagatgacaccgagatctagaacctttgtaatgctcttgggctcatgcaaggtcatactaatactttgcatcatgaccaggaagagccccgtgctgaagtgaaccttgcgttcgaagagcagttcactaaatggagggatagagaaatggaaatgttgaaggctcaacaagcagccatcgacgaccaaacaagacaagctaccgtactgatatgaagagcctaccaagttgctaatcagcaacccgcgtccaatatcccactgggtgactcagatgaagatccagctgggaacacttcccaaactctgaacggtcaaccgtccaatcctcgatcacagattccacttgtgggctaagcagtaggcagctagaccttatctggaaattcgtcagagggtttataccttataactccacccagactagcggttttgaccaagtgcttggccaaactaactaatcactgagacaacctggtgcgtctgtatttaatagacttggaacagctcatgatctcagagatgatctaaatagaaggagagggtaagacgaacaatatgttccaccatccactcagcccgaagcccgcgctcaagatctagttcaaagagatcttgatgtggcattggtcggcaaagaggccgagcaggttcatccattagtgcacacatagttggatgaactgaaaaac

SEQ ID NO: 231072 - DNA, 1677 bp, Cannabis indica
gaacaagaatagcactcctgagatgtaatcataaaccataaacatgtaacatacatgtaatcataattcacttctaaattgataactaatcagattgtaatgagttttatttagggcataaaacccaacaataacaacgcccagaatcttgttcatcgtcctcctcatgaagatagctcgagtccctattatctcagctctggagatcatcctggtttaatcttggttacccctcccttatcagacaataatttccaggcctggagacggtgttcctcaaaggcacattacctcaacctccgatcgacgatccccttcaccaccactggttccgctgcaatcaaatggtgcagtcctggattcttcactcagttacccctgaaatcaagagcaacataatgttccttgaaactccagctgcaatgtggactgaacttcatgcccgtttcgatcaaggtaatggccctcgtattttcgaactaagggaaactctcatcacccttcgacaaggtgatgattctgttagttcttattttacaaaattaaagtgtatgtgggatgaaattcaggaattaagacctaggatcccttgtacttgtgctgcttcaatcgataaccttgcctttttgaatcaagaacaggttctccaatttctcactgggttaaatgaatcttttttccctgttcgtgcacaaatacttctcattgatcccttcccttctttgtccaaagtcttctctatgattattcatgaagaacgacaaagaaagctgaaaaatcctcacatcccccttcttgcttctgtccaagaatccacccaaaaccctgcagctattgcccaaaacccctctgcctcagcagcctctactaatcctcgttccaataaaaagatgagaccatactgttctaactgtcacaaaccaggccatttaaaagaaaaatgcttttttctaatcggcttccctcatggttatggtgataagaagaaatccgagacaccatctgttaatcatgcttcaacatcagctgatcaatatggaattcttgctaatcttaccaaacaagaggacattcaagccattatctctctgctgactcagaaattgtagcctacagatgcctccaaaccatttgcctctcatgtctctggtaactcttcccttaaccccctatggattgtggatagtggtgcttcccaccatatttgttgtgatctttctttattttctaatgtgcataaatttccaatagctcatactgtgtctcttcctaatggttctaccataagagttgaacaatcgggtaacattcagatttcacaggattttgtcatatataatgttctctatgtcccaagcttcaaattcaatctattcagtgtatctagctttatcaatgatacctctaacagtatgcactttacttctaaactttgcacattaaaggattttcagaacaagaagattgggacagctaaacgcataggcaacctctgttttttgctgcagtcttttccattttccaagttttcttttccttgtaaacagaatattcatacttgtaataatgcctattcatggcattctagacttggacatccttccttgtctacaacaagattactgaataaaactttacattctactacggattctgtttccccttgttctatatgtc

SEQ ID NO: 231073 - DNA, 833 bp, Cannabis indica
catttcgatcgatccctcatgatctttgctatccccgatggatttgataccattctcccctcccaacttcgctatattcctctctgggttcaagttcactatatcccgtttgggtcccgttcctacggtctggctcagtttgttgctgatacgatcggtgacctcattgaggttcacttgatctctctgtacgactctgttaccccttttatgcgggtccgagttcttcttgacaccaccaagccgctgcatcgtggaatgaatgttcatttcaggaagctttccctcaccaagtggctcaagtttctttacgaaggtatccagaactattgctaccactgtggtaagctcgatcacacctttaacaaatgtagtaaattccttctccactgtgataaccacccttacccccctagcctaagctataaggatgtcttgcgtgctccggccaaatcaatctataagaaaagcatctttgagctgtccacttctatcccttttgaagaacaaccttcacttgccaatacttgccatcccactctcgaagaccgtaatgatcatttcactgcccccaccaccacggttgtacccacttcccccactgcctccttcccctcaccacccgtttccactcatacgaccttggccctaacctcatccacccctatttcaaatccctactcttttaccctctcctcggttcactgccctctccctgagcatactattacttcctccaccaccaaccccgctaccaccaaaggtaaggcccccatgtatccagaaaaccccccacctaatctcagccaccctcctctgtccaacctccgcat

SEQ ID NO: 231074 - DNA, 1812 bp, Cannabis indica
atgcacccggataaatcacctggtcctgatggtatgacgccgggtttcttcagaaatattggcatgtggttggtcaggatgttatctcccaagtgaagcagttctttgttacaggttcttttcctcatgctttaaatgaaactaatatagtgcttgttccgaaaaagaaacaacccgaaactatgagtgatttgagacctatttcattatgtaatgttctatataaggtcatctcaaaagttcttgctaacagattgaaaagtatccttcccatggttatctctgataatcaaagtgcttttctccctggccgtctgatatctgacaatatcatggtctcttttgaaattatgcactatctaaagcggaaaagaatgggaaaagagggttttatggctttgaaacttgacctgagtaaggcatacgatagagtggaatggatgtttcttgaacaaatgatgttacagatgggtctaagtagggaatttgtttcactaatcatggtttgtgtttcaacaatcaagtacggaattactcatggtggccacaatctaggacctattattcatagtagaggtataagacaaggggaccctttgtctccgtatctctttctaatatgtgctgagggcttctcctccttagttcaaagatatgtgcagaatagatggctatctggatgccgtgtagcacgcggtgctccaattatttctcatatgttgttcgctgatgactcgtatgtttactgtaaagctaatggaactgaagctgcaaatgttcttcatctgttatctgtgtatgaaagagcttctgggcagaaagtgaactttgacaagtcttcggtttttttcagcaacaacactagagatgatgttcgggagtaaatctgtaatttcttgggggtgtcggctgcttcagaaaatagtacttatcttggattgccatgtacgatggggcgtagtaagaaagccattttgggttttctcaaggaaaagatgagaaagaagatccaaagatgggagactagatttctgtccaaagctgggaaagaagtcttggtgaaatccgttgctcaatccctaccaggttttgccatgactgtttttcttcttacaaaagaaatatgtactcaacttgaggggatgatggccaaattttggtggaaatctcaatccaattctagttctaaaggagttagttggatgagttggaataaattgagccatcataaggatgtagggggtcttgggtttcgaaatctaaggcattataacttagcttttttgggtaaacaagggtggaggctacttacaaatgagaagtcacttgtttctaagctttacaaagctagatattttcctaatggagacttccttagttcagaattggggtctaacccaagttttatatggcgtagtatatgggaggctaaaagtttggtcaagatgggtgcaagaagggctattggagatggtaagttgactgcgattattggtgttccttggcttcctgggaatgaaaatcaatgtattacgactgtccatccaagtctagttggaagaaacgtggactgccttatgaagatggaagggaggggctgggatgaggagttagttaatgacatagtcaatgctcatgacagaaacttgattttgtcgattcaattgagtgatactccttgtgatgattgctggtactggtctaaagaaagtgcaggtgggtactctgttcgaagtgcatataagatgttgcagcagcaaaatggttcttggccgactgctggtgcagcaaaaaatggcagcagctgtggct

SEQ ID NO: 231075 - DNA, 5570 bp, Cannabis indica
tctctctctctctctctcggggtgtgtgcatttcattattcctgattcagttttcttaagatgcattcataaaacataatttctgcaattgtaataatacttttatgccaaaaaatgttgtgtatatctttagtcaagggaaaggtatatggtcctgaaatatgccactattttttgtttaattcttaattactttgactggttatctttccgccacattctttgtagtgacacttgtttttgttgctaattccttttttcaggcaaaaccttgtaagcatctatgggtgggtggaattagcccttctgtttcgaaggaagaactagaagaagaatttcttaagtttgggaaaattgaggacttcaagtttcttagagatcgaaatactgccttcattgaatttttcagacttgaagatgcttcccaagcaatgagaaacatgaatggtaagcgtttgggaggtgagcagatacgtgtagattttcttcgatcgcaaccttcaagaagggtaagttcttgttatagcttcattgtttttatctataagaggcaatatggtcattaagttcttatactagttgatatcttgagagcaatgttaatttgttaaggtgatgagacaaatgctaaatgctatgtttttaaagtaaatacatttaaaattattcaaagctttatcatatgattttaagtatatgtattatgtgctatgttgtctcattgattttcagtacatttataattaaatacattaaatgattaatggtagtatagttggtttgccattatggtgttatattgaatcattttgttatccctataatttagttcataattcttattaccttcaattagattgttattattgttgaataaatttcagatacgtaaaatgtagttactttttttcaagtgagcttatgtttctcatgctctgtggaacaggaacagtggcccgattccagagatggacaatttcagggcaggagcataggtccggctgattttcattcttttcaaagaagacagctggtgagtcataaattttgttgcagcaatctctttgctacttatacttatggcctttttcctacaatgatatcattatattataaatatgtctaaaattgtcttcttaggcatgacagactacttcaatatattttgtcagaaagctgtctacagaatttgagattacagcagtgtgtcaatattttttttcatcattttaatttattttgaaatcttgtattttctgtagtattctcaagctccggggggacgaaaaggagatggccagccgagtaatgttttgtggataggttaccctccttctcttcagattgatgagcaaatgctgcataatgcaatgattttgtttggagagattgaaagaattaaaagtttccctgagagacattactcttttgtggaattcagaagtgttgatgaagctaggcgtgccaaggagggtttgcaaggtaaacttttcaatgatcctcgaattagcattatgtactcaagtagcgggttggcaccagcaggtaaagggcctgggccagatatggtgttcaacgacccttttcgacctttgcagatggatatgtatggtccaaatcatccaatgatgtcaaataattttcctggaccacttccaggtagtggaattcttggacctaatatggccatgaggcctttgggtcatcaaggaagatttgaaccactgctttcaggccctaagattaatgatttggcaaatcttcctaactatcaggatggtaattccaaaaatttaatgagttcaagttggggaaggccatctcctccttcagctggtgtgctgtcttctcctgtgtcaagcattcgtggaaacacaagatctgcatctggtgcatgggatgtgttggatgttaaccattttcagagggactctaaacggtctaggatagatggcccaatgtctattgaagatacttcaattccattaagaaaatttgatgaccatgggctagggttggatcaatcttatgtagttggggcagttgatggaggtgcttctggtccatttggtaatgttcaagggaagggtctccttagtcctgttggtacaaggggttcaactggaggagcagctcaaggtcattctgatggtgattatgtctggcgtgggatgattgccaagggtgggactcctgtttgtcatgcacgttgtgtcccaattggaaaaggaataggatctgagctgtgagtattttccattttgcatatgttattgttttcctttagatgtttttgcaagctgctatagtaacttctatctagctgcctgctgccctgacttagatgctcctgcctctttttcttgtcaatgcgtgtacattgcgataaagttataacatgggtgtttattgtcttgcagtcctgaagttgtcaattgctctgctagaacaggattggatatgttaactaaacactatgctgaagccattggatttgaaattgtgtttttcttgccagatagtgaggaagattttgcttcttacactgaatttcttcgttatttaggtgccaaaagtagggctggtgttgccaagtttgatgacgggaccaccttatttttagtacctccttcagaatttttaacaaaggttttgaaagttgttggtcctgaacgcctatatggcgttgttcttaaatttccacaagtttctagtagcaccttggggcagcaaccggctcacctgcctattccttcacagtatactgatagacaacagaatccttctcaaatggagtatggtgttgtttcatcaaaggaggaacgagttatgccaatggattatggaagggttttgcacgaggaatctaagcttcccataaaacaattttttccacctacaagtgagtcgcccagattgcaatcagtatcacaagattatgcgcctaataatactggagcattatcacaagctggagttgcattgacgcctgagctgattgcgactctagcatcctttatgcctgcaaatgctcagtcttctgctccagagaatgcaaaacaattgggctcaacaattcggccttcacttcctcctggtcaactgaataaattaattcctcctggatggaaacaagatcatcatcaagcttatgaccatacagggcatggattacaacaattgggtagtcagtttaatcctcagggacagaacctctcgcaactgcagtcttatccatctctttcaaatacacacagccactctgcacaacaacaccatggtagcactcagttccaagactctagtttaaatcagtcactgcagtctaggcctctgagtaactttccagtaccttctcaaggtggacaaaccagcgcatccccacgtgttacccaatatcaggcacatggaacagatgcttctgggttgtaccatcctactgtttcccaacaactttccaatcctgtgaatttttctagtcagtcttatggtgctaatgctgtgcaatcacaaagtgtgccgttagcttctgacacggtaaatgcagaagtttcaaatcaggtgcagcagctgcagtcaatcattggggcgggtcagagcacatcagagggtgaagttgataaaaaccagcgttatcaatcaacattgcagtttgcagcaaacctgcttcttcagattcagcagcggcagcagcagcagcatgttagtgctcaagcagggcggggttctggaagtcagcaatgaaatagctacatctaggtaacttctcctattcattggttatcttttggggaagatatatatgtgtcatattcattgcaagttgactaagttaaaattgactctgcttttacttgttatggtgatttgttgttgttgtttcttttctgtcagacttaggcctagcttagaaattttagatgggaaaagttggaattttggatatttctggctgtatagcttgctgtgagaattgtgtttagtgctgtgttagactatttgtattatgctttgaacgctagagttttgggaagagttttctcgtgtatgtctggacagttaccacttacatgtattagcttaggacaagaacaagatattaagaattaacatccttttgggcaagaataatgtgtcattacagttcttacagtgaaatgatattaaagttgatttcagctaaaaatgtataaaataaaattgggcaatgagtattactcttacaaatgtatgttatataactgaataactttttaagagtgattagctgaaaagtataaaatggtttaggactccttggttggactaggattaattagtccataaataagcccctaggctagaatttcagttaagttgtcaaaatgtgtggccaaaagattcgctatggatcaatggtttgaggtactaaatgcctggtttctgaaggtccctttttttttgtagtccctgaaattgattcaagacaattcgatctgtctcttcaatgcccagttattgctgtgttggaaaatgggttggattaattgtatttatttggattgtaaagtagatatttagacagtggtttagtagttcatatagtaagagtttagatctgaactattctgtgcgttattcaaaaacctaggcgaaaataaaatctaaagctgcttcatttttattgctaaatgtataattttgcctttaaatggtttgatactgtcatttctattttaattttttaaaatccaacttgtttctatgcattacattttgcttgtcttgatgtagaattttacttgttcagttgttttatttagtctcaattttgtttattttgtttcgagaggtcgatgctatttttctagaactcattttattttacttttcttgcacatctcttgaattagttttcgtttgtgaaacttgtcattaaactgtcttcttgtatggtatgtatattatgtctcattgtccattgtctattcaataaacttctgtcgttttagtatatatgttatatttctgtataatactcctgctttatatggtgtatgtcttaaatgattaacccaaccgtaggacaactatgtttagactttgtcaggttgtacattgacttgtattgaattatatataataatttcttttctgtaaaagttatttttttgttattaatttatatgtagagttcataatatagttcacgactagaccgggaaattttaatttcaggtgactaagaattttaatccagtagtttttttcttttctttttctttggacacactaaattcgaataatacccaattattttgtgtctccctttgagaggcgagggaacatatattcgactcttaaatgaactttaagactatcaaaagtagaggataagacttggcaactttactttgcgggaaaaaaaacacacgaactccttaattatttggtgttctgggtttagattctcaacaggaattaacaagtttcgtttaaaactctctaaatgatttatcctgtaatccttttaactagtggaattcttaagatagcttccttaggtaggagtattttaataataataataa

SEQ ID NO: 231076 - DNA, 867 bp, Cannabis indica
atctatgatctcaatacaaaatctaaaaagttcgtgttgagaatgctctaaatgaataaacatagattttgatgtgaaacgagagtattcacatagcttatgtaacttttagattatagcttaatgcgaattgtatgctgttctatctcagagatgcagtagttgacatgcaatttatgacttttatgatctgagaagagtttatgttaatttataatttatcatcacataggagaaagaagaatggttaattagtgttaacaattcggtaatcaaagcaattgaaatcatatccctataatttcacatctatttaaatatattgttatttgcgtgttttgttatttaatgtttacttagattatttagtttttaatcttttttattagattgccaaatagaaacaagaatttaataaattggtacttagctacagtcctcgtgggaacgatctcacttatctgagtattacttgttaaaacgaaacgtatacctgcatgttaggtttatcacaacaaccactttacacgatatgaaccacaaatcccaaaccccataaactatgaaagctactatcaaataaaaaaattaagtataaaaatcacccattaacttatttcacatagacattgataaccacaacactaatatttttagaaatcccataaaattctaaaaaatacgagtctagttcttaccgtagtcgagagaaggatcctcttcaccttgaagacaaaatgacatttcctaaaccatcaacttccactaattttttggattttcttcaatttcgtaggataatggcgaagggtttcctttgatttgttgggtttcatgtctttcccccttctctctctctctctatat

SEQ ID NO: 231077 - DNA, 3945 bp, Cannabis indica
atgaggccggggagccagtatccgtggagtgtgacgtcttggttgagggggaagactatgtcaccaaggcagttccccacaagaggcaaagtgctctaggggccagatgggtgtgccctccgtccaagataagtgaggcacgtatgaaggctttggataaggttgggtacctgggcagacttgagtgttacgtcccctctttgaatcaccgggcaaccaatccaaagaaagggttttgtgcttggtcgagtgctcacactaagcgagtagtgatgctgcctttgcactcgtacttcaagagggttgcagattattttcacttttgtcagacccaattcactcccaagggcattaagtacttgtctaccctattcttcctctacgccattcaaggatggggtgtgtcgtccccacacgtggtcaactagtttttttcacttgaagtctacccctaagcaaagtaggtcggggtacttctacttctctcagctagacttcaagtggctgacgggcaccgtggacagaatgttagcaagataaggggttttgttgacgagtactacttcgtggaaagcatggataccacctatactcgctttcaatagatctcagtatacagctgtccaccccttacattggcacttaggtacagggctcaaaagattcttcaactgccgaatgctgctcggaatatcactctgttgatctcggaggacaactttgtgaagtacaagctttatctggcagactttataccccagcctgtgaagaggaggaagaagaagtccagggctggccgagctgagggagttgagcaagagaaggagctcattcaaattaagcgtgaggctaagttgaagggtgatgctggagccaagcagtatgctcaggaatattctgagtaggagaagaaggctcaagaatattctgagtaggagaggccgatcaagaagaagaaaaccctcctggccgagcagaggcccatagaacatactatctggatcagggagcatggtgtacctgctcgcccatcaacccctgtagagggaaaggggaaagccgtccttgaagagtaggaagactcttcgaatgatgacaccccatctgtgcttgttcgggcagatgctcctgccatcctgcagagtacttcatcttgcatttatttttctttattttcatgccttcatatattttatgccttcttctgactgtattgttgttttcgtgcagaaatgtctcataaaatgatcgaggctctaaaacagagagttgggggaagctcgggcttatctcctccagccaagaagtctaagggcggtgagactccgtccaaagagaaggcaccggttgaagaggtattgatctctctgaggaacaacctaccgtggaccctcctgcctcgaaagttactaagtccaaaggttcctgaggacggagtttggacggacctgagcagatgaaaggtggatccttgagtgtcttgttgactgcttcaacttgaccattttcttggggatgtgccactattgagaaaatttttatgatcccatggttcgcacagaaatcagtgaatgactgactgtcaaattgtttgccattgtccgagactatcttatatggtaatccgaaccggcaaattatgtttttcacaatgaagtcttgcactttttggacgtgatggtggccaatggctcgacttccatccacttggtaaactaatccactacaaccactgcatactggactctgcctttgcctatcaggtcaattccctaaatggcaaaaggccaaggactttgcatctgagttagttcgttgggcggtgcccgaggtatctttgaaaatatctggcatttatcacatttcttaacgtaggccttggagtcttcaatcattgttggttaaaaataaccttgccttagaattttcttggataaactctacccgactgcgtggttgccataaaatttttcatgtacttctgacaaaagtcgtccagcttcttcttgtgtgacacacctaattagtggcatggagaatcctcttctatacataactccctctacaatgatgtatcgtacagactttctcctcattttctcagctttgtttctattttctaggagttccttagtgttgaggtaggctgctattggcgtcatctagtttggggatgtatcaatcgtttcaacctctttcgtgctggtgatactaggtttttcaagaaacttgacaggaatcagatttgctttatcatttatgttgctgctcgtaagttgggctagtgcatcagcagttgtgttttcttctcctagaattcgcttgagagcatagcctttgaattatgcgagcatgtcgtgtattttgcttagatatgctatcatcttctctccacgagcctcgtactctctagatacatgatttaccaccaactatgagtcactacagatctcgatgtgttcgactttcatttcctgagcaagtcttaggccggcgataagagcttcatattcagcttcattattagatgccttaaatccaaatttgaccgcaacgtgcaagtgttgccccccaggggtgacaagggagaatcctgcgtcggacagctgatccgtagctgacccgtccacatgtagcttccaagtaggcttgtcttcactatttctcagctaaggtacttgtactggctctgggttactttctgaaatgctctcttctttacccgtacattcaaccacaacatctgctaaggcttgacctttaatcgctggtcggggctaaaagataatttcatactggcctaactccacttcccatttgagcaaccgtccagaggtgtccggtttttgcaatacttggcataatggttggtcagtgtatacctgaacaagatgagcttgaaagtagggccttagctttctcgttgctaggattaggcaataagtgagcttttttatcaatgggtaccggtcttcagcttcgatgagtcttttgctgatgtagtagaccgggtgttggatattgttcttttctctgatcagtacggaacttacaacatgctccatgacaaccaggtatattcctaattcttctctgtcaagaggttttgagagtacatgaggttttacgagttgcatttttaactcttgaaaggcttttttgcattcctccgtccattcaaattgcttatttccttgtaggatgttgaagaatgggacacacttgtctattgactttgaaacaaatctgctgagtgtggcaatccgatcagtcaaactttgaacttccttggtttttgttggcgatttcatatctaggagggcttgaattttctctggattggcttcaattcctcgggcattgacgataaagcccagaaacttactcgagctgactccaaaggtttaggggattgagtttcatgttgtatttcctaaggactttgaagcattcgtccaggtcatctatatgccccccaaccttcctggatttgacgagcatgtcatccacgtacacttccatatttcatccgatttgttctttgaacattttatttaccaatcttttgtatgtagctccggcattcttgagaccaaatggcatgactttctaacagtatagactcatatctattcgaaaacttgtgtgttcttagtttggtggatgcatcttgatttgattgtaccccgaactggcatccatgaagcttaatatctcgtgtcctgctgttgcatccacaagttgagctattcttggaagtggaaagcaatcctttgggcacgccttattgaggtcgctgaagtcaatacatactcaccactttttgttcggcttgggtactagtacaggattagccacccaggccgggtagaaagctttaattataaaattgttgttgcgtagcttttctacctttttcttttagtgctagggctcgttctttgt

SEQ ID NO: 231078 - DNA, 1265 bp, Cannabis indica
aaattttttaaatagtttttattttttaataaatattttggacttcgactccaacttggacttgggagccggacttcgatcccggccccagtcccaaactcggaccacagccccaaccccaaatttgaacgtggacccgacttaaataaaataaaaaataaaaataaaaataaaagttataaaacacacttgtttttaaaattaaaaaataaatgtggttatagaaaacatttttgtttttaaaaataaaattatataaacacaaattctactttcatttttgtgattaaaaattaaaaaataaaaatattaccaaacgtcaccataagtaaacagtataagtatataaggtaattggttatgtctaattaccctaatgatacttggttacccttatctaattttctcatatttttcaacattttctttaatttttcccattaatttttttttctgaaaaaaagctatatttgaaataaaaattataaaaattcataaaatttataattatttttattcttatttataattaactcaaattgagccttatattattttttataataaattagaattattataaaatatttttatataaggttctacggcattacgaaagtttaaagtcttttcatatatggaaagaaagaacaattaattatatattaatttaaaagaacaaatttgaaactttccaaccagaaaacactggtttttcccaatatatatatcaactgatttttggaaaagacattgttgaaatatatataaataggggacttatataaaacctcacttgagtttgaggtttgacatgcttcaaatgggacaaaaataattttactgtagctatagtgatattaacttggtaaaaccggttttgataaccggatggtacacaatttttaataagagaaataattttttaatgtcttttattcttttgagtaaattagtacaatgacaaggttagatgtgtaatttacttttattgggtagatgtatttatcttttaacacttagtattttctacgaaggagtttgtattccttcgactatatgttagacagcccagcaaaaaagactatataaatacagtagatctttttctatttcattatcaagaaattttatttattctaaagaaagtcaaaaatttcaaaatattacaatactagtaaagaaaactaacaacaatgggaaaccagaatgtgaaatgcaattgcattcaaattattatgagcagagaataaatgatctattgt

SEQ ID NO: 231079 - DNA, 744 bp, Cannabis indica
caactacagaaactctcctcatcagttacctttactgtcaatcaaactccgcagaaatgttgatgttgtccactaccactacattttcatttcaagatttcaactacccttatcatcagtcaaaagaatctgctagacaatattacaatttttatcctgtgctgtcaaacgccactttcaaggttcactcatctcctcatattttggccactaagggctcgtttggaatgccgtattaggtcgtattgtattgtattatattgaattgtattttatgcaatatttatatataaaactataggtagtattaacttttatgcacacctaaatatataatattttagtataaattaaaatttgacatactattatataaaaatatgatatataatccaattcaatataatacaatacaatacgacctaatacggcgttccaaatgagacctaagtgaaatactttcttcattagttttcggcaattctttagatcatttttgtacaaattgtaagcgttttagtttactattaagtttttaactcaatttgcttcaaaaattactagcacaggaaaattaaatcatgtgcattcacccacaatataagtcaaaactaatatatacacacacagaaacattaacagcgtcaaactcatgaacttcacctacatccattttagcttacatgaaaaatacataaaaatgttatttgaacaaaataacaacagcaccccaagaatacaaca

SEQ ID NO: 231080 - DNA, 1813 bp, Cannabis indica
acacacacacatgtagtaataaattaaaagtaccttcagcagttcaaatatttcttcttcaatgcttctttcttggctagtatttgtatgcttttcagtcggcattgtaagggggatatcaacacttttgtctttctctttattcaaagttggagttttaacacaatgaccacttaatgaattttcttcagcttcagatcaaatcaaaggttcataaccaacttttatatattacaaaaatgtatattagcaaaaggacagtatacaattaaacattatgaaaataattaaagacaacaagaaacaaacctgcaatttttggaaaacttccttccaaacagttttcttttggagatttttaagtaacttccaattcaaaagtcttggaattcttcttccaacacgtgtctcaaacgattcccctagcaatggaatcacttcgaaacccccagacttgaaaagctagtggaaacccacatagctcatagcccttcttgtcgcattcttcagcactgataagacctttaattgtttcgtcgaatgaacgacgaccccaaggatacttgtcaaaatcttctttgtcatctactagtttcataatgaattcatcaactgcagtgcttcctctcttactttctaagatgtttgtcactgtaaacaccttagccatcttgatggcatcatcaccgtccttaattgttccaaacaacataaattctttcaaattatcccttgaaacaaaatgcttcccgaaagtatttttcctttatcataataggctggtagctatctccaacatgctttggaagctgagaacagtttaagcctgttatcagagcaaattcatccagtccaaacgttgctttcttatcttcaaaattcaattctaactctgttttattatcggtatgtctttgatgtagcaagagagaatggatgatcatgatagctggttgaagagattcatccatatcaagaagaaacccaaaacaacaacctttagatctgtctatcagctgcttacttagaatttttttaatgatttctaaaccacaccaataggtttgcacatgtattgttgattttgcaaaaatcaacttttttgcatctaaatcctacacacaaaataagggacatgttactgtctagttatttgaaatacatatttggcatagaatgtgacttatttttttggaatgtaaacatgtatttataatattcgaaataattattatttaaaatatattaaagaatagaaatgcaagatcaatataccgaaaattcattctcatttcttctttttttcctacttgatgaagctctcctttctttcttcaatggggatacttttgtcatatctacaagaatgacaaacaaacaaagaaaaaagaaacatattttatttaacatatttaattctcaggggtatggtgcgcacaatgtaaatttaagagtataattaagaaaatagactataacttttatgtactttaagagcattgatatgtaatggagaatatatgattgaatgagttgaagatgtggattcacaacttttctaataattaaaactactggcttataattaataagcttattgatatttgtcttgaaatagattttaataactattgaaaaaaaaatgaagcttattggagttctgctacttatttcaatgtgtttgagcccttgtttgcttcagttgacaatggccaatgatctaagtccaagtcgaactccaactcccatggtttttccaagtaagaatgattattaaagtcatatatttagtttatagaataaagaaattaat

SEQ ID NO: 231081 - DNA, 995 bp, Cannabis indica
tagaaaactgattaaaaaaaagtattaccaaacaccacctaaattttgtaaaaaaaactctctcgattttttaatgtttgtaatttttattttgttaatagatcttgtaattttatggtccataatgtggccaagtgggctttcactaacaattagtatggtcgattgtgtgtatcttcgctcccaaacaataacttttgtaataaccgtgaggtctaattttatctatgcacgttttcgtttaaaaaaaaaaaacaattaaaagtgaacaaaaataattattttctaagcaaaaaaataataaataattatttacccaaaaaaactattagaaataattaaatttgaaatgcactaaattgcattaaatttgaggtctaaatgtgattttttgttttaacaaaaatttacttgtgattaaaatatgatatttagatacaaattgtcactaatttagttttagttacaagtattgtgactaaaaatacatttaattacaactgtaattttgtaactaatacttttaaccacagactttttagttataacagaaaaataagttataatattagtgacaatttttttatattttttattgtgactaaaaataaaaatttttgtaataatatcttatctaaacgggatcggaaaaagaaacatgtctcatctaagaattcccatgtccttaatagggggaggggatccgaagaccaacggccccaaaaagagggaatccgagaataataaatttacacaaaatggacctaattatatattttattgataaaaccatggtgtccaaaaggaaaacaacgagttaaagaaaagaaaaataaattgtgtaataaataattaatgaaattgattttaatttttaattcaataagataatattaaaggtgaattactttatatactatttttttaatttttttttcaaatttacgatttgggtttgtgaagtagttacagtgctagttgcaataggagttttt

SEQ ID NO: 231082 - DNA, 1198 bp, Cannabis indica
aatctaagcgcaaagcatcggttttgccggcaactgcaaaatccaaacgtgcttcgtcagaaaatgaggaccgagaagttcacaccgttggatcagaatcggttttcaagtatagctgtgagactggaagtaccggcgatgagaatggacggacggaaaattttagtacttcttgccattcctcagttggtaagttataaaaaaaaaaaaatatcaatcagattgattgatctaatttaattagtgtagaattcaacatatttgatttttgtgtaatttagtaacgactacgtagtgttaatcgattgattaggttttttttttcctttttataataataataataattataattaatatttggttttgtaccgggatagaacaaaaataggagccagtggatgtgaactccatggatgatgacctaatcagcattactcaacaactttacgacatcgatgccggttccagattggtacggtggatcaggtgaccgaaaccattgtaataataagaaggaaaaatcgagctaacaagtagctttacaaggtaggttgatgaagacgacgtggtgttggagcaggactcttcgtctgttccagtgcggaccaccggtaaacgtgaacggagtttggactcttgttattggaataacatgcctggcatatgttaaaattgttagacccagcttttcttcaagcatgtgtgtttaactttaaccggccgaccttcctgattgaaaataagactaattgtattagatcagtagggtgttcatatttatatatatatatatatatattaagtaaggtttagatgagattgatcactgatatactagtaggtttcgatcaccatcatatagtatgtttgtatcgtagtaactaattattattattatttatgaaaactattaatatatgttgtgctgataaaaacttttgtcttataatgcatgtatagccttactatgctgacctagtagctaccaaagcataagctcgtgatggagttttggtatggtgttcaataaaatcaaataaataaatgctaagctaacccacacattaggcgtcaagcaaacactataattatattgttattagtgtatttaaatattaaatctcctatattttaatttaataaataatataaaaataaaaactatataaaattactcattaagttgccaaataat

SEQ ID NO: 231083 - DNA, 1311 bp, Cannabis indica
aaaatatttccaacaacaactgcctctccactacctatctgacacgctgctcttcacggtagaaaagtaattttgtcccttaacttttgggaccacttgtattttggagccatgagagctccctataaatacccatctctttcattgaaaagggggtataatcatttgtaatagggttggaaataatcgtttgtaatggagtttagagattcaatacaacaccagttttctccattaatgttctgagtttctcttaagcttttcatcttcacccctttgcattttattttttaactaaagtttagttgacgagctcttaccgtcaataatttggtgtcgtctgtgagaatgacaagctctggctacgttagtttctaaagcattcactattattttcaagaggtgaagacattcccatcgtctccgagaaaatgggattcatttagatgaaaagtagccaaccaccataataagataaatcaacctcctgtcattgaagaaggccaaaggaagaataaccaatgtgtggaccaccaggaaaacactcaaaaagagcccccaacattacatgacttgataaccccaacgatagaagtattcaactattgagaaagccattttcagtgcggtaccttccaccatctgtgccatcaaaccccaacacttcaaggtgtgggccaagaaaggaaaagtaagtgtactcggtgagttcaagctcccgagctcactactataaagatgaataagcgacctccgatggtagaacaagaggctagaaactagtgtggctggtatggaaaaagtgttgagtggcatacttaaaggtaaaaccaagcctcgcatttccatcacaaaagccactaagtggagaacaagatctcaactgcatatgctagtgaaggagattccatgtcatccactaataacaccccaagagataaacacgaaaggagcctattgcgagacaagagcccaatggaccagtggagacaactcgagcctactcaccataaggggattttactgagggaaacactccataacctacagaagagacttcacttaagaggtcttatactagggggcacctcgcttatgactccccccaataacaaggtaagaaaaaggccttatccaccagctttagtgataagtcacacaatgatcggacaagaggagtacctctcacgggcccaatgcaaaccacacagaagacccaagttccacttgctaacccctgagagaggatgaagcaattggagtgtaaagcccgcttagttaatttggaaattagcagttatttatgttaat

SEQ ID NO: 231084 - DNA, 1039 bp, Cannabis indica
attcttttacaaagcatctggtttggttgttctggtgctcatatacgtggatgatatcattgtgacaagcaacaatactggtaagctaaatcagtttattaacaaagtgcatactatgtttgccttgaaggatctgggtcccctaattatttccttggtattgaagttcacagagatgagaccggtttgtatctaaaccaaggaaaatatgtgaaagaactcctactcaggtctggaatgatgcacctaaaaccttgctccacaccaatgacagttggtaagccactgtcacaatcggatggggatccactgtagaatcctactgaatatagaagcatcataggagggctttaatacctcactcacactagacctgatctttcttttgccgtcaacaagttaagtcagttccttcaagcccccactatagctcactggagtgctgctaagagagtacttagatacctacagggcactgtgtatcatggactacacatcaaaaactcagatagactcgccattacaggatactctgatgccgattgggcatgttgtcctgatgatcgaaggtgtgtagccggttattgtgtatttcttataaatacacttgtttcttggtctttaaagaaacaagttgtagtttcgagatctagtacaaaatcaaagtatcgagcacttgatcatgtttcagcagagatttcgtggattcagtctcttctcaaagaattcaacttcccacttcaatatacaccaataacatggtgtgacagtatgggagcaagcaccttggtaactaatcctgtgtatcatgctcgaacaaaacacatagagcttgatgttcgttttgttcgagataaggttttcaacaagtgtttggaagttcgttatgttccctctagtgatcaagtggcagactgcttaaccaaaagcctcaccaatcacatatttcatttcttagttgataaactcggtgtagttgaaacaccaccaagtttgagatggactgtcaagaaattaaattcctcacatgtttttttat

SEQ ID NO: 231085 - DNA, 1375 bp, Cannabis indica
ctggaaagctcctctgaagaagaaagcaacctagggctcgaagtgtagtgccgtcgaagctgctctcgtcgttgtcgccgttcatcggcgttaatgtccgtccttcgcccctccagtcaagtgacggttcaacccatcctacccagctgccgttagctgccatcagacagaacccaccattaatttcccttgtcatctccttcacaggtaactttctaatccaccataactcttctgctgctgtcccatctgtgataaattctggtctgcatcccatttcaatttcttcaaaactttcttataaaggaaacccctattttgattttgcatttatggaaaccatacctcccgaaccaccctcagcaatgattaaacctattgttgtagaggacactacccaaattctaagagccactgtcatctatgcaggtataatcgattattctcctgacatggagaagttaattcccactgagatcctttggccagagcatatactcgaccatttcagattatatataccagtttcttccttgattcacgctgcactatgtccttttctgcataatttcattgttcacttctgtacaaacactagcctttctgtttttgttcatagacaaattcccacccttgttctcacaatggacgacttgtccaacacattcactgccaatcttaacctcacggcccttgaaactcaaatccactccttcactgacacacctgatcatcctgaggatgatggatgtgaagagccttctgccttcttagcggtcaagctattgaccactcgccacttcaactctgaagccttcaagaaccgactcaaacagatgtggcctgaaagattttccatcaatattcttgaaaaagagcccaacttctatacggttgaatttggttgcttcggagatagacgccgagttctcattggccaaccctggcattttgactataaactcattgtcatgacccccttagaagctggctctgtggtaactgctgaaactctcagtaccacccctttttggattcaagtttcaggaatccccttcttgaaacgatctcatgttcttgcacaaaagctcggtgaagtcctggggcgttttatcgaagttgatactgcatccctcaaagagacttggggtccctatctccgagttcgaattgaaatggatgttactcagccactcccgcgtggaacgggcttccatttccatggaatggctgccccagtttggcttgaattccgcttcgaaaacttacctgatttctgtcactactgtggccgacttagccatatagtgaatcattgccatgagtttcttgctaagtgtgattcctcctcggctcctcctttgcttcactatga

SEQ ID NO: 231086 - DNA, 927 bp, Cannabis indica
aaaatatataaaaaataaaatattatataaaataagatcttacatatttgtgattataataaactatattataccattattattatcattataatagatcttaacaactcacagtactttaaaatttataatttatcaaatactcagctcagcttttttctacagttctactggagttgctttttctcacagtacaactacagctgttttttctcacaacacagctgtgccaaactggctgttagtgtataaagtgattaatttattatatatatatatatatatgatgttatcaattatcatatagagtattgattaatagagagatatgaggcggtgatatgacatttcaaaatttctctaaataattctctcattttaaaatctttctaaataacattatttgttctctcttttattctctcatttttttaaaataattttatttgctaaaaataacactattgatttttttcttaattctctcatttgtttaatttttttatcaaccaaaaataacattattggttctcttattttttttaatattttattaactaaaatataattttcttttacgttttctttaaaacttattaaattacatgtatatgcattaactggaaaagaagaataggacgttattaagtttttaactaatttttttttatataactacaattacatatatatccgatataaaaatctttataatattttgatatataaataataataatatatatatataaatgatattttgacattatattatgatctttaagaaattactaaaatcaaaaaaatgctcatttagttgttaagaattgatgatactataaatattaaagatttataattattaatatgaacgtcatataaattttatgatgttataaaataatataaaataatataaagtagatg

SEQ ID NO: 231087 - DNA, 1026 bp, Cannabis indica
tgttaaaacaacatacttgtgagtagatctaagatcctggtaaaataaattccaacatgattttagtttttgttgatttgattaacgattgtaaagtgttgcttaatgatttaccctttgtctcgttttcaattgttaaacggtctgcaaatgtggttgctcatagctttgctagagcgcctcgttcataccttaatcgtacttttcagtttgagggatgtctcaactgagttgttatcttgtttggtaacagaatttcatgcttaataaagcttgaatttttcattcaaaaaaataaaaaataaaattattataattttttaagaaaaaatcttttctttcttttttctttccttttcttattccttatttccagagagagacacacgatgggtctagtggttccaaatctctcgtggcttgtcccattctgtcactaccaaacttgtcgtcacaactctattggttttatggtactaaatcaggttcgtagcagaagaattcgtattatctgattatctttgtatcatagctcctaggatctccatatgtgtacattaaatcagaacaataaaaataataagtttagagtatatttcttgaagcctatcagggtaacctcgaaacttcttgtaagttgtatctcttaatccagttgatgaggaatttacaatttggactcacagtagtgtcttctaaatcgatctaccacacacaaggaatagtgtggactattaggataaagtgtataatctttgttcttgttgagttctcaacacatgagcaagaataattgagaagaaaaaaagtattttcttttctctctgtatacttcgaaaatatagtgttcaaaatttctcaaatcacgcttctatttaaagtagttaaatctcttttaattaaatcatatttaattgtttaaataaacatatatctataactaaattcggttactgatattaatgaggaaatctctcaaccacttgagagaatatttgaacaccttaaaatatctataatcacttt

SEQ ID NO: 231088 - DNA, 1747 bp, Cannabis indica
atttacaattttacggcctaaaatttttatttacaaaaagagtaaatagcaacataagtacccaaaattttaagtttgtaagtggcataaattcaatatttatttttattggcacaaatacataatatttgtaaaactataaattctctaatttcgtcagtacggactctattattgtcttaaacaagacagatataaggctcaaattctaaatcattgggtctagacagaaacatgtagtattagtttttttgagccaaaatattaaattttattaaattaaatcagctaccaagatagcttccaaaccagcagagacaaaacccccgcgagaaacacagccaggaatagaaccaaaagaacgagccaaaatgttagccgcctggttcccggaccgtttaacaaaattaattgaaataggaaacaaaagagaggattgcataagagcaacacaatccgaaattaaaagccccaccggagacaacaaatgcttcttctgttgcagggtttgcaccagcagcagcgaatccgactccatgaccacactagcaggcacacccccctcaacccaccttcccttcacccaactgagcgcctccttcaacgccatagcttcagccaaaaatgggtcgggctgaccataagttttaaccgccagcgcatcaatgaataaaccattatgatcgcgagcaatccacccaataccgagactattgtcatcctcaaagacagcagcatcacaattaacttaatctcaccaaaacaaggtttagcccattgctcacacccgaaagtaatcgggccagaaattggcaacacaactctattttccagctgagcattcttccaagaatcaaggtaagtaattgcagcattcaccaccctctctaccgacaaagccttattatttcaaaccaagtcattacgagcctctcaatacgatccataggttgcaccttacaaatattatcaaaccagctgccaaacacaataacttttcaccccctcctaccgtccctcccagcaccctgtccagaaaactcttagtaaaagcgcagctaaccatgatatgaaaaactgtctcatcctcccgattacacatcagacacaaactgctcatgtggacccttttagaccgtagcgacacaagagtaggaagacaattagtaagcctcggccaaagaaaattcttcaccttaggagccaatttcaagttccaaaatatcctccaaaaactcgaattgtcctgagtactccacctaccattgcttacttgtaaggcgcgataagcacttttgacagaataatccccatgcatctccaacacccaaaaccaagcatcctaaaccaaagacggagacaacggaatacaacgaatcaaattaatatctctctgaacaaataaatcatgaagaacatcctcatcccactcaagagagcccacttttaataaattattgaccttacagtcatggagagccacatgagaagaggtaacatatacggatattccttacaaggtttattcaccatgccacatggagagccacatgagaagatggttgagaaccgatatagaaaaactggctccaacacgccatctcgcacccatcttaaccacagattttgcccctagaacactccgccacacatagcttggattagcacctagctcagcatcaagaaacgaggaatgggggtaatacctggctttaaaaacccgcgccactaaggaactattatttgt

SEQ ID NO: 231089 - DNA, 1386 bp, Cannabis indica
tttatagatttttttttttttaaattgggcgggttgcacttaaattttaacaacctgaactttagattgggttagaaaatatataggataaaccgtccaaaccgaccgatgtacaaccctagcattaacaaaggggtgcaatcagtcagtaataagaagaaaatcaactcatttagttattactggtgaaatcggttactattgccctcgatattgggacaatattaccatgtcggtattattgattaatagtaacgggtcccgtcgctacacgtattatcaaattacaatctaacatagtattattgacgggcccagtggctattattcttccaatagtaatatcaaacaaaaaatatatatatttctcataatataatataattaaataaacaaaaaatataatataataattaaatttgttatagtgtgaattttttgtttagaaatacaagtacagtctcgtatatatttgacacatagatccaattcccagttggaaaatgatgacatgtgaataactactccactagagctattctcgcatgataagaacttgcgagaaggtgtgacttagaccaggtctagtcgcacataatgctcaccattgtaaaatagaagcaggatcaagagttagcacaagtcgtgtgttaacaattttatgcgatgaccaagtgtctctcgtgtacccatataaagaccacatccttacaggcgtctggttcgaatgactaacgtatgtgacaactcttcttgaacccacgagttctatgttgtcagtatggcaacgctccataagcgacccatatagtcgcaagaattttaagttataaattaccctaagagggtttaagtggttcaaagaccttatatgaaagtaacaccagagaacccgcaagttcatatggtattcaagaaaaataaacaatcaatatgtgtggtctaaagtcgcatatgttcgagtattaattagaaatggtgaaatctattctttcatttattctataaatattttttatcttaattaaatgtaattaatactgtaatggtcctgtctgaccgaataggtaatccaaaggatcacttgctttctatataaacgagtgatccaatctgaattaaattgaatcacaaacttttgcaaaagtagactaagcagaccaagctctgcctgaactgctataattttctcgcttttgcattttacactatctttatttgcacactcactatttatatttgagtatttgccattttaggtgaataattgttgttttgcaaaagagtgttcttgcttatctcgaatactcacaatatttagtgttgtctattttccttcgacaatatttggcgctagaaggagggtgattctgttgggttttatgc

SEQ ID NO: 231090 - DNA, 869 bp, Cannabis indica
tcaccacccaattttcgaatctcatataagtcaagattcccaaaatgtttaagctcctgcagcatagtctcttgtgcttgaaagaaagaagtaagagcttgcttctcatctaatcccggtagcaaatcttgaccttcaaccgaatcttgagatgggccattagagcccaatgccgtatgaagaccatgacaatctatggaggaactagcaatcctacccttcttagtggacttactcattaaaagctttggcccacgggtagcaatctcaggcccaccaatctttaattccttcaaagttgcaccattaaatgatcgaatagggcccactaaatcaacatttatctttttaaagtcttttaccttgtcactcggcccaacagagacacgtgggaggccctcctcaaaagcctcaactgaatccggcccattgacctttgaattaataaaattaggcccaagtagagaatagttcggcccatcactaatattcccatgattctgagccttgaccgcctcagggacacacaccatatttaaatttttcacattaaacgaggaacggtcaacaggctttctcaacgataaatgaggaattaaatcagagccttttacctgctctaaagaaatagcttgagccccattaccaaatccagaaatcttggcctcatcaacaccaagcttcgacttaggaacccaggctgcggactgcgactttcccagcaacacaggcgatcgacgggtcactttcttgggcagtctcgagaaaccactcactttgaaacccgggtggtttgtacccgcgaacccacttccagtcgcctcctttggagcaccaccggaaaaacgactaggaggggggatcaccga

SEQ ID NO: 231091 - DNA, 1283 bp, Cannabis indica
accagatcagtggttccctcatatagagacatgcgggtttttaaatcttgaaggaaaaggggtattcatgatatctaggtgatatggctcaagctcctcgtctgagtcgtatccagattgtctccctaattctcccacttgatatctcctgaacttgtcccccaactcgtctattcccaattggataggatcctcttgctttggaccaagttgtttgtgaaggtcaggtttctttggattcaagtgctctcgcagatccggttgggagtaattgctaatagacctcattttactcacagattgtgtccgactcatggacctcgtcttgctcatggacttcgtccttgagtgactcgcagatttactggttcccattccttctcgatcactagcttgtcgagtactttctcctcttcgagttgatcaaatgtgggtccttgaccgccctaaggttacacttgcttcttcacgctctgttctttccccctaagtgtggtttgtcgtattttccccattagggtttatacgagccctctctctgtgggtttggaagaacgttggtgatttctcgcaagtcacctacgttctccaggctgagtcccaagatcctcctcattttcatgaggaatttctcgttcatcagtttttggttgcctcccattctcatttctgtgggagggttctggctgatcattctgatttttaggaggtatctcatttccctgggttgttcttccagggcattttcctatctcctggttcgtgaggcacgaggcctgcctcgtggtcttctcactccaggtttatgttgattttgagtgttagtcccctgcggtgccctagctatgatgcatcacattctaactcggtgttctgccactgtgcctcctccaggcggtgtctaaggcggcaattttccgtttcataagtgccttctcccataggctgagtacctccacgaatgggcccctcctccctagttctaggattttggccattctcacattgagttctcctcaagcgtgttgtttgcgtactgagaccaacgtcaggttgggtccttcgggaatgagttgttcaagtgctagggccaccctcaggttgagtcctcctagagtgggtggttcgtctgtactgtggatcgaaagatctcctggtgcccatgggatctttccctgaacggtgatgagtttcctcatgtggtgtattaacatcttctaggttttcagccatgaaggagatggttttcttcaaaaaaatgagggttttccctgagctttttt

SEQ ID NO: 231092 - DNA, 864 bp, Cannabis indica
aatttgcaaagaaaaataaactttagggaatttttcaaaaaataaaaaagataacaaggttaagtgtataaaaattaaaacataagggagttttactactaattacccttatagatccattagcatcccaagccaccaatccaaatccaaaactctgaccactatcaaataatgccacatctatattaactttgatactatttggctgtgataaaatccaatgctcaaccccattatttgcctaaaaattagaccaccatgaatctatatcaaattttgagcatttttctcttaatcaaggtactttattgcatacacaacaatgtcatcaaccttcaccgtctttcccttccaaacaaaatcatttcgagtctcccatatagcctagcacactgtcaccaacaaacacttcatatcgttgttcaccatttcaaacttgtctacgcaccagtcaaagaatttgaaggattgattcctcactcaatagccaaacagggcacaaagggttcaccttcacatgcttagaactcagttgtaccatagttgggagacaaccattaacaacatgccacaacaagtttttaacctttgtagtttgtggcagcttcaatttccacattttattccacaacacaaaaatcatcttcattcaaaccacatgctatgcaaccacttgaggttagctcaagtagcaataaagaattattatggaatgtgtgtggggttcctgatatcgaattctaactttgtgtaactcaaaaaatatatttattagacgcttttaatataaaaaaaaaaaacttaacaacctgcaatgaaacatattataagaactttttacgtatactaatacttgaagtttcc

SEQ ID NO: 231093 - DNA, 867 bp, Cannabis indica
gtgtgcatgtggtaaaatagtaataaaatatagaagatgagtaaaaaagttagtttagtcgtgtatatgtatttatgtaataaatttatcattttgaatttttggtgtaaaaatttcttaatataaagcaaagaaacattggatacaaattacaattgtaaagataaattcttccacaaagcctcctgatctaggcctaaagctttcttagctagataatgggaaacttcatttgcctctcttgggatttaactaataaaaactttaggaaagtaagacagcaagcttttaatttcagtgacaaattttctaagatgtaataagtccaaacaagttaaaaaaatatttttagcaatgaaatcatgaaaactaggtagttcccatacctcctggacagttgggcacctgaaaagagcatgctctagggtctcatcaatcaaaacatcggcaacaacatgaagaaggtaaagctttccgtttaaaaaggttgtgactggtgggtaggataccatggcaagcacgccaaagaatgtgtttcagtttgggtggtaaagggagtgtccatatctgtttccaccaactttgggaggctgtgatatccgaaggtgctgggtcatttcggtgtaactgactatgggcttgatgatagcctaaactgactgtgtaggtgccatgggttgtaagagaccagaaatatgtgtcaggtgtggtgatgttggtgaggggaatggttagaatggcttgacaaatatccgcaggaaaggtggtttggagacaggtgaggttccattccttagtaggtgttaaaagatctaccacagtcacatgtacttctaagcggtgcctaagataatgaagtttaccata

SEQ ID NO: 231094 - DNA, 796 bp, Cannabis indica
cccctaataaggcccaggaagatgattaccaataagtagtgagcctcccagactgctaatctgaagatccctgaaaatgaggctcaggctccgacccatcctccggcccccccacataccaacaagcctatttcaaaaattacttaagcttccacctctttaagccaagccctcgaaactctacctgtcgaggctaggaatactggcccagagtacgctgcagaatttggaatatcttgttggcgtcatttcaaggccctcttttcccatgaatgagacttaatcaataatggggacccataggaggtgtttgaaaggagtgtcggtgatggcctctcggtaaattcctctacccttacctacttacttcctttctaaacatccttcaaaatactgatgcatttttatttgttgatttcatttccttcgtcggccaacggcggggcatggaaaaaaggaaatacatggacagcgagatccagaacttgataggccagcacaaggttgtgacctagcaatggaatgatgccaagttggagaacactcgcctaatcaaagaagccgaagaggtgaagaggactcagaaggccaagcttgaagctgccaagaaggaggcaaaagataaggcggatgcatgccgaaaactccagaaggaacttaatgcagccaaagtaatgctccatgggaaaaaagctgaaaccattgaacgatgcaacgttgttggactacgttccatctaccacgcctggatggaaaatcctggaatggataagagtttcttgggagagtctgagga

SEQ ID NO: 231095 - DNA, 1542 bp, Cannabis indica
ttcatattccgatgttaagctcgcagggttaccattatgtttaggatgtctgcgtccttaggtagtcgcttcttgtagacatcgtatgtcgagctgatagaacctagacatgcaagtctatattgcattataaaggctgcagggttcctaagaccaactcgtatttacagagaatcgttctcctagtttacacaaggacaaggggaggatactcgcatatattcaatatatgcgatctactctcttgtttcggatgtgattagacttcggtcatgctcgccacctctcgctggttatatcttaagtgaggtttaaaacttcgaggagtcccttagggacatctcagctttctgtggaaaatctgagtatacgtgtcctttaagtaggggtctggtctcgagtttctaggtgagagaaatctcactataacactacaatactctcttcagttctcaaggagtatgcgatatggctataaattctatccttcatgtgatctctaacaagctttcccctgagcaggctgcttttcttgaagaaccctttactgaacttgagattaagcaagccttatttggcctttcgggagataaggctcctggccctgatggtcttaactcttttttctaccaaaaaaattggtctacccttgggaaagatttcaccagacctatgctccaaattcttaaccactaggaggacgtttctctgatcaatgaaatgatcatttttctcatcccgaaaaagaaaaaccccaaactggtcagtgactttaggccgattagtctctgtaatactctgtacaagtgcctctccaaggttcttgctaatcgtttaaaacttgtccttctccattattagcatcaaccaaagtgctttccttaagtgtcgtcaaattactgacacattctccttgctaatgagattattcatgccatccactctagacgttcgggcaagataggttgggcagctattaagcttgacatggaaaaggcctttgatagggttgaatggcacttcctccatcaactgctcattcatgtagcttttcctgcacccttcatctctcttgttttgaacttgcctgtctactgtctcctatcggttatccataaatggtaccctcactaacccttttcactctacccttggcattcgctaaggagatcctttgtctccttacctttttctcttgattgctgaggggctttctgctgctatccgtttacatgaaactaatggaagctttcctggcatccagatatgtaggggagcccaccccctttcccatctcttgtttgccgatgatagcatgttattctcccaagtcactcatcattctagtgacgcccttaatgctattctccaactctataatagagctaccggtcaactggttaatagggataagtcttctattcttttctccccaaacacctctgatgaatcacagcatcaattctgacatgctttacatcttactggggagggttttgttaacaagtatgtaggtgaccctatttgtgtgggtagggttac

SEQ ID NO: 231096 - DNA, 1026 bp, Cannabis indica
aatatagtccataagcacgtaaataaattaatttcactattttacccttctcgggtcaaaattactaaaatgcccctggctcacctacggggtcttaacatgtcatatctcatattactcaattaaccagttaggttttttgctaatccattttcttaattccagggtattacaggagaggtcgaggaggaggaggaagagggtgagatcttgggccccttggactgaaaacgcaagggcaaaatggtggaggctgagtcttccaaaaagactaagagggtgaacactccggccgtcagctctgactcggggattctaccagaagcgaaggactatactgtgcctcccagcatcattcttggccacgttcccgcggatgaggagaggcaacaactccggatagccaagcacaattatgctatggctgagtatacaagagggaacgtcgaggtagaggatttgaaaaaggtcttgcgggaggcccagcaaaattccttgcgcgaggagtccttcaggaacgcctaggacctgaatatggatcccctgatggagtggttcaatcgctttgtcgggcctactcttactcccttcgcctctgagttgacgagccattttgtctccaacttgacccaactcccggccaaaagatatgcagcctacgcttccacgaaatccatctatcagatttaggatatcagcgctgctatgatcgcggtgagtctctgttactgtttttggggttttactctatggcacctgatcttccatacttaactcttttttcttattttgccagattgctgcagagaccggtcagctctcaaagactttaattgatcttgagtacgtcatgtccgagtttggggacatggaggaggccatgaagagcctgagaggaaggcgttccaggaggaagcccaacagagggaggcttaggcagaaaggagtcatcaagaggcactgaaggccaaggcagaggagttaaaggctcgagatgaggccatggctaaggcaaggcgcgagctg

SEQ ID NO: 231097 - DNA, 2161 bp, Cannabis indica
tgatttgattgtaccccgaataggcgtccatgaagcttagtatctcatgtcctgctattgcatccacaagttgatctattcttggaagtggaaagcagtccttggggcacgccttattgaggtcggtgaagtcaatacatacttgccattttttgttcggcttgggtactagtacaagattagcaacctaggccaggtagaaagcttcaattatgaaattgttgttgcacaacttttctacctcttcttttagtgctagggctcgttccttgtctaataatcttcttctttgttgaacaggttggaatttaggatcaatatttagggcgtgtcaaattatagaaggatcgattccgaccatgtcctcatgtgaccatgcaaaaatatctaggtttgctcttagaaattttatcaatgatcattttacttcgagcagcaaaccttttccaattttgagttttctggtcggaacatttgggtcgattccaatgtcttctagttcttccactggcccaacatttgtatttggttccccaagtcagggatccacatcttcatccccgccttgggcggttccctatttggaaatgtcttttcccttgttcgaactctgactagaggatacttcctttttagccttggttaaggcgaggttgtaacattcccgtgcaacttgttgatttcctctcaggcacccgaccccattcttcgttggaaacttgcggcacgaatgaaatatagatgtaactgcttttagggcatataagactggtcgacccagcatgacattagaggctgatggaacatccaatatcaaaaattgtaccattacagttacgctcttcggagcttgcccaacagtgaggggtaggcaaattttccttagaggtacgacattctggccggagaaaccatatacgggctgaagacaggggttaaatcattgagttggagccccattttttcatatggtgttttgaacaagatatttgcagaggcaccattatctatcataattcaggccactattttgttggctatctgtacttccacgaccaacaaatcattgtgtggaaagttaaccttgatagcatcctcttcattgaacattatggtgggttcccctacccatggtacttttggcttcctttcttcaacggctaagactacttatttttgctcgtgctgtaaggttcaggcatacctttcccgggctttgcctgaatctccagctatgtgtgggcatccaataatgacttgtaaatgcccatctactagtggtggcagtaaatcttggttattgtcggcctgggcggccctttgattttgatcagtcttgacatatttttgcacgtttgggttattctttcttatcaaaaattcaatttctcgcttcaaatttttgaattcgttggtgtcatggtcataatctccatgaaaacgcaaaaacttggacatgtctgtcttacttatgtcctttttcaagggagcgggtttttttttacggagctactgactgagtagccatgtaaatagtctccaaatcgttggtcaggacatagaaagcagtgaatttggaacgattttctctaggggcatcttcggctttgccagtgaactttccctttttcccattgccttgcctgttattgatgttagaccttttacagcccgagcctgaattgcttgggtactgagggtgctgaatggatgttccagcagatggagcttgtgattggtttaatttaagcttgacttctgctcgctgaatggcctcttcgagcttgatgaaaccatccacgcgattgaggaaatcactcatagaatctactagttcgtctctcttgatgtttgtccaaagctctccaagaacttcgatgccccctagtattgcggttaattacccttcttcggttaaccgtgcaacttttgtcgcctccgtcatgaatctgctgatataagatcggagaggttctcctggcctttgcttcacttcgaccaggtcctctaaatgcaatgggagttgacgagaagaagagaattgtgcatggaattccgaggagaaagccttccaagagttgaaccttcctggtgtcaacttgaagtaccattattgggaggcttctaagaatgtggccagaaaaactctgcaacatacatc

SEQ ID NO: 231098 - DNA, 1148 bp, Cannabis indica
gaagaagacaaacaaataccgaattacaacctagaacagatgcgagtgggcttagaagaacccagtgaagaatcggcaacagaacgccgtcgaaggcgccgccacacgcgcctccacgcgccggcgcgtgagccccatgcgcagaagcttcaggcggcgcgtgagccccacgcgcgaggaatccggcgaccggacttcggggtttcgtggatcggcggctgggcaacacggctgagtgggcggcgagaataaattctcactccaaatcgggtttccgaaaaacaaccctaaactcaaaccccaatttttgctttttctttttttttttttttaagaaccctaattttgaattacaatgctctgataccatgtagaaaatagtgattcgaattgtgtatcgatttcatagaataatacatatttatatacaaagctaggagactaaatatctactaaatatctaattcttttacagctaatatacatctaatatttactcaatatctagcagccccccacacatcgctccaattttcctcatgattttcatgttccacaaatgtaatggcagcccttcgatgcctatccatgagcttctacattcaattttcacatctttgttttgttttttcacagaccatttaatgaaagaggcaatggtgcccccctgttcccggtattaccatcttgtttaacttcaatagaaagtccatctcttcctcgttcttacaccaaattatagtgcgatcatcatacatttggctaaccaccagctttctatctatttcccttgagagattgtagagtatggcactccatgacatctcgctattgtctttgaacatcatcaccgccctattccattccttgtcactcttttctgcttgtgaatactcatggaaatttttctgctctaatctcttttttggaaacttgtttcttggtctgaagctctcgttcccttttggtagaaagtcccaatatcccagtttgttggttttcctcattactagaggaaagctttcttttgaaatattttcattcccacccattgctttagtgacatgctgcctcgatctttcgacgatattagcccatgattgtttgttcttcctaccttcttctatcttcacttctttttgctgttt

SEQ ID NO: 231099 - DNA, 800 bp, Cannabis indica
gtaaagcctctagcaacttcctcgttagtttcttaagtttgaagttatgagtttttgcatgatttgggttttaaggtgatgtggttgctgttattgtttattattgttttcggagattgaattatggttaaatatgttaaattaagctaattttaagggatgttatgtaggttgagcaagctatgagttttagaactcaagcttggctctttaaaggtgttttaatttgattctgagcttctgtagttattttgttgcttggaatatatttattggggtataatatccaggtctggaaggttaggtaaggattggaatcgatttggttaggttttggatttttctttgggttctctggggtaaaccggttacccgaatttgttgctgggttccccaaaaaattcgtgttgtcaattcgtattagtttcagagctttggttggttacttggttgctagtatagggtatttccatgttaagttgtagtagataggtttttggtataaaacctaagtccctagttgtgatttagtgtgtcacttatccatgttgtgattgatgtgatttaggagcctgtaattcgtcgagtagttgttccactcaggttagctggcacacctgaattcagaatcaaggtaagattagtataatgtcatgcatatattattacatgtttagcatacatattgtttatgcctgttagagtacattgatagcagtaataatatacgcagagttgtattgataactgataaatgtatgttggctgaaatactgatcgatgctgtcacatcaatatgg

SEQ ID NO: 231100 - DNA, 619 bp, Cannabis indica
gatttttaaattaataaaaagattttttattttttatccaaataatcttagaatgatttttctaattttaaaattaaaaaaagagcttataaaagctaaactaaacatggtcataatggagtacattataattatggcaaatcttctcccgtatttttaaaaaatttaataattgcacgagtgcaggttacttttatacgtatacaaattgattattttaaatcttgtttttgatattgtaaattattcataatttttcaaaaactaaccgcatggccatgatacacatcgccatgtaaaaaaaattatgttataattttttcaaataacgaaaagagaaatgccccgccggtagaggcaaaaatgaccatcttacaactagaggcgaatttgtcaccaattttgacaaaatactcttttgattacccatttaagttgcagcaaacttatattataagaagaaaaaaaatcacatgaaatcacactatagctctccattgttgtggatatatatatattatatatatagatatttcaataaatcacaactatattgttcatcacagcaaatggaacaaagcacaaaactttactgctggcctttttcacctaaaccgat

SEQ ID NO: 231101 - DNA, 1350 bp, Cannabis indica
cttcgagtagattaacaccatcgcgccaggtgacacgacctggataatgctctgatattggaattattagaagtgcaggtcactcaaaaaaaaaaaaaccagaaaattgaaggttagcaattaaagatctagcataaaatcagacccatttcggacccaatacaataacaaaaacaacaaacagtacattcgcaaacacatatatcaagcacaatcggaccgtatatcggatacaaacaggcaaaaaataattatgatcataattatggttaataattttctttttgtaaggtttattattgatattaaatattttgtatttttctaaaaaaataaaacaattaaaaaataataattaattaattaaataaaacatttaaaaacattaattaattaaatttaattgctaagaccatcgggcccaacctatcggactacccgtcggactgcgttggacaaatcgtacaatcagaccaatgcaaaaaattaaacggacatcggaccccctatcgaactggccatcggaccaatcaaacctatcggacaatcggaccaatgcaaaaaattaaatggacatcggagcctctatcggaatggccatcagactaattgaacctatcggacaatcggaccaatgcaaaaaaattaaacggacatcggaccccgtatcggactggccatcggcccaatcggacctatcagaccaatacccatataaacaaacattggacccctatcggactatgcatcagacccatcggacttggctttttcaaataaaaagaaggaccgttggacccatatcggaccccatcgggccttcttcttcttcctcaaaatttttcaatttcacagatctgactatatgtttaacaaaatttccctaaatcaaacaaaatttaggtttcacaaactaaatcaatctttaacactttctcacaaaacaaaaaaaaaaaaaagggaacacccttagacattgtgtcgagagcagggggcgccgtcaccgtgcgtttgagattgagtccaccgccgtcaccatggatttgagattgggtccacagccgtcaccatgggtttaatatttgataggtttgggatgggttcaccgtgggtttgggcgagagaaagagagaggaggcagtttgggtttgggatttcaaatgtgaggggtattatgggaaatatggtaatgtggtcatatatggggaattttaatacatatggatttaagggaaaaaaaaattagggtattttatgcatatttattcaaattttccttattatattaaaatctaaatgaacttaagtcaattattttttttttgcaagaaagttatttttttaaggcac

SEQ ID NO: 231102 - DNA, 1462 bp, Cannabis indica
tcaaatagttaacctcctcctttcaaatgaaattgaaatattcagtaaaattaaccatgataaagtaaaagataaaaattataattttttcctgttaagctgctaaatctgtttttaaatcttgcaatgcaagtatcatgacaaaggtggaattgtatccttttctgcatgcatatgtcttatttctattatcattatcagtacatattattccttcttctgtaactgtatttgtttttatgtattttctcatcctttattatgatgcattaatttttcatgtcttcaactttaaataattgaatttaaatttaagagctaactctagtgtagtgcaatgtatataacctgatcattttcaaattaatgaggattattaatattctacgagaacaggtttcgcagcccatcatcatcaggtgggatgtataggcctggttcaagtccaggtggatatggcgacagatatgaagatgaacgttatggaagcagggatgacgatcgatatggaagaaatggggaaagggaatggggctacaaagatgatgatcgctatagcagaaacggggactcctatactcgtgatggagatcgcaatggcagagactatgaggagcgctatggtaaagatggttacagagatgatgattacaggggaagaagtcaaagtgttgatgataactatggtacaagaagtagaagctctgatagagacagagagcgttcttcttttgatgatggtcaatattcctctcggtgtgtgctttactttaatagatttttttaacatctgatttgagggcatttaattatttaattattttataatttttctttttcagatgttgtcttattgtctatttggttgcttttcttgttttgcttgtgttttttattttttaagcatatggtacttgcaaagtttatcatggaatttcatctttcgcactaagatcatgtcaagtgtgaaattatttaacactcaaaattattacctagcttatgccttttatcttacttggcagtgggcctagaggtgatgattctcaggatggaaggtaacttcgtgtttattatatgcatgctcatttggtactcttaattaggtgaggttgacatagagcaaagtgattgacacagtttttccttttgaaatttttattcttttttagcaggcgccttgataggaaatactctgaacaaaatattggtgcgcctcctagttatgaagaggcgataagtgactctcgaagtcctgttcacagcgagaggttctattatttttcttcccatttaagctaacaaagtcttttgctccacgttttcatgtagttctcattccccaagaatgtcttgataacagggatgtcgaaactccaacaactgctgctcctagaggttcttctccaccaagcaacgttccaacttctccaccagtaagcagtcaaccaaaccaaccaaa

SEQ ID NO: 231103 - DNA, 1145 bp, Cannabis indica
cctggtaaaataatttcaacagtgggcgtatcagggtatttttataattttgactcgagaagagtaaaatcataattttatggtgtactatgcttatggactatattattatatagtatgtttctgtctttctacatgtgttttctgacaagttagtgcagtgtagtcataatcaggtcttttgggccgaattgggttcgaggctcaaaatactcttttcggatttaattatagcatttatgtgataaatggaaaaatattatttatgtgatttatgtgtgtgagtggaatgtcatgatttcaccttttatgtattgtgagtgccttaggggccaaatggttttttttaaccaattaatctattttagtaaaagcaaattttcaaaaaaaataaaaataaagttttgggttctttcaaaccccaaaccgacctctctctattgtatatttttacccaatttttaagaaaaagggcttgaaatctagtgtgaatttgtgtatttcttgcttggagcttgaggatttttaggtagctcttctaatctcttttgcatattgttaatttgtgaattttgagcttgtgtataatgtctgtggatgctcatggtgttcttgtcatttgtgttgcatgttgtggagattaagaggaaattatggtgattatagcgtgattgagctattaggtttatgtatatgcatctagattgaattgggagattttagggttgaattatgatgtttaaattttgggaaatgctttgaatttctaggctaagctttgaagctttgagtttcaagcttttgcaattatgtgcaactaaggtgtttgtgtagtatggttgatttatgatgttgattttgattttgagctttgtgtggtgctcaattgaataccaatgttatattagtttgattttgatcaaaagtttagtttaagcatgattttgattaagttttggtatgtttttgggttaaaatcgagtgtatagaaaagttagaattttggggttctagggcctatcgctgcagccacagtagggctcgccgtggcgaggctccaacaaggagccaccacggcaaggggccttggtcggtttttgtttcgtcatttttgccataacttttgactcggaactccattttgg

SEQ ID NO: 231104 - DNA, 889 bp, Cannabis indica
aagaaagaaaagtatatggatggaccaaaccctaaaatcaaacacaacatgatgatcacgatcgatgataacactacccatactgatatggtgggaaaagtactgcgagctgagggcacagttgagtgcatccaagagtctcgagggactcaggttattggtggagtcattgctcctcctacctctagttattgtaggggtggtagtgactcgagcattgatcaaaagagaaaggcaccatctgcacctggtggcccaagttagaataagaggttttgggggaaccaaggtcgtggtaaccataagggtggttctaaaacacaatatacttacctagaatgtaccaactgtacgtaagaagcatcatctgggtgagagtaaagggcaaatatttttttagtgtggtttgcctagacactacaagagagattgcccacaactcaagaaagaaaagtagaagagagaagcaaaacccgctccagcaagggtgttttctcttactcaatcaaatgtagaagctaaccccttagctgttacaggttagctctagatcaacaactcttatttctctctgttatttgattttggggccactcattcatatgcggcggccaaaatttttgataaattggatagaccgtttgatacttatgataaggggtttggaaccctacttcctggcagagaattagttatctctaaaaggtgggttaagtctttaccgataaaaattaaggatagagagttgagtgttgtttagtggaattgggcttagcagatttcgatatcatacttgcaatgtatttcttgtccaagtactctgctagtattgattgtaagcaaaaaatggtgatcttccaacctgagggcaaggaaccatttgtatttg

SEQ ID NO: 231105 - DNA, 1683 bp, Cannabis indica
gccactcctttggtatttccaagcatatcaataacacaatatgatgggagagtatagagcaaagtttaattagcaatgttagctaggaattattcaaacgcaaaactacctacccattgaaaagtctttcattgcacaggttgacaaaatcatctgtgtagttaccaaaaatgttatcaaggcgttttatcagttttggtacatcatccggagacaagacatcccatatctttagtacttggaagtagttcgaattctttgcgatgtccactgtactaataacaatttggccatcaaccttaaatctcattatctccaaagaacttctacttcccgattcttcaagaaatcttttaggccgccaaccaccggaaatcttaagaagatggtttaaaattgacttttttttccgaataggtgttaactttctaaaggacttcaaaaagttatcactgaaaagaacctgaaatttggaatggcaaggacagaaataaaaaaattagaatagaaatgtcatatatgtatgtctgtagatttatgtctgacaagagcaactgagcactaaaaattaccttccacttcgaatttctgaaaagcatgctatcagcattaagaagatcatcgaattgatcaagctctttctttatctctaacatagccttcaccaaactcacatcttcatcagcattatagaaacagagacgcttttttgcatcaatgactagagcttcccaaatagattgactattagcaaggttctttcattaccaagtatccacaagcaatgcctggacagatcaatagaacagacattttttactcacgcttatgaaaaccaggcaacaacatgcttggggaaaaacatcagtggcatacctagctctagtgaaaaacatcagtgagagcaacattcgttctctgaggtttggatatgaaatccaatgtctggcctatatcagatcttacggttgacattagtataatgtcttctccccaccctggaacccgtcaattgttttcaatttcactcgaaagccattaatatagtcatacttctttccaaccttctctttgaattgcaacaacttgagcagaatagggagacaccacaccaatactaagtttagctttggtctcatgccatgatgggtaaaaaaccaaatggttcagtgcgctcaacctctgaaacaaacttcttccaaaactagcttcctcagaaatctgttcagaaaaaagcattgtagataaggaatcatatattacaaaatcaggatgaaagtgtagttattaagaaaagaaaaagagaagtaaaagtatatacataccttgcttgtaacagaagtgcttcaaaactatcaagtaacacagtaagggttgtcatgtttagaaaattttgatccaaaatgaaactttgaggtaaatgcgtacaaaagatccaaatgcattttctcaactgcttgacagtggaagcaaacctttctctcatgtaatcaagaaatggtttgaacttttctatgatttcttctttaatattagttccacagctctgttcttgttgttctcttatcaattcagattccaggaaaacacggtactgagaaacccaacgttcaagtaagcttatcatggaaggaaagcaatggttccaaccatccggacctaaacactccgcaagcctttgaa

SEQ ID NO: 231106 - DNA, 1146 bp, Cannabis indica
ggaaaataccagtttctgtggcttctgtaatggatgatgtgaagggtgcgaatgtcttcaagttcggttttgaatgtgctgatcataggaactgggctatggagaatggcccatggtgtgtacgtggttattcgttggtccttcgagcttggactcctaccgttgaagggccggtggctttcaatctgttgcgtacatggattcagattcataacctccctcatgagtatttttctaaggcaaatggttatctactagggggattggttggaaaagtggtgcgagtagacctggatgaaggaaagccagctgcttggtgcagtttcctcaaagtcctggttgatattgatgctgaaaaaccattattctcagggtgttattttgatattgcatcaggggtgaagaagtggatacaagtgaaatatgaaaagataggcattttctgttatttttgtgggtgtcttgggcaccaacgcagaggatgcaagctgacatctccagtgacggtctctaatagcgagggaatcccttttcccatgttcggcccttggctttcaacattatcattataccaatgcgttttttctgggctgaagtcatctgtcttccgtcgactaccagcttctttggcctcgggaagaatgctggaagtgttttattgttgccggcatccatggaagatggagatgctgaacggaggagcttccctacttctcaagctcttcgatcgagacggcaagtgatggggacatctcacggtgccactggcctcgggaagacgaagcgtgcggtgtggttccctaaaaattgcctttctggtggtgagagatcgattgccatttctggctttggtggtgaggcagggtctctgcaagcaggaaaggaaaaggatgacttacttgttttggagatgaacagtagggaccaaaggaatttcaatttgaagaccgttggtgaggataaaaggaaggatgggctttttgttaatgggccgagtggtgtgaatgttgggctggataatcaacaaatgagaaaaggaaagagcccactttaccagaatttaaatgagactattaatgtaaatgggcctccgccttcttctaaggaagctattctgtgtgggcccgagttagtggagtccttggg

SEQ ID NO: 231107 - DNA, 1741 bp, Cannabis indica
tctttttatccttgcctgtgattgcttcttgaaaggtttcaggctctgagttgtcaagcttttctgctgctgcaagtgcaaaagctgtgaaatcagcaaaaccaaatctggcaggggctctatgaacccttctttctctatctctagtgagttggtaatcatctacactcatgtcagtttcaactcccatatgttcttctgaatgagcctgatcagtaacctgttcttcaggtacatgatctgtagtgtctgtatccacctcaaacccaactggttcagcactagagttttcatttggttttgtgtctgtcttagatttcattgccatttcttcttccctaaagacaacatccctgcttagaatacattttttgtatcctggttccaaacaccataatttgtagcctttcactccatctggatatcctagaaatagacacttcaaggctcttggttggagtttgtcttgccttatgtgagcataggcagtacatccaaacaccctaagatgttcataacttggtggatgccctgtccatttctcttgaggggtcttgaactcaatggctgcagaaggacatctgttgatgagatagcctgctgtcttcacagcttcaccccagaagggtctctcaagaccagcacaatgtaacatacatctgaccctctcagtcagtgtcctgttcatcctttcagctaacccattttgctggggattcttgggaactgtcttgtgtctgtcaatgccttctctcttgcaaaactcagtaaattggtttgagcaaaactcaagaccattatcagttctgagtttctttagtttctttccagtttgattctcaacaagtcttttccaagtgacaaatgcattgaaagcatgatctttagaatttagtagatacacccataccttcctagaaaaatcatcaatgatgctgagaaagtaactagctcctcccagtgtcttgattctagatggcccccataagtcagagtgtatgtaattcaatggttccttgctgatgtgtagaccagatgagaattttgccttacaacacttcccataaacacaatcttcacagaatcctagcttgccattcaacttgtctttcaacagtccctgtttttcgagttcttgcaggcccctttcactcacatggccaagctttaggtgccatagcctggtcttgtcaatctcttgatctgttatggctggtgcagcatttcccataacagttttcccaattaaagaatataagccattctttaattctcctttcatcacaggtatggaattcttagagattacaagcattccactttccaccttgatgatgcaaccaatactgtctaacataccaattgacagtaggtttcttttcaaatcaggtacatacctgacattcttaagtgttcttggtatgccatcaaacatattgatgatcacagacccaataccaagtacactgcatgctttgttgtttcctaacagcactgttccccctgagatctccttgagatcattgaacatttcagcttttggacacatgtggaaggaacaccccgagtccaagatccactcttcttcatatgctctgcttgagacaactagaacatcagcagacatataatcttggcatgcaatgtcagcttctccttgcttcttgccttcttctttggcaagtttagccttgagtgccctgcactcactcctgaaatgtccttccttttgacaataaaa

SEQ ID NO: 231108 - DNA, 1168 bp, Cannabis indica
ggtgcaagatgatggagactcttagtatgagatgctccatctttacttgtttgggagggtgcaactactgaaattcagggtatcaattattttatctagctttgtttctcttttaacttgtttaaatatttaccaagtattttcttctatgcaactattcaaacaagttgaaaggaatgctgaagaggaaggtcggtgatagttccagccagaagtcacctgttaagcagctgataactctaagatttacagttattttagtatctttaaactagagttttaaactaaatagtagagtaattagtgtctattttatgtaattgtgtttagtttgttgtgtctttgtagtaaatagaaatgtgtgtgtgctattaagtgttatagagacttatgttactgtttttgtgtgtattaagcagaaaaaaggctgaaataggtgttggggagtgtttggaacaagaagaaaaagaagcaggaaaatgcatgttgctgattgtcattgctgtagcaattagcacgtaaaaattggcaagcccagtaagagaatcgtgccagaaattccagctggctttaatgaggaataaaggatgcttatgtggtgaaaatgtgtacaatgagtcagtttatgtggaaaaaaaacaagtggacaatgacttggatttccaattagggtaaactttagtacatttacctaaatggggggcagccaagaatagagattggaggaaataaatagagaatagaatgactgctgcaacttttagagactaagagcagtacgaattttcaaaaaaaaaagtacagagaaaaaagaacgagagtacaaagaagagaagaagaagactaagaagaaggagaagaaggcaacctcaatagagaagatttgagctcaccaactcatttcttttgctctcctcttcaatttttgtattattttctactctttaatattctctttagcttcatgacttcgttattttcttgttttatgttgttaatttcaaacatgaactaagatctttgatatttgggtggttatgaaccctttgtatgaactagtgctttgatttgcaatggttgaagtaatcctatatttattcaataaaatgtgatgaaatgttgattgaatgttaatttttggttagatttaacatttagtaagctagat

SEQ ID NO: 231109 - DNA, 939 bp, Cannabis indica
acgtgagtacctatatactgcttaaaaaataaaaatttgataaaattagacggtaggggcattgggatcatctgcgaccttgcttgtaccatctacgactttagcagcggtcgcatcttcagcatcatcgggaaaaaaatttccacctaacccttgagtctcggtaggtgacatggtacggaaagcattggtcatctcaaccgcctctagtccaaagatcgcaaagtcaaagtctggcagcttggtcagtgtagtgtaaatgtagtcagagacagcctggtcgtaagccttcttcgcgttctctttctcatattcaagattacgggtaagaccagtattgtcctcctccagcttattgactctctcactcagagtcttaacttgctcttccgcctgacgtttggccttgccgagatctttgacttccttgtctttggtagccgcgtccaactttggctttttaaggctctcttgaagagctgagttctatttcttcagaagattatgatctttgaaaccaaccacataggcccgcgaataaacactcatgagctgggagatgagatcagctgatcgagataaaaggccctcgacaagagttccctcaactttagtgacgaactcatcgttcacgaacttgtcctgtaagaccatgaagttgtgagccttgacagcaggatcgatcacaaccttcttccacttgtcttgaacaaccttctgctgcttcttcggcaagttagccactggggtaggaacgacatcgcttttcctcttctgaggcatcacggttgatggtgtcgtaataccaaccttagacttgcgattgaagactggagcctatttcaggaaagtcatatatgcgagggggaagacagaaagtaagaatttgaaaaattaaggcgattttgccagtggtatactaaattatattacctgatg

SEQ ID NO: 231110 - DNA, 4340 bp, Cannabis indica
aaaagaaaaagaattctgatgaggtaaaggatggtatccctacaaaagtgttatggtacttaccgcccatacctcgtttggttcggttctttcgaaatgcagattacgctaaaaatttgacttggcatgtaaccaatagagtggaagatggttatatgaggcaccctgccgactcacccgcttggaaaacagtagatgatagatggcctgactttgctagtgaacctaggaatattcgtcttggtctttctgccgacggtattaatccacatacttcccttagtagcaagtatagttcctggccagttttgcttgtgatgtataatttgccgccttggttggttatgaagaggaagttcactatgctgacacttttaatatcaggtccttcacaacctggtaataatattgatgtctatttagctcctcttgttgatgatttaggtctactgtggcacgacggtgtttcagcatatgatgcgtataggaatgaaacattcaatcttaaagcaatattgttatggaccatcaatgattttcatgcatatgggaatctttctggatatagtgtgaaagggtacaaggcatgtcctatctgtgaggagaaaacttgctctcaatatttaaaacattccagaaagattagctatatgggacatcgaaagtttttgccaaccgaccacgttttccgaacttggaagaaagcatttgacggaaaacaagaatttgaattggctccgccacctttacacggggaggaattgaatgaaaagttgaacaaagttcaattcaaacttggaaagagaaaagttgcccctaaaaaaagaaaaggtagggggaacaaacgtgaagaggttacaagtgaacctgcagggccatggaagaagaaatcaatattttttgagcttgagtactggaagtatttggttttacgtcataacttagatgtgatgcatatcgagaaaaacgtgtgagacagtttgattaataccttgttcaatgttcatggtcggagcaaagacgggattaaatctcgtctagatttgatggagttagggatacgagtaaatttacaccctaaagttgttggtaaacgaacttttttacctccggcatgttatgccttgactaaagatgaaaaactctctttgtgtacttctttgtctcagttgaaagtacctgaagggtattcttcaaatatttcagctttagtagatacgactaaattgaattttgtaggattgaaatcacacgatcatcatatattgattcaacacattttaccagtaggtatccgtcctgttttacctaagaaagttcgatatgccatcacgaggttatgtttattcttcaaatctctttgttgtaaagtggttgatttgaaaatcttcaaatagaaatcgtagaagtgttgtgttacttggaacaatttttcccccttccttttttgacataatggtccacttaattgttcatttggtgagagaggtcaaattgtatggaccagtgcacttgagatggatgtactcatttgaacgatacatgaaaattttaaaaggttatgtaagaaatagaaacaaacctgagggttgtattgttaaatcatacatcgttgaagaatcgattgaattttgttcagactatttgtcaaatgttgcaagcgttggatctttgattccacgaattggtaatgaaataagtaaagggggtaggggtttaaatttttccgaagtaagccaagctgatcgagacgaagcacatcgtcttgttttacaaaatattgatgaggttcaactgtatattgagtaagttagttaacataattatatcaaaacattaacttttcattaaaattgaaatgcatagcatttgatatttgtaaataatattgaagggaacacttgaatgggattaagaccacttacccgagtaagtcaaggaatcagaaatgggtccaagatgaacactacaaaaattttagtacatggttagagaaggtactttaattaggtttattgaattgggtatttgatatctcttactctcactgtgtatattataacaaatttacttcttttaggtcattgtggaaatgagcaattctccaagcgaagtatctaatttacttctttccatatcacgaaggccttcgtgtaatgttttaaaatatcaatcatatcacataaataatactcgatttaacacaatcgatcgggacaattgtagaaaaacacaaaatagtggtgttatgattgttgctagagcttttaaaatatctagttcaaaagataaaaaccctgtagaatgtgatatgaacttttacggtcaagttaaagaaatttgggaattaaattacacaagtattcgaatccctatttttctatgcaattgggtaaggagtgatgatggggttaaagatggtgagtttggtttcaaattagttgacttgaatcgaaatgggcacaagtctgataggtttataatggcgtcacaagcaattcaagtgttttacatgagtgatccgctagatgctcgttggtcaattgttttatcaacgcaatcaaaagattatcaaaacgaacaatctagtgttgacgatctcgtggtcaatggcaaaactttcgaaataaatccaccacctaatgtcaccattagggacgatgatgtatgtacccgtgatgacggggaaggattatgggttgatacaactatcaacccataatggacgtgttttggtaatcttaattattattttgtttgtttttatatattctaaattactatgttaatgttaatatgatttgttttatacaactgtgcaggtgcgttcattatggataatccaccatctgatgatggttatgaccaatggggggaggcggttggtttagacgatgatcacacagatgcctttggtgatggttgatggaccaaccgaggttggaacagggaagaaaaatgtaaggggcgcatgcgttaataaggtacttcaaaagtatcgggctgaaggtaaaaagatggaggttgagtacaacatgtggggtcagcccattaatgagtcgggagacatacaagtgagcacgattggtgcatatgtgtgtcgaaacatccctttaaagtatattgattggtgtaaagtgccaaaattctataaagacaggctatggaattacattgaggtaactttatgtgttaatcatatttacatacatacaattttcatatttaattagattttaattatcattgaaaatcttgcagagttcatttgatattgggggggggggggaactagagcttctgtcttaagaacagctggagagttactcaagagttggagaacaaaattgaccagccaactcatctacaaatataaagatgaagcccttgaacatctcgaacatcctccaaagcattatcttagttgctatgacgagaagcaatggaagagttttgttgcttccagattaactcctgagtgggaaaagaagagagcaaaagcacaagccattagagataaatggagaaagagttgggccaccaactcactgagtttgatagatctggaatatggatgagaatgcacaccaacaaaaagggtgagattgaaggccctgccaaggaggtcgctgatcgaattgtaagtttcatttgttaattctttttaaagtgttgtgctctgttaattcttaataattaattcaaattatatgtgtgtaggttgaatatcgcaagcaagttgaggagggcacattggtgcaggaaggaaagaaagacatactcacgttagccttggggacagatgagcacgctggacgtgttagagggatggggtgtggcgtcacccaaacccaatttttcaagaccccacgccctagaagaaagaatgagagtagagacaataatcgcatagctgagcccgagaggcgactttctcagtatgaggaacagatgaatgaactcctccaagtattgaggtctcaacaaagtaacacttgtggtacttctcatgcatctggttcagctgttggaggagcatccaatgaaccaccaacagtaagcagagcctattctccaccaccaccctcagctaaatttgtcaaggcatccactcgaccccatgcacctcctatgggggcatctgctccacccccagtgcctcctctcagggcatctactccaccccagcgcctcctctcagggcatctactccacgcccagcgcctcctcacaaggcatctactccacgcccagccctcctctcaaggcatctactccacgcccagcgcctcctctcaaggcatctactccacgcccagcacctcctcttacggcatcta

SEQ ID NO: 231111 - DNA, 1371 bp, Cannabis indica
aaaaaaaatgtttcattttgttttaaattatattttccttatgttatctctcaaaaaatccaaaataattgtacatgaatttttcttctagatatagaagccaaacaaagaggagctcattagccaaaaaagagctcattagccaaagaggagctcattagccaaataggagctcattagccaaggaggagcatactggccaaataggagctcattagccaaagaggagcactttgccaaaatggagcactttgggcgcactaagctcatggctccgtcaggtgctaaggcgcaaagtgatctttagcttccaaattatctcaaggacctgatgggcacgaaccgatccaattggctcccctcatgtacccatgactatctgggtccgctaaatgcgagagacacgtgctcttaaagctattccgaaaatatagtcaaaaaataataagtgaagagatatttattttttaaataattattctattattattttgtatcttgaacctaacccaactataattacaggaaggtatacctatgtttaagggattttaaatcctatatgaatatctatataagggaggtgaaatcacttgtaaagggaccctgaaattgatactcacgtcacgagatcatactcttgagctcacactctcaaattctaaaaactcacttgaggagtgaactcttggagaacataactctggagaactctcctcaagcattgagatcaataatattccaagtagactagcctattaccgctgaaagggggtgaacgactataaaattcttgtgttcgtctttggtgaatttacttttgcaaagcaatttactttgattaagtattacttgtgttcatcttgcttgttttacgttcttcttagacccgttaacgaaaaatcgcgtcaacaccttacatataagaatgaaatatacatttaatctattaaatttttaaatatatttgtatcgcatgtattaaatttttaaattactattttcttacattaaattaataattgtatagataatttttttaaaaaatatataaatatgtgtaaattgaattgaatcagttacctttatatgtcaattaacattcaatttgtacaaatgcaaattttaaattttttaatccaatcttatctgtatagtgtggatatctgtactttgcggattagatattttatgaacacccatgactaaattatacatggcttgatgagattgatttagcttatttaaagtttatttattatttcttcccaaaaaaaaggtttatttattatttaaaaaattaatttaaacttaattttaattctttaattgttgctaaaactaaattaaagttaaataatatttaattac

SEQ ID NO: 231112 - DNA, 1264 bp, Cannabis indica
caagttgacatcccaccgcctaagttgacatatggcgtcatcctggacgctgtgtatgtgaaaaaacatccaagggacgtactttaagatgcctaagtgatattttgacaccacttagtctttttctgtattctagcaaagttggtcaccagttctcagagatgttgttttgcgaaaatgggagacttgaaactcttcattttcaagtgagtctcccatgttggaaatgataaatgtgaagttgtaaatttgacttctctaatttcatggatcttagttattgtgaaaaattagacggataatcaaaatggaatcagaattagataagtgaaacccagtgcaccagaccatttgtcaacctgggcgctgggtaccctatttctgagctcctgggttgtcgttttgatacttccaaggttcttgaacttaaggacgaggcctcctaccccatttttgaccattctgaattcaacggttgaatcatatttggcatttgaatgatcaaaactagctcactagtttgattgtcaacttgggtattgggccctgtttctaggggctcgggtttgtggttttctcctcgagtttgcttgaatcttcattattttttatgacaaaaaaaaaaataaatacctagaataccttttgaaaacttgattggaaataacccaggttgacaatatgtcaacctgcgcactaggcccaatgccaagtgtcagcctgggcgctaggtcccacttatgacccttgagaagtttgtttggtccttgaaaatagttgaatcttaatcttttatgaaaatagagaagatattcgaaatagttctttgaaaacgtcatcggaattggcccaagttaacaaaatatcaacctgggcgctgggccttgcttttggcacccaggaagtgttgtttcttcctcgaaagtacctatttccccatttttgatgaagacaaagaagatgcacaagttagatcgtcgatttgatacttagaaggcccccaaattgacaaattgtcaacctaggcgttaggtgcccgggcactgggtgcttcgggtgttcaaaaatgaacttgctttaaatatgattctgatgcctcaaatatgttcatggtatgtctagttgatgtctcaatgtaaagtttgacccattttgcactaacacagtcctaaaaactgaaatcctagttcagaatgtcaacttgggtgtcgagtgaaaccctaggtgcctaggttgtcttttggggtgcaggttcatgtaattt

SEQ ID NO: 231113 - DNA, 1119 bp, Cannabis indica
aaacatacttattagtaaatttaggtcatggtaaaatatattccaacaatgattgcctcatttgggggcatcatccttctacaacttcacggtgaactctgcttatcatttggataattccatacctgttttaggttctccttcttcttcttcgagtgattgttttaaaacttggtggaagacggtttgaactattaaaatcccttttaaaatcaaacactttgtttagaaagcctttaactatgttttgccgcgtgcttttaatctatttaagtcctcactgctccttatgtggaaatagagaggagactgttactcatgcccttttaggatattccagagctaaatttgtgtggaagaatttctcactttatcacttttatgttaaaaataaatattgtgacattaaggaatatttttaggggtttttacactcttaatatggatgattttagccttttccttaccattatttggttgaccttgcctagaaaaaaatgactatcgccttaaaaagaagaccacacttttatcagatatagaagatattattaacaaccttctacacaaatataagaatgcccaatcagctcccacaagacaaagtttgatagcaagcaacaatgtcgaggtaggcatgagaaatgcttcagctactaacattacaaatggtcctccaatccacccagaacaatataaaataaatgttgatgttgtcttagacaaccgaaggcattgtattactgattgggaaggaaacacgatagtagggttttcatctcctatggtgggttctgcctctcctatttacactgaagctcatgcccttttttttttggctctcagatggtgctccttaatcaagatgccaatcacacacatagagatagattgtctccaattgacattgaagattaaacacaaatggaaagatcgttcaacaacctcaaggttcatctcaaagattatagactctttatctacttttcctaatatatttctgtacaacgtttcaacttataatattgttgggttttatgccctaaataaaactcatttcaatataatcagatttgcttattaatatagatcagaaataacatttaatgttgcatggtt

SEQ ID NO: 231114 - DNA, 1690 bp, Cannabis indica
tgttttaagaactgtagtgtatttagttttcgtgaagaatgtttagaatgggtttctatattgcaaagcttgttctacagcatcatatctgtgtggatgaatgtatagaaaattgtaagtctaatattatttaggagctaatagttagaatgagtggaggagacataccaaccaatattatttagctctctagttagaggatactttggtaggttttctgcatgagaaatgttgtaatgcttatttatgtctgcattttagttatttgtcatagaaataaaaatacttaacttgatttttctatgggtgactaacaggagcacaagcataataataaagatgtgctttatcatgaaatgaaattactgaatttcatgataaaacacatttttatcatgtcctatgtcatgtgctcgtgtgagttttgatcgaatttgattaaatgccttacccttaaaattgtatatatatttttattattattatttgtagttgaaattaacagatgtttaggttaataaaatagacaaaatgttgtttgattttttatagatgtagttgttagattttagacgtttttgcatgcatcaattttgatatagttgagtggtgttaatgtaggtccttagtgaacatactcaaaaatcaagctcctccttcaatatcttcagcccaaaaatctgaattccaaaatacacgccagatttgtgcaccttgacttcacgcctgctgcagagggaggagagggttcatggccgcactctctagttaatgacaagagcttaaaattgagcagagctaaaaaaaataattgttttttttttgggctgcattacattagccaaccatatggaaaatcttggaaatgtcctatcaagcttttgcttgttaatgacaacttctgtgataatcatccctcatcttgggtgctgcatagaatcatcgtgggtttcaagcaaggtcagtgatcccattttttttaaagatgttttctttttatataaaatcttttacatttgttttcttgcttgtatcattttcattttgttgtgttttgtttttgtgtgtgctataaagttcatgacacccttttgcatacgataacttcaaagcatttgcttgatcctcattgcccatatatttgagatgataggggttatgatattgtagatgagattttgtttagtgaatgcgtaacatggcaggggatttttatgttgttaaatttttattattgtcgtgattatattattctaagtgtctcattcatagacgatttggaaggcaaaaatgggatgaaacaatatgctaactgtagaattattgtcaaaggagagtctttctgtattgattaagcttattaatgttactcttaatgtattctaaatggctcgatcatatatgactattgtttcttcatcttcttataatagcttaaaagtttttatgctttaagttatgtttgatacctccatctagaatttaaggagatgatatagtgtggattttttacctcaaaatacgagtacaatctcgtttatatttgacacgtggacctagttcccagttgggaaaaaatgacatgtcaacgaataattctagtagagctacatgatagaaacttgcgagaaggtgcgaccgagacagggtctagtcgcacactatgtgttgggttttatgcactaaataa

SEQ ID NO: 231115 - DNA, 689 bp, Cannabis indica
cactataaccggagtctccagctagatagagtcgttgcatctaacgaccttgtctaaggtagtcgtcgtaactgtgttgggtcatcgctccttcgtctggcccctgtacctttcgccctgctctgtttgtgcatggcaagacggtgggggagctgagcctggggatatcgacgattaatcttgcccttagagggtgggctcgccaaatctgagcttttaaggatgaacattggtgcaacatgcatcttagggcttcacagacccatttttaccacccatcttgagtaaactgaggcatcaagtctctttctgggcaacaccatggatctgcacatttgtggcctttggccagacctcgacaaacaatcaggaggcctttcttcttttcttccacgaaccttctttcagatggccttgcattggtaaccgtcgtgcatatctatttcttcagctctcaatgaaagtaccaaaatgtttactaagttttttggcaaccacataatattagagctaagaaagtaatgaaggcatcaataataaaataataaacaagagattttttcatggttcattcgttaattatccttagtccacgtgtccattttattaggctctttggccggtgattatgcatacaaatacaaagtgatggacttgactccactctactgtgttcctcttgaagaaga

SEQ ID NO: 231116 - DNA, 1282 bp, Cannabis indica
ggtcaggttcacgatgcctttgcttataattactcacagacctagtccctaattatgttttagattggtaactgcgcaagttacttatacttacttggttagtaaaataacgtcaagatctgctcccatctcacatttgtctaattgttccagttggcctactatggtcgtaggatctcgattctcttatacttgaacttgcttcgtgcatttcatctcgcattggtattcttctttgaaagagattagacacacgtcccctactcaagtaagtgtgcatatttcctttgtctgtgctagaaggcctttgtggatgcctaaggggacgaccacaaaacctatattcatttcgaaaatttcttccatcattactagggatttcctggtttcctagatgcagttgcctcgcctctccattcacgcgacatgattctggtatgtcagtccgttcattcactttatttgcaaatccatgggaagttcctaaaacattgtgtcgatgttcttgatttcttgtattacttgggttgggttgattttctctatccattggttcatccctcgcactgccatgttattcttctggagcatttatgggattccctttgttattttcctacctcctggttgtgaagcctcaagttcttcctcctagtcttcttacagtttgatcaagttgaatttgaggaactattccctgtgcagccctggctatcgtggattgtcactccaattcagcattttgtcgttttgattgagccaggcgttgtcgaaattgcctattttctaattctactagtgggacatatctggtaggatcataggcatcttcttccattctttctagaatttgatcaccagcagtattgaaattaccatcgttcttcctcaaacgtggtttttcagatgtgttggttctctgagatcccataggatctttaccaggtcgatgggtagtttcctctggatgattaccttcatgtgaaatgttatcagccattgatatggatttgtaattgtttttacaaggaggggttttctaattttttatcaccaagactctcattgaaagcaccaaactgttaacgcaaattttcgttaaccaaatatatagacttttacgtaataaatttactatagaatttaataatgaacactagatattttacgtggttttgtagtttaagtctacatactccacgatttcgtagtattagagatatttatttgaatatagagtataattctcaatattgatgaataatagaattctctctctact

SEQ ID NO: 231117 - DNA, 502 bp, Cannabis indica
ttctatgtgggacaatatccacaatagtcatgataactatctgtggtcgcgaccacaactttgtacgcgacatgggcaactttgtcttttttcaattttaggttgaaaaactctattttaatgaaaggccgggggtcacaaattttagtggagttaggatggaaccctaaaaatataagaaggttcttggagcgagcgtgggcgatccgtgacaatcctccatctagttttcttctctcctatttcctatatttttatttgtgtctagtttaaaaaaataaaaagcaaacactaaaatctaacaaataataattaaaaaaacattacaataatatacacaatcacatcatattaagaaacactataaaaaaacataagaaaaaaagactaaaataaaagacttttttaaatggagtttgaataattcttccacgaaaatttgaattggaaacttcatctacatatgagtgtaggtagatttttttagcgggtcttttacggt

SEQ ID NO: 231118 - DNA, 735 bp, Cannabis indica
atggtaatccaagatagaagctatcatccccaacctccaccattgccatgagttgacacacactagatcgagtatcaacagaacaattcttgctgaaaaagactgaagacttagaataattcacctgttggcccgacgcttgctcatatatttgaagaaggtgcatcacatgtgtagcttcactcacattcgctttacagtacacatagctatcatcagcaaatagcatatgtaaaacccgaggagcactcctagccactctacaaccagttaaccatctacgttgctcataaagagttaaaagcgaagacagaccttcagcacaaaccagaaataagtacagagatatggggtccccttgtcgtatcccacggcctggtacaatcggtcccatagtctttccaccattggtaacattatatctcatagtcgtcacacaaaacattataagagcaacgaatctcaagttgaaccccatttgagccaacatagcttcaagaaaagcccaaccaaccctatcataagctttgctcatgtcaagcttaactgccataaaccatcttttcccattcttttccgtttcattgaatgcgtaacctcataagagatcataatattgtcggaaattaaacgaccggcaaaaatgcactttgattgtagagataactgatggcaaaataaacttcatcctattggtaattacttttgaacgaccttgtaaagaacattacaaag

SEQ ID NO: 231119 - DNA, 960 bp, Cannabis indica
aatgacctaaatagttttaactttatttttaattgctggttacttcttctgttaatgattacatggtttataagttatgttagatttttggaaccggatggatggtttacttcctattgatctagtatatttgtccacctttctacatttaaatctgtttccatatgcaattcatgcacacttttattgagtgatcttgatacacaccagaagtgtatcgatccaaaccagaaagatatatagagaaacagagagtatttactgaaaataagaaattgcccagacattcgagagacctggtttctctccaaaagtctaacctattttaattctctaactttccaaacaaagctaatcacaaaaacagaaacaaataattccaattaaatcattaggcaaaacaaatcataaacttccctaaataactcatctcaattactgtgagatcttctagcataggtatacgaattgatggcttatttttacctgctgcccaaactttcaccttgtcctcaaggtggaattatgggaattgctgtagcaagttgttgtagttttcccaagtagcttcaaacattggcaggtccttccataagattaagacctccatttctcccattccattagattgagtgtttcgtacacctaaaacttcagctggctcaactgtcatatccaaatcaggattgagttatggtggtagtaatgaagaagagtgagtcaccccatgagcatgctgcaactgtgaaacatggaacacgggatgcaccaaggaagtggctggtagtgcaagcttataggcaacagtccctattcgtgcgaaaacatcaaatggtccataaaaacaaggtgacagtttctcattgcgtcgggaagccaaggatttctgtcgataaggtttgagcttgacaaacacctttttgtcaactgaaaactgttcatcccttttgtttttatctg

SEQ ID NO: 231120 - DNA, 963 bp, Cannabis indica
tttgagaataatatactgacctgaaaagaggaagattgacttgaagatgcttgacagcctgcgacctggtgatgtacctggcggcgtttccttccttcttctttccctgtaaaaataaattatacgaaagaaagttaggaaggtaaaatcaggaaaaagtcttttgagaaatggattgctgtaattcggtactgaccggaggtctgtaatgcttccccatacggtgagatgttggaagaggcgaagagagaaagtgagagccgctgagagacacgaagtgaagaggaggctgaatgggaagataggcaagggtttaagggcaccgctttcgaaacgacaaaaccaattcggaaacgacaagaattaaaggaaacccttaaaaataaagaataaaaatgaaacccctatagatgtaatctaatttaatctataagttttctaaattaaattagttattgtaaactgattactttttaatattaaattattgaatattaattcaaaaaattacataactaacacaaaataaaataaatctttattattttaccactccaacaacaaattaaaataaataaaataaaaaataacaaaaacaaaagaagaacaaaaagaaagaaaaattgcatgtataaagaaactactactagataacaaaccatattttgcatacggttgtatttttttaagtacaattgtatattgttgtaataattaagttataaaataatattgttaacacaaaaatctaagccaatactagcttgctagattggcgagatgaataatgagaagtaaatattaagagagacacacataatttatattacttcactccccatatcgtgatggtaatagaattgcatctatttcgagtttttagtacttggcaggattacagaaaactgactaagaaatagctcaaagtctaaagagagaaattagagagatactctgatctta

SEQ ID NO: 231121 - DNA, 662 bp, Cannabis indica
tttttatatttataatatacatataatgtaagaaatttcaattatagtaacttaaaatgaatctgcaaataattaataatggtaaaattaactaaacaaaagaataacatagacgataaaatcataaataaacaatgcaagaaaactgtaaaattaattcaagtttgataaatcgatgtgatttataattttatttcaattatgcaaaacttcttttattaattaagtaagaatacagatacaatattgttgagagcaagttcttcatttacaaaaacttcccctatgcaaaatccaaaactcaatcctcttattcctttgaacccctctctctctacctctcaatcaaaactctctctcatagaacttacgtactctacttttggtgtttcctactgtattatttttgtatgattgtatttatagatcgaggatatgaattccaaatatagtgatttcaaacaacaaagtagttaattcggttaagacttactcgacttaattgactctttacaataatgagatctctaagttagcccttggcatccaagtctctccggacatgtatcacgcttcctggacggacgttccaaattgataaagctcaatctggaaggacgtcttggataggcacaaagcctactagctagaacagattattt

SEQ ID NO: 231122 - DNA, 957 bp, Cannabis indica
tcgctttttttcatttccaatcgtaatttttttatttctcattttcagggttcaaaagacgaaattgccctcaccgcggccatagcttcctccgccacggcgagtgatgacgtggccacggcggtggaaactctcgccgcggctactaactcgccacaaaatcgtctctctgttcttgagttatggtcgcggccatggttaggctcgccgcggccaagagtgcaccgagcataactttgcatttttcttggctctacttgtcttttgttgcacttttgtagcctggggcttccatagcttcgagaaacttgaaaaacatagcaaacaagcgtaattctgtcctaaaacaacgaaaagcgaacataattgtgatccagaacataggctaaaagtagcctaacaaattcccccaaactgaatctttactcgccctcgagttaagctaaaactaaaactaaaacaacgcattacataactgaaccttccaatggttgaactaccactaccacctgcacaacttcaagcaattgaataaccagaatttcaactcaatcgctctaagaattaacttggatgcacaagttagaagtaatccattcatatagacacaaaacacctcttttgacactcatatcacaaccattctactcttttcaacactccgccaacctatgttcaataagcttgaatgacatacctctctccactaatgttaacaacccttgctcagaatcaaaatgtctttttcgttacaatatcgtggcttaggtaaaaaggatagatgagaagtcatttaggttacattataccataagcaaaatataccaaacaagcacccacaattatccatactttatcccaaaaaaactggtaagagattacactttcctctttttgtgcctacctcattgttcatattttattttaagaagaattatcacatttattactttgtgt

SEQ ID NO: 231123 - DNA, 1007 bp, Cannabis indica
ttgacaatatgtcaacttgggcactgggcctagtgcaaggtgtcaacctggacgctgggtcccggttatggcccttcgaaagctttgtttggtccccaaaaatagttggatcttaatcttttatggaaacagggaagatgcttgaaagagttcttgaaaaatatcatcgaaattgccccaagttgaaaaactgttaacctgggcactggacaaccccaggtgtcaacctgggtgttgggctagccccaggtgtcaacctgggcactaggccagtcccaggtgtcaacctaggcgttgggccttacttctggcagcaaggaagtgttgtttcttccttgaaagtacatttttccttattttttatgaagacaaattaagaagattcaaaagtcaaatcgtcaatctgatacttggaaggtgggtagattgacaaattatcaacctaggcaatgggtgtgtctgggcaccaggtgctcaaaaataaacttgctctgaatctgattctgatgcctcaaatatatctgtggtatgtctagttgatgtcccgaagtaaagtttgacttattttcactaagacggtccgaaaaattgaaaccctagttggaaatgtcaacctgggcactaggtgaaaccctgggtgcccaagttttctttcgggttgtaggttcgtgcaattcaagctcacggggcttggattaggttgctccatgtattcatggtacatgataatactaaaagatagtgagttagattcaagttattgaagtcttaacttctattccggagctcttgaaatcaacgtaggcgcagggctaggtcctcctcccagttcggctgctatgactcgggtttactcaacaccatgacgtgatccttcttaccacatgtcaaatattgatgtccacatcactaaaaaaaattgggttaacacaggtaatttatcttggatagagatttataagactaaagctcaacgaggccttgccttcaaagatgttgcattgtgg

SEQ ID NO: 231124 - DNA, 906 bp, Cannabis indica
taagtctaatgagtcttgttttccaatttctgtcaatgagtcaagtttgtggcatcataggttaggccatccctccttcaatgtactcaaacatgttttaaataatgaaaagaagtctttaccttcaagcttgcaattctgtgaaagttgtcaactgggcaaggctcatcacaagccatatcctgctgcattaaaagagtccaaacagccccttaaattgatacattccgatatatggggtccttccccaactatagtcgatgcacttggatctttccactcaagacaaaggatgaagccttacctacattcaaaaactttcaacaacaagttaaaaaacaactcaacacctccattaaaaccatccaaaccgattggggaggttaatatcgcaagtttgaaccataccttcagtccataggtgttaaatttagacacccttgtcctcacacccatcaacaaaatgggaaagtcgagagaaaacatcgacatatagtcgaaacaagactcactctcttagctcactctagcatgcctcaaaggttttggtgggaagctttccaaacagccactttccttattaaccaccttgtcacacccgtccttcactacaagtgtcccattcaaaaattatttggtctttctcccaactacaaatttttaaaagtgtttggctgtgcatgctactgttacctcagaccttacaacaccaacaaactccagtttagatctgctaagtgtgtgtttataggctatagcccaagtcacaaaggttacttgtgtcttcacagttcaggtcgtgtctatgttgcaagcagtgtctcattcgatgaaaatgattttccttttgctagtggtttcacctatcctactgcacacacaaatccgccatttcaacctagtcac

SEQ ID NO: 231125 - DNA, 2006 bp, Cannabis indica
tttcggataactaccacaagaagtcgatttttctttattgacattgatcatttgattttattttagcaaatagattatagattatattatgtgaacagactgttactgaaattaaacgaaaaacgaaattactgaataaaaattttagattgagttgcggactaagtcgtttttttatatttgtggcactgcttaagaatgtgcaattaagcagtcagaaattaccggtcatctctaggataatacagcccagtcgaaaatctactatattagagctttactacacgatagagaaccgtcgaaataccacactcaaatactactgctcgaaatatttatataatataatcgtaaatataaattaaaaatgattctttttctttgagaaagatgtatttctcccgttagttataatgcattatatagaaaatgcacggaaggtagtaatgagaagatagacgttttttattatgggaaagataagtgggatcgtgggaacgatgctaaaaataaagagaagaaatcgtctctgtttaccaagtaattaaacacctttaaaaacagttttaattaattaaaagaataataatttaaaaaataaatttttttcaagaaaataaaatgacaccacaaccgcccgctcgactcagccaaatggcagaggtagtgcgcgtggtgatccagtgtgtgagtcattaccaacgcgcacaaaactaggtaccccttgggccccaacccaggtgccaaattcgcacattatatacacttctaatgaagtgttcatatcccatgtaggactcaatgcactcagacacttcacttctcatgaattttgaaaactttccaacaaatcataatctccatttttgtatgatcgtattcattgtattgtacttataacaagcctcctaatatattttggaaatattcagatcatatcatactgttacaaaaaatagaattacccaaccatataattagtagtgttttatttaagtgttatttagggttttagttttgtattttaattttgagattggtaaaaattaagaggaagaggaagagcttggtagaaaagctttgagtattgtgataaactctaaaaagggtttttctttctatctctcttttttttttaaattttgtaatttcaagaaaaaaaaaacttgtattcaattatataattaatgatctaagttaaaaatataaaaaagaaaatcaaaatcttaattttttagatttttataaaatttccaaatttcttgaatataaattttaaatttttaaagaattaattaaaagtggctctaataccatttatttgaattttttaacacttataaaatatgcaatatcgagattaactttatagataaacatattatatattattataagcatagatttaaataaaacctttgttgatttaaagagaagaagaacatgaataacgaaagcgtaccttaatccattgatcgagatgatctttgtagtgattttgggttatgatcttttaaaaatacaagacttaaagtttcctaattttctctcttgatggggaagatgagaatagagtttcttgtttcttagggaccgctaccaatatataaccacataactaggttattaattttaagtaattctaatttagccccttaataaattagaaacatcgtttaagttatctacacatttagcccataacactttaatacccatgaccaacaattaccaaattgactattttatttgtgtcaaacatcaaataacaatacaccaatacatataaaaccatattcaggattttaatgcaacacttaaacaaagacatatcaatagaagacgcatggaaccagttaactcatgagctaaagcttacatagccacattgggcaacatagttcaaggctctaggaaccttactataacagcagtcactcaaaagttttagctattagagcattttcaatgctacttcatattattttagctaaaatagttaaaaa

SEQ ID NO: 231126 - DNA, 1594 bp, Cannabis indica
ttaaatatgccaaaaatggaattaacaaccccgaactcagatttgatcaatgtatttgaattccaaactcaaatttgattatagtatttgattaagaatagtttagtcacattgttgattttatagtactaataatgtacaatttcaaataataaaaggtaggggatgaacacagaatactaaatgaatatacattccttaattaagaaagggttaatttaatgtgtcgtacttgtgtggatttaggatcttggcgatggttcgatgattcaatgcttgattgttgtgaaccactggaaaagattaaatctaaagggattacttttgggaaagtggctggtttggctcattgcaatggagctaaagttgatgcttttagaacgaacgagagctcgattgaagagttctgcaaatttgtgatcttatgttctgcttcagagaattgtcatttgatcacttcataccatataggacattttaagcaggtatgtatggtgatgtttgtttcatttaggatttggcacttatttttgattctttatagtaatgctgctgattagatgtgtgtagcattgtaatttgatgtacaaaacatttcgtattactatgtgtttgcagattggaagtggtcatttttcaccaattggaggctaccatgctggaagagatatggttctcatattagatgttgctcagtttaaataccctcctcattgggttcctcttacacttctgtgggacgccatgggcaccatcgataaagcgacagggcacccaagggggtatgcattgctatcttcagtttctatgttgtaattgtattaagagtattgtgaacttttttgaattgtgctctatttgctggtttgtttccatttcagcaagtaataagttcattggataggccactctcaactgttttcattgcaattgacatctctacttttgttacttcattaggtacatgattatttcgaggcttgagcgagccccgtctgttctttatactgtggtactgctcttgtcgttggttgacttgttcttttatcactgtcgtagttgttcaaatcgaatttcagtaccaaactcaatgttaaaacaagaaaaataatttttcgacgtaggaatattctcaattatccacacagaaacatgctttgaatttcatagaatttgaacttgagaggaaaatgggaatgaggctgaattaattgattataaaatctctgaaccaggctgtggaaatatgaattttatagaactttagcataaggattgtggtagatcttgaatttggccttgtatgtcttgtgtggttttgattattgacttcttctggattatagttttgcatatggtccgaaccgactttagcacggcatttaattgcatggtttcctgcagagttgcagacacgaaagttggaacagtgtcgcaatgtacttaacggaggatgttcctctcctcttgaagttggaggatctaaaagatattcaacacgtactttctgtaatttttatatcaccgcctgctgatttaagagagttcatcaagtggattgctgaaattcgtattctagaggatggaaatttaa

SEQ ID NO: 231127 - DNA, 1822 bp, Cannabis indica
tggtacaatacctaaataaaaaaaaaacaaataaggggttcgaaaataatcattaatgagatatatggaggaaatatgattatctgtaaacttattactgtgttggttatatctatgggaatatctaaatagattactgttaattagattatagtgttggttgagcacagaaatcttatatattattgtataaaagttaaaataaaataaaatagtaactattatatctcttttatattaattaaatataaaataaaataaatattcataaaatttatgtaaattaataaatttaatgtcattttatttgagattaaaataaatgaatatcactcacatatattttttcgtataatatttttatatttatttatgtaaaattattatagtaattaaataagaatagataaaagttatatttaaataaattctaagaaaaaactaaaataaaaacaacacttcatgcattattaataaataagaaaataatctaaaatatttaagttcaaaaattatattttttgcgtttattaataataagtatttttattaaagaaaaaaaactaaaataaaacccactctaactcgcttaaacatccctatagcaatatctataatttttaaaagtggactaatattatttttcaatagtataaatatagattattatttagggatttattaatttttaatatttttttggttatcatttaaaatatttgtcccaaaattgcaatctttctatatattttaaaaataacaaatcaggtttccaattacagtactattactttgtttataaaatacacgtcaaaattaatgttatactttagattatattactcaatgcgtaaaaatatatattcatataatatatatttacataaaaagattataaaaattggacaacaccacgcgaagcccggcttagttccctagttcttcttctaaagtgaagaagtaatcgatgtggggttgatttgaaactagaagttttccaattttaagtcgttgggaatttgtgagtccatcaacttttttgatctcttcatataggttcattctcctagcagcactatcagcttcatgttgaaaacaatcagcaagttttctaatagaattacttgcagaagcttgcatagtactaaattcttgcattgacttagaaagtagttcaaccaatggatctctattatttgattttctcttagcctttcgagttgtttgacttgaaggtatattgttattcatgcttgcattagcattcatctcatcaagtgtatcaaagggatcatagtcatcattccaaccattatttatctcttctgcaatttcatcaagtgtttcagagaatcccattgcaccatctccagtagcacgatcctttccatatactatagcaagttcattataatatggaaatggcttgtttaataatccttttgcagttggatgactctacaaaattatatatcattaaactaaaaaaaataatgaataattaattaacaataaagaagtaaatttttctatagtaactaaccttaactcactcattaaacacaattttatcagctaccacacatttgagttcctcactccaaccaaaatcactagcagaaggtcccaacatatcagaaattgtcgtatattgtctctttaatatcttgagacgagagttaatgtatggttgtgctttaattccaaaatttggaattctgtcattcatcatttttttctaaggttgttgccgatatccaggcttgaatgtaccattatcagccttccaccttccgctgttcacatttctatcaacattcca

SEQ ID NO: 231128 - DNA, 1357 bp, Cannabis indica
tctacttgggaggtcaatttgaccaagccaagtccgccattattctggcgcctctctagagacagctcagcgtccggctatatgacgataaagacagcgctcttgggaggcaacccaagtgttctctttaatttttttcagactttttgattatgtttttagtttatgtgttagtatttttagtattttcaattattagctaagtagcagatattatttttttcagttgaatcgtgaaaaacgtgaaaaaaattatatatatatatttttcgggactgggaacccagtggtcgcgaccaccaggttcttgggtcgcgaccttttttggtagtcgcgaccgtggtcgcgacttcgagttttacagaaacgaagaaaattttaagttctagaagtcgcgacttgggcctttggaagtcgcaaccctttttccaagtcgcgactagccacttttccagaaacccccttatttttgaatttaagctagttgcgaccagcctttgggcaagtcgcgaccagctttcgaaattctataaaagccctatttccccccccattcaaccctacacacattcaaaataacctctaagccgcccaagccattctcccttccaaaaattcaaattttcatcaccaatcttcaactttctaatcttttcttcaaattctcaattccaatccatcctaaaacccactttcactcatcaatcctcactttccatcaaaaaccatcccaaaaatcaccaataacaccccaaatccgaaaataccattgtcttcatcttcaaccttaagctttcaaggacattcaacaatggaggtggagtaaagcatctttgggtttgtaagtatcacttcctacaatctttaaggaatttgatttattcttttatagattttgggtggtaatagtgctattgtgatagaattattgttgatattgggtttgttggtattgtattgtggtgttgagttattggggatataatttgcatagttattaagtggttgtgaattttggggaaagtagaaaattaaggagaggtgctgcccattttttttttcttagcattatttagaaaaaaaaaatcataaaaaaaaaatcagaaaaaaaagagaagtaaaaaaagaaaaaaaaaaaacaaattctattattgctagaaagagggaaaatggcacctaagagaactaggcatgttgaggagggttcgtcatcaaacccgccaactacgggttttgatagaacccggtttgttaatgaggaggcctagaatcattttatgaggctaaaaaatagggcatacattgaagaccggggtattgaattccctgaaaatcctttgagacgtcaaccacggtt

SEQ ID NO: 231129 - DNA, 1577 bp, Cannabis indica
gaattatgagatagcattttctgatattttttgatatatatttcaatgacacatatatatttatttaagaattctctaaactattactctactttacactcaatactctaagcttaaattttgatagtaaaatttttcaaattactgaactacttgtaaatttaagatatcatttatttttcacagttaatttccaatataaactatttatatatacatttttgtatatgtattaaattttataaattactcacacaccaatataatatgagacaaacacacaagtttttcctttatctttttatttttacattttgaagtagcttcatttttttttttattaattttacaaaaatctacatagcaacttagtcaacctaaatcgcaatttaaattcagacaacaactaagcaatctagactgtaaaaataaaaataacacattggtgattatctacatatataatagcatttattatgggtttaagatttagtaattataagtgtaatataaatctaaaaaattaattacacacgaggatttatatttgattaatcatttttcataattataattggtccaaatcagtactcattattttgtccccgctaagaattgtggttggctctgccaatgtatgtacacaggtaacttattttggatgtggtggagtttgtctaagtgttggaggagaacatcttgcatttgatgggcattctgctatcaattttatcaagtcatggtctgaaattttcagaggccaacccaacacaatcacaccatattttgatcgaacattacttgatcctcgaaatccaccaaaaataatgttcgatcataccaaagaataccaactacccaatcaacctaaattgtctattgttgacgaacaaaacttcaaagtggttattcttaaagtaaccaaggatcaactcaacaaattgaaaaacaaagctaaagaattagttaataataagcactttagtacattttgtattatgtctggccttatatggaaatgtgcatgtattgcccgtgcacttcccaaaaatcaagagactaaattatttttcaatgttgatggacggtcaagattgcaaccaccactgccacgtggctattttgggaatgtggtatttgaaggtatggctgaggctttggctggtgatcttcaatcaaaaccattatggtatgcagtaagtcttgtacatgaaagtttgatgagaagagatgatgattacttaagatctgttattgatttttttaaggttaatcctaatacaaaacgtcataggcttgaagtccaatgtaggtgtccaaattttgcgattaatagttggactagctttgctcttgatgaagctgattttggttgggtttgccttgggggatttgtggaattcaatcaatgaaggaagagcaagtatttatgatgatattcctaaaaatgggaatttatgtgtacacatctctcttcagactcatcacatcaaagagatagaaagtatatttatgagagtgttggaacaaagctgcagtgataataagattatatattagttttgttttgtatttgc

SEQ ID NO: 231130 - DNA, 1361 bp, Cannabis indica
gcagatgataatcaacttgatgtagatcaaagatttattgatcttatagatccagtcttcaacattagaaccatcaaatcttgctaccttgactctgagatttttgatgaggaatttaacatcacgcaaatcctcttcagcgtttgatcgacgcggcactgaacggttctcagctatcccagagttcccacccgttaatggcgattgtggaatcggaattggaatagaaccgattggtaattgcgacaatgtatccttcgtctccgccttgtgttgctctaacatttttgcatatttccctaagttagttgtagagaatgcatcaaaactcttcttcatatcttcgaataaggcagcaatttcttcgtttttcattgcaaggaagaacaatgaaagcaccaattgatagcaaaggaagtcctcttcgagacaggacaagtttccaagctagactgtctaattcatttcataaaaaaaagaaatacatgagaattgttatatatgttttcaaaaaaccagcagaaataaaatagcaaaataactacatttagctgatccttagccaaacttcagcgccggtttatcattacgaaatctcggagccatctcggcttcatacgaactcggctcacccgctcaggaccctctcgaacgacttctgggacagcaactccttcgttggttgaaaagcttggttggttcgaacctttctcctgggctgaattctctatggcactcttgatgctttgtttccaaacaccaatatcgatagctagtggactttctagttgggcctcactatcatatggggtccgtagcagagagagccaccatttagagacacactcgcagcgtttaagagatttgacatcgagtcttgagagaatgtccccgacaaaatcacaagggataccgtcgaagggcaattgaactcctttttcagaattagccattggagactgagaaattgaaagagatttagttaagagagtcaaagagatttaggtttttttttttttttgctaatgtgtggaaaagaaatcagtgcccaatttcctatcccatttctgtctctccaattaactgccacctatttttttttcgacatcatttgcttactttttttttaaacgtttgttttgttagttagtttcgtttgggctcgtttggaacgccgtattaggtcgtattgtattgtattatattaaattgtattttatgcaatatttttatgcaaaattatatgtagtattaacttttatggacacttaaatatataatattttagtataaattaaagtttaacataatattatataaaaatatgatatataatccaattcaatataatacaatacaat

SEQ ID NO: 231131 - DNA, 1376 bp, Cannabis indica
gttctttttcttatggaaactaaacttcccaataattccatttctcgtttacgacagtctctacgtttcaacaacggccttgaatctcctagagtcggtttgagtggtggtctaatgcttctctggcatgatgatattgatgttacactacttaattatagtcacaccttatttattggtatttaaaagctgggagtgagcctagttttcattttacagctttttatggagcagatgatgctcaaaacaaaggggcatcttggactctcttccaacggtttgctgatgttgctctgaaccttccttggttagcaagtggagacttcaatgaaatcatctccaatgataacaaatatggtggttgccttcgcaatgaaatctctccaggaaactccttttgagggagaacctttcacttgaattaagaatcatttggctcccgataaattcaaagagaggttagattggtgttttgttaaccacctttgggagaatcttttcagcattcatatggtgcatcatctttattatttcagctctgaccatagagccattttagccacttttgcatctgcaacatccacggttcagcatgaaaaatggagaagtcgttttcattttgaaaaattgtggcttccagatcctgaaagaaaagatatcatttctaattgctggaacaattctttaaatactgatcctatacaaacggtgctatctaatttggatgtgtgtgcaacttctttgcaaaaatggcatctccaaaagtatggaagaatgaagaaaaatattgttgaatctcaagctaaggtgactgctctcaacaacctctcccaccgaaacaatgacaatatgaatgaacttcaacgcactgaggctattcttcatgatttattggagcaagaacaaatttactggcaacaacgctcaagggttgactggctaagtccgggtgattgcaacacaaaattttttcatgctaaatcttctgcaagaaagtccaataataagattaaatctctcattaatgaggctggggctcaagctcattcaagatctgaaatggcagcaacaattcaagattactttgcttcagttttcactgccagtactattgatgaggaggctctctctcaaatcttaaatgcaatccctcaaatggttaccttacaagaccttttcttgatactgaagtcaaaaatgcatcacaatccatggcgcctgacaagagccccggtattgatggcatgtcctcagtgttttaccaacgaaattggtctattgtgggtgaggtggtaaccaaagcagtgttaagtgtcttaaatgatggtgttgatccaactagtttgaaaaagacgattatcaccctcattcccaat

SEQ ID NO: 231132 - DNA, 1390 bp, Cannabis indica
gtgagttcaactttcttcgaccgggtgagggagcagtcattgctcgatcctagttacaagaagcttcttgaggaagcaagaaagggagaatcagtgcagtagtgggaagaagatgggattctctatgccaagggtggcagattgtttgtaccaaacagtggaactttcaggagggaatcacttaaagaaacccacgatcctaagtgggctggtcacccgggtgtggctaggatgctagctttactgtcaaagtcttactatggtagaaatggagcaagacatagaagtgtatgtgaggacatgcaagaagcagggttgcttcaacctctgccaatccctgagaaaccatggcagtcaataagcatggatttcattgtgggatttccagaagtgaaggggtttcggtctatcttggtggtggtggatcgattctcaaaatacggcatattcattcctgcgcctcatgcgagtccagcagatgtggcagcagaacttatcatgaaaaatgtggtcaagtactttgggctacccgaagacattataagtgattgggattccagattcacggggaggttttggacgacattgttcaacgtgcttggttcagaccttaagttttcaacagaaaaccatccccaaactgatggtcaaacggagagaatgaattagttgttggaagagtacttgcggcattatgtgactgctagtgagaggaattgggttgagttgcttgatgtggcccaattttgctacaacattcaacaatcttctgcaacgggaatgagtccagcgaagattttcttgggaagacaaccgctgacgccacacgaagtagcaaaacagaaggggtctatcctgcagcctatcggttcgcgagggataggactgagttgctggaattggccagggaaagcctgggaaaagcttcacggaggatgaagaaatatgctgacaagcataggagagacttggaattttttgttggagatcgagtgttgctgaaactcactccacagatttggaaaaagataaccgataaaaggtatcataagggcttggtccagaaatacgatggtcccttcaaagttgtccagaaagtgggggctgtagcatacaaattgaagctgctggaacatttcaagctacatctgactttccatgttagtttgttgaagaaataccatgtggacaaggaggaaggaagacagcagggggtgagggcgccgcctactgtgaggatacaattcgagaagaagttgtcgaagatccttgatcatcgcactcttggagccagcaagaaaaaccagagaaccgagtatttggttcaatgggaagatgaagatgttgcagacgctacatgggaaaaggttgtgactttgtggcaatttga

SEQ ID NO: 231133 - DNA, 6131 bp, Cannabis indica
gttgtttcaaaaaattaatttaaattaatttacaactcaaatttaattttctataaatatatattgcaatttcaaaaaaaattgaagtatataagaatactaattttcgaaaattgcttttaaaataaaataaaaataaatcctggaaaaattatcttaattttatgttggcccaaaattaattaataaaattaatttacaacaaaaatataattttcctatttaattaaatatttaagaaaaatttcaaatatttaagtatcatgattaagaatcaacttaaatattaattttctatttaattaaatatcactagaaaaatacttcaagcaaaacagataatatctatctagactttcattgactaattaattcaatttctaattataatatattttagttcatttattttaattaatcattaaatgaaaaaatcattgatttaagttggtccaaaattaaaataaataattttcaactttaatctatttttcaaataaaattcgaaatttctgcattaaagaaatgcaatttcgaaattgtgggaaaaagattaataaaataaaataaaatatattttgaaaattattcaaatttaagttattctgaaataagattccaaacttaaaataattttttttttttttttttgtaactaaaaatgatttattcgattataaactttcagcaacaataatagtcatgagttcagtaggagcatcatgctcgctaaagatacgatctgggtggtaacaagacgctcttgcaacacaatgagccgccctattagcagaccgtttaacaaaatgtaaagacacatgattcatacaagacattaaattacgacaatcttgtaccaagaaaccaaattgtgaaggcatttggatagagcccaagaccgcctgaactacgacaagcgcatccgtctcaatctccacctccatccatcctttgcgcttaatccaactcaaagcctctttcaccccgataacttcagcaatctctggtcccaccgctcccagccgactgcttgaaattgcttcaattaaatttccatcagccccacgagccacacaaccgaagccatacttgttatcctccacaaaaatagccccatcaacattcactttgatggtattcaaccccggtttcttccacagaacctgacccgtgtgagagctaggcaccagcaacggcccaaacttctcaactcgcgctgcattccactggtgcagaatggatcgggcagaggtaacaacagcagctgcacttcgatttttattcttccagaagacgtcatttcgagcattccaaatgttccaactcaacattgcagcttcaaccgaaatctcagctggtttagtgtcaaggatggtgaaaaaccagctgctatagtcgatgttaaaaccttgaacagcactcaaactcgaaagattccagcaagaataagagaaagaacactccaatagcacatgtgaaatggtctcataaaagttattgcagaatggacaaaagagatccacattaacatgctttgtggtcagttgcactttggtcggcaaacacccagtaattgcacgccataagaaatgcagaactttgggaggaacttccaatttccagagttttttccagctcgaagtaacaaccatatcagtccaatttccttgtgttgactgaaggaatcggtaggcgctctttactgaaaaaaagccggatgactccaagttccaagaccatctatcaagcggactgtgatcactaagctgaatagagagaattagatctttatctcgctcaccaaacaaatcattgattacctcaacatcccaagaatggttatccacacacaatagagagacaacattttgattaataagagcaggatgaaccgtttcaacatacgggttaatggaatcaggtaaccaaggatcattcaaaatactaactccacagccagacccaatcgacttccgagccccatgccttaccacagattgagcttcaaatatactccgccagataaaactaggattagagcctaaagtagctgataaaaaattaccattaggataatacctagctttatacatccttccaaccagggagttctcttttgtcaacaagcgccaaccctgtttagcaagaaaagacaagttataatcacgaagatcccgaaaaccaagacctccctcatgcttatgcttagacagtcttttccaactcatccagctcacgcctttactagaagaactagattgcgacttccaccagaacttagccataagtccctctaaatcagagcaaatttccttagtaagcaagaacacactcatagcataattgggcaatgcttgagcaaccgatcgaatcagaacttctttgccagctttagataagaaccgactttcccaattgaagatcttctttctcatcttgtctttgaggaacccaagcaagccaaggtaaagactattttcaggagcttccaccatttgcaacaaattacacattcgagaccgagtatcagcattagtatttttgctaaaaaatatggaggatttagcaaaattcacctgctgacccgaagccctttcgtatagattgaggatttgaagaacactagcagcctcctcatctttagccttacagaacacatagctatcatccgcaaacagcatatgagaaacaataggagctccccttgccactctaataccagaaatgagctgatgacgttgataatccttcaaaagagaagaaaacccttcagcacaaattagaaagagataaggagacagaggatcaccttgtctcagacctctgccaggggtaataggtcccatactatgaccaccatgagtaatcttgtaccgcaccgtactaacacaatacatgatcagagacacaactcttctatcaaagcccatacgcaataacaccgattcgataaaaggccattcaactctgtcataagccttgctcatgtcaagtttgagtgccatatagccatcttttcccaatcttttcctcttcaagtaatgcataatctcaaaggaaaccataatattatctgatatcaaccgtccaggtaagaatgcactttgagtttcagagatgacatcaggtaacacaagtttcaacctatttgccaacactttcgaaatgattttatacagaacattacaaagcgaaataggacgaagatcattcataatctcagcatttttcttcttaggaataagaacaatgttagtctcatttaaagaagggggaaaagaacctgaagcaaagaaagacctcaccaacatccgaacatcatcacccacaactggccaaagcttctgaaaaaaagccggagtcatcccatcaggtcctggagacttgtcagggtgcatttgaaacaaagctttctttatttcttcatcagaaagaggctcgagtagcattgaattttgatcatgtgacaccatgcctgaacccgtagcaatactttcaaagccctccacaacaccaggcgtaaacaattgttcaaaatacccagtaatcaagcttggaagaccaccatcccaagtttcccaatcccctgtaggggaccgaagcttctgaatggaattattccttcgacgagaagaagccattgcatggaaatattttgaattctgatcaccttctctcaaccaaagctgtttgcttcgttgtttccagaaaatttccttttgcaataaaacattattaaattcaatttcggcttccttgtatttgtccactgccaaagggtcacggcccttcttccatttgcgcatctcagccttgcacttgcttaatctctcttgaaaattaccagaatagtctttaccccaagtaaataacacttcaccacaaacttttattttttccaaaacatgactattcgaatttaaactccaaacatcctcaataacccgataacaaagtggctccttaagccacgaattctcaaatcgaaaattcttagctttgaccgcccctaaaggaggagaaagaacaagatgaattgggcaatgatcagaagttgtaacttcgagattcaaaagtttgaccgagggaaataagttaagccaagattggctcactaaagctctatcaattctcacttctatccaatccgaagtaccccttccacgctcccaagtaaagggataaccacataaatccaaatcaaccaactcacaatcagacaaagaatcacaaaagccatcaattaaccaattaggatagttattacctccgcgtttgtcagcttgagaagtaacgttattgagatcaccaatgatacaccatggcaaattggacttagcttttaaattcctcataagatcccaagtacgttgtcgcaaatttctattaggttccccatatagccccgtcaaacgccacttttggtcattatcaccatgaatttccacatcgatgtaatttttaccataacccagcaattgagcttcactttcgtgtcgccaaagtaaagctactccaccactcttgccttgaacatcacaagacaccgctccttcaaatcccacagcaactcttaacttttccacaacaacacttcttgataaagtttcacataaaaaaacaaagttgggcttcttttggaacacaaggtccttaaagaattgaaaagcccatgggttcccaagcccatggcaattccatgccaaaacactcataatgtctggtgggcttggaaaccaaggcccaccttttgcacattttttggcccaaccgaaccaacaaccatcaagtccacctcagccacatcattcacgcatacatctttctccacactatcctccatacgtctctttttattatctaagatacaaacaatatcttgctgagattgactttccatatttgtatcattcacatgcttgtcatccctaccagcttcaatattctctcttgaattcacagcattagttaggagatcttcctttccaaatatagtcccagagccaatcacgccagagccaaacacgccaggattttctctatcgatctccatgattctcggcgtaattactgccttcccaccagagctggcctgaccatgaacaccaccgtccgccaccgtctcctcctccctcccagaccgaagccactgagcaccgattagataattcttcttcttcataacagcacgtaatccgacctcataaggctttgaaagttcagcaataggttggtcaaaacgttttgggcagaaacgatcggagtgaccaatgattccacacacaaaacaaaaagttggaaggtattcgtatttgaaattagcccagatccattcacccgattccttactcagtttcatacgtcgcttcaatggcttttcgatgtcgattgtagcccgaacacgaaggtagtccctccaaattccattgaagtttcttggatccgactttacatacgtaccaacatacgctcctgcacttcgaaccactttatccatcataaaaccagagcgtaaattatgtatctgcacccacatatcgagtttatggagacgcacactccgtggatcttcccctttctgtagtcgatgaaacacaagagggaccctattaaaagtccaagggctcccatcaatcacagcctgcacatccaattcatggtaaaactggaatatgtatctattcgtatccagttctttgacaaacacacctttgccaggttgccaaagtgagccatcatgtgtcgcatagcatcaaaatccattgttcttcccattaaaaatttgcccaccaaacaccatctatcatcaaagattaccgcctcttcctcatcatcccctgttatcaatatcccctcttcttcctcttccaaattcaactgatcatattgctcttccaatccctcattcaaactactacttgaagccataacacaaactaggaacgcacaacaatctcaccaggaaaactcaccagaaaaaaaaaaaaaaaaaaaaaaaaaaaaaaaaacctcaactttctaacatgtcaattgacaagactttatatgggataatttaaaaaactttctaactgatcatattgctcttcatcttctttgccatttttaattaatggaaatagaaaaatact

SEQ ID NO: 231134 - DNA, 847 bp, Cannabis indica
cttccacgtccgccaccactaccaaacccatcagctgaaccactgtcggagtttcgaccacccttgccggagtttcgaccgctagaattcttattattttttctgtttgtaccatttttgtcacgaggattattatgattagaattaccttgagaaggattttggtgattcatactatcatctgaagtttgggaatgggctacaaggacagatgcttgttttgctcgctctaaaatggtggtctcttccaaggcgagtttggaacagcttgtagcaaaactaggtaggcttttcttgttttgcatcactgtgacaaaattagaatattgttctatcaatcattgtagcattctcaaaaccatactttgatcattgacgggagctctgacattggcgagttgatcggcaagactttgagacgattgcaatacgtatttatcgtcgaaaaatccgcaagacttgtgttggtgaatgccttattgagatacaaggcccttgagtttttattatcatgaaagagatccgcaacactgtgccaagcatgttcagccgagtcatcatctatgagaatggaggtgaggatgtcggaggagaccgtggcataaatccactgtaagaccgccgcatcgagtcgtttccagagagggagatcctcggctttggccttgtcatatgtaatttattttctctagtttgagattttattagctctgcctgatttggggtgccttaggtcctgttttgttgaaagttacatcattttgttatcatgtttttagaatactgataatgctacaattgatactagttaaacggattcaatgtttgacacacaaaagtccccata

SEQ ID NO: 231135 - DNA, 1731 bp, Cannabis indica
ctatgagtgaagtgccctattcaagtgcagtgggatcagtgatgtacctaatggtcagtactagaccagatttagcctatgccattagtgtactaagtaagtacatggcaaacccaggtaaacaacactgggaggctatgaaatggttgttaagatacctattgggatctacagaagtgggattaaactacaagagaagggacaatagcagaatgatcactgggtacagtgatgcagactatgcaggtgacagagatagtagaaaatctacctctgcctatttctttacactatggggaaattgtatcagctggaaagtacaactgcagcctgttgtagcattatctacaacagaatctgagtatgtagctgttactgaggcaattaaagaggctatttggcttaaaggactactaaagaactgaaattactagatgaagaacctataatctactcagatagccagagttgtatccacttgtgtagaatcctgtctttcacgacagaaccaaacatgtggaaatcaagtaccactttatacgagataaagtgacacagaaggttgtacagatagagaaagttcccactgaagagaatccttctgatatcggtactaaggtgctacccttaactaagttcaagcactgcttggacttgttaggggttggtaatggtggatgaccattaccacaatgagctaagacccttgaagaaagatgcactataagaataagtgttccaggagagatctaaggtggaaattgttaaattagatcccccctgtcacacttattattacagctttacagaagagaagaaaaatacaaataaaacagactcgatcctatgtggcttcgcactataagaataagtgttccagcctgagaactctcgaaggttcgaaagagagaaatgagctagggttagctctgatttctcttggttttattcgaaggagaacgacaaatcgttttgatcaaacgatttgtcgtgcagataaggaatgacaagttccattgtcgtgtggaaagaaacgactgaggtttctttgtcgtttggatcaattggttttaattgattttctgggacaagtttgtccctgtcgttttgataatttgcttgagttggtgtagggcattcttagaatttcaccaagaaaattcctacatgaataatatattcaattgtatcaatatagacatatgtatatatatatcacatagaagaaatactataaattaattacatacaattaaaatttgtatatatacaaatagatcaaataatcaaaaacattagaagaatatatatatcatcatcataatcatcattattacaagatttgagacaaaataaaaaagaattgactgggtctattgagcttgcttctatccaagcagattggttccgtaaagaccaagagctgagctcttgaacaatttgtattatcttggcttatgaatctaacatttccttttcaaaaaaaaaacattatattatagtacaaataaaagttaattataggtgatgggcaaaattcgctatccctaactaattatactacatccccaccttaatttatctcacagtcaccaaacaacaaattaaaatgaaatttccaagtaccaactcaaaaattcccaaatgacatcaaaaaaataagagacaatagaaataaatcattaggataatttaggaatcaaaaaacctaaaactataatttctaatagc

SEQ ID NO: 231136 - DNA, 1715 bp, Cannabis indica
gcatacctatcgctgattatcatgccagtctaaatccagtgaactgacaaatcagggaattaaactttcgaacatataatcatgattatattccactgtgctgacaacactataatcacgaacaaacacatatgttctggacctaatagaatttatacattaaagataatcatgaaataaatcatgtgaaccatgcaacataaaatgtgatttctgatctttattaatcagtaaatctgattatattgaaatgggttttattagggcacaaaacccaacaattcatcagttctcgaagatattgctgtttcacagaattgggagactcaaaattagaattgaataaacaaaacccaacgcaccaggtcatacgtcaacttgtgttgggttttcttctcaaagatttcgagatgtcgttttgatgcttccaagattcttgaaatcgaggaggaggtctgaaagtcaaattttgatcatcttagagagaatgctcggatcaaaattcgcatttgaatgatcaaaaccagtgcaccaattgattgtcaacttgggcgttgggctatactttcatgcccttgggattctcattttctcccaaagtttacttgtatctttgttatttttaatgataaaaaaatgcttagaacaattttttgggatatgattggaaacaacccaagttgacaaaatgtccacctgagcgctagctgtagaaccaaatgtcaacctaggcgatgagtccagtttttagccatgaaatggctctgtttgattcctggaaaaactttgtcttaatctttgaagaaaattgagaatatgccagaagacttcttagaaaaactccttgaaaatggcataggttgacatttgtcaacctaggcgttgggcccagcaccaagtgtcaacctaggcactgggtccccattctggcctctaggttgatttgtttcttccccaaaagcacttttttccttatttttaatgaacaaaaagaaatctcttgggatagttctttagtttgatgattggaattaccccaaattgacaaaatgtcaacctggacactaagtgccctagggcacctggtgctttaggttctcaaaaatgaaagtgctccaaatcttattctcataccttaaatatgttggtgacatgtctaattcatgtcccagtgtaatgtttgactcacttgcactaagacgatcccagaaactgaaaccctagttggaatgtcaacttgggtgctgggtgaaaccctaagcgcccaggttcacttttagggttgctgttttgtgtatttttcagctcccgagccttggtcttggattctttatgtcttcatggtacaaaatactgaaagatagtgcattggaaataacttggcactatccgaacacccattttagagttctcaaagtcaacctaagtgcagggctaaggacccctcctaggtcgattgctatgactcagaactactcatcttaaggatgttttatttcttgccacgtgtcaaacattgatgtccacataactttatttagtttttgggataacattttcccccaagtcaacttcatacctgtgtgaggtttacttgatgacgtgaactaagcccgtttctctcgaaactaccaggtgggaatgaattttggaaatcttgaacattatttctactcttcaagcattcctaacatgattaggatttcaaattccat

SEQ ID NO: 231137 - DNA, 1528 bp, Cannabis indica
ttaactaaatgtatattaatagacaatggaagttctgctaacatattgtttttgcatgctctcagaggaatggggattgatgaatccaccatcatccgtaagtcaactgtgcttgtggggttcagtggtgaacagaagcattctatcggtgaggtaacattacacgtatatgcagaaggagtcaacctccagaccagattcctggtaatcgactcaccctcatcctacaatgccatcctaggccgtccttggatccatgctatgaaaggtacaccatcaacataccatcaggttattcattttccaactaagtggggagtgaaggagatctagggagcccaaaagatggcgcgagattgttatcaaacaacagtgaaagacaaacaagcctcagcatagcaactatagcaacccacatcgtcaagcgcacctacaaagcctgaaatggaagatctcgacgatgtgtgtatcagcaaagacttttcgaaacatactgtccagataggatcaaagctaacacctgacttctgtgttcggctcatcgaattcctaaagaagtaccaccacatctttaagtggtctcatgaggacatgacaggtattgatcctaacattattgttcataacttgtaggtagaccctcaccatcctccatttaaacaaaaaaggagaaattttctccagaacgcaatcgaataattaacgaagagatccaaaatttgatagacataggatctgtgagagaagttgattaccccgactggttggctaacgttgttgtggtaaaaaagaaaaatggtaagcggcatgtttgtattgacttcactaatctaaacatgatgtgcccgaaggattcattcccattactgcacataaacatgatggtggatgcgacagctagacaggagttacttagtttcatggatgccttctcaggatacaaccagatgctcatgcacccagatgaccaggacaagacagcattcatcattgaacgaggaaccttttgctaccaaatcatgccctttgggctcaagaatgcaggagcgacgtaccaaaggctagtcaaccggatgttcgcagatatgttgggtgatacaatggaggtctacatagatgatatgatagtcaagtccttggttgcccaagaccatcttgatcatctgcaacaagcttttgaggtacttgaaaaatataatatgaaattaaatcctgcaaaatgttcctttgttgtatcttcaggaaaattcttaggctacatggtaactaagcgtggaatagaagcaaaccctgaacaaataagatcgattcaaaatattcaaccatcgaagaacatcaaatacatacaacgcctaaatggaaggatagccgcactaagacggttcatatcaaagtcatcagaacgttgtagtatcttcttttcaaaactcaagaagacgaaggacttcttatggagcgaggaatgtcaaaaagcactcgacgagctcaagccgtatctttcatccccaccgctaatggcaaagcctaa

SEQ ID NO: 231138 - DNA, 1260 bp, Cannabis indica
taaggagacacaaaacagttccctaaaaccctcaacaaaatggtttagcagagaggatgaatagaaccattttggagagggtaagatgcatgttaatacaagctggattaccaaagaatttttggggagaggctgttaacacagcctgttacttaataaacagatgtccctcatctgcaattcagtttaaaacccccatagaagcttggacagggaagaatgccaactatgatcacttgagagtctttggttgtgttgcctttgctcacattaggcaagacaagctagaaccaagagccagaaaatgcatttttctgggctatccagatggagtaaaaggttacaaattgtggagtattattgaagaaggagaatcaccaaaaatacttcacaagcagagatgtaacctttgatgaaagcaaaatgtataaagatactctcaaaagcaaccctgcaactgatcatttgacaaatgacagtgaatcccagtttgaggtggagccagatcagagaaaggaagatgcaaaagaaagagaaagagaagaaacagttgaggaagaattagaagaaagaatgagtgatgatgaagatcatgagagggaggactatcaacttgtaagagatagaaagagaagaggcaataaaaccacctaccaggtttggttttgcagatgtcatctactatgccctgaatgtttctgaaggagaagagcctagatcctacaaggaagctatgagatcagtgaacaagcataagtgggggcaagctatggacagtgagatggactccctcagaagaaataagacctggatagtaataaagttacctgcaggaaggaaagttgtgagctgcaaatgggtttataggcacaaggatgagattccagggattgaaccagccaggtttaaggccagattagtggccaggggtttcacacaaagggaaggtattgattaccatgaaatattttcccctgttgtgaaacacacctctattaggttgcttctcagcattgtagcctataatgatctagaacttgaacaactagatgtaaaaacagcctttctacatggagatttggaggaggagatttatatgagacaaccagaagggtatgaggagaaaggaaaggaagaccatgtatgtctattgaagagatccctatatggcctaaagcaatcacctagacaatggtataggaggtttgatgattttgtaaccaaaatagggttcaaaagaagtgcctatgacagctgtgt

SEQ ID NO: 231139 - DNA, 1024 bp, Cannabis indica
tccagaaaatgagtttcaatttaaaaaaaaaaaaaaaaattacattttaatgaaaatgtgcttagttggtcaaatgaccaaaataccctccaaggtcaacataagcataaacacacatcaagggtaacttagtcatttcatcacacacacataacataaataaattttagatttctcaattatccacataatgccaaaataaaatcctaaaaatatatttcaagccccgaacctagttcggtccaaaatactcgattgtgactataccgtgccaacttgttagaaaatacctgtagtttgacagaatacatatactatataataatagtccatacgcacgatatgacatcaaaattacagttttacccttctcgggtcaaaattacaaaaatacccctggctcaccaacggggtcttaacatgtcatttattagtataattcacatatattaaattatataataatataatttcacattaatacacatttaactagttagggtttgctaatctgattccttaatcttagggtattacacgagccctagaccgtgacagatatgtaatatccataacttgggtggtcaaatgtcacactttgacccttgtaggaagataacgcttatagatgatcctttaatttatattagaaaatacgtatataaaaataaaagattaaaccctacatcgataagaaaatattagtaacaaaattaagaccactcatcaatataaatgaacaataatatccccacagttatgtagtcaccgaattgatagatttaataagttaataaaatactaaaataatatctagcatccatcatttctcatttctaactagtacatagctaatttaagccatcctgaccatccattcaagcttaaatataaaattagtttcataggaaagtttaataagtagaataaaactaaactaataacgaatttcttccttaacagtgccatccttatgtattagtatcaaacggagttcctgaaatgggaaaaaatagggggtgag

SEQ ID NO: 231140 - DNA, 651 bp, Cannabis indica
tattattgctatcttgaatcacttctctatatccatggacattattcttgctctgcattgctgcatccacacttagcttataattttcaagagaaggcaacaaattatcatggacctttttatttgaggaactgttttttgtgatggtttcagctccaggaataatcctgacttgagcttcctcatattctgtaagtaagaagtaataaaagaatctaagcaagacttcttatctgcaaaaagagacttttacgataattccatacagaccacaagacaccaaaaaatatagtcaaatcttgtttgtgaaacttatcaaatcctctcaaaagctagaaattctttaatatcacaatatctattattttttataaaaaaaaactctataaatctagtgtgcttccaatatttacctgccttgaaaagggaatgcaagttagaatcaactttattaaaacaaaaggagcagaaagcatcggtcataatttaaatatagtatatttatatcaaatacgatatgttcttcccaccacactaattccaagtccacactactagtacccatttagcatgaaaagaaaatcgagaaataagaaggcttagtatattaatactttagaatatatggccccattatatataagattgacc

SEQ ID NO: 231141 - DNA, 2113 bp, Cannabis indica
atgaaacactgttagtagacaaaaaaacatggtaatcactcaagtatgatggcctctttgagtttctgctgggtctgttggtagtaatttcagcagacttttgatattctgtgttgtcatgggaatgtggtgcaatatcagtttggtctggtgctatttcaggttgtatagatggttgtgacaggtgagaattgctggtgtgagtaacagaactaggaaaaaaatcaagggattcatgagacatggttcctgcagtcacaaaaggaaagatttgctcatgaaaaattacatctctagagcagaaaactctatttgtgtttaaatccaacaacttataggctttcattcccatgggataacctaagaaaacacaagcaatggctcggggagcaaacttagttctagcagcacctaaagttgaggcataggctaaacacccaaaggctctaagatgattgtagttgggggctttagaatttagaatttcaaatggggatttgtgtttgagattgggagtgggtgttctatttatgatataagtggcagtgttaacacattctccccaataaggtaaagggatgtgagattgaaaaagaagtgccctagcaacattcaacaagtgttgatgttttctttcaacaacagagttttgttgaggagtttggacacaagaatggtgatgaataataccaagagaactgaatagttcagggaactgaagttctttggcattatcagatcttatccctttgattttagcattatattgggtgttgacaagtttaataaaagctggtataacatgttgtgcatcagatttattcttaataagatgcacccatgtatacctagagcaatcatcaactatagtgataaaatatctaaacccttcaatagtagagacatgatagggaccccaaatatctatatgaattaaatcaaaacatttcttggcaatattatgattagatacaaaaggtaacttcttttgtttggcaaaatgacaaatagcacaatggaaatcaggaaaactagagtaatggaaattcagctctttattcaaagaaagattctttacacaagaggcatggccgagtctataatgccatatagtatcactactaatttttgaatttgtaatggacaaaacagtaggaaaagtggctaaggcagtaggagaatcattgtgtctcaggaggtagagttgtccaacacgctcacccatcccaatcacttgattcttggaaatatcctgaatcacacatttattagggagaaaaaggaaagaatagttagatgcgttggaaagagaggtgacagaaagcaagttgtagtgaaatttaggaacacaaagaacatttttaaggacaatattagcaagatgcacagttccaacaaaagatacatcaatgtgtctaccatcgggcaacccaacattattgattttgatattgtttttcacactatgaaacaagttaggatcacagcatacatgatgagtggcccctgtatctattatccaagtagatttagggacacaaaaatcattaccagaaacattggaaacaatgggctgatctgtggactggtttagtgtgctattctcttgcactttctgtgtcaacatggcaatgagcttttggcattgagaagaaaaatcgtgttcaccagtggccccttcttgactgttaatatgcccagaaaaactggcagtggatcgatcatgttgctgagaagatcgatcacgctgctggttttgttgattgcttggcttattaggaaggtctttaggcactttaccatgtaaacgatgccatgggggatatccatgcaatctatagcattttgcagtagtatgcccaacaatactgcagtgagaacaagtaggtttcccatttgtctggttatttccacctcagtttccctccatatttcctacaaactgtccagcactttcattagatttaggaatttcaggttgatgattagtgatacctctttgcctttcttcttggatgacagaggcaaaagccttgttaacattgggaagaggatcttggagaaggatttgagatctggtactggagtaagactcatttagaccaattaggaa

SEQ ID NO: 231142 - DNA, 1084 bp, Cannabis indica
tttttgataagaaagaataatctgcatgtgcgaaaatatgtcaaggttgatcaaaattaaaggggcgataacaaccaagatttactaccaccatcagtagatggacatctgcaagtcattattggaggtccgcacgtagctggagattcaggcaaagcccgagaaaggtatgcccgaacagtacagcatgagcatgaagaagtatttctagccatcgaagaaaggaaaccgaaaatacctcgggcatgggagcccaccataacatttagtgatgaagacgctgtaaaatatattgtataggagaagggcaagaagagggattatgacagtaatatggttggtccaccgactcaacctttgaaacaccctcgaaggccagataagcttccaatagctcgttatactccgccagagaaaagtgtcacattgagtttgctagagatgatggtcgagcagtggccaaaggaaaagaatgtccttgaagttgacattggtgaggatgtgttcggggtagagcacaaaacatacttatcaaaaaacgacatacttgacatttgcaatctcaaatggatcggatctgttccaatgtctgtgtggtgcaggtatgaaagttgataattaacttaatatatattttgcagtttttgttattaattttttattgtttaccagtataatgcagcgtgaactaaacaaaaatgagttgaacggtgtatatgcatttatgaatcctgcatctgtggcatctactgatggcttagggtacaacgagcgtgtagctttgctttttcagcgattgagcaacatacaaccagatcgattccttatttgcccttggtaccatgagtaagtacttactatggctttattcacctttgtcatgtcaactactttaaaacccaatatactatgataatattcaagaaaaacattagctacattagtatttgttgtctattataagtatcttaacttacacagatgaattgtggcgtgtatggtgtcccttgtcccttggtatatttgttatacaaataatgagaatgagaaaagttatgtttggatatggactatggactataga

SEQ ID NO: 231143 - DNA, 2070 bp, Cannabis indica
acagttttatagaacatattttgggaaaatattttaatttttctaattaaaaaaaaactagattaaaaaagtattaccaaatgcacctttcatataatcacatttttttaggaatatttgcgacgaaacttgtaatgaccgcatgattagattatggattagtaaagacaattaacattaattattgatattcaattattatgcatgagtttatatttattatagatctcatttttaaaaatgggcattagagttataatttctcaattccgaagattttattaaattctaagtgtattatttatgttatatgcaaaatttatagttttatgatttttgctcggcgacaatgaaaaatgcgacggatggccaaacttgtcacatgggttagtttagaaccttcttatttagcaggatatttgtaagttgatatttggaatatcggattaggcagggtcatgatgttggaccattttaccacttggaaattattcatatagatgattacaggtattctggagagttttttggaagtttgaggttgttttgagttcaattggagggttgttatttttctgcaatgaaaaatggtaggccgtttttgcagaaacgacatactgtttttattggtgcaaacctagaaaaattgcatgccattttttagaaaatgaccttccgttttttgggcagttttcctatttcatgattttctcgtgttttctcgatatctagggttttctcatgctatttattgatagggaaacttttcgttttgagtttagatccccgaaaaagttttagaaaattgtttacccgttttgcgtgattgtgacacagggcatccgttcagtaagtgattttccattcaggtcaaccgacacgcttgatttttgaaacgaggtaagactagcatagaatgtatttatatatgaatatgtgtatgcgtaatatatgcatgctaattgtgattcatatactactaacagtagtacggtagtggtattgtgtgtattggtacaatatatgatgttcaaagggtacgatctggtattagcaacactagtacggttaagtacgtagtgcatgtggtacaacattcagtagtgcttgaggtacagttcaaccctaccaacactagtatgagacgagttcttagtgcatgtggtacagaggtcgtacttctgttaagaatgttcttaatcatctgttaagccttatggatatgtgtatgagctcctaaatacaagtcggtaatataatgtatgttacatgcttttcttactaagtctgttgactcacagatattgctttcatgtgtaggtaaaggaaggctaaagctaaatacagtgagttctgagcttggggatgattgtacatgtcgagacggtgtgacctggagagcttggggatgattgtacatgtcgagacggtgcaacctggagagttcggtcttgagatgacttggactttattttgtggtcgttgtgcgacatgtccataaacactatcttgaatgtaaagtttaaaaataacatcccagttttgtatctaaatatatgtatatgtctataaaattttaaagattaaagttttaaattattacaattttcaagaaaatcatttgattagcaaaggtgtgcactgtaattagaaagtcactacagcgtgtctaagcattagggcgttacaaaactcttttaacatttgtaattgttacacatataactctaataaataatggacattattaacttacgatttagttctagatgtatccttttagttgttaagtgctaactaaatctgttaagtatcaactcaaacacgtgatgatatattattagaccacatattatatatttattatttcttctatttttaattaaaaaatacaatttaaatagaaaaattaaatcaatatttcttttattaaataaaaattttattttttagagaaaatataattttttttatttaatacgtgctctaataatatgtcgttatatatttttaagttgacacttaacaatcaaattggtacaaaaaagtatttttattgctatttttttt

SEQ ID NO: 231144 - DNA, 745 bp, Cannabis indica
atatgaaaatattatttcttagcttgggaaaatgttaaataatatttaacatattttattgttactaaaaatgaagtttttttaatgtattcgtagcatttgtatgtagtgtacgtatatatttctataaaataatctatgagtatatacattaatatttaatttcattttaaaattaattaatttttttacgaaaaaattagtcataaagtatttacaataatagaagaaatcccatccaactctaaagtatatattttgctaaattatgtgcaaaaattaatttatcaaaatattaatatgaatattaaaaattaaatactaatatgaatgttaaaaaaacatacgtactactttttaacgtaaatcaaagattttaaatattttttaaacgttaaaaaatttctttttatttagactttatattttgtcaatttatagtagatgtagaataaggtagaacactgaaaaaaaaaaaaaacagagtagcaaaagcttaaagtctataatagctcaagtgaccataggtgggtatgtgagtgttggaggtcttgggttcgagtcccaggtaaaacatgttgtaatatgtaaacccttaaatcaaaaaaaaaataataaaaaaaataatagctaaacttgtattcataagccacaattttacaagaaaagtaagaaaattgagtagataaaactaactaacttaaaacagaaaacacataacaaactcttataaaactaactaact

SEQ ID NO: 231145 - DNA, 787 bp, Cannabis indica
tagtactttgtctgaaaaattgaaattttttgctgagaagctcgggccttggggtaaagagataacagggaattttaaacagagaattcgtaagtgtaaaactgagttatcaagcctgaagaacaaaagagacacactatcggttcagcgatacagtgaagtcaagaagcaattgtttaaagtacttgatcaacgagaagcgttttggaaacaacgatcaaaacagttatggctgaaagaaggcgatcaaaatagtagttactttcataagactgctacaactcggaagagacataatcaaattgatcgattacagaataaccaaggagattgggtagattgggacaatggcttatcaacggtcatcaccaactattttaatggtttattcgaatcgactggaggttctcatcaagctgttactgattgtgtagatgtttccatccctgaattggctcatgttgaatttcggcagttggttactgaagaagaggttaagaaagcggtgtttcaaatgcatcctgacaaaagcccggggccagatggtatgacacctgctttttataaaaaatgttggtcaattgtgggtaaagatgtggttcaaatggttcataatttcttctctactggcatgtttgatgaaggttgtgctgatgcaaatatagtcttaattccgaaaacaagaaacctgtgaacatgactcaactacgcccaatagccttgtgcaatgttcctacaagatcataacaaaagtggtggtaaaccgcatgaaaccattcatggacag

SEQ ID NO: 231146 - DNA, 1091 bp, Cannabis indica
ggagtaacaagtgttgtgctgggctatagatccaagaacagtctcggacatagacgaacgaagccagcttagaaggagttgatctttccttctccagacaagaaattctgggttagcagccccagtaaccagtgttgcaggtggagcaatacctgtaagaagaatatcgtcaaggccatggccaatgactatgggaatgacttgcgatttccacgcaagaaagttggtgcgatccaatttgactgtgagggaggaattgagggaatgttggaacggattccatgaagaagcagaggaagcagaagatgtagtggtggtagtggcagagggattttcaagaacaccaggatccatgggagactaacaatgtctatggcaatctgataccatatagaagctatcaatacaggactatcaatgaacacaaagatactttgggtacaaagtcttgcaaagcttgagccatgaaaatggccttaggatctttatttataggcggagagattacagaaaggagagttgttacaacagttgagactgtaactaactttgacagattaaaccagaaaataacagaaaataacagaagaggactttaactaactttgtcctgtaatacatacaaatattacaacacaaactaaaaaagactatacattattaagagctttcttttgaaagataataattgtagtatgaacaatctaaataaaaataaaaatccaacaaaaaaaaaaaattaaacaacagtttagcacttaaaaaaaaaaatacagcatagattgaaaaaattataaaaaatttcatcactatataaattttctatactaatgaaaatatatcaaactttaagaagatttgagactaaatgatctcttaattttagaaatttaaaatttgaactctaagcaataaattaacaatatataaataatatatatatatggaacacttcttaatgggtaatacccattgatgggaactaaaaaaaattaataaggtaataatccaataacctttttatggaaagtttctaaaaattaattttttttttaaaaaaatatatttattttttataaaattgaaaataa

SEQ ID NO: 231147 - DNA, 544 bp, Cannabis indica
taattttcataattaatcatgattaactgttaatttccaaattaaactaatcggtctttacagttacacaattgattttctaacccctcctcacatatgtgaaagaggtatttataggctctaatggcgtgaggtacatggtggtcccaaagggacaatgtgttgcttctaggctacacgttacaagtgcaagagatggtcttgcgcctcgaacctttgtttggtgttaggtggtccccaattgcagaggtagtccctgatcgtagaggtgtggttgcagtgtaccctcgatcgggtcctcaaaccttgcaggtgcattgcctccactacttgtacttttttgctttcagagcttgcagggggtgtggttgtacgcttctcccttgcataccttgtcctttgattccccctctaacgacattctctttgatgtgctttcaaattttaccttcactccttgttcacacaaacaacacacttggcactgcacatcaccttcacgctatggacttgcatgcacacacacaaacacacgcatgcgagc

SEQ ID NO: 231148 - DNA, 2697 bp, Cannabis indica
ggtgacaaaattttaaccttggcgttgggcttagcaccaggtgaacctaggcctcgggtcccaattctgacccccaaacaactctgtttgttttcaaaaagcactcaaatcttaattgtagatgaaaacaaagaatattcctagaagacttcatctgaaatgctgatggaagtggccctgtggacaaagtgtcaacctgggtgctgggttcctgtttcagccttcaggtcgatttgcttctttcctgaaagtacttttttccttattttggatgaagaaaaagaaaattattgagatacttcttcaatattgcggtcggaagtgccccaagttgataatattcaacttgggcactgagtgtttggggcacctcgtgcctcgggtgcccaaaattaaaagtgctccgattttgattatgtttcctcaaatatgtttgtgacaggtctaattaatgtcccaaaataaattttgagccattttcaccaaaacgaacccaaaaaacaaaatcctagttggaatgtcaacctgggtgctagccacccagattgacttctaggggtgttgttttgtgtattttcagcttctagaccttgaatttggattcttgttgtctttgtggtatagaatactaaaagatgattagttagaaacaacttagcatgatccaaacacccattccgaagttactagagtcaacctgggggcagtgttagggacccctcccaagtcgactgctatgactcgagactacttaactctgggatattttctttcttgccacgtgtcaaacattgatgtccaagtcaccaaggtcagtttttgggtaaacatttgccccaagtaaactttatacttatgtgaggttgactgaatgacgtaaactatgcctgtttctctcgaaactacatgggcatctattttggcaatctcaagcaatcttttctattctttaatgtcttctagtgagactagaattttcaaattcctattctctatggaacaagggaattcaacatttaaagataaaattaaagaagagaaaagagaaaagataatagattttctctcttttgtctttttaaatttaaatttaaattcactccttgttggcttaggaatagaggagatcaatagctataaacagagaactcttccatgctcttttctcattcaatccacacgcccaacacagtgaacttaagtgcatgagtctcctgcttcatcaatttttcaagtgttcttcatttttcaagtaatttcccaaaacaatttgaattttttttctttgattttttttcttccctattgtgaagctcagtttaaggattttgaatcttgttggaaatccttaaactctaatgtcaagccctttgaaaatcaaaataatattttcatatgagttgtttgagctgaactttttcgttcgtgcaaggtgcaatttgtcttaatttatttggaaaaagatgttttgagctagattaagttgatattcaactgtttcaagtttaggcaagccaagctgagagtaaacatacctcgtgggagaagaattacaagaaaacatgaagaatatgatcgagacacgactaaattcatctatgcaaagcttattgtgactaagtctaaagatctagataaggcccgtggtggaaaagtcgtggccactatgttactcaatgctgctattgaaagtgaggacccgagagattgagcctttgaactaagacctcttatttttagttccattacttagcaccaagttgaactagtacgagatgagtaatcactacctgagattgttgttagaaaactaaggacattctgtccaagtggctctcaaaatccttgttgtagtgcttggtcaagatttcatatgaatgcaggagcattctttcctcttcgcctcgaggaccaagtggcggccctagaaataaaggtcattgtagatgttgccctttatgagtattattgctttgatgctgtctataaatcatgttcgaccaatggtggagctctcagctttgattgggtgacatcaactttgaattgatggtgatgtcccagacattgggcatgctacaggagtcgaaggctacaaccctgggcacccaaacatgcaccagaagtcactatgacacaaatcgagaagcttctgcagaaatagatagttgttagtttttttgaggtttttgtcttagtcctctcttattttattagcatttagctttagtgtattagtcagtcatcccgagcgatgtttaagtggggataagtcttagtagaaacattttagaacttgttccaatttaatcaaaaactaatccaatgtaattaaactttattgttatgtttttttttgtttctactttatatgtaatcgcatgagctctaacacttgcacaatatttcatgatttaagaaacttggttattgggagtaacatcaacgttttcttaatgtttcattaccatgaaagtactactcaggtgtgcaaaaaaaaaagtgaatgcccttataactcctggctcccgtgtaccagggtaacacctagctctcgtgtaccaaggtgtatgtgcccccctaagtgattaaagaagtgccttcattggtcacttgccataccaaatcctgttgggcttccttgatcacgtgtcttgaggaactattacatgttgagcactcgaccacttatccaaa

SEQ ID NO: 231149 - DNA, 840 bp, Cannabis indica
aggtacgagtgttggctttggccggtcaggcctacactcggttgctgtccttggctggccacacttgcattgggtagggtttggccacccattgctctttcatggctggccagacctacaaagggcaaggtctggcctcccttgactcctcagttgactgatgttggttgtgcgttgataagaggtagatcacaccaattgctggagtttggtggatctaggtgtttgaagtgatcaatttcacttcttaaattgttgttttgggtgtttccacccgctcgcgatccttttcggttgaagattgacctttaggcgcctcgctcccctttgggaggaagtgttatcctctggccgactaaggagtcttctatagatggttggccagccaaaggctgtatgatgggggatgttgttgagccagagatccctggcaggccacctatgccattggttggcgagatttggttgttgttgccgttagacctttgaggaaaagtatgtcctccctctgtcaagggaagatctatcctagttcccaaggaactaggttggtcagaatgtcaatagaccctctctgatctatcaatcagtcttccttgaagtggatctctgatgagatcctggctcttccatcgattctctggttgaaccgtcttatcagatcgctagcctctcagttgtggcgatccaatttttcttggtgagatcaaagaatgtactcttggtcattcatccatctcaagaattcacgtctctactgagctaatacattgcaatcagcagcgcgtggttcttaagttaggtcaccctggcctacagcttctttgagtctaactaact

SEQ ID NO: 231150 - DNA, 1697 bp, Cannabis indica
tttatgctaagttcaaaaagtgtgaattctgattatctcgtgtccctttcttgaggcacatagtagataaagatgggatcatggtggatccggctaaaattgaagctgtttgggattgaccaacaccaaaatcggctactgaggttagaagttttcagggtttagctgggtattatcgtcggttcgttgagggcttttcaaagattgctatacccttaacagaactgactcgaaagaatctgaagtttgtttggactgatcggtgtgagaaaagtttcctgaagttaaagcagcgcttgattaccgctccagtactaacccttccttcagataaggaaaagtttgttgtttattgtgatgcctcgagacagggtctcggatgtgtgcttatgcaagctggaaaggtaatagtctatgcttctcgacagttaaaggattacaagcagaggtaccccactcacgacctagaactcgtagcagtggtatttgcactaaagatttggcagcattacctatatggcgagaaatgtgagatatacactgatcataagagtctgaaatacttctttacccagagagatctgaatatgagattgagacgctggctagagttggtgtaggatgatgattgtgaaatcctttatcgcccaggtaaatccaacgtggttgctgatgccttgagcagaaagggtcagagtcagttgaacactgtgaaacaaatctcccagcaactagcaaatgagatgacccgagctaagattgagttgattgtggggcaattggctaatattaccctacaatccactcttttagagacaatcaaagaagtacaaatgcaagatcccgagttggtaaaaacccgagatagggtttcggctgggaaagctagtgattttttagtagatgaaacaggaatgttgcgattcgagaatcgtgtttgtgtgcctatggatgacggtattaaaagggagattatggatgagtctcatacgactccttattcgattcatccagggtcaacgaagatgtatcaagacttgaaagccatgttttggtggccaggcatgaagaatgacattgctgagtatgttgctaagtgttttatctgtcagcaagtaaaggctgaacaccagtggtgtaacgccctgtccaacagggacgccacatgtgtgtgtttttataaaattcttattttatatactatataattatactaaaagtgtgggtaattaaatttttgataattaaaatcaagcatataaaaatttctttatagtaaaagataagtaatgagaactacgaggaccccttgtttgcaaaatattacaagctagtttattagtacttttagaacataaactttgcattcccaaaatatattcaaaatagagcatcttgttcactgggccgtgccactgcggctgatatgtacatcgctgctacgaccacgaactcatggctgctcaacctttgccttccctttacctgcaccataaagcacccatgagtcacagagactcagcaagaaaagttaacaaagcaaaacaataatcggtaaaaatcatcaattcaatctcatatcagcatgcttacacatttacacaatatcataaacacacaatcttgctactttataaagtacccctttaccactcgttaaccacgagctgaatctgtcactatcgttgtccgatgaa

SEQ ID NO: 231151 - DNA, 1779 bp, Cannabis indica
aactaataatagtaaagagatcaatgaatcgatcataatttaaataagtaataaattgtcaataagttcctttgcccaaagattttgactttttttttgttgagaatatatgctaaaatatatcattaatacttagtatttttttaatatcataataaataattatcgattttatatagcttaagaaaatttaaaaaatatagtaatgctcaataataatatatttttttattgtatatattttttatttatttatctacttaattacttaatatgtccgtacaatgagttaaacgtacggcacaccctcttaaaaccctagctaataaccctgcacgtatcatgttttgaaaaaaagcatatatataattaaatacagtgtattaaatgtatatgtatatagatattggtttacatatgtgtgggaatagttttggaaatttttgcattacaccatttaaattaatgggtgttatagtagacttcaatttcaactctttacatagaatttaaattcttaattttgccccacttttatggattggtaattaaaatagttaaaagaagagataaagtgttgaaaggaaggtgaaagtttgtttttgatttagttaatttgatatgttaattaattattatactgaagaatattaaggcaaaacaatctctttgtttaaccttttgttttcttttcatttttatatatataaaaaaaaaaattaggtagtgcagattctttcttcattccaatagccttaacaatcctaccacgggtcagctataaaaatcttatacctcattctgtcttaattaagattatcgaaatgcacttcgagaattctcaccccaataaaaataacaccgccacaacaaaactagcctgaattaaactcttcaaattaagtataattaagaaaggaaatcaagttatatatacttaggaggtaaatcataaatgttctatgtatctctaaatatatagataagaacatcaagaaacccaatataagaaaaaccttaaagagagagagagagagagagaagaaagcaaagcacagtggaaactgaaacaataatggggagcaaaggggacaagcgtggggttgtcttgtcatatcactttctttcttaccttattagtgctctgcaatattcaaatctctttctttttttatttatttatttataattaccaaaaaataaaaataaatataaaactttttatttttactactacttagttattcccttgaaattactatattggcctctagcttgggttaaagagctctgtcacactcatatatgcatctttctattgtactacaaataataaaatggatcaaatgtaattatgaattttattttatttgtattgtatttttgcctagattattaattaattagttaattaatgattgatataatatacataaaaaaaacatattgaaaaaatttatatgtggcaagacatcttactagggttacataaatagttccaaatttcaattctttaataatttttttttttttttgagtataaaatcttaaactttgcatgtgaaataataatttatggataatgaggtaattgggtcagtcagtaacctttatagcccaggtccatttacgggttttgttttgggcctgggcctagagatctgaagtacattccaagcccaaaatattattatatcataatattcttggtacatatgtaaacaaattattattatctgttaaattatgtaaagactattgttaaataggtatattttt

SEQ ID NO: 231152 - DNA, 1713 bp, Cannabis indica
ttttgctcaatgattatggaatgcatcacttcggtatctttccaagtgttattgaatggtgggcttactaagatgtttcggcctttgaggggtctaaggcaaggagacccgttatctccatatttattcatcttatgctcggaggttctttcaagaatgattagtgctaaggagctacaagggttgatcactggctacacttgttccgcccctggcccgagtgtctcacatctgatgtatgcagatgacaccatttgtttcattaaagcgtcgatggatgaggtaatgcggcttaaagaagttctggatacttattgccgctggtcaggccaattgattaatgtgggaaaatccagaattctcttatctaagaattgcaacttgaatattggccttagcttatcggagttgctgggattcgatataatgtcgggggaggaatcttttcttgggaatcctatgtttgttagtggtagaagggccaatgatttcaagttcgtgattgacaaagtcagggatagattggatgggtggaaggccaagcttctctcccaagcggccagatctgtgcttattaaaaatgtggtttctgctatacctgtatactctatgtctgtgttccttctccctaagaaaactcaaactcgctggactctctggttcgacgttttggtggacaggcggcactggtggagggaagttcctctctttattgcattgggggtctatctgcaaaccaaagagtctgggaggactgggttttcgtcaattccatgatatcaatttctgcttaattgccaaactgggatggctgcttgcgtctaatcatggcgctctctggactcaggtgataaaagggaagtatacttttgaccctgcagggtggcaagtgcccccacctcgtggtgcttccccggtggtgagggggatatggaagacccgtgaatttatcttcaacaacagtgcctggcttcttggcaaggactccaatgtcgatctttggagatatgagtggtcttgtagtgatggaatcctgttagggcccaaggatttcaatccgagagttgggggaaaattgcttttgccagagctaaggtcgggagaaggtactggctggagggttgagtccctggagagatggttcaaacctagtgctgcttcttcgatcgccaggtgcaggtacaatgatcttactgaatatgataaattaatatggaagtctaacccctctggtggtttttctcttaaatttgcctattgggatctttgttgcaatgagatgcaccgatcaaagctgttcactaatctgtggctctctccccttcatgagagactcaaactttttttgtggaaaattgcccgtgagtgtttgatgttcggctcaagattacaaggcatctttggtagtgtggtggggaaatgctatctgtgcaatgtggatggtggtgattcggcgaaccactttttctctctttgctctgttactagagccatttggctctctagtaagtggaacttgagattggatagaatccctctcgcttcgggtgtggaggttgttaactggattttaaatcctcatctgcttgtcgataatttcccgtctcaagactgtttggaattttccatgtttgctgctgttttgtatcacaatctttggtttttccgcaacgattcttttcacaatcaaacccggtggagagtggaggagat

SEQ ID NO: 231153 - DNA, 859 bp, Cannabis indica
ccatacataattgggaccaacaacatcatctattgcagcctcttcccatatatatatgcatgcacattctcaccttgtgtccctttgctcctacttgaatctctggacgccgtacttctccatatcatcttcttcactccacatgtcatttcgagccatgattcgaattctagtgtcacaatgctcaactcccttatgctttgttctacactactgtctttaccaaatccaccaactctttgcttcttttggttccctgcatcagagttgaaaactgttgagtctgagttttcatcggtttttactgattcgaagtctacgattcttccttcgatggaataaataggtctctttcttctttttgtggggtacttttcgaggtcaaggtcaagactattggaactttgtgaaattttacaaaatcagaagtgaagtgtgtaagttaatggagttttatatgggatagaaacactttattaaaatgtatataatgtgcaaatttagaaatcaccgaaccaccacacacgcgctgccattgccgtctgtcggactgtaacgagctcgctggtgtggtgtcactttatgttttagggaagatttatttatttaattaaatgtgtttaattaattggtaaacagttttttctccaaacatgtttggaacttcccgaacatgaccaactcagcaatacccaaaaagaaggctaattaggatttttgtccactaaactttgacatgtaccaaatcatgtcccctgaacttttaaggccattgaaaaatgctcctgaattattgagattgttggatataaggacttttgtctaattttattcaattttactatttcaatgattgttt

SEQ ID NO: 231154 - DNA, 721 bp, Cannabis indica
atataaaataaaagaatataattaattttgttattcagttatatgatatttatttttgaatttaaattacaataaatattatcttttattttacatgattaataaagagtttatttattaatatatgtatatatgatatacataatatataataaattatatatatatatgatatatgagaaataattttaagagatcaattttatggttgaaaaataacatttaatttttcttaactctctctctttaaaagtcttacactcctctctctctactcctctcttcacgccactctctctagagggtgggtgtgtgctttcccaattgttaatcagagtgtctcgtgggttgagaatacaatgtgataaaaaattatttgtatctcatttaatttaaaagcttactttctcctaagtgtggagactgatctagaagacattgatttgaagtcttcaacgagtttttatactagattggatgttcgttttgtttatacaaaaagtagtgagaaaatcctaatagacaacaatctatatactaattagttaagtttatattgtgtattattgtgttgaaatctgaggtttatagtttatatcagattcaataaattttttttaaaccaaatccaaattaactcttttactgcgactcaaatatgaatcttaaaactaataaatagtactagatccatactcaacaatttgcataatccaaacat

SEQ ID NO: 231155 - DNA, 901 bp, Cannabis indica
tgtatagcagaaacgttcaaggactttcctccttctgcgctacctctaatagaatctcttctttcaatagaccctaatggacgaggtgacgctactacagctctacaaagtgaagtgagtatcctttcaagtttatttactttgcacaaatgaaccacactattttgttctgaatattgactcataatttgaaagcggatacataaccattatttttgtgtgggtgcagttctttagcactgaacctcatgcttgtgagccatcaagtttacctaagtatcctcccagcaaggaattagatgtaaaattacgagaagaagaagctagaaggttactttcgctacttaacaactactatatgctctgatttcatcttggttaggtgttgacggttgatatctatttttaatgtcaggcaaagaggtcttaatgggaaatctaatgttgttgatggtgccagaaaagttaaggttcgcgagcgtgctggtcgagcagttccagctccggaagccaatgcagaggttcaagcaaacttagatgtatgtattttctctctgtctccaatctcacattatctcttttttcatctctgtttcttttcttacattatctggtttttctggtttctgcaaagtcaaactatttaaaatcaaccatatttattttcattctcagctgcctctttatttatgcatttgtaagtaaagtttagaattttatccccccctatatgcaaaaaccagcaatttagttttgagctaattctctgctcttgaatatcctatgcatttgttcatatcaatattttgatcaaaatgagcgaaccttgcataacactgctctgtttaacataaaaagaaacatagaaatactcatggcttcctatacttgatgattttca

SEQ ID NO: 231156 - DNA, 748 bp, Cannabis indica
atcaatataaaatacgtataacaatgaaattcattcttttattgtacatataaaatatctatatatatataatcatatcagtgagttgtattgcacaaacatatttacatcctaatagcacccatacaatggcctaaaaatctatacaatgtatttcttttttcttcctctattcaactttttttcatttttacaattcatccataaagcataaaaccaatccttatctacactttggattttctttggtaaaaacatgttgatccggttcttcaagttccatttgatgtcttcaactaccaggcacttattcaccggtttcccttgccaaattacctcatttcttgctcgccaaacatggcacaccaacgctacaacacacttgaaaaaaccagttttttgaactttgagatctttgccctgcctatccaccaaacaagatgaggaagagatatggcctttgctttccattcaagccacattttgattctctccaagcaataaccagtaacacagcattcaaagaacaaatgctgcccatttttgatatgtgaatcacataggctgcagtgatcttgcaccaggattccatacctcttcagccgatcttttgttttcaacctattgagcattgcaagccataatatcacactgtgctttggtgtgttcagccgagcccatacctctgtacaccaattcagttttgtttgggaagaattgaacaacttatagctgattgctatagtat

SEQ ID NO: 231157 - DNA, 1187 bp, Cannabis indica
ttgatgcacttgaaaaatttggggaaaataccaaattatatctttgatgaattgttgaagttgttgaagtttgcatttccgaaggagaataaaattcctgcaacacactatgaggcgaagaagaaattaggaaaattaggattagggtacgaatcaatccacgtgtgcgtgaacaattgttgtttgtttcacaatgagcatgcctcgaaagatttttgcccagtgtgcgggaccactagatggattaatgaggacacaagcagaaaaaagtagcgcataaagtgatgcgttactttctgctgactcttcgattgaaaagattatatagttcaagacatacatccaaatagatggtatgtcatcgtactggtcgtgtgatagaaaatggtgttatgcgtcatcctgttgatattgccacgtggaaagactttgatagaagacatcctgactttgcaagagatcctcagaatgtttgcctagacttagctgctgatggatttaatccttttggcaacattagcctttcgtatagtatatggcctgtagtgttggtgaattataatttgccaccttggatgtgtatgaaagattacaaaatagtaggattggagagtaaaacttttccttgattgatagggcgagagattgcacttcatgtgcctggacattatctaagttgggcaaatgtcccggagcagtacgaacacctcatcttaaccaaacttctgataaatatttattaatatatatctaaatttataaatgtgattattaccatgttattttaaaaaaaaattgtcatatgcagcattattaccagttggacaaccatccaaaattaatagctatttcgatagctgagatggccgataaatacaaaacaagaaaaaatattagattgcaacatttcagataatattacaaaaacccagaagactttgaaaatgtagtcaagaaccctcccaatgaacttaatgaagaccaatgacgactgatatgtcaattgttcacaactcctgaatttattcagcggtcgaagcaaaattctatcaaccgacaaaagatgaaattctcttcaacaaaagggtcggtaactatggctgagattcttcgtcaaaaagtaagttaatatattaaatttctattttacaaagcttactttaaatataattttctaacaagttata

SEQ ID NO: 231158 - DNA, 1589 bp, Cannabis indica
cttgagataagaaaagtacaattgtaccacttagtatgtaaaatgtgatacggtaattaacgtttgtaagaaagagtcattactctatcattgaaatctttgttaggtttcttataaaagttgtctcattaggcaataaagtaaagattgtctcattaggcaactatatagatgattactttataaagtaatagtatcggtttgtcttattagacaaatacttgagattaatgattgtttacgttaagtataatgtctacctgcttatgaaataaagtaagtgatcacttgattttaattacatgtgtgtaattggttatgtctatggatgatatatgatgttgtgctattgctttttttgctgggtctttgtgactcacaggtgttttgtggtgcaggtaagggaaaagacaaaataggacatccatgaattagcagccttctccgataaatatacacatcgactcattcggctagcagtgtcgagttgtcaagtgttgttttatggcgcttttgatctttaaatgtattttggtaaaaaaatgttatgacaactcttttgtgaaattctaaaggggattctcgaacccaaaactttcaaatattatgaatttatattttaaaagtaattagtaaagtttaattaaatcacaattttatttaaatagttagtttattatcataaactaatttataaaagcatacacgtggtgttcctacgggccagcgcattacacaatgctattagaacgaccatggttttaaagatcctgaagactagctgaatatgtacatttactgcgaagacaagtatgacacatggtataataagtgctatctgtttatctattatttgattaattgttaatgtgatactagaaaaatatgttaggaatatgggtaattatgtgaggtattattatatgagtggaaatgcttattagcatgatatttgactagatgttctatcgttgaaagtcattgatcataggtctattaggtaatgcacccgaggcgatctaataggcttaccaatcgtaagctttctgggctcgggattgacggtgaggatgtgaatcccctaccaccttagaattcagagcaaatgtatgatacaatggaagagacaattcggcagcaaggggatcatattagaaagttgagagagcaacaggctcagcctgcccatgttcatattcctttgacacctttggttgtgccacaggatgtagggaatcctttggagttgttgtacgagaagtttaggaagcataatcgaccagtgtttgagggtgacccttatccactgaaggcagaacaatggatgagcatgataacctccatcttcgactttgtgcaagatgagggtatgatcatgtgggctatgccatattcatgttacaggagaataccgtattagtgggagattgtattccaaagccaggacttgaatacaatgactagggatacattctgaactttgtttatgagaagtattataatgagtctatccgtgctgcctaaagcggaagaaattcatacagttgggttaaaggtcggtcatgatagtgattgagtatgccactaag

SEQ ID NO: 231159 - DNA, 1385 bp, Cannabis indica
gttgttaatccaacatacttgttagtaaatctaaatcttggtaaaataatttccatcagtacattcgctctgacgaggtcctcttaacggagcagtgtgcaagccgcgcaacatgccaactcttagcaaattcagcattcccatcgtgagtcaccaaagaaatacctataactttgggttcaaattacagagatatggcaagttgtccaaatcccacgatcagtgtattctgtatttactacgcaatctttctacttatatacattgtaaccagaagggaaatacttccctcccaagcttatagccctataaatagttattcatatttactgggcgaagggtcgaaaaatctatctaagaattcatattcagagatattcttgtaagagctctaagaaaaggaaccattctccttgttctttattcattttattacactcgtattaaactacatgtcgcttacaaattagacttattgtcgttggccaaaagcgaggtcaacattttggtgctttcattgagagcagaatcaaggattgctctttatttcaaatctaatcaaaagtacgatggtggtacaaactcgtagggtgtggttgatcgggggaatccataggcggtggatgctgcattgcagaacccagtgaacacaagggttccgccaaccgtaaatcccagatagccatcaactgcgggtcacagtgtgatgactcctatgagtgaaatcgcacctggtgtgcaagagactaggaataccagttcagcagccaaccatggcattcttaacacaaccgttccgcccactaccaatgttcaaacaaccattagagatgacactgaaatcaagaacctctgtgctgctcttggaatcatgcagcgtcataccaacacactacatcatgatcaagaggaactccatgctgcggtgaatctcgcatttaaagagcagaggtgcatgttcgccgaattgagggacaaggagatggaaacgttaacggcgatcgtagtcggcaggccactatgttcatatgaaaagcctatcagactaccagacaatagtcggtaaccgtcatccccttgggcaaaaccgatgaagatccagtgatgaacacttctcaaactataaatggtcagctgtccaatccccggtcacagattccacctgtgggccaagtggtatgtgtgcagaccttgtctagtaattcatcaagagaagtcatacccaataattccaaccaagttatgttgggttttgtgccttaaataaaaccctttacaatctaattagtaatcaatataagaaatttgaagtgatttatgtttgcatggattttacatgctaattgtttaatatgtttattacatttatacacaaaatcagttaa

SEQ ID NO: 231160 - DNA, 1003 bp, Cannabis indica
aaataaaagaataaataggaaaattacattgatgtttacctttatgtagtgcaatgagaagatcatctttgagttttggatatgatgacaaaaatgcaggtgcaggacatgaaacaggaggtggaggagtgggacgcctggtgtacactataggaggctgaaggagtggtggaggtggtggaggtgtaggcattgtggagctatgacccaggcaagtgaaggaacaagaaactcgtcagaatatctatcaggcatagaggatgtgacaaaattaccaacaaatcatcatccttcccctgacgagtatgactagttgaagatgaaaaataaggtgtattttctacaaaggtaacataaatagaaacaagatatttgttgagattaggacaataacacgtataccctttctaaagacgagaatggtgacaaatggatagacatcgcaagcaaaacaaatactgccaaataccggaggagcaattggaaacaatgacttattaggaaaaagaatttcaagtgaaatctcaccatgaagtacagaggatggcatacaattaataagaaagcatgtcgtagaaactacatcaacctaaaaaggtttaggaactttcatttgaaacaagagggcagatgcagtttcaagaagatgtctgattttacattccgcgataccaatttgaggtgcagtatcaacataagaagtttcatgaagcatgccattagagctcatgtaagattgaaattgagcagatgtgtactctttagcattatcacttctcaaagtacaaacaaatacattaaattgattttgaatcttagcacaaaaagcacagaatttagaaaacaactcataatgatttttcattaaatataaccaagttatacgagaataatcattcacaaaagatccatgttaagacaaaataggagaaggaccctaaacatcagaatgaactaactcaaaaggaacactaacacgttattgacttgaggactcaaacta

SEQ ID NO: 231161 - DNA, 607 bp, Cannabis indica
aatctaaaaaaggaaagtctacctattagttacctgctattacaggttaaggaaaaatgtaaccatatggttacaataaaaatgtaaccattgaatagtcacccatttataaatatatatatccctcaaattacaattatactcaaaatatatatgggtcgtgcacccacatccacccatatatagtaagaaaaaagcattaaagaatgctatagctaattaatattataaatacatgactcaacatatagacaataaaatgaggatttgttttattttttcctcatattcaatacaattttcattatttataatttatcacttgccagcaaaacgaaagaagaatttttgtatagtaataaaagaaaaagtcatgtataaatagttggttttgctattaaaagaaagtgtcatacactcttatatatagttttggtgatccaatattggtatgctagttgactttaaacgaaagagtgtgcacatgacatcatcacccagttgactttaaatattagcatgctcatcatgatgtcattgattggcctgatcactttttttgtgtttatatatatgttgtgtttttttattttcatttttgttttgt

SEQ ID NO: 231162 - DNA, 752 bp, Cannabis indica
caaatacaaaataattacaaaactaaatattgtcggctaaaccacctgaattttaccgtttgtaacacttaaccacaaaaatcaaatttttgggggctaaactacctaagccctggttccgttttgctatgtacacctccgtccaaatatcacagttaagtgccacggtggactatccacatgtacacacttgtaaacgtgataagtttttagtggtccacgtaatattcttcttccttctcctcttcctcttccacccttttcccatgcatccactcacctccttccaaacactcgcctacccggagaaatggatcgcaattctcctgctccgtcgttaccttttcaccgttacagaccactgacctcgtcccgtctaagcttcaaaggctggtcgccgagttccagtcattttcggaacgcatcgacagggtcaagcggttgttgcaatatgcgtctcttcttctgaagtttgatgactcgtcccgggtttactcgaactgagtcatgggctgcatcgctcaggtatggctggcggcgggtttagataaggaagggagaatgagattcgcggctgacagtgattcaaagatcatgagagggttttgttactgcttggtttcgattctcgatggggcggcaccggaggaggttttgacgatgaagaccgacgatttgaaggctttgaacgtggggttgcttggtgggcagcggtctagagcgaatacttggcataatgttttgataagtat

SEQ ID NO: 231163 - DNA, 860 bp, Cannabis indica
aatgttcaaagctgtacaaagctgcaggccagaaaccaaactgtcaacgctgaaacttaaatagatatcttcctttgtcaatgaaatatttactaaaaagttcctagctcttcactctggttcaaagatatatcgctattctaaattgatgaaaaactttaaatcaagagttattgtatcttaagtctgtacaaatacgctgcatgcactgacagaaaatcaagagttagcagagctagaataaaaccttcttgtacaaatttaacaaaactatacaaagttgtctatatcataactgagacaaggatagaatcaggaagaaatatgcaatttttgctcgtttaccaacgttgaaactttaaggatagttttcactgggcgaaccatgaagttggtaaaagaatcaatcctaaaggttggaacacaaaagatgtaacacggtccactagaagttggcacatctttggtattgaccatcaatagcaccaaacaaggttaaatactgttgaaatctctcggcattagattataagaaaaacttgtgaagcaagaaaatgcattctagaaagaaacaaaatttggctgaataataagagatggccttattgctgcatgcacaataacttacagcctaccacactttgtgagaagaagggattagtaaagagctagtatcttttctttcttttcaagcccaatatactttttattcaagatggatagtaacagacaagtaaaagtatacattcaacaaatgtaccttgctttaaaaaaatcaagagactagtaagggtgaatgactacatcagcacctttcccacaaaaaataactaaattaatatgcatgatttaacaatttg

SEQ ID NO: 231164 - DNA, 1315 bp, Cannabis indica
tttacccaaattttaatgacgatgatgtgtcaagagtagccacacgtggcacgaatatattaagattgaattaataaagaatatgtaaagtcatgactgtttgggtgaccgttaatcattaagggtggtcatgaccattagaatagaagtcaggcggtcacctttacccctagcttgagtaaggtgagcatctcccaagaaggaaaaacgatagactaacaccttcataagtgggatgaataatcaccacacacctacagaccaagttagtctaggggatagatgacactacccctaccatagacataaggacattctcaaaggtagatgagaacatccacacaacactatgactacccacaacatatatggggtctcaggggtcaccctaagatgacaattgacgcccccctcaggttgggtctcgggggtgtcacccccaaatgttaacttctatccctgaaggtggtcaacgatcatgtcacactcttaggagaccctcatcatcaatgactatttcaaatgttcaaatcccacaaaaggcccaaagatagttctcaacctacgaaaatagcgggatattatcataaaaaaacacatttcaatcaccttcgaaaattaaggaaaacggttgagatagctccgcgttggtcgcgtctcctgaagcaagaagcaccgaccatttttcctatataaggggtcatccatgacctgggaagggggctgcgattttgagcacttaaaaaaataaacacttttcattttttgcaatcaagagcatgttcttgacttttgcagccttgatcaataaaacacaatgggtttaggctattaccgacatcagggaccaaacctctttaaatttcagtgtctttctttacatttattgtaatttttggtgtcattaattacatttatggttacgattttgatctaaatctcatttattgcgactccgcatcggttggctaaaaatccagtcaacaacacttacacaaaatatttttgcaatcgaataattcatttgtactccaagcaaatattctttctcattaaatagttgatgtgcatgcaccaaaaaagaaaaaacaactatatatcaaatattattttgtagctaaaataatatatatattttttatacactactaagtaaattatattataaaatttattttaaatttatactcaacaacaaactcatgatattttaccaacgttgatacaaaatttaaataatatatttgagtaaagcatattctaaatatattggtaaaaaattaaatattatataaatacttacaagctaaaaata

SEQ ID NO: 231165 - DNA, 1782 bp, Cannabis indica
aggttgctaaataaaatttcacatattgatagattttatttaggcccaattagtagttgagcctattcaattaataacagcttttcattttaaggttaaattcctctcttttgggccttgtgtgagagttagggggccatagaagaagtgggtacgacatactgaacccagccctccctcatatgaacaacccaacctgtgaaggtccatttgccttatttgaataattgttaggttaattaaattagtttaacccagtaaaattgattagcaacataactaatttcgaaatatatgaaattaatttttcatttgaatattttgaaattaatttaagaaaaacacacttagtttaatgaaacttattcaagataaattatatgtatttttcttgtatttaattaaatatagaattataactaattagattcttctaaagctttttttaatatttcatgaaatattcctatttaagttgtaaattagttacttataactaatttttgaatcaacttgaatttgaatatttttgaaattcaaaattaagctgaggaattcagtgaattagttattgagagactcttggaatattattttaagttgaaagtttgttaattttggatcaacgtaaaatggaatatttttcaaattaggtggttagtaaattttttatttcattaaattatgtttgaaaataatttaagttgaaaatttagatattttagaacaacttgaattagattatttacaaattttattttattatattttaatttatttatttatttatttttcaaattttatatatttaaatataattttcaaaaattaaattaaagttggaaaataattttcaattaatttcggaccaactttaatttataattttcatcattaaaatataattaaaagaaatgattaaataaaaataaattttcttaaaaaaataatgagctttaatcaagagacattcgatctccctaatggaggaacgtccattagtgtaacaccttggaattaaggaaatggattagcaaaaccctaactagttaattgagtattattgtggaattatattattatataatttattatatgtgaaataatatgagataagacatattaagaccctgtaggtgagctaggggtattttagtaatttcgacacgagaagggtaaaagagtgaaattaatttattaatgtgcttatggactatattattatatagtatgcttgtgttgtcatttttcaggtgtgttctgacaagttggcgcagtatagtcacaaccggatatttcgggccaaattgagtttcgggccgaaatataattttgggtttaattattggtattatatttatgtggaaataatctgaaaaattaattgagtttttttgtgtgtgcaagtggctattttacctttcaagtgcttatgtgggtgttttatgttcataagggcgattgtgtaattttgtcattttggagtaaggttcataaaagggattttaagcaaaattaagatttaattttctgcattttttcccagccctttggctgaaccccctttcttctaaaaacctgtatttaactcttgattttgggttgtgcttgcttgaattcaagcttggagtttgtgtgttttgtggttgagattgaaaagagtcattttggcattttaaaaaggaaaaattctgggctttttcctctgccctagctgaaccccctctccctcttttcttcatatttttattttgttaagtgttggaaaattcatcttgaaag

SEQ ID NO: 231166 - DNA, 692 bp, Cannabis indica
atatgaatgaaattgtctttatctaacatgatgtttactgtaaagacctaattcatattataacaatgatctatagtagatcaacttaaatcctgaataatcatgaactcttgctcatgttattagtttctttgattcactcgttaaggtttctcataaaagatgattcttacaaattctattttggggaagctaataatgggaatggttggaaacatgaattacaattatggaatcatgactttcctaactgatcgaatactggttccctttaagtgttaattatagaattgaaaagttatgcacaaaattagatgggatttaaattatacttccactagtgttaattctaaaagtcgacgacataatacggaggggagagaaaccctatagcgagtcgactagtcgaggggtgagaagtcgagaagcttctgccataaccgtacaggcgattgaggccaggagcgtcgcctgcgggtcgtcgtccggtcagtccacatcggccggagtcgccgatcaacgacggccaccgccttgtcttttgtcttttgtcttccgttcagttccgttaccgcaagtcttgtcttttgtgacatggtgtgattgtttatggtatgagattggttcttgtttattggtttgagattgttctggtttttgccattgttttttggtttgagagtctaagtttt

SEQ ID NO: 231167 - DNA, 736 bp, Cannabis indica
tctctaccttggccaccaccctctctctctcttcttccttgataatttcgaaacccttagtgattagagtagtgcccacacacaacaagcaatacctcaatcaaaataatttccaacaagaactacctcggttgctgtagtgttcttttgattccatagcaaattgtttctagcattccaaatggcccatgtcaccataagagcttcctcaagttgttcactcgaattgctactcattaattcttggaaccaagtatagaaatgatgttgagaaaaggatgtaatgttgagagaagatctatgccaacaagacttggcaaaattgcaactaaccaaaacatgcataatagtctcttcgacagtgttgtagaagctacacaatctgttaacatgaacatgtttggtattaagttggactttagtagcaagtataccaaatatagctcgccacccaaaatggaggactttcggttgtactttgatttcccataaatttttccacaaactagcatctaaaccagcaggcatcgactggtttcgtagccacctataagcacttttaacagaatagaaaccagatttctctttactccaagtccagcagtcttcatgtacagccataggcaaaggaacactcataattaggcgctctctgttttttgaatgggtaaatatcatgtattttgtaaaagttacactctctgttttgttaaatgaaaaaatggaccttgtattt

SEQ ID NO: 231168 - DNA, 1279 bp, Cannabis indica
ttatatgtaaattattcaatattaataatttaacattcaagcacatataaaaatattcaactcttatttataatcagaaatatctttacaagctttcaaggtataaaccttaacaacttttgtggttagttgtacacccttcaaagaaatcttctttatgtattaaaattctttgggttagctagttaatttgcacaagttgacatgttgcttctcttcaagtatgcctacaaatttgtgtgatttcatggctcatattttgggggtttctcgtgttccctaccatgataaatatcttggtttctcttagtttgcgaggaaaagcaaaagtgatctttttcaatcaatcaaagataagatctggaacaagcttttgggtggaagtctaagcttttctcttttaagggtcgtgagtgcctattgaaatcatccatcaatgttattcctacttatgctataagtctattcccttgaccgtggggcttgtcaataagatacattgcttgtgtgctagattttagtggggcagggatgatgataagaagaatatcccttggtatactttgtctagcttgtggtttcgtgatatgtttctctttaatcaatcattgcttgttaaacaagtagctcaattatttaatcatcctgattctttaatcaaaatgtgcttctttctttggaagagcattctttagggacgtgacttttggaagcaaggtttttactggctggttgggaaaggcgatactatcaagattcgggaagatgcaaggataccaaagtaccatgtgggttggacctattcttttaagggggtcgtactctttaattggttagtgatctcaaacttgattctggtaggtgaaattcttctcttatttgggataagtttgacaatgtgaaagccaaggctattttgtctattccatgctctttgtttaattaatagacaagataggcttatttgccacttttttgataatggtatgtatactgttaagagtagtttttggagctttgttttgagtttggatttgggccaagaatcagcttcttatggttctttttgttggtggaagcttctttggggccttaatatctctccaaaaataaaaaattttgtttgtaaagtttaaatttcttgcatccctatgccaatttgactcatcatggcctttatgctaaggtttgtcccatttgtcttcaaaataaggagactatcattcatgctttatggttttgctcctcgctttagtcaattcattctaagtaggttgtt

SEQ ID NO: 231169 - DNA, 557 bp, Cannabis indica
gagatgtggggtctcagttcttgtccctttggtgagcaagcttctccactctttcacctctctctctttcatttatgtttttggcagatttaattgctcgatttaagattttttttcctatggatttgaatggagtttatttatttttgtgggattttaaatcaagatcgtggtaggtgtttatgtttattttattatatttagattatgggatcgtgtttgaatcgagatagaggtgatgataattgtggttgttttggattaaaaaagaggtggtaatggtggtgagcaattatagttttggtggtggtgatggtgtgcagttgtttcgacagtggtggtgatggtgggtagttgtgagggatggtgatggtggtagtcgccaattgttgtgggtggtggtggtagttgtgaagaagaatgaataaaataaaataaaaaatagaaaataaaatacaagtgagaaaaagattaagaaataaagaaaaacattatattttatattttatcattttttgaagtttaattaatttattttaatttcttttaaaataatt

SEQ ID NO: 231170 - DNA, 1483 bp, Cannabis indica
tcttcaaagaataaaagaaaatgttttatctgtaactcaacatcacacctcaagaaagattgtccactatggaagaaattcaacaacaacaattctggcagtgttgacatagcatcagatgaagaaggttatgatagtgcaggggttcttgttgtctccaaagattgctcttcatcaaattgggtaattgactcagggtgctcctttcacatctgccctgaccaatcccaattcaatgaatacaatgcaataaagggaggctcagtcagacttggtgacaacagatcttgcaacatcactggaattggatctgtcagattgaaactgaatgatggtggagttgctgagttaaggcaggttagacatgttcctgagatcaagagaaatcttatctcagtagctatgcttgaccaagaaggatgttcagttaagatagagaatggggtcatgagaattgtcaaaggttctatgatagttatgaagggagtcaaagagaatggaatttacttgctgcagggtcacactgacaactcagaagtgaatgcaaccattaaatcatccaaagatccaactttaatttggcataggagacttgctcacattggaaatggaggaatgcaagtgctcaagaagaaaggagtttttggaaaggatcaaatccaagaaatcaagttctgtgagcagtgtgttctaggcaagtcaacaagagtcaaatttggaaagggacttcatgtatcaaaagctatcctggactacatccattcagacctatggggaccctctagaactgaatccagaggtggagccaggtattttctaagctttattgatgattttaccagatttgtttgggttcatattttgaaaaataagaatgactcatttaaagtttttttggaatggaaaaccttgatcgagaaccaaactggcaagaggatcaagaagcttagaactgataatggtcttgaattctgtgtggaaatattcaatcaacactgcaaacaagttggcatttccaggcacaagacagtgccaagaacaccccaacaaaacggcctagcagagaggatgaataggacaattatggaaagggtgagatgcatgttgatttattctggtttacctaagaaattctgggctgaagctgtgactactgcttgttaccttatcaacagaagtccatcttcagctattgatttcaaaacaccaatagaagccagaacagggagtaatgcaaagtatgatcatctgagagtttttggatgcattgcctatgctcatgtaaggcaagacaaacttgagcctagagctagaaagtgtatattcattggctatcctgaaggtgttaaaggatataagatgtggagtattgaacctggtgatcatcaaaagaacttcatcagcagagatgtggtattcgatgaagagaaggtttataaagatacactgaaaactcagaaagatgatgaacacactgaaacta

SEQ ID NO: 231171 - DNA, 845 bp, Cannabis indica
tacattcctggaactaagatggtcttccctggactgaagaaaccacaggatcgtgccgaccttattgcatatttgaaggaatctactgcttgatattgcctattccattttgtagttcaacaattattcacacatagcggttcggaaccaatttttttttctttgatttactaataaaactcgagacttttaagggctgcaatgcttctttctcgtggatttttcttttgcttttcctatggaatctctaggaagaggaagaagttgctgtaatcggcacattaaacattcattttgcttacaattttatgaatattgtggaacaccattttacttattggtcgattgatgattttatcttcatgtcaatgctattggtatcctgtttatctacacaagattctgaatagcaataatgcaattacctggctgaaaattttgtgtttttttttaactgaaatcttcattgaaagaaacccagaggaaaaagcaaacaaaacaaacaaaagggagttcatggcagcaacatatgtgtcatctcacctccctagatgatggtaactttgagtgtttatttattacgagaattgtttactaaagaaataattcatatttttattgatatttatggtaacttcatgaagatgtgaaaaataataaaaaatgtggaaaaatattaatgggttgatcttgattcgtgatgatgatttggagcttgaattgtgtctattggattgttttctcaatccgtactatttttgtaaattttatattttggatctaattcaatctgtacaataatttaaatttaatttaatctgcaaaagtgtagagtggattagtta

SEQ ID NO: 231172 - DNA, 897 bp, Cannabis indica
tggaaccagactagggacacagaacaagggtcgggacctattaccgaaccccagtctcgatctcgaacccgaactcagaaatgagacctgcgacctgaataagaacaagaccgagacccgtgacagtgatccagatcttgactcgggattcgggtaacagggcctggaacagaccactagtcattgtctagatctgggacttagactaggaccaaaacccagacgaagaaccaaacctgaacacaaacctaggcttgggacccaaaattagaacctgaagacgaatcgccgaaccgggaccatagagcaagactaggaacgtgaccaggacccgaaacaagacctagaaccaaacacagacctagcctcagatcctaactgagactagaactcgggcccagacatggtcgtgtacctagaccggaactgagacccgaacctggacctaaatcttggacccgatcccaaacacagacttggacctagatagggatccggatatgaaccttaactcggaccaagacctagatagggatcgaaatgctggacctagatctggaccgacatcctgacccaaacctaaacttggacccgcactcgggacccgaccttggacctggttccgaacatagaccaagattggggtccgaaccgggaaacaaacccggacacagactcgaacccgaactcaaacccacacctagaatcagaccaaaagctagaaccgtacccggacccaaactcaaacacagaccaggatcggaacaaaggacttagacccaaaactgaatccagactaagatctggattggaattgggactcggacccaacctagaccaagacccaggacgcgcacccaaaccctgcgcctgttctagacctagactgaaatccgg

SEQ ID NO: 231173 - DNA, 1968 bp, Cannabis indica
acctgcctggcttataggttcccaggctaagtcctattaaatggacgcccagcgaaatacaagaagtcaaggtaatagggtcgagactggaggcggtcgaggaaatcaaattcctcaaaatccccgtggtttcagccaaggccgtggcaggttttagggtggtcgacatccgaacccacctcaagctcctccggattgggagtagagatttgcagaaatgcaagatcgtatccgccagcaagatgaaaaaattttgagactaaggtagcagggtcctcctgcaatgcatccactgcaagctcaggctgtcgtagttcccgcagtgccaacagaacaacctgttgctggcaaccgtatggagccgctttacgagaggttcctaagcaagcacctacagtgtttttgggaggtccggatgtgatgaaagctaagcagtagctcacagtgatagaaagaatttcgaatttcatgggggttgttggaaatgatcgggtgacttgagctacttttcagttcccagaagacgccctcgtgtggtgggaattggtgtccctcacctgagtcgtcactgttatgacctaggaggagttttgagatttattcaatgccaagtactgtaatgaggcagcccgcagtgctaagcgaaaagaatttactgattttgtgcaaattgagggtatgtcagtaactgagtacacaacaaaatttgtctgtctggccaagctggtttcgggtattgtgcccacaggtgtgaatttaaaaattaggcacgacctagtgattactaccaatgacgcaacatcatatgtagagatggttgaaaaggctctacgagccgagggtgcggttaagtttctataggatccccgagtgactcctagtgttggtgggacccctactcttcctactcctgtctatggtagggatggtggtgattccatcactgatcagaaaagaaaggctaacccggcatctggtggttcagggcagagcaagcggttctgtgggaaccaaagcagaggtggatgtcagggttactcttaccttgagtgcccacattgtaagaaacatcatccgggtgagtgtaactggaaaacatgcttttagtgcggcatggtggggcatttcaagaaagactgccttcagacaaagaaagaagagcagaagccagagggaaaacccgtacctgctcgggtgtttaccattactcaagttgatgttgtagccagtccttccgtggtgacaggtcagcttcttgtcaacaactccttttatactatgttatttgactcaggagctacacactcatatgtggcaacactactaattgaccttttgggtaggccatgtgattttattggaagtgggtttggaaccctattgcctagcggggagttggttatctccaataggtgaattaggtctatcccagttaggatagaagatgggaagttgagtgttgacttgatagagctggaattaacagaatttgacattatacttgggatgaattttcggtccaagtattcaaccagcattgattataagcagaaaatggtaacctttcagtcggagggtgaagatccatttgtttatgttggatcggtttaggtgtctaggatcctgattatttcaatattaagggctagagatttactacaaagtggatgtgtaggatttttagcggttatgtttaactcaagcacacccaaaacatttgggactgagatagtcagggttgttagagattttctcgacatttttcccgaggagttgctgagataaccgccacaacgagaaatagagtttgtgattgacttggcacctggagtggaacatgtttcaaaagcaccatatagaatggctccagcggaactcaagcagctaaaattacagcttcaggggatgcttgattttgggtttatccgacccagtgtatcgccctagggagctctggttctgtttgta

SEQ ID NO: 231174 - DNA, 1600 bp, Cannabis indica
caattatttaatgaaaattcaataattccaaatatccaatcattccaaattcaatccaaattcagtagttagagtattctaataatagttataattgaggtactccacataagtacctgaatatatagtttgttttgttattaatatttctaaaagtttataagactccatattaatttacactaatagttatttattgtgtaatatttagtaccataaaatgttgttttagcatttctcttatcaatattattctagttatgtataccactcaagagtcattgtctataaaccaaacaacccatttttgtttaaaaaaaaacaaaaaatatctatacacaaaaacagaaagaaagaaatagtcaactaaagacacagcacgtggctagtggcgacaaggaacaatgacaggtgagtcctacttttccgactatatgggtatgtaatatgtatgggtatgcacattgaatctccaacttatgaagagagagtgggtagactatagctttagtcggtcagatcttaacctgctataatttatggatcccttatcaattgccactcctagtaattttatcagactatgaatagatattattataattattaaggtgaccaactcagtatgattgtaattcaacaccaatcgagatgattgggttgggggggcttcaattcatatttgtatttttcgtccatatataataatataaaaagttaataatggaccacttattaattgttttatttaccggctgtggttaaatattatacatgtctctctttcatgtgtatggcaacaaaatatatatgtatgtatagttttataatcatagcttcatatatagatatatagcagcatatatctctcataatgaataattaagtttttctttttgattaattaaagatcttattagcatttttggtcgaatattatattctaatatatacatatatatataatcaatgcatgggattaattaatctgattaagatatcaatgtagacaaattatagcttatccaacaagtgatccaatggttgtttaatctcttatattttgtatgtttattggtaggttacctatataatatggcatcttaccagatcacttttgttatattcaaaacattaggttttacgtgtgtgtttataaatttatatatatgtgtatgtgtacataaatatatattaacgtgatttatgtcgttgtaggtatataaaaaatctaaggacaggtactactgtaggtatctaataaataatatatagtaatatttgtagtcaagagctagataatcagttcccaaaattaagataacctagtacgactttatattattaggtaacaattaggaatgtcaaatatatatacattttctctttatcattttctaattgtcttaaaaaatttgttgctaataagacaggttactagtggtatcaattttattactccaaataaatgtaactatatagtagtcacgatcgaaaaacattaaccgaaggaggaattggatacgctagcttgctctatatagcaccttcaataatattctttattttttgtttaactaaaatagctagaaaattaaaa

SEQ ID NO: 231175 - DNA, 1368 bp, Cannabis indica
aacataaaatgttatttctgatctttattaataagtaaatctgattataataaaatgggttttatttagggcacaaaacccaacaagtggaagtattcgtactgaagaaaaccgatgacttaccaaaattcacttgttgtcccgtagctatagcaaacaaactcagcaactgaagaacacgagtaacctctccatgtgctgccttacaattcaggaaactatcttctgcaaaaagcatatgggatacactaggcgctccatttgccactttacatccatgtatccattttctctcctaaaatctttcaataatggcagataaagcttcagcgcacacaagaaaaagatagggagatatatggtcgccttgtctaagacttctacctggcacaatttggcccaaggttcggccattggccagaaggttcgagtaagtatcgcacacaagaaatgccaatccactctatcatatgctttacttaagtctaatttcaaagccataaacccatccttacccacttgcttcctcttgagatagtgttagatttcaaaggaggccataatattatctgtgattaatatcccggggatgaaagcactgatgtttggagataatatcagataataaccccttcattctgctaacaagcaccttgttaatgactttagcaatgacattacagagagaaatatgatgcaattcactcatttgatcaggtttcttcttttttggaattaacacaatatttgtgttattcattccctcaggcattttctcagttgcaaataaatgtttaattgtattgatcacatcagtgccaacaatggaccattattttttaaaaaactttgtcattcataccgtcaggaccaggggattaatctggatgcatttgaaagacaacatctttaacttcttgatccataataggccgcaataactcctcattatgatcatcacggacagtaggatcaacacactccagcacctcgttccatcttgctggctcggcagtaaagagctttctataatactccaccattacatcctcaaggccatcatccgaatgtctcaagttcccctcagagtctttcaaacttatgatttggttattttgccttctagtcgaagcttttgttgggattttatgccctaaataaaacccatttcaatacaatctgatttgttatcaatagaagattagaagtcatttatgtttacatgtagttttcatgtttatggtttaatgtgtacaaaatctgttaagtccagaacatatagttattcacaattacagtgatgtcaacacagtggaatgtaattgtgattatatgcttcaaaagataatgtcctgtattcatcagtgc

SEQ ID NO: 231176 - DNA, 542 bp, Cannabis indica
tttcatgtgagttgctatacaatttttggttgtcatttaagttgttccgctagttgtaatagtgatttttatgtagaattccgtaaaaatagtaaaaaaaaaaaaaaaaactattttgaagtataaaaatgaaaaagcctcttaaaattatgagaattatcctatatgtcattttttttaaaaaaaaaattacggtttggattgcttcaatggttgttccagtcgttttcatgtaagttgttatgtaaatttttgttacgatttaagtttctctgttggttactggattgttatataaatttttcgtaaaaatataaaaaaaaattaaaaaaaaaccttaaaattgtacatacttaggcttaccattctaaacaaattaacctaaattcaatttgtaataagaatccatcaatacataaaagaagaaataaatattttttatatttgaataatgacgtctattaatttgtttttctttattacaataataatattaagttattatctcacgagcattgtctacatctctgaagttaaacata

SEQ ID NO: 231177 - DNA, 1057 bp, Cannabis indica
ttacccctcactaaatccaaaaagcttctaagtcacttagtggtattttggtcatctttaaaacctcgactaatcccaaaattcccaatgtctaactatattgccccgctactactaaatattaaaatgtgattctattggccaaatgacgtgttccaatattgctgggcacgaaacatgcaaaaacataaaatttcatatatggcataaataatacatcctggattcaaataaagctccttaaaatgataaatcataaataatattctagtttcataattaaaccctaattatctgtgaatttccaaaacaaagttaagcggtctttacattataggcttaggatcaagatcctaaagtcggtggctacaagaaacgaggttgttaagatagttagaaataactaacttaaccaactcatgtttgagcaatccccatatgtgtcgttatgtgcagaacctaacaactttgctcaaatctctagtggtaagaacactaggagcaagcgtaacaacaacaactctagaagaaacagttgtaaaaatgggaagtataacacttctcccacgccacaaaaccaaaaggacaaggaagagaagtttacttgcttcaccctcctggctaagaaatctgaagccatcttcatggctactcaaggaatagtcccatacaagaacccccctcccatcaaaagagagttgagcaagagggacatttcaaagttctgtgaatatcacaacgactttagccatgacaccaacgagtgtcaaaatttgaagagggagattgaattccttatatggaagaacaattcccatatgtattgttatgtgcagaacgaccagagataggcacaaggtgcccaaactggagacctaatgacacttccagtggcgggtcactttggggtcattatcgggggactctatattgcaagcgagatcagtaaatctaaggagcactatgctcaaacactctatcacaagccaaaacatgacatcctagctatcgaagaaaggggctctaagcaaccaaagcttggagagcccacgatctc

SEQ ID NO: 231178 - DNA, 1043 bp, Cannabis indica
aaacccgaacccagataaaaatccaaaccgagacctacacctgaaccgagaatatgactcaaccctgaacctagaccgggacccaaaccctgataagaactggaacttggaccaagaatcaggatagggacctgggcaacgaaactaggatcgggacctagtacccaaactcagatccagacttgaacctaagacctagctcgtgaccaagcacacaaaatggaaccagaccaggacccaagattgggattcggaactggacccggggcttggaccaacccgtagtcagtgttcggatctaggacccagccacggccccaaacctagaccaggacccgaacctagacccagaccccaactcagtccaagacccaaacctggacccaaacccataccctatgaccgaaaattggaagtaaaccgggaccctggaacgggaccagaacaaggacttggacttggaaccgtaattgtacatggacgtagacccataatcgtaaccagaccaggacctagactccaactcagacctagaccaaaacccagacctggacccggatcccaacccaaacttggactcgaaccaaaactcagacccaaacatggaatcggaattaggataacaaactggggccgggacctaaaactgcaccccagtcttgatctcaaatccaaactcggacctgcgacccaagacttgaacaagaacaagaccgggacccgtgatagggatgtagatcttaactcaagatctgggaaatggggcttccagtagacccctagtcggtgtttggatctaggacttaaactagcacccgaacccagaccaggatccaaacccaaacccaaacccagacctagacccaagacttgaaattggaacctgaacaagaactactggaccaggaccatagaacaacgctaggactgtgaccaggttccggacctagacctataaccgaactcgaatcttgccctagacccaaactgagacaagatgtcaggcccagacccggacctaaatctgggacccgatcccaaac

SEQ ID NO: 231179 - DNA, 1589 bp, Cannabis indica
catagcccaataaagctctaacacaatcaactttctctttcttgcaaattgtctcacacaaaaaaattaaattgggtctcttttgaaaaactatttctttaaggaattgaacaacccgggtgttcccaagcccacggtaattccaactcaacaaactcataactcaacaacaaaaatcacataccagacatgtcaaaacgacaagacaacttttataataaaaaatcaagatttattccagaaacatgtaatattatttctacttaattactcataagtctaagatcatagtaaaagcatcaataacacagaaattagaattgtgatcaagtctttagtctattttcctaatatttgacaaataaacacttcgaataaattcattcgatgtcgaaatctctatcagttaaagcaagaaaccaatctaaagttgttgctttcctagtcataataatctagcaaagtcctttcaatcgtaaacaccacaactagcaaacttgcattaaatcaatcaccaaaatataagaaccaccacaatttcaataatctctatcaataaaccgagaaaacatgaaaatgcatatcaaaaccaaccaaaatctctaatctatcaatatacaaacatagaaactacaaaaattaagcgagcattataatcatcatcaacagaatcgtaagaatctaatgttgaaaccttgaaacaggaacgatgatagaacttggcgttgtcgtagtggttgtagctagggtttttgatttggaatctgaaggaaaagtgaaacagaaccctaagtcgtattagttctcttatttttaatattttgtaagagcataaattttcaaattaatattttacgattattttaattattattattgatttttaatcatatattttctaaatttatcaactttcttttatatttagatctttattttgtgtgagaattagatacacgtgagatatgataattacaatactcttgaatgtaatgatgagtagaagtgagatacgatgatgagaacggttttaaaatcatatgataagttttctatagactattaatttttataacaattcgagggattaagcctaacatcatgttatacacgtcgtgttaggcttccattataataacgagattttgtaaataaaagttggatcagtctatttgtacacacctagtttttttatacaaaattatatgaaaaattagattaaaatttgatcaatttattacttagttctcattaaataaagttatgatttattttatatatataatttaaaatttcttaaacatccaccgcgaagcccaggagggtaaagttgctaatttataaagatatgtcattatttaaatggaataatgggacggaacaacagaatgaaaatttttataaatgtaaaagttcagaggattcttaataaaccatatattttaggggataaaatcagtattgtggaaagttcagagggtaaaattgctaaatattctaaaaaataatagagtaatttgcggtataaatacttaagtttaactttcggttgcaaataaatacctaaatttaattttgtcgataataat

SEQ ID NO: 231180 - DNA, 1779 bp, Cannabis indica
gatgagatgcccaaatgtcactatggaattcttgtacttgttgtatctttctcctaaaccatttctatgcctgcaaagcaaagccaccaaattagtttttcatagctatatatctcaaaattttcctccctagttacgtatataaaaacgcttccaattatatatatgcagaacaatgtagaaaccatgtcgatcaaaaccagaatggtccattaatgtgttgatagtccctgtatatgataaaggtgtctgaattgatttcagataccttataggtagactctgatcctatcaaaactcgaaagatctcaaacatggatgcatatttttaaaggtgtatcaaatatattagatgtttaaactgtttcaaaatcttatatcccttcctcaagaaagtgctaaaacatttgatctaacagctacaaattctaacagacagaacaaaacagattaatattattatagagctcataaaacaataatctcttttcagattatatacaagtccaagaaaacaagagagatataactaatttaaatcactttggagatataatgtttcataaatgagaaaagttatttgatccaaatacttcataactaaaccaaactaccccaaaacaattgacaagctgccattgataaatagaaaatgaaaacctaaattcttgagtatctacatatgacaatcaccaatccataatacataaaatgcaccccttttattttcttttttttctcaatccatttctaaaactcaaatagaaaattaagaaacagtaggaaatattaatttaaagttttaaaaaacgtcaaaacaccatcataaggttctctcagagaaaacagagtaaaagagaaacacatatttatatatatggttatgttttatgggttggaaacaaaaagaatctgcttttcattgattggtgtccttcattgaaatatatacctggggtccgagaaaagaagtttgtgagctgagggcgataaggcagccctgcgcaggcgccatggctgcattgacagccatctcgggttgggttgttgagccttccgctctctcagtccctcagcagacttcttccttttcatgcaagaaaatgacccattttcataattttatattattattacccaaaaaaaaatatcaatcatgttataaatcactagaccattctagatttttactccattcccatgtagatgatttactgagttaatttaattaattttttttttcttaattcttattttatatataactttctcgtttatatttttataatttattttatatatttatattttatataattaatttttttttattcattataaaaaaatataaaataacatatttttgaaataaaaacagcataacgtcaaaatttaaaattgaaacaatataatctcgaaataaaaataacataatttcaaaataaaaaaacaacttttataaaaattaaaacaaaaatataaaagtgaaaaaaaataaaaaataccgtatacataattcccctaatatttctttttgggacattcagaattcttaattgtctcaaagcacgtttgtgttagcataactatcattgtgatttgaggattctcatatttttattggcctcatggtttatggtgttattgtttgttacgattgttagtgttatcactaaaaaaaacagttgtttttagtgattaactttttagtcacaatatatatatatagggcaagactatggtaggacctagcaaaagttccctactggtagggttctt

SEQ ID NO: 231181 - DNA, 1941 bp, Cannabis indica
aaacagggtctggggtgtgtaatgatgcaggtcgatcaagtcgtagcttacgcttcccattagttgaaagaatatgaacagtgatacccaactcacgatttagaacttaccgcagttgtgtttgctttgaagatttgatggcattatctctacggagagaagtgtgaaatttatactgaacataagagcctcaagtacttctctactcagaaagatttgaatatgaggcaaaggcgttggttagaattggttaaagaatatgattgtgaaatcctttatcatcctgggaaggccaatatggtggttgatgcccagaggaggaagggtcccgagcatgtaacgagtatgattagaatttcacctcagctagcagatgacatggtaagatcgagcatcaagttggttataggcaaacttcataatatgacgttgcaatctaatctataagagcaaattaaagttgctcagttaagtgatccaaaattagtagagatctcagaagaggttttacctggtcaagttaaggattttacgataacagataacgggatgctattatataagactagggtttgtgtttcaagtagtacggaactaagaaatgagattctcgaggaagctcataccacttcatatccgctgcatcttggcactaccaagatgtatcaagatcttaaaccctaatactggtggtgcgggatgaagaaaaatgtagcagaatttgtatcccgatgcctaacttatcaacagataaaggctgaacatcaaagatcagaagcgttattatagctactaaaacttcttgagtggatgcgggaggatgttaccatagactttgtggttgggttacctagaaccacgagaatgtacaattcaatttgggttgtggtagaccaattcacaaagtctgcatattttctaccggtgaaaataacttttacagtggatcagtatgcagatttgtacgtgaaagagatagtgaggttacatggcgctccaaagtccactatatcagatagagatccaaaattcactttgaaattttggtaaagtcttcagcgagctatgggtaccaaacttgaattcagtatagctttccatcctctgactaataggcagtccgaagggacaattcaaatactgaaagacatgttacgagcttgtgtaatggattttgaaggctctgggagcaagtacctgtcactgatagaatttttgtataacaagagttaccagagtacaatagggatggctccctatgaactattgtatggcagaaagtgcagtctcctattcactgggatgaaataggagaaaaaaaattcctaggtccgaaatcagtgcaacggactaatgaagccttagaaaagattaagttcaaaatgcttgcctctcagagtaggcaaaagagttatgcatatccgaagcccagaaatgtagaatttcaggtaggagatcatgtattcctacgggtgtctccgatgaaaggaatcagacgttttgggaaaagaggcaagttgtgtcctaggtttacagggccttttgagattctcgaaaagattggactggtggcatgttgtctagcttttcctcctgaactttcatcagttcagaatgtgttccatgttataaaagtatgtttctattgggttttgtgcccaaaataaaatccatttcaatataatcagatttactaattaataaagatcagaaatcattttatgttgcatggttcacatgatttatttcatgattatgtttaatgtataaattctattaagtacagaatatatgtatttgttcatgattatagtgtcatcagcacaatggaatataatcatgattatatgttcaaaagttaattccctgatttttcagttcactggatttagactgccatgataatcagcgataggtattcttacaccttggataagtgtt

SEQ ID NO: 231182 - DNA, 1261 bp, Cannabis indica
ctaagtggattttcgccgaaaatataactggtatggtagatctctaccaatatactagataactattttatgtaatgacggtattaatttgtgatattaatacttaaaaactctttttaattaaaaaaacaattagtataataaacaaaagattattttgtgtgtaacttaagagatatttaaagtttaatagttgattatagtaattaaaattttggtattttaatttatattatagtgtaatttcgcatacaaaatatacttttctgaaaaatattattttttcaattttttaaaaatattgaaaaagcattttcaatttcattgattctgagaaagttccaaggaaaccatctgatacaaatggtctcaagatggcaacattgatgctgccaaaaatcgtgcttcgagtttgattgggataggcactgttgttcttgattccagaattcgtgtgtatacttcatggttgttttgtttcaagccacaacaaatagaagctaaagcattattagccttaaataggccacaattgcagcttcctatcacacatattgaattagattttttaatggtctccactgatatcaactcagtgaagttagcagttcacatacaagaaggacattcaatttgagtgctaatggtcttaccaatcatggtttagagtttgatgaatattgtcaatggttagaggatattctaaaaaaataactttgaaagatatctcaaatttaaaatgataagattttaattagcatatacatgtgtaatcgtatggtttaattttttagtatgttttgtatcagccataggttcaagatgatgtgtccttttttactttagacgcccaatatttaatgagtcatatgatgagctcgttgatttatactgataagagggaatgagatttagatattattaaagatctttttaacaagtgcgattaacaacatattttgatgtttctattgagtctgaatgtagctgaggatcattttatctggtctaaggtgcatcatgatttctactcggtgcgtagtgcatacaagttgatgcaaactcaaaaagaaaatttgattgcagttaattctactaggttctggaacaagttctggaatttgaaggtaccactaaaagccctcaatttggtacgacgggctgcttcaaattgtttgcccaccttaactcaattaagtgttaagagggtcctagttcaaatcatatgtctggattgtcaaagaggtgagaaaactatttt

SEQ ID NO: 231183 - DNA, 2637 bp, Cannabis indica
tggaacaattgcttttttgttcgtccaatgtgctgtgggagaccaagatatttttcaaaagaagatcgcaccgggatgcccataaagtcggagattaaagtttgatccctaagctcaacattaggggaaaagtacaaagaagatttttggaaattaaccttctggcccgtggccctctcgtaggcctcaagcacctctttgatggtattacaagaattgatggtggcttgacagaagaggaagctgtcatccgcaaagaggagatgagaaatagcaggggctcttctcgcgactttaaaaccggaaagggctctcctactttcttgctggtgcaagagggaggaaaaaccttccgcacaaagcaagaaaaggtagggagaaagggggtcgccctgtcgaatgcccctggaagggctgacactgcctaagactttgccattcagattgaattggaaggatgcagtggaaatgcacgcatggatcaaatggacaaacctgggggggaattgaaatttcctaaggatagcaacaatgtagggccattccactctatcaaaggctttggccatgtcgagtttgatcgccatccatccctttttcccacgagtcttaagtttgatggagtgcgcaacttcctgggctataatgatattatccgagatgagccggcccgggaggaaagcactttggttcggagagattagagaattcaagacaagtttcaacctattggcgatggtcttggagatgattttatatatgatgttacaaagactgataggccgaaactcagagatgaacttaggttgcttaactttaggaatgagagtgatgagggtgttatttagaggggccacatttgcgcttccattgaggaagctggaagctgcttcgagcacttctctccgaacagcatgccagtttgctttgtaaaaatgggagttgaagccgtccgggcctggggctttgtccagaggaagctggaaaaacgctttttcaatttcatccaaggagaaagcctcgcttaagagggacttatcagcgtcagagagagagctgctaatgccctccaaggctaaattcatgtcagagtcggtggggtttgatgaggtgaagagatggtcgaaatgagactcaatttctcgaataatgctttcctcatcagagatcatacctccattttgcgtatggagttggtgaattttgttggttttcttccattgggaagcaaatcggtggaagaacttcatgaagtcttcaatttataggaatataatacttttattagcttttattatttttttatcgttaattagtatttttttgtatctttattttttatttttttttatattttaactaaagaaatatcagttaacaaaatataaatataaatttgtaaatataaaagaagtttgaatttgatttgcttaagtaaatataatttttattaaaaataaaaaataaaatatttttataataaggtaaatattatttttagaccctgtattttgtaaagttaccaattagaccctctattttgttaaatgataaaatagaccttatattttctaaaatagtaaaaataggacactgaactcaattttcaactaatttattttttaatataatcaactttaagataatttctaacacgaacaaatataaaaaaatataatctgtattgtcataatatctttagatcagattattattaagttttattttaacaaaaaatcagcttagggttttatttgtacaattttagaaaatacaaggcccattttgtcatttaacaaaacagaggatccaattgataacttttataaaatacagagtccaaaatggtatttaccctttataatattctaaaagttgggtttaaaaggtctatttcacacatataaaataaaaatgatagacgtgccacaatacaataaattgtttgaatcttgttttcagcttaaagtaagattaaaactatttggatatcaaaaatatgaaagtgccatagaatttttataaattaattatactgttgttttattagtctttgattaactatatttagtttctcataattatttgtgttgtatgtttatttattttttgttaagttgactttttaattttagctataaatttaacataatgttattatattttttttatctaaataaataattctaattatttactcaaattattataatgaagaagcaattatataataaatttattttatgtatttttttagaaaaggattttctcataatatatatgatgagaggaagacactaattccctccaaggctccaaataattaaaggctttttgtaaatcaattcttagaggattaaaatttttcactttattatagttatagattatagatttctctactttgatatgcttttgacacgcatttgtgagtcaacagttaaaactaacattttgatttttaattcaaggggttttatttcccatcaaggaggctctaatgcgattatagctagttaatacaagttctcttccatgaaaaaatgttgaattaacaattccgttgctattgtaatgaattgggttacctgttatcaaagtgacatgtatatgagtaaaaagaaagaataataaaaa

SEQ ID NO: 231184 - DNA, 1867 bp, Cannabis indica
aatctttaacagaacacctaactaacattggtattgacacacgtgttctggtttacatcccccctcaaacgaaatggcgaagttgccatatgaagtttgtttttaagatagttgtagcgttcagtagagagagactttgtgagaatgtcagctgtttggtcgacagaaggaacatagcggacagcaagctgtttgttgagtataagatcacgaacaaagtgcaagtcaatttcaatgtgcttgcagcgagcatgaaagacggggttggcagctaaggcagtggcaccttgattatccacccacaatacaggagcttgaggcataggaacttgtagttcagacaaaagataggtgagccatttaatctcagcagctgcattagccaaagcacgaaactcactctcggtactagaccgagccactacttgctgtttcttagcagaccatgataccaaattgtggcctaagaacacagcatagccccctgtggaacgcctatcatccacacaacttgcccagtcggcatcactataagcatgaagagtaaaatagtcagattgttgaagctttaacccgtaagatatagtaccttttagataacggagtagccgtttgcaagcctcccaatgagtggttgtaggagcatgtataaactgactcagtttatttattataaaggcgacatcaggtcgagtgaggctgagatattgaagagcaccaagggtactcctatacagggtaatatcatgaaacggttcaccatcatgtaaactaagttttgtagtagagcttgctggattcgggcaagacttggctccatccatgtgaagtctggttaacagatcagtaatgtatttgctttggctgaggtacatggctgtgtgatctctataaatctcaacaccaagaaaataatgcacaggtcctaagtctttgagagagaaggcagcattgagattggtaataatagagtttatgagagaagagtttggacctgtaatgagaatgtcatccacataaacaagaagatagacaagggtatcatgagaaccatgaatgaagagagatgtatcagacttggatgcagaaaaaccccattgataaagagtttgtttcaacttatcattccatgctcggggagcttgcttaagaccgtagatcgctttgtgcaaaagacacacatgagtaggcttgtctttgtcaatgaacccaggaggttgctgcatgtacacagtctcttgaagagtgccattaagaaatgcattactcacatccaactgtttgactaaccatctttgagtgacagcaatgctcaacacaatccgaacagtggctggttcaaccacggggctgaatgtgtcttcatagtctataccaggagtttgaagataccctttagcaaccaacctagacttgtacctgtccaaagaaccatctctgtttagttttacccgatgaacccatttattgctaagaatattcatgtgaggttcaagaggaacaagggtccaagtgccttgtttcttcagggttgtatactcagtattcatggatgcaaaccattgagggttgttgagggctgcttttaaagatttaggttcagtgggtaaaagtgattctggaagtgggtgtttagtggccatataagctttgggtttgtaaatgccatgttgagagcgtgtgaccataggatgaattcttgtggaagattagtaggttgtggggtaggatttgggtaatatgggaggagatgaggctgcttgttgtggtatattatgctggtttgctgagatgaagaagtatcggatggtaaaagtggggagggttgattttggattacggcaaaatgggtcattattcatagcaa

SEQ ID NO: 231185 - DNA, 881 bp, Cannabis indica
aaaaaaaaaacaaataataaaattgtcataatttacatcaatatccaccttaaatttatttttcatgattaacatggaatttggaaatatggggaggcaggccaacaaacaaggttttagactttgaataattagtaataattaattaataattttgaaagttgaattaatttcccattatttttggtgaggtgagcatggaggtagcaatatctcatggttgatttccttttccaccatccgtgaaacaccaattaaagaagccacgtgagtagtcctctaataattcatctcatttaattatttaacatcaaaatatataacatttttatttaataataataaacccaaaaaatactttgtcacactcactcgtcatcttttgtttattgaatggctttatttacttggtaattagtaactttgaagtatacatagtgagagtggaatggaattattttatggtctaattagtttaatatatatggtttcacattatacaatgtttttgtttattgttaaataaattatgtaatgggacagctggagttggttcagtgtggtgctggaatggattatcttggttcacacattggaatcagcgtggacacagtcacacccaaaacctaatgtgatattccacaacaaaacacaaataattcaattcaaattcaaattataatattattttcaagtttatattttacaaaagttgttgatttactcttcacttttggtaaataataatttggattagagtaatttatggtattttaattttcaattacaaataaatatataagtttaatttttagcggtaataatacttagttataattttggaactttctgtatgtacctggttaaataaattgccatgt

SEQ ID NO: 231186 - DNA, 944 bp, Cannabis indica
acattataactgaccgaagtaatgcaagacataacaagatcaatccactttgaatgaaaccccatatgagacataacagcattgagatagtcccactcaacacggtcatatgctttactcatatcaagtttaagcgccataaaccccttcttaccttttgtcttccgctttaaatagtgcatcacctcaaaagcaatcatcacattatcagtaagtctaccagataaaagcactctgattcacaaagataacctgatcaatgatacccctcattcggttggcaatgactttagagagcactttgtatagcacattgcaaagggcaatcggtctcaagtcactcatggagacaaagtttttcttcttaggaaccaaaacaaggtttgtgatattcagatcaataggaatgacaccagaagcaaagaaatcagtgaccatgtttactatgtccggcccaacaatatcccagtgtttttggaagaaacctggccccataccatcaggccccggagccttatcaggatgcatttggaaaagggcatgtctaacttcatcagatgaaataggctgtagtaagatgttattttgatcttcatcaatactacacctaatatcattagcaacagtattttgaaaggtgccatttgctgtaaacagatcaacaaaataatcagaaatcacctcatttagaccggtatcccaacctaaccaatccccattcgacttttgcaactggtaaatttgattgcttcgtttacgagagctggcagtggcgtgaaaatatttgatgttcttgtctcctgcatttaaccaaaactgcttggatctctgcttccaatagatttcctgctgagcaagaatctcaaaataattatttttctcagttacataatcctgatagcagttgtcaaagccagaatgtttcatagcagtcatctttttct

SEQ ID NO: 231187 - DNA, 840 bp, Cannabis indica
tgtagtgttttccatccttaattgactaccattcatatgtgtcaaagagatcaaggtcctgccaaatcctttttagagaattataatattttgtcatagagtccccccttgttgtatctcaccaagtttgagattcaactcaaacatttgagattggttctctaaatcagaatacatttgaacaacattctctcacagatccttcgctttagggtaccacatctagttagaactaatctcctcctccatggaattcacaagccataccatcaccattgaattcttagcatcccaggtctcgcatgtcgaatcatcctctgctagcttcttcttctcacctgtcaagtaccccatttttccatgaccacacatgtacatttgtaccgattgtgaacatctgaggaagttatcaccatttaaccaaatggtggtgatttggacacagtgacagttagaaggaatggttttggatgaaacagtggcagatgcgactggaatagtggtagatttggttggaatgtttgttgattgatttgaggcgtcaaacatggtgaagaaagagaagaaaacgattagagttagggttaggaggcggctggctttgataccaaataaaaaatgggaaaggtatattttctgatattgattttcgtacataaaaggaaacaaatcaaagaataaagaggaatcgggtccctttcctaaagagaaatgctaaagggcaccagtggtgcctagcactctcctatgtgttagtatcgctattggtccaactaagtatcgggtcccatataatttaatataatagcttttagggagtatcgcttgccaatcgcaacg

SEQ ID NO: 231188 - DNA, 2026 bp, Cannabis indica
agcagaaagggtcccgggaaggtagctagcatgattcaaatttcacctcagttagcagaggatatggtcagatcaagcatcgagtttgttgtaggcaaacttcataacttgacgctgcagtcagatttgttagaacgtattaaagttgctgagctaaccgatccagagctaatgaaagtcagatagtggaatgctgttgtttaagactagggtctgtgttcctaatagtatggaacttagaaatgagattcttgaagaggttcatactactccatattccctgcatcccggcatcaccaagatgtatcaagatcttaaagcctacttctggtggaacagaatgaagaagaatgtggtagaatttgtagcgagatgcctaacttgtcagcagattaaggctgaacatcagaaaccagcaagactgttccagcctttaactttacctgagtggaaatgggaggatatcacaatggacattgtggttggattacccagaaccacgagattatttgattcaatttgggttgtggtagatcggtttacgaaatctgctcattttctaccagttaagacaaacttgtcagtggatcagtatgcggatctgtacgtaaaagagattgtaagattgtatggtgtgccaatatccatagtttcagatagagatccatagtttacttcaaaattttggcagagtttacaacgagctatgggtaccaaactgaagttcagtacagctttccatcctcagacagatggatagtccgaaaggacgattcagatactggaagatatgttacgagcctgtgttatggattttgaagtctccttgagtaagtacctaccgttgataaaatttttgtacaataacagttaccaaagtacgatagggattactccctatgaactgttatatggcagaaagtgtaggtctcccattcattgggatgagacaggggagaggaaatatctaggtctggaatcagtacaacagactaatgaagcaattgagaagattaaagccagaatacttacttctcaaagcaggcaaaagagttatgcacatccaaaacgcagaaattttgaatttcaagtaggggatcttatgttcctacatgtgtctcctatgaaagggatcaagcatttcgggaagagaggcaagttatgctctagatttataggacctttcgagattctcgagaaggttggacaagtggcatatcgattagctttaactccagctctttcagcagttcacaacgtattccatgtctcgatgttgagaaaatacgtttcataccttgctcatgtacttagctatgagaatcttgagctgcaaccacacatgtcttatgaagaataagcagctcagatccttgacagaaaggataaggttcttcgaaacaagaccatagctctggtcaaagtactctggagaaatagcaaggtggaggaagccacctgggagttagaatcggacatgagagctcaatatccagagttgttcaggttagatttcgacgaggaaatcctattaagggggggatagttgtaaagaccgcttagctttaatttggaaattagcagataatttgggtttaattatgaaaatcatttattagtattgaattaattatttatgatgatttgtttgaattcagaatgcatttttatgttacatatagaaatttcataattttgcatatttttagtgccccacaacattggaatgcggtgtatggctattagaatcacatcttagtatttttagtttaacgggacaatattttagacattgggaatgttgggaatagtcgggattttagaatttcccaaaatacccctttggtgccattttgtgacttttagtgtggaagggaaaaatggtctttttgaccatttgtatttttgtcctttagtggactttatgttgatgagcaatctgattgttaaagtttaattagctgaaatatttaataaaacaagtgttatctcatttattttctaaaaataagaaaattcaaaagaa

SEQ ID NO: 231189 - DNA, 645 bp, Cannabis indica
gaggagtcatggaagtgttacttctgcggaaggcccgaacacttacaaagatactccaagaagtacaaggagcaacaaggcttcaacaaatcttataatgtagataggaaggactacaagcataatcacaagaagaaagaattggttacaatcacatgggaaagtgacgactgctcaacaaattggagaattgttttctatctcaaaatcctcaatgaatagggagatgattcttgatttaggatgcacttatcacatgtgtctgaatcaagaataattttttgattataaatcagttgatagaggtaaagttctaatggaaaatgaattttcttgtagggtcattggaatcagaaaaatttccatcagatagtatgttggtcgaatgaaagtgctaaaaaatgtaagccacatttcaaggttaagaagaaacctcaaatccctaggtgcacttgaagatgagggttatagatacaagtccatgaacagaaacttgaggatcaccaaaggttctttgatagtaatgaaaggtgaaaatatcaacggtttgtatgtacttcaaagagaaattgttcatgccagagaaactagcttagtgaaggggcaagaatcatatatgcagctgtggcatcacaaacttgggca

SEQ ID NO: 231190 - DNA, 1362 bp, Cannabis indica
tttcatgaaaatatatacccttttcacaagcttaacaccactaaagatttagttgatcccttctctaacatggttttaccatctaaacatgtttttgacactattattaatgactttcctactgtctcttctactccttctagcactaatatcactccccaggataattactcacaccaggagacaagtatgcaagatgatccccctctcaccgaagatgccaatacagatgacaactccacagatgcaacacaacctgctattagacgcaccagcagaatatcaagacctcctccatacctctgtgattatgagtgcaattctgtgttacaagacaaaacttctactccacataatctacataaatttctatcttatgacaaattgtctaagtctcacaaagcttttatttctgtcattacagccctatatgaaccagccacttacaaccaagcatctcaatacaaaatatggaaccaagcaatgaacaacgaattattggccttgctcaaaaacaaaacttggacctatgtaaaattaccagccaataagaaagctattgggtgtcgatgggtatataaaatcaaactcaacagcgatggatctatagaaagacacaaagccagactcgttgctcaaggctacactcaacaagaaggcttggattttttcgatactttttccccggtggctaaaatggttactctcaaactcttgctggctatttccaccatcaagaaatggcacaccttgcaactagatgttaataacgcatttctaaacggagatctacacgaagaagtctatatgcagctcccaaaaggattgattttacctcctgaatttgctacggatactgacattgtatgcaaattaaacaagtccatttatggactcaaacagtcatcacgacagtggtatcgcaaactttctgatgctttaattcatgaaggctttactcaatcgcaagctgattataccttgttcactaaaggcactcaagacaacttcattgctctccttgtgtatgtcgatgatataatcatcactggccccaacttggatttgttacaacagttacaatgcactctcaacaacaaattctctctcaaagctcttggtcctctcaaatacttcctcggcttcgaaatagctcgtgcatcagagggattaatcctatctcaacgaaaatacactctccaacttcttgaagacaatggatatcttggtagtaaaccaacaaaaacccctatggatccaagggtaaaactagatgatcaacaaggggaaccactcacggatccctctccttatcgacagctcgttggaaaacttctctatttgacgttatcacggccagat

SEQ ID NO: 231191 - DNA, 959 bp, Cannabis indica
gggaagcaaccaagcaagaacaaacacctgtgacctgcctagtgcctacatgtgaccttttttattatctaataatttaggatgaaacaataagttggcccatttttggacaaagtaagggccaagttgctttgggacagccccactatgctccttcgcttaggcccaccccttcactcaacccaacccaacaatgtaatatacaattaacattttcatataacctttattattaataataatatactaaatttgattaaacttcaatttgaattactagatttaccttttcatggttaatatctttttaaaagtaatttcataatatttgacacaagatatttaccacaaaattttcttaacatttgtaattgttataggtatgattctaatcaaaaaaagtaacgacaaaagtattttattttacgattttgttgcagtcgtactcttttttgggctaattaaactcattaagtaccaactcagaaacacgtggcgacatatttttttagcttatttaatacgtggcccaataatatgttaccacgtgtttctgagttgacacttaatcaccaaaaaagtgtacgaatacaacaaaatcacaagatcagatactttttactgcaatttttttaattatggttatataatgaggttttgacacaaatactattagacacaatcaggtatctttactaacggattgagatgaaaaatggccctaaatttggtaactaagttagtaaatggtccactttttaaaaaaattaagaaaatggttaaatctaataaattagctaataaaaattataaaaatagatttatcacatattttttaaaatatatatatataataacaaaattaagttacataatttttttagtatatcatatcattatattgtaataaaataaataaatatattagattattaaatatatacagcagtattagatat

SEQ ID NO: 231192 - DNA, 952 bp, Cannabis indica
aaccacatcatccttcaccacattccaatatttctgaaaaaaaccaggcgtcataccatcaggtcccggagatttatccggatgcatatggaacagagcacgccttacttcctcctcagtgaccggattaagaagctgttgattatgatccaaagtaacagcactaggagtaacatcaatgactgaggaaaactctgatgcagaagttgtaaaaagattcttgaaatagtccaacataacatcaggaagcctatcatcccacgacacccaactacctgaatcatcctgaagacgagaaatcgtattgtgctttttcctagctggctttagcgtggaagaacttactattgctatcaccttcacgaagccacaattgtttagatctttggcgccaaaatatctcttgtcgatttagagtctcacacagttttagttcaacatcacgaaaactatgaatagaaatagcatctctccctttcttccatctccgaatctcccttttacactgtgagattttttgctcaaagttacctgtatactccctaccccaaactgcaagcatctccccgcaatacttcaacttctcagtaatcagctgaccactacaatgctcctaacagtcaaacacaacttgtaaacacatgggctcacgcagccacgcattctcaaagcgaaattgccgaaatggaactacaaagttactaatgataggctcaagcaataacgggcagtgatccaaagttgtgatttcaagattagtgagcttggcaagattaaaccgttgaaaccattgagaagacaccagagcacgatccaggcagacttctatccaagcatcagtacctcttctacgctcccaagtaaacgaataccctaacaagtcaagatcaatgagatcacactcaacaagaacatcattaaatccatctagaagccattgaggataatcatg

SEQ ID NO: 231193 - DNA, 602 bp, Cannabis indica
aactaaacattgattgtatgaatggttagtcatgccttttggattaactaatgcgcctaggtgggactgcccttaattaccctacctatgataaagagttgtatgcactgtgtgagctttagaaacatggcaacactatttgtggcccaaagaatttgtgattcacacaaatcataaatcccttaaacatttaaaggggcaacaatagctcaacaggagacatgcacaatgggttacgtacattgagatatttccttatgtcattcggtataaacaaggtaaggagaatgtggttgctaatgccctttctcacaggtatgccataatctttactcttgattctaagttacttgattttgaacacattacggaactttatcctgttgaccatgattttggggaaatttatggaacttgtgaaaaatgtggtgaggggaagttttataggcatgagggttcttgtcttgggagtataggttgtgtgtgcctaattgttctttatgagatttgttagttcaggaatcccacggaggagggttgatgggacattttggagttgctaagaccttagttgtattgcaagaacacttcttttggcccaa

SEQ ID NO: 231194 - DNA, 1827 bp, Cannabis indica
ggttcactaaaatcatcattagtcatagtcaattcagctgctaaaatttttggtttagtgatgccatttttagagcgagttcgcataggatgtatgttggatatctgtgtaggagcagtgggtaaagcagggataggaggcagggtagaagttgaagactcaggtgtaacattgtgagaggcattaggatggacatgtgtggaatcaacactgttggtatgatgaccagaaaagggagggtatataggatgtgggaaaccaggaggatgagaatgagatgcaagagaagtagctgatgttggttcaggggtcatagagggtgtgagaggagtctggtgtgttgcttgtggcagtggcaaaaactgaggcagacagatgttgtgatctggtgtaggtgtaggagtggtaaatagagattgtaagggaaacaagtctcatcaaaggtaacactcctagcaatatacaatcggccagatggatgtaaacatcgataacccttgtgagcagggctatagcctaaaaataggctgaagttttgaaattaaatttgttagagttgtaaggtctgagaaaaggaaagcaaacacaaccaaagactttaaggaagttgtaatcgggtctggtgtgaaaaagaaattggtaaggggttgtataatttcgtttttgaataggtaatctattgattagataggctgcagaggtgacagcatcccaccaaaactttaaaggtaaatcagcttgggctaagagagtgagagccatctcagtgagatgtcgatgctttctctctgctttcccttgctgttgatgggtgtgtgggcagggatgtctgaacacaaacccgagtttaagtaacacaggtttgagggggtgatattcaccaccccaatcagcttgtagggtcttaatcttgcatccaaattgcctctcaacatatgcattaaattgcagaaaaatgctgggagtatcagacttaagtttgagaggaaaaacccaagtatatcgtgtaaattcatcaagaaaatgtatataatacttgtagccttctgttgagggctcatgagatggcccccatagatctgtatggactatatcaaagggagctttagccatatttgcagaggaatgaaaggtaaattggtgtaatttgccaagttgacaagcattacaaaagtcaatggtggaattggaaatgtgcaaatgactaagaattttactcaaaacatgtttattaggatggccaagtcttttgtgccaaagatttacaacagaggaatctttattacaagtattcgaatgagagctagtagcactcggttgtgtcatgaagacttgagctgaaggggaaggcttggttctgcaagaagtgttttggacaggggactgattgtggagatggtacagtccatctttaagagtgccctgaagaagatgcttcttcgaatccttgtccttgacaaaacaaagatcaggtgtaaattcaatggttacatcattgtctttggtaaattgggaaatgctaataaggttcttggaaatggcaggcacatgtaaaatatttttaagataaagaactctatcagcaggaaatgaactatgaccaatgttagaaatgtgaagtttagagccattacctactaccatcttttctttgcctttgtacgatgttctttgcaggagattggtggcatctggtgtaacatgatttgatgccccactatcaagataccagccatcatcaggaggagctgcagagaaggcaacatgagcttggggatttgattcagtgggaggggagacattgtcatcaagccctgtgaaactaac

SEQ ID NO: 231195 - DNA, 797 bp, Cannabis indica
gtgttagaagaacaattgggactggagagcaaactagtatcttacgccacccttgacttcctttgcctaataatccgtatgtttatcccgctcttgtgaatcaaaaagttagctctctcctccaaattgactctagacaatgggatgttagcattgttcgtgatttgttcaatcaagttgatgttgatgctattctgagtattcctcttagcttttctgcgacaactgatttctgggcttggagtggtgaaagatctagtcaattctttgttaagagtgcatatcgcctactccaagatcaaagagatgagcgaactggtaataacaattcaggattttgggtgaaactttggcaactaaaaattcctcctaaagtcaaaaatcttctttggagagctgtttcgggatgtctttcaactagttttatgctccataccaagaatgttgatgtccctaccacctgccctgtgtgtcaagaaaatactgaaactattatgcatgctcttgtcacttgcccttttgccaatgcttgcttgaacaaggtgttggcagcggatagcttggtaagtgctgtaacattcgactcttggcttggcactatcttctgtagcctcaatgaagaaatcattaataatgttactgttctttgttgggcactatggaagtcacgaaacaataaagtttggaacaacaaattatcttttgtctctcatgttgtaacttcggcatctacttgctttgatcaatggaaaaaagctcagtgttcttattctctatcgtcacttaactttgcttct

SEQ ID NO: 231196 - DNA, 1076 bp, Cannabis indica
gtttcttgcagccaccgactttaggatcttaattttaagcctataaataccacctcacttatcattttaaggtgaaactgaatacacaagtttgagaactctctgcagatgagattttgagtttaagagagcaaagattgagaagtagagagagaggtgcagagaaaagagagagattgggtttgggttttctaagaagaatcgtctgtagatgaagaagattcttgagtgtaagtatgaagtgttgaaatactttgtgagaactcaaacagagaatctcgtctcaactgtatgtacctattcttgcgaaatcaataaagaaagattatggtggtgttctagaactggagtagagccataaatcacatcgatctattagacttgaaccagtatatatcttggaattgatttatttattttttgtatttattgtttctagttttaatactctatttgtccctatttttctatcgattattgttcttggtctagtaatcttgtcattgctcactatttcattgtttaaagtttagttattttgattctgcactttagtcataattttcccacaaattagagcttggtaattgatatagaacgcagaattaatcaagattctttcggctgcgttcttcaagaaactttaaatgtcatcaatggcaagattcaaattggaaaaaaatcgatggaactggggactttgctctatggagagaaagtttgaaagggatccttgtgcactagaaagtttccaaggttcttggagatgagaacttattggcaaaaaaaaaaaaatacagaggaaaaagcagaaatggaggagatggcatactacacgatcatcatgtatctatgaaatagtgtttgaagaaaactcatcacacagaaggcgacaaaaggagttttggataaattggaagaattatacttaaaaccatcgatagcaagcaagatcaatttgctagaaaggttatacagttttagaatgattttgtccctttctttagatgagaatattgatagatttaatgagatcatttgtaagtttgcctaacataaatcacaaggttgatgaa

SEQ ID NO: 231197 - DNA, 3571 bp, Cannabis indica
ttttatcagtacagactttgttttgaatttattaaaagaacatttagaagtaactgatactatatatttctatctagacccgatgattaaaaatttaggctttatatgtgccctatttaagacaatatcagagtctgcactgataaaattagagaaaaattacagttttgcaaaattaggtacttatgccgctaaaaataaacattgggtttatgccgcttacaaacataaaattttaggtacttatgccactatttacctaatagtatataacaaaaggaagaaaaaagtctaattgaggcgaatctgattggatcggctattttacgaacactaatggaagcaatgaatatgaataataaaaatatcccatccaagttgtatttgtaacactcaaaatactttgcttcagcttctcctctctctagtctccctgtcctttgcttcgctgcgaaaatggcttccaatgtcagctcagtttgtcctccactgggcgccattgctgccccaaaggtttactatcactcttgctcatctctttccccatccaatcctaattcccacacaaaaagccctactcttctctcttctcaatcgcactcttccttcatttccagcttctcccgatgccaccgtgctaacctaactccttctcgatccactgtcgcaccgctcccgcgagctcccaattttatggtaatattttcatctaattatcttcaataatggcgattgagtgaaagggacatggaattttttttttctttaaagaaaatattttctgaatttattgttgacgaataaggttgtaagaagtgctaaggcggagccgctgagagtaatgatatctggtgctcctgcttctggcaagggaacacaatgtcagctcatcactcagaaagtatgtttgtgtatatatatgtacttatatattcctattttcttgtttgtttatttgaaaattaaactcaactacattatattctttcttttttatttatttttatttgtaattacttgtgtatagtctggttggaattttttccattgatgactaaataggtggaaagtggttaagaaggttttcatgttttatgggcagttttgctcttttctgtttccctatattttctagttctactagtgcatatttggggattaatgaactgttattgtcttctccaaaaaaacacacacaaaaactgtgattgtctgaaaaacgtaacaaaaggttgattttaaattgagttacacgttattaatatgtaacctgatgggttggtcatttctgtggtaattggtacgaaatcatactcgtggtttttacttttaagtgcggtttgataattcatcaaaaagtcgattagatcccaacgaagaagaccaaggcaggcagatttttatttaatcagctttttcagttaaaaatggcaatatttgaagggttgaaaaccaaccaaccaaccaaccaaccataatatcttcataaaacacgaataaatcagtgtatgttaactttcttgaaataattcttttaatataattcagcttaattttgttgttaatttaggttcaaaggttttaaacatctgaaaaaatgtgtcattgtttatgtgattatggacaattcctgttgcattttttgttttctctctaccttgatgaatcaggttttggttgattttgtattcatgtatgtattaattgatttaatgtcattttctatgtgaatgtactgatttttatttccatttaaacaattttttttttgcaagagaaaagcatattgatttgacttttcttcttgcttgcagtataatttggtgcatattgctgctggagatctactaagggcggaagttgcagctgggagtgaaaacgggaggcgagcaagggaatgtatggagaaagggcagttggttccagatgagatagttgtcatggtaggacaacttgttcatttgacatatattcacgccgttggtgacttccttctttgaatcctgtagatggtgaaggagcgattgttgcagccagattctcaagagcaaggttggcttttagatggatatcctaggagctcatcgcaagcacttgctctcaaggactttgggattgaacctgatatcttcattctgttagaagtaaggtttcattttcttctcttttatattttttcccctccaacttgttatatatttttttatttaggtccaatggaaagaaagaaaagttgaaataaaagatgagtctcagctctcaatagctgatgtgtcttcttcgtttagactcataggatatggatgttcatacttagaatgaatttgagattttggtgatggtttctgatttcaggttaaagatgagtattcatttttactatgactaagaaatcatgtggggttctgatttcaggttcctgaagagattctggttgagagagttgttggacggaggttggaccctgttacaggcaagatctaccatttgaagtattctcctccagagactgaagaaattgcatcaaggctcactcaacgctttgatgatacagaagagaaggtaagatatgtaattttggctctgtataataccttgatttgagacatcttttctggtggttctttactgtttacaagttatggctgtaagtgttcccagaaaaaaaatcaagtaagcatgcttgttattttactgaaagttttcatttctacaatgtattttaggtgaagttgagattgctcacgcataatcaaaatgtagaggcagtactctccttgtatgaagacataacaattaaggcaagtgatataattctctcttttcatttttcatttattaaccaatacacaattttttttgctggaaaaaaagggatcacgtagtgcaaattgtttctccatctcttgataacttagacaatcccaaggatatgccaggtataggggatcttatatctcatactcctttaattgggtcatttgtatacacctcaagggttctcatcccattaaggatggtactagtagttagtctcccaaagagccaagcaaaatccctcccatgaggggctgtggtgagatttgaactcttgacccaactaagcaaggatgtcagtaaaagcattcctaccactacaccacagaacatgtggttcactacacgtaaacttgttgatgtagatattatggactttcattttatgaacaaatgtgcatagacacaacacggggattaacatttccttggaaaaggatctgcagtcaattttctgtccaaaagttcacttaaccatttgcttcattaagacaaacatagcataatatccttgaacattaaacacactctttagctaaaataaatagtgagctttaaaaaaaaaaaaaagactctaactatacaaaaaatgacttcctataatagagactggatagagagctctctaattaaaaagctattcatgcgctcttataaataggaaacaccaaattagattacaccttccaagtcccacaacctccagtccaaaataaaataaaacagaaaacctgagagcatgtttggtattgtt

SEQ ID NO: 231198 - DNA, 1405 bp, Cannabis indica
ttaaatttttaattttttttttttggtgatatcttttcaaaaactattaggagtgttctaaaaagctaaaatagtttgactcacttttttgtataacaatttatatttgtgtagatacattcaagttgaaggtgaagccaggaaaaacctatcttctccgtttgataaatgctgcacttaataatgagctatttttcactatagcaaaccacacaatgaaagtggtcgatgttgatggtgtttatgtcaaaccttttgaaactgatgctgttatcatagcctcaggacaatccacaaatgttattctcaatacaaaatctgagtacccaaatgccacattcctcatgattattaggccattttcaccaggtcacccttttgacaataccacatctgcaggaatcttagaatatgaatttcctaacccaaaccttacaatcccatggcacaaacttcaactcatgaatccatcagtcttgcatgaccaaaatgacacttcattcgcaacaaaatttagcaacaaacttcgtagtttagccaattcacagttcccaactaatgtacctaaaaaaattgataaacattttctcttcacagttgggcttggaactagtccatgccaacataacaaaacatgtcaaggcccaaatggggcaaaatttgcttcatcagtgaacaatatttcttttgtacttccaaccactacttcactccttcaagcccattttttaggtcaatctaaaggggtttatagtcctgattttcctagtgttccccttttcccatttaattatacaggaaatccaccaaataacacaatggtggaaattgcaacaaaagttgtggttcttccatttaacactagtgtggagttggtgttacaagatacaaaaattattcattctgaaagacacccttttcatctccatggatataatttctttatagttggacaagggtttggaaattttaatccaaatgaagaccctaaaaacttcaatttatttgaccctgtgggaagaaacactgtgtgtgttccttctggtggatggattgctttaagatttgtaacagataatccaggtcagttaagtttataaattataaaaatttaccttttttcattttgtaaaatatataaaagaaatatatatatatataatttggttcaatttaatttaatgattaatatgttttgttggtaggtgtatggctcatgcattgtcacttggaggaccatgcaagttggggtatgatgatggcttgggtagtcttagatggaaagttgcctaatcaaaaattacttcctccaccaaatgatcttcccaaatgttaaattttactatttctaagaattttgtgatccactttaatttaattttttttttaaaaaaaaaacttctaa

SEQ ID NO: 231199 - DNA, 2557 bp, Cannabis indica
attgtatatcgttatcttatataaataaaatagctgcaaatgttgtaatttttattttctttttattgaggcaatatacttgtattgatatctctgatattgttgatgagcatgtgtttgttttaagttcaatcagctttacaatataattttttttgttaatatatttttttcttcatttatttaagtgaaaaggactaaatgtttaattatgtgaaccaattaaagtccataaaatgcagacatatccactcgctcacatatctgttcagcttttaatatggtcgaagccactgcaggcagtctttatcttggccttcccaatgttattggccgcaataaaaacacaattcttggttttatcaagaacaaagtcatttcctgtatcaatagttgggaaggaaagtttctttctcgtgctggcaaagaaatcctcattaaaatcgtcctccaattgctgcctacatatgcaatgagtgtttttcttcttcctattgggacttgtaatgaaattgaaaatctaatggcaaatttctggtggaagactaagtctagtaaaggtcgtggtattacttggatgacttgggatcagctagcttcctctaagaaggatggtggtatgggatttagacatttgcatgatttcaatcttgctatgcttgcagagcaaggttggaggttgtagtgtaatccaaattctcttgtgggaagagtgttcaaggcaaaatattttcctaattcgaattttctttcagcggatcttggttataatccaagctttgtttagcgaagcatttggggtgcacaagatttggttcgttcaggtgctattcgtattattggtgatggagctactactaacattactggcaatccttggttaccccattcgagtaacagacatgttaattctattcacccatctctgcataataacacagtcaattcactcttctaagttggagtttgtagatgggattgtgatgttattcatgatctgtttttggctcatgaagctgaattaatattaaggatgcccctttgtgatactgatactgctgactgttggtcttgggttgagaatcgaactggcctcttcacagttcgtagtgcttatttactgctatagcagcaacgccccaaaattcaaggctccaacaattctggtttttggagaaaactttggcacctgaaaatcccacctaaggttattaattttttatggcgtgcaatcactggatgtcaccctacatgtcttaatcttgttactaaacatgtccagatttcagtcaagtgccctgtctgcaaagttcatccggaatccaccactcacgcattgctgcattgtagctttgctaaagcctgctggaatgtttcagtgcccctgtaagcactgatatttcagcttcttttggcacctgggtcgatgctcttttgcacattggtgatgctgatatggtttgtcgtgctactgtactttgttgggcggtgtggaaagctcgcaaccaaaccgtttgggacaaacgacctctactgtgaatggtgttattgtttctgcttcaactacttttgatcattggaagaaatctcaggacaaatcaactcttttatcattgttaatagaaataatgaggaagggtctaagcagtggtaaaaccagatttaaatcacatcaaaataaatgttgatgcggctctttttcattaagaagatttcgatggctatgcgttggttgcaagggatagctcagcaaaactcatagaagctaaaacatgttttcaaggtggtcattatactgctgaagttgtggaggctttgggctttaaagaggctcttagttggattaagaatcacaactagaataatgtacaaatggaaactgatagcttgctctcgtttcaggccatccgaagtaaccaaactttctcctcaaattttggcttacttatttaggatttccaattattattatcttctttacaatctgtgcatttacgttttgttagacgatcagcaaattgtgtcgctcatgctattgctaggcactcacgatttttttttttctagttgtagcatttttaagcataatgcgtctgctgatttaaaagcccttttgtattcagaatgataatatttcaatgaagtttagatttcaataaaaaaaaaaaaagtccataaaatgcttctaactaaattatttttgtttcaaaaaaaataaatataaaaatcaatggacaaccatcccacttgccaccaaccctaccctaccaaaaaatgggcaatataggtgaagattttaacaaatgattctcttcgacacactagacgctctctgggaccatcctcataaaggatagtttgacatttgatttatttttgcaattttaacaacctttatttttttttgtcattctcactatttttgaaaggtttgtctttctctcttctttattattattatttttttgaaagtatgtctttttcttttcatcagttaaaaagttatattattaattaaaatttttaagccactgtattgttgaacaaattgaccttt

SEQ ID NO: 231200 - DNA, 1614 bp, Cannabis indica
agtaagtaaattaccatgtataccacaagtattgttgaaaagaaagtatgtaagctgcttgcaagtattgttaaatctaaactaatgaaaagaaggcaatacctcttgtagcctatcaagggattctcgctatcttttagtataattacaatcatccaatctaagaactattgttgaagaattcataccgcaatcttctgagccaacctcaacactcaagaatagagtgggctattagatcttgtattacagtgtattctcaactcatgagacactgtaattaagatagggttgatcacaagatatatcaacaaatatatgctaggctttgtcgtacaaacgttctacacttagtacgcatcaaacgtgggataaggttgtaactgggtgtacgggtgcctggttacaatccagttatatgtttatgtttatgtttatgcttttcttaccgagtttatcgactcacagatattatttacatgtgtaggtaaagataaagcaaaggttgaacagtagtgagttcgagctagatgaagattgtacatatcaaggcggttagacttagaatgtttagatcatcgggatagtttggcctttattttgatagttgttgggtgacaacttttgttaaacatgtattttaaaaaacaagtgtaactttttaaacggaatctcaaaatatgtattgtatatacttatcaagtttaatttaatttatgaattcatttaggaattcagagcaaggtagtaggaaaatgaagatacctttaaatgatattgaggaggaggttttgttttggaagccttcgattgtgtgctatgttcttggagtgaatcctccactgcacatacttgagggttttgcaaataggatttggaaagataaggttgatcgagtgaaggtgttgtcctatggcatatttcttattcgatttaactcaatggaatagagagatcaggtcatcaataggggatacattttcttcaatcgtagacctgtcattatgaagtcgtgggatcctaatgtcaactttaagaaagaggatgtcaaatgtgtaccaatttgggttcaacttgaggaattggagctgaaatattggggccaaagattactttttaagatagttgggcagctagggaaacctctaatggcggattctttcaccaaggagagggagaggctgaactaccctacagtgcttgttgaggttataatggatcaacaactacctgatatgctagaatttgaaaatgaatttgggtcgaatacatcagttggaataaaatatgagtggaaactagtcacatgttcccactgctttggtattggacattccacaactgattgcaaaaaggttacaaatgccaaacaacattgggttaccaaaaaagataacaggaaggtcatagaaactgatgaggagggcttcactaaggtctcaaaagggaagaaggtagacatgaaagagaagtcaaatgctggagctgctgtaacagtgactaataacactttccaggccctgagtttggaggaattaaatggcactacaaatggagatattgcagaaaatggaatcggtacagatgggacaactgcagaatatgagagcaaca

SEQ ID NO: 231201 - DNA, 1023 bp, Cannabis indica
ggtaccaaatccagacaccgacttcgagttttgtctaagccctaggtccagatccggatcccaatcttaggttctagtctggttccatttctggtgccgggtcacgagctgggtcctaggttcaagtttgggtctgtgtcgggtactaggtcccggtcctagttctttttcataggtccctatccttattctaggtccaggtcccggttattgtgtgggtttgggtcccagtctaggttcaggttcgagtcctagactcggttcgggtttaggtatctgtctgggttttaatttgggttcgggtttggatttaggtcatggtcctggtcctaggcctagtccgattctagttgcatttgcgattctgtgtttgagtttgggttttagttcgggtcaaagttcgagtcctggactgagtttaggttcgggtccggatttcagtctaggtccagatcaggttcccggtgtgggttcctgtcctgggtcttggtctaggttggatgcaaggctcaagttcgaatccagatctgagtttggattcggttctggctccaagtctttggttctgatcgtggtgtgtgttcgagtttgggtcagtgtccaggtctagctttgggactgattctaggagtgggtttgagtttgggtctgagtccgtgtccgggtttgtgtcaaggcatggaccccgatctaggtctaggttctggtccaggtccaagttggggacctgagtgcaggtccaagtttgtgtctgggtcaagatctcggtccagatctaagtcccgtatttcgatcccagtctgggtcttggtccaagtccaggttcgtatctagatccctatctaggtcaaagtttgtgtatgggatcgggtccaagctttaggtccatgtttaggtctcagtttcggtctgtgttcgattctaggttggggctgggtcctagttatggtcctagtcttgttctagggtcttggttcgacgattctttttcaagttctaattttggaacccaggtctaggttt

SEQ ID NO: 231202 - DNA, 1562 bp, Cannabis indica
agatcgtatcccaaacgcaagcagcgaataaagctaaattatcatctttaaggccacaccaccactcaccgcagtccttgagagaatcccacttcagaccatcactcctcaaaccccaaaagcttctaaaccaaatgtcgcggaccacatgacacttgaaaaaaagatgcagcgaagtttcttcacaggacaaacaaaacctacacttcaagtgatctccgctacatagaccgattctgcccttcgtaggaatacaatccgagaaaatcttccagcataaaagctgaagccgaggatgaattttcgatgtccataattttccccacatatcacttgtttcattgaacctatgactctgacttagccaataagcgcttttcaccaagaaaatgcccgactttgaagctttccaaaacaaaacaacagccccttcaggaagaggtttaatccgaagaatctcatcagcacttctaggattaaagcactctctgatcagttgttcattccaaacacgccttcctctaacaaataaatcattgatttgccagcaggcttggttacaactcaaattaaaccccaatttcaactcctccatcctcctatggggcacccacggtctatcccaaatctcattacttccatgcgcaacaatcaagccagcaccttctaaacagatttggcgcgctgccagaatactcttccaaccccgcaaatctacctctttcttttccactgaccagggagagagcagcctgcaatatttatcactaagaacccgaacccacaacttgtcctccccttttagaaccatccaaaacaacttggcaaaaagagcaacattcacatccgtcattcttctaaatcccaaacccccacacttcttaggctgacaaagctcattccagttctttaaggcacagtatctagacttcttagagttacctttccaccaaaatctagcaaggatcttgtcaagctcaccacagaaagtttttggcaaaagagaagttcacataaagtaatttgggatagtttataatacagaactaaccaaaactgacctccccgcttgggccaaatgtctcgctttccatccttcaaacttgcacaagattttttccttaaggaaattataatcacgtcttttactagcagagaaaaagaacggatttcccagatatttctcacttgacttcaaacaattaatgcccaatctttgttttatctcgtcacggcaagttctagcagtattgtgagagaagatcaaaccacttttctgtttgttaaccctctgaccagaccagccttcataagtactaatacatttcatcaagttatccaaattggcgacagtggcattgcaaaaaaaatatagagtcatctgcatactgcaggtgcgaaatttggatcgaatttctagcaatacgcaccccagaaattggaccattactcttggctttgataatgagtttggatagcacctcgttgcacaaaatgaaaataaatggggagagcggatcgccttgtcgaataccccttttaggattgaagggagctagagg

SEQ ID NO: 231203 - DNA, 746 bp, Cannabis indica
ttcataaacctggaagaagtttatgctcgagcttacaaaatactttcagcaccttccatcgatgttacaaatgcccaaccttcgcagatgaccactccatccatttaccctccaccaactgcttttactactccaatggtatatggaccaagtacttccgtacagctaggtgcacaggctttggagctacacaaacaagatacagtgccgcacccaaacaaatgaactagaaagcaaatgttacaaagtctaatataatcaaatcacgtagtaaaaggactttgaagggtccaatctgtagaaactctgtgaagaagggaaagactcatgaatcaaggtacactgagtatacaagtcttataggtactcaaaagccttaaaggctgttaaagatgatcaagaatggtttgcacactggaattgccagttcctaaatgcattgagtgaggtcaaagagcttgatgtccgtttcaaggactgtgtctagaatgaaggtactcctagagtgagaacctctgaaagcagtaagatacccttctatctagttagggttccaactttggcaaacttaagttgttttaaccaaagaaaatttgaccattactttttgcgcttagatcatcatagatatactgtcaataattacatggatagagtatatgaaatcattaggagtccaaaccatttcattcaaccaacacatgaagtttgggtagacaactatagaaagatgttttacccattgt

SEQ ID NO: 231204 - DNA, 710 bp, Cannabis indica
ttcatctcttctatcattgcaacaagcgaagaaggatgagacattgcttcacgaacagttttaggaatagtgactgaatcaagagaagaaatgaaagagcaagaagaagatgaacaaaagaagaaatagaaaaagtacattggcgtttacctttacatagtgcaatgagaagatcatcttggagttctagatctgatgatgaagatgcaggtgcaggacatgaaacaggaggtggaggaggaggacgcctggtgcacactataggaggtcgagggagtggtggaggtggtggcattgtgggagttatgaccgagacaggtgaaggaacaagagacttgtcagaacatgtatcaggcgcagaggatgtgacagaatataccaatatatcatcattctctccctgacatgtagtagtagtagaagatgaaaaataaagtgtattttctactaaggtaacatcaatagaaacaagatatttgttgagatcaggataataacacctataccctttctgaagacgagaataaccaagaaagacacactgtaatgccttagagtctaatttggtgacatgtggacggactttgcgagcaaaacaaacactgtcaaatactcgaggagcaactggaaacaatggatctcaccattaagtacagaggatggcatgtgataaataaaaaagcatgccgtagaaactgcatcggccaaaa

SEQ ID NO: 231205 - DNA, 1228 bp, Cannabis indica
tgaaggagaatcaggctcagatcatgataatattctgtgacagaaaggaacaagggttaaagatatgagtggaaggagtcatttaattctgctgcaaccaatgtaaggtttcttgaactttatatgtgtttaaattccattattttacaaatgtatatttaggatgttaaaaaacgtacatggtagtaaatctagatcctggtaaaataatcacctatatcaacaacaacaacaacacaaccaacaacaaaaaaatcctcctccaacgaaaacaacaacaatagcaacaacaacaacaattacagacaaaaaaaaaactacaccaacaacaacaacaacgacagcaccattagcaaatacaacaacagaaacaacgacaacaccctctacagtagccccacttgggatccattaccccgttgaggggtaaaaataaacttctagctagcaattgggtttggtcacttctatcccccaaatcccatctattggctttaagttccctctaaagcctactcgctctgactatgccaccatgaagagaataggggagtttaaaggcatcttgaaaaggaggcataagaatgtgaagggaattatccaaaagagggcccaaagtctctcaactgggaagagtacttggatttttgaaggtcttcatggtgtcaccctaataggatcaataatctacattgaggttatggagaagcagctagtatgcagtgttggaaggcaaatggctcccttgctgctaagctcttagatcaagtggctagcagtgcaattgagctttcctctgaaaagtgggcaacttgtagtagtggcgatgcatttgccttatcccatgctaccaagtaataggtagtggggctaggtttcatcttttctatttttgtttttgttagtgcatattatttttctcatgttgttttatggcgttagatggtacagattgctgagaggaccacgaaagaggttggcagtttaactgtagagcttcaggaggcccatgcaaaaattgaatagatgtacactaaaaattgaggcttgctcactaagcttaaagaagaaaattaaaactgagaccaccactgcggtgaacaatgctaagtaggaagcagaggagaatttgacatatgtcttggctgactgtgaagtagagattaagcgtaaagatgatgcaacaagtgccacatagtagatgctattttaagagcacaaggcttaa

SEQ ID NO: 231206 - DNA, 854 bp, Cannabis indica
tactctggggtggaggaattattctagaaggatgtaagaaatcgtctatgataatttagttccacctgtgaagctagaaaacttagttggttttgaaaacactagaaagttatataaacttaagaaagttcttaactagtttttatctctattctattttggaaagttcttaagaaagttcttccattatcttcatgacaaagtttggggttatcttcataattagaggaacaaagttttttctaaagggggtgaagaaatccttctcaagtttgttatacaggccatccccacttatactatggcctgctttcgccttcctacggccacttgccactctctggagtccattatggcaaacttctggtggggtttcaacgataataatcggcccaagacgcactggcaaagttggcaaaaactttgtaggtccaaaaaggatggtgggctcggattcctttctctggtccacttcaatctggctctgctggctaaacaagcctggcgtgtattaaaacaaccaaactcaattgtgtccaaaatcttggctgtcaggtattacccaaactcatctttcctaaacagttctctaggtcactccccctctttcgtttggcgtagtatttgttggggaaaggagttgctgcacaaatgactcattactaaaattggtaacgggcataacacttccactacccttgattattggatcccgagttttcgtcaggttgtccctctttcttcagttcctgatacggttgctacctttatcacttctaccatgacttgggacattcctagccttaggagatgctaccctcctcatgttgttgaggagattttgtccatcccct

SEQ ID NO: 231207 - DNA, 1728 bp, Cannabis indica
ttagtgtttgtgtcagataggcatcaaagcattgatcatgttgttgaagttgttttccccgaagcagtccactgtgcatgctatcaccacattgttacgaacgtgaactccaagttcaagactgatgcttttcacaaccaaatatataatgttgcttactcatgcatggtaaaaaaactaaatgtgatagagagtttgagaagcttagaaagatgaatctggccattgctgcatatgtggagagtatagggtcttagaagtgggctcacccttattgtttgggtgatcgatacaacatcatgaccaacaacgctgctaaaagcttcaattgtgtgatagaagagtttaggaaatatccaataactactttggttgaatttatcaggttcacactgtaatcttggttcgctgatcgcctcgaaaatgtagacaattatacaacccctttggctatgctctttgaaaaacacttgggaaaaatcatgaaaatggaaggttcacgcgtgtccaacaaaatggagccaatttgtataatgttggtaggtgacctaacggtgaaagaggtggtgatgagaacctagttgaaaggacatgcacctacgggtgtttacgttattgaaactcccttgcgttcatgcatgtgtcgcagcattgaaaatgaatacgagtatgtacacgctttgctcaccttattattcgtaagatacatggaggaagacttacgatggtaccattaatcttgctggttatgaggaggattgggttctcgcaggacacatcaagaatatgaaagttgaggtacttgtggaaaagaaaccaataggtcgtccaaggaaaagcaaggctagaagaagacaagagaatcatttcccgtctggttataaaaagttagatgtaccttgaaactgcagcctctgtggcagttcaggccacaaaaaagcaacatgcaaagcccacatttgaggcataatctacttattagttgtaataacatgttctgtatttgtaatttaaaaaagctttaaaatcaggttggtactctacttatgtgttgagaaagagaatttttttaattttttcaaagtcatcgacaacatatcgatatgacatcaataatattctctttttttggaaaaaaaatagccaactattcgagcaaattatcgagaacatatcgacatcgtgtcgacaatgtcgataagaactattttttgtaaaattagtgtatcatgtaatatgcatcatcgacaacacctcgaaaaaatgttgataaaagcgtcgataaagagtcgacaaatcgttgataaagtgtcgacaacactctgtttgtgtgtacaacattttgtcgaacaaagacacaactaagtcatgtatgtcgataatatatcgataatacatcgataatatgtcgatgatatgtcgacaagacactctacttgtgagaaatcatgatttgtcaaaatatattgagtaattaatgtcgatgatatatcgacaacatgtcaatataccatcaatgtacaaaatataacgatgtatttttaattatgtaaattagacaaaatatacaatatatttttaattaacaaaatatataactttttttttaattttgtaaattagacaaaatatacaaagtatttctaattatacatagatattcaaccgagattttggtaaaacaaattaaggcaccaccattcacgaaacatctgttgggttttatgc

SEQ ID NO: 231208 - DNA, 1758 bp, Cannabis indica
tgtcaataagagactcctcgagtttaaacctcctctgagctaaactcggcgagatgatgcgaatatgaccaaagtctaatcgcatttacgaggctcgcattatgtgggatcaaggaacggacttaacttgcatataccatgatatatgcgagtatcctcccaatcctcatgcgaaaacatagaggacaaatctttataaagcgagctggtcccgatgacccaacaacctcgataaaccaatacagactcgcgtgtccaggttctatcagctcgttatacgatgtccgtaagtgcgactacacaagaacgcagacatcctaggcttaactaaatgttaggtgtatcctaagcccgcgagcttataccagaatatgaacagccaactcgcacattagaagtcgcatacgttgttgtatttagtgaatagaaactgttcttcatttattaatgtttacgttttagcttaattattgtaaatcaatgtatgaacggattggcaatgaatgcaatccttgtaagtaattggacacttgctttgtatataaaggagtgatccaccgtgaaatgaacacctacgaaatccttgcaacagtggactaagcagaccgtgatctgactgaaccactatattcctttgttttcttgatatttccagttttcattaagcatttacgttcccagttcgagtactcgccgttctaggttgaatactcgcacttgttcatcatattgttcttattataattattattattattcatttttggtgttgtgaaatttgctcgacaacaactatgtatatatattacataaaaataattcaaacggtccagtttggttcaaaccagtagaaataatgtcaaaaccgtaaccagactgcacaataagaaaacagtccagataactaaacaatgacggattcatttagtccgatctaaaatgagttggtttggattgtttcgtgtttcaaactacggtttgcggatttcatgaacaacctaggttcacgcgcacatcatttggatgattcaatcgcatttaatattgtcaattctaatatataggtgcagtactaaaaataaaagaaaaaaaaatctatccgaaaaataaaagatgctgtataggttctaaatgaaattaatggagtaatgaaattcatcttattaaaaaaaaaacaattgcactgtgatgtttgatttgtgatttgaaaaatttataatgcgtagataaatatattacttacatcaaaaaagaaaaattatattataaccattattctcctaaaaataatgtagccttatttagaaactttaattaatatagataaaataaatgcataacacctgcaatttaataagttcaaaactactgctgttacattaatatattatattataaatctctctttagtaattaagatatacttgatcttggatcataaaaaaaaatgatatatatgagcattgaattgacttataaatatatataaatatgtggtatgttttatatatacagtttggtgtacataatcatatatatgatgtgaaaagatgcccaaactaaacctatgtatatagtagtcattttttatttatgtcattcattttataaatttaatcaagttgtgcatgatcagtgtccttgttttaataatgcagtagcccacaccttagcaaagtttgctttgtcaataagtgttataacagcctggctggctggctaccgacctctcttattttcaaactcatagtttttttt

SEQ ID NO: 231209 - DNA, 737 bp, Cannabis indica
ttcacaattgctagacggcagtattgaccaatagcataatagaaaagaaaagacagactagaaagaaaccatgatattgtatagaataaatattgaaaagatttgtgcataataagtggaagagagatgggtgatattattgatgaagtgaagctgttcagaacatggtcaactccatttgctttgaggattgtttgggctctgcaactaaagggtgtccaataccaaacaatctatgaagatctttccaacaaaagtgatgccctccttctctacaaccctattcataagaaagtccctgtccttttacacaactccaaacccatctctgaatctcttgtcattcttgaatacatcgatgaaacttggacccaacaacctcatctactaccccaacacccttatcacagagccatagctcgattttggatcaagtttggtgaaactgaggtaattaacttacaataaacactaattttcggcgtacatacttaattttaatttttttaacagtaataatacttagattaacttaccaataaaaaaataaaatgtggatgataactttaacggtcaggtgcttaccgaaattccaaaaatataattaaaattttattaccatcaaaaactaaacttaaatatttatctaagaaatagaacagtaagcgcccacacccaaggcccccacgaccaaaatattctttaacaaaatgactctaaatttattttttaaaaat

SEQ ID NO: 231210 - DNA, 1064 bp, Cannabis indica
gtttttggattgcataacttctcatacaatgaatacctttttttagaagaagatggccaccaaaatttgcacattgaactctctagttccttgcaagtttctaatggaagttggaacacactcatagcataattcggaagagcttgtgctattgtcttgatcaatatctcatttcccgcttttgacaaaaatttgctttcccatccttgcacacgctgctgtactttatccttgagatagcccataataattttcttctttctaccaataatattaggtagcccaagataagtgctatgatcatccgcttcatgtatattaagcatcccacatatttcatcacgggtttcaacttccgtattatgactgtagaaaatagaagatttgtcaaaattaatcttctgacccgaggctttctcgaaaatttacagcaaacctgacatgttattggcttcttccacctctgctctacaaagatgtagctgtcgtcagcgaagaacatgtgattaattgttggggcatttcgagctactttgattccttggagcagactcttgctttcgtaatctcttaagagagctgaaaaaccctccatgcagataaggaataaataggatgacaatggatccccttgacgaagaccacggtgaggaattatattgccaaattcttgaccagcatgagagattttgtatcttgctgttgtaacacaagccataaaaagtctgacaattctatctgcaaagcccatttgccgaagcatagcttcaagataaccccactcaactctatcgtatgctttactcatgtccagtttgactgccatagaacctttcttgccacttctcttcctcttcaaatagtgcattacctcataagaaatcttaacattatttgtgattagccttctaggaatgaaagcactttgtgtttcagatatgacatgattcaaaacttttttcaacctattggcaagcactttagacaccactttataagccacattgcacaacgatattggtctgaggtcggccatagttactggatgcttcttttttggaata

SEQ ID NO: 231211 - DNA, 2470 bp, Cannabis indica
atgaaatcaataaggggttgttcttgattgccaagcttggtttgtatctaatgtcgaactggctcagttctacgaaccatttgattaatctccctgatgctttcggtttggccaaaacttgtcgtaagggatagtttgttaaaacctcaatgttgtgtgcttgaaaataaggtcgcaactttcttaaagcgatcaccagtgcaaatgctagtcgttccatttatggataactggttttagcatctaagatatgcttgctcacatagtataccggatgttgtctacccatgtcttcgtggattagtaccaaactaatcacttatttagacactggaaggtagattgacaaaaattctccaggcattggcttagatagtatcgggggttgccctaagtgcatttttagggcctgaaaagcctattcacacttttcagttcattgaaactttttgtttccattcagaatctaaaaaaattctttacagttatcagaggaaagtgatataaagcgatttaatgcagcagctttacctgtaagactctagacttcttttggtttggtaggagatcgcatctccaccaaagcttttatttttgcgggattggcttcgattcctcgctgatttaccataaaactgaggaattttcctgaacccactccaaagatacatttgagggggttaagacgcattttaaactgtcgcaggattctaaacatggcctcaaggtgagtgtcatggtccttcgcatattgagattttacaagcatatcaacatatacttccatcatcttgccaataagatccgcgaacatcatgttaaccagcctctgataagttgctcctgcgtttatcaaaacaaagggcattaccttataactgtacaaaccgcgatctgtattgaaggaggtatgctcctggtctggttcatacataagaatctagttgtatcccgagtatgcatccatgaagctacgaagctcatgacctgcagtagcatcaacaagttggtcaatgcttggtagaggaaaattgtccttaaaacatgcttcgtttaaattagtgaaatggacgcatgtatgccatgagccatttggcatgggcaccagtaagggatatgctaaaaagtttgggtagaatgactcccttatgaagccacatgacaaaaggcaatccacttcttctttaagcgcttggtacctcgcggggtccattttgcgacgcttctatcggacacctcgcacttcggggtcaatgttcaatcgatgacacatgagctgcggtgatattccaaccatgtctgaatgtttccacgcaaaaacatccatattttgtttgagaaaagtgacgagcttttctcgctattgaaaggttagtttagaacaatttttaaaacattattttaatcagaaggatcgatttgtaccccaattgtttcttcttcagcctgtacagtattggtgtaatcgaggatccttggatgtagatccagcttctcgacatgtggtatctcctcaattctaaaaatttcttgtggaggaggcagtgcttctagtaaatatatcacatttaccgacttcttcttttctgcgagtattagtgtcgtgttatagaactctcttgaatctgattggactccttgcacggatcccacacccgtgggggtagggaatttcaccataagatgataaatagaggttactatcttcatctctttcaaaatagggcgacctatcactgcgttgtatgcggaatactagtcgacttctgtgaaatcgaccattgacttagcagcgacaggggcagttcccagagtgattggtagattgatcattccttttagtgctattgtatctccagtgaacccacatatactcgaggttacaggtcgcagatccttttcttgcaaccccattttcttaaaggcttggaagttgagaaggttaactgaactcccattgtccactagaattcggtgaacattatctcctccaatatttgcaacgatcacgagtgcgtctgcgtgtggatgatgagcccacctggcatcactttccatgaaggtaatgtcgtcgtattcttttatgaaaaacttctcaaggcgctgacttaggttgtttacattggtgagcggtttctcttttgcttccttaccatatcgttcttgcacctttttggaatctcgaccaatatggggccctccaataattgttaatatattgtgaggagttcatgatccactcgcattgtttgtgtcatcattatcatctgcttggggatgattttctctgttttcttgtacttaacaaattttcctcatctgattaattcttcaatctcgtcctgtaggaaccagcactccagggtggtatggccaatgtccttatgatacttacaaaacttcttcaggtctcttttgttgtaatttcccctaattgggggggggggggctttctgaagactccattctt

SEQ ID NO: 231212 - DNA, 973 bp, Cannabis indica
cccccgagccattctcatttgaagccccatctacatataacttccatgtttctgcttcgtgttcaatagctgggtttcttctgagtctatcccttcaattaggaagtcagccaaagcttgacttttgattgatgctctcgggtggtaggttccatcaaattttcccaattcaattgaccattttatcaatcttcttgaagcatcaggttttgataaaacttgtcttagtggttgatttgttaagactttaattggatgtgcctgaaatatataacttgcaagatacatgaattaggcataatgcgagttttttaagagaaggatatcttgattctaccactagtaaccttttactgacatagtaaacaggatgatagtgctttccatcttctcgcactaaggccgcactaatggcatgctccgagacaactagataaaggtataaagtttctccagttattagtttggccaaaataggaggtgttgataaatgcttctttatgtctttaaaagcttcttcacattcttctgtccattcaaatttcgtattgcctcacaatatattaaaaaatggaaggcatttatttgttgacttcgagacgaatctctttagcgctgccattctccctgtcaaagctcagacttctttagacttcgttggtgaggatatctcgattagggccttgagtttttttgggttggctttaattcctcttgcatttactatgaagccaagaaattttctcgaggaaaccccaaaagagcatttattcgaattaagcttcatattatgctttttaagtatatcaaagcattctgcgaggtccttcgtgtgatcttcacttttaatcaactttatcagcatatcatctacatatacttccatatttcgtccaatctagttctcaaacattccattcaccagtcgttgatacgtcgctccggtattttttaaaccaaatggcatgacttt

SEQ ID NO: 231213 - DNA, 750 bp, Cannabis indica
tgaatatcggtcccttccaatgtatactccatacatgtccgatactggtaaactttgccaatactctggaaaggacataaaacttatccaaggtgtaagtataccttatcaccgattatcatgccagtctaaatccaatgaacttacaaatcataggaattaaaattttgaacatataatcatgattatattactgtgttgatgacaatataatcattatatatatttatatatgttctggacttaatagaatttctacattaaagataatcatgaaataaattatatgaaccatgcaacattaaagtaatttttgatcttttataaattagtaaatctgattatattgaaatcagttttatttaggactcaaaacccaatagaattatggtagttagcccaaataaaaaatgcggcctatcaacaacgcacaacgtattactttaacttgaaggttaaagagaggaacctgtgattaggagacttagtacttcgcaaagtcatgcgtgattcctgtaactcaacacatagaattttcggcgataactcggagggtccatacctcatcattaaaaatattggtactgcaacctaccgtctatttgatcttaacgattcagtttttgacagagcttggaatgctgagcatttgaaattttattatcagtagtactcgcatgtatataattagtcaattttagttttctatttcctaagtatagggaggatgcaagtatccttattatggct

SEQ ID NO: 231214 - DNA, 1423 bp, Cannabis indica
aattagatgatcaacaaggagaagcccttgctttctccatacagacaattagtaggcaaattactctacttgaccttatctcggcctgacatcatatttgctgtcaacatcttaagtcaatttatgtcttcacctcgtacacctcatctacaagcagtacaccacttgcttcgatacctctaaggaagccccagccaaggtcttttgtattctacctcttcatctctgcaacttcgtggtttctctgattcggactgggcctcctgccccactactcgtcgttccaccactggtttttgcattttccttggagattgtttaatatcttggagaactaagaagcatcccaccatctctcgaagctctgctgaagcagaatatcgtgcattagctgccactggcagcgagattacttggctccaataccttctacaagatttacatatccctcaaacacaacctgcattcatcttctgtgataatcagtccgctatacacatcgccaacaatcctacttttcacgagagaacaaaacatattgagctcgattgccacttcatccgtgacaagatcaaccgttctcaaatccggttaagccctgtcaacagcacattacaactagcagatgtattcacaaagcctcttgcttcaacaaccttaaacgctcacattagcaaaatgtctgtccatgatgtgtacagtccatcttgaggggggtatcaagatcatgttgtatgcctttatgttagttttgcccgttattacagttagctacttttactggtttagtcggttaggtggtctggtatataagctcctctattctcttgtatctaattgattaatcaataacagaattatcattcattcaaatctctctttctttccgcattagaaaggtagtaagcattacataaagtaacagtgttatggccagggctgccctaaccctagctccaaggatcacaattttagagaccccaaaattaaaatttatatattaatatatatgaaaaaaaaatatatgtatataacatatataaacgtttaattcattcatttcaataaagaagtaataatacaattagtttgtatgggaattttgatagcaagttgataggttcgatcctccaaccaatctcttttaattgttttatgaaatagcattacatgcatatatttttacagaattaaagtcaaaggtactatattttttttataaaaaaagtcaaagatactattaataataaataaaaaatgtttattatgtattttttacattatttttaatactctattttatatttttctacaaaaatactaaatatatagcactttataaaatactcttaataattaaatattgctttatcaagatagtttacataataaaaattaactgttatatatattatataaaaaa

SEQ ID NO: 231215 - DNA, 1783 bp, Cannabis indica
tagttattgagggactaaaaagacagaaaaaacgcacatgctaaaaatcctattcagctttgaattaggcaaccacaataagcccacgttgagaaaaaaaaaaaatcttattctgcctcgaactagggatgagccgcgatatgcctttcctgggccgcggcccgtgtgcattcttcaccctcagattgctacatttcaagatacgagccgcgacatgcttcctcctgggccgcggcccgtgtgtattttcccacgaattcctgacacgtgccacttcatgttatctttttttttttctaggcatgacccctattttgcacagttatcttttatgtgatctttttatcttttttttttcatcttttttccattgatatttttctaatctttttctattttaaatctagaaaataaaaaataacaagcgtaaaattgctataaagacgaataaaactaaatcaaaaatacactagaattaatctaaaaataatactaaaaataacttaacaaagatccatgtagtcagaaaagtcaaattcataacttcgtatttctcatttttgttgcacatcaacatctctgagaattggttaccaatttcgctagaacatagaaaccaattaagtaatgtcaaaatatcacttaggcatcataaagtacatcatctcgacgtttttttcacttaccagcatccaggtttgacgtcatatgtcaacctgggcgctgggtcatgaactgcctttaatataacaaccataactaactcaatattaatctgattgacgtgattcaacttacattttgaagatatttcaatgctctatcaaatcatgtctcgcacttcaatcacaattttgaagttatcggcctcaaatgtcaccccaagggagttacaaaaataagcttcggcttacctaaagtgggtcccgttgtcgcgactcgggctctaaaaattgacgatcaaccttagaagttaatttttattatcagatgatcatctacggtaaaaaatagccaatttgtattttttttcatcattctattcctattttcaagggcctccttcacctataaaaggagagctctctaaattcatttttcatatttagaaaactaccacaaggtgagagcttatctctttagaaattggagctttgacacttagcctttttttgtaataccatctcgtgagaaataaaaactcaaagtagacgtaactccattactgtcgcgatataagaagtgaactactataaattgtttttctctcttctttttaacttaacaaatattctattctcgtcaatctagtaagcgggtgtgacttacagtccgtgtctagatttctgagtcaataggcaacaaataatattttcaatgttgtcccatttaaatctatttcttaaacatctttagaatgttataattgtctaattatattagtttacgtcaatacaaatttgagagtgccctactcatattcttagcaacaaggaatgaaagttagaacatagaactaaaatttaggtatttgttggatattctaaagatattgagagtaaactatattatagtcaagaaaaataaaaaaaaaataatttagttttataaatactaattttctaaaatatgactatatccttattctcaaattttgtagctaaagggtttttttttttttttttttttttaagttattgtagcaaagttttaatagaagagatgttttcacaatcgacctaaaaaagttgtattaaacaaagagatgacttaaaaaaaagat

SEQ ID NO: 231216 - DNA, 1237 bp, Cannabis indica
tagagaattctctattacaaaatacatactgaaaattaacatccctttcccatacaaaaggtagctcactactaagtacaattaccaaaataccccttcctagatcacacatcaatggttttaccttgcttaccccttctagcataagtaaatttaattggaggcctcacattcgtatcattacccccccaaaatcccgaaccttgtccccaaggttgaaatctggaaactgggcagcaatggtgtcaaacttctctcaagtagcttcgaaaagaggcaaatctttccaacgaatcaacacttcgataggagctcctgtaggtgtaggcctttgacgcacattcaaaagttcaacaggttcgaccaacaactccaaatcagcagtcaatgtaggaggaatggtaggagacgagtgagtcgtaccaaccgccgcccggagttgggacacatggaagacggggtgaaccgcggaggatgaagggaggtccaaataataagctactgcgccaatccttttcagaacagtaaagggcccatagaaacgggcagcgagcttctcattcttgcgaagggctaaggacttctgtcggtaaggacatagcttcagaaagactcgatcgcccaccgcaaattccacatgtcgacgagaataatcagctgctgccttcatcttgtgttgagcacgcaacaagtgcattttgaggtcatccaggaacccatctcgctcttccagatactgctctagggccaagaccgaagtggatccctctgaataccggattaaggctggcgggtcacgcccatacaacaccttgaatggagtacaacccaaggaggagtggaaagtagtattgtaccagtactctgcccaagacaaccatttggcccatgccttaggccgatcagaggccaaacaacgaaggtaagtctcaaggcaacgattgaccacctccgattggccatcagtttgagggtggtagccggtgctatggcggagctcagtgccctgaaggcgaaacaactcagcccaaaaatgactgagaaacacacggtcacgattcgagactatggtccaaggaaccccatgcaacttgaccacctgatgaaggaaggcttctgcaactgtacgagttgtaaaaggatgcttgagggcgataaagtgactctatttgctcaaacggtccacaaccactaagattgtgtcaactccttccgattttggcaacccctcaataaa

SEQ ID NO: 231217 - DNA, 1067 bp, Cannabis indica
aggatgacgatgataatttttttaattgtggcaatccactatagcgacggtttaaaaccgttggctatactataggccacagtttaaaactgtcggctatagtagctgacgattttaaaccgtagcttatagtatcgactatagccgacagtaaccgtcgggaattcttttataacgagaactttctactgtcgactattctacccagtattcgcgacgctgtagtggtccctataggttttagttttgccattttatttaacaacatatttttttctttcacaaatatcacattttaattatatatctataaaagtcaaatctatctatttaataattataattaattatcaaataaaatttacatttaacttatgtattaattgatcttacaaagactcttaattaacaaataaaccctaaattctctcttccttctcaattaagcccttgcttagtgaaaattcaaaaacaagacagtattatttagaattctaattgattaattaaaaccaattaattgagtctactagaaaatattatcttagacaatgtggggaccatggccctatgtaacaaagctcccaataactagatctgaaatttaccaagtaaattttctatcttattaattcctcctgactccactatagagtcagaattgcactcctatctagtgaccggcacaaaaagtgtgggtcactaaagagttaggagtaatttttagtgacatgcaaaattaggctctaaatattcaatggtagtctcttttaatgcgcgtcactaaaaatatagtcactaaagagtaaaatctatttttttttctaatttttattaatttgaaaaatagtgatttatagtgacgcgccatgcgcgattgggtaaatatgtcccgactcacctggcgcgtcactatatcataatcttaaattacaaaaaaaaaaaaaataaataaacagctgtaatattttttgaggaaaaaaagtaaataaaaaaataaaagataaaaaataaccagttgtacatagttgaaattagggatttttacactaggtaccaaatttaat

SEQ ID NO: 231218 - DNA, 1033 bp, Cannabis indica
gtaaaaattaaaacaagtaaagaaaagtgggtatactaaataatttcctcaactattttggtaccaaccaataatacaaatatttcatttcaaaataatttataacatatatgaataccctgtatatatgtaccattactacttgattattatgtgcgtcataaatacctaagtttactaaattataacactctactttataaccttcttaaagtcactatcccttactaagaccatatcacctaaaaataatttcaatatgcaatttagtaaacaacaatgaacctaaatcctaccaaatatgtataatgaaattacacttgaaccatttctattatatcaattataggcttatctataaatatattccacttgaccaaaactaacatgcaattgataatttaagcttttatatttaacattaataacccacttccacaagagagccaaatattttctttgaaaataaacaaaattatagaataaataataaattgtgtttaagctaaccacccactacgacagtatgactaacttttaaggagtttgcataatggactatattatttttgtagtgctcgctactcaatgttttacaatctgatttactttatataatttaatttaataattattataaaatattctaattataaaggctcttaaataatatttttttttgttaaaaaataataaaataagttaatttgaggacatcatgataatgtggaacctgtgaaaatgtaagagatagcattataaacgtggtagaagtagatagatgcaggccaataatgttggtttctttttctcttttttataaatgaattattttatcttatattgtcagcaatttattcaaattattaaaagaatatgggtaggtctgtaatagtgacctaaatataggtgacactatttgacacaatatgaaaaaaatataggtttagttagaatatggcatgaaaatatatgggcttagatatagcacggtataataaactcgaaaacacaacatgtaagtacaaataaa

SEQ ID NO: 231219 - DNA, 1038 bp, Cannabis indica
tggactatgcagaattttaactcgaaaactacgtaaaaaaccatgtgttcatattctttattttgatagcttttattttttctctgtgaaatgaatattgtgaggatcaaatttggtcaacgaaaatctgcattaacagcttggtgctttcattgagagcctctatgaaagacctcaaaaaaaactctcctttcttttgaagaaaaaccatttccttcatggatgaaactctagaaaatattaacaccccacatgaggaaagcaatcatcgttatacgaaagagcccatatatgggctctagaagatctaccaatctgcagtacagaaagaccacccgttctaggagggcttaacctgagggtggccccagtgcactgaccacatgctctcggagaactcaacccgacgttggtcctagtacgcggacaacacgctcgaggagaaccctaggacgagggatgaagagctcaatcgtggaggtgcccaatctgtgggagaacttatgaaacagaaagttgttgcctgagatgccatctggaagaagcaggacattggaatgctaagttagaacatgaggcagcctcagcctgggcggcacaggagacaaacgctcaaaatcaacctgaacctggagtaagaagaccatgaggcagacctcgtggctcacgaacaaggagacaagaaaaggcccaggaagaacaacccagggaaaatgagacaccccctaaaaaatcagaatgaacagccatatgggagaaccagaaactgatgaacgagaaatccctcatgataatgaggaaggtctttggactcaaccgggagaacgaaggtcacctgctagaaatcaccaacgttcttcccaaacccatagagtgagtactcgtacagactctgatgggggaaagacgataaatcactcttgagaggaaagaacagagcgtgaagaagcaagtgtgactacgaggcggtaaagaaccaatagacgatcaactgaaagaggagaaagtactcatcgagctaatgatccagaaagtatg

SEQ ID NO: 231220 - DNA, 707 bp, Cannabis indica
attatctcaatgagggtgtaatacattggcaactttggaaagcacaaaatgagatagtttggaatctttctactcttgttgcttttaacattgtaaggtcttctgctacttttttttgatgttgaatattgctcatgaaaataataaatctgctcctcaaagttatgttggttcagttagggaggttgagcacgcgatgaaaccattggctaatataatcaaaattaacacagatgttataatttttgacagtgcaagaaagtttgatttttccataatcattcgtgattctgctggtgtgatggtggagccccgtgtgtgctgtgtggagggtgttgtgcgtacgtatatggttgaggctcttggtgtaaagaaagctcttaattggttaaagaataactcaacggttcatgctcaagtaaaaaccaactgcatcaacattgttactacaatttatagttctattgaaatattttttaagttcagtattattattcatgattgtaagaactctttgcttctcttagcaatgttttcatttgttatgttaacggtgtgtaaatgtagtcgcctgttaacttattaaagtttctttttatctccttgaccatattattatagaggataattgtccctttgatttgttgcctttgttttgtcgactatttctattaataaagtttcaatatttcctttttttttttaaa

SEQ ID NO: 231221 - DNA, 601 bp, Cannabis indica
attattattattttttgaataaaatttgttattattattagtaaattgttttatgaatcaaagtgttgattgctcattgcttattaaaaaaaaatgaagtacaaaataaattctgaataccaaaaattgttagtatttgaaaacgtgtaatttttaacaatttttttaggatttcttctttttgttttgattttataaatttattattgttttgtttgggaggtgaggagtgagtgtaggagatagttttttatattttaataactctctatatgtaaaggaattctgttcatgtattgtaagcaaaactcattgtttgtaaaaagaaagggaattagaaagtgattttggttcttatgcaagactcaattgattgtataggtcaatttttaaactttttaagtgttattttatttagtgggtagactcattgattaaaactgctttcaaaagtcaaaaggtttggattggaactaatgttaaacatgaaagtcattcatgttgattctaagatgggcattgcattgttgctaaattgaatggtaaaatggattaatgattcaacaaataacttgttcacaagtttctttaaaatacattc

SEQ ID NO: 231222 - DNA, 674 bp, Cannabis indica
tgcataattcttatcttctctaaaaatattgcttgagaaaggaatattgcttgagaaagatgaggtggctgatctcgccctttaattatgtcgattctttcctctgaattagtattaacataattctcaagcataagatttgcatacgatttggttgtttatgatgccttattaattctaaattatatgctaatctaattcatgaacatcaataattaaagtaaaactaatatgagaaaaaaatatctcaaaaatttaaattgaaatagaaaactaaatgttcttttttattttttttatttatttatttatttattttttttatctaactcaatcattttatgataaaatattatttctattaaaactcaatcgcacgagtaaggaaggagtggagagagcccaagcaaagtggcttgatgcataataaagagataatgtggattggagattgcaatccattcttcattgcacaaatataatttaatagaaagcactataaccaatttagtaacataaatatgttttttgaatgcaacattataaatttagtaagtgttacatgatgagtccattacaagacaatgattcttttacgaacaacaagatgggtcataaggccttttcaaatggtcagtggacagaaaaaactgttgaacaacctgcttgaagga

SEQ ID NO: 231223 - DNA, 1174 bp, Cannabis indica
gtaatattttgtatgtaatattataagtttttaattaaataagcaaagtttaattattcacgtttttcattaacctcgttgattagcaacgagctgcacagcaagtttaaaatcacgttaacacgcctaggctagttagggtgttacagtttgctttgttcgagccatcatcctattgctggacatatactagggtgattccgagcaaccgtgacagcagaaacagcactgggaataccaaagttccctgaacttggacggccaacaggcaaagtgtcaacaacacctggccagacaacgtatgtccagttggacagcagataacgcctccaacctttcttcaactcccaaatgaagcggtcgtagccctctccagcgatctgctcggagtaatattggtgttgcactttgggttcaggagtagaagagcgttcactactcacctcccaatctttgaagcatgaattggagagtctgtcacttgaagaggacagactggcacgaagacgaggatgatcctcgtacaaaagttgaagcaggtcctggtcaattcggtgttcgcttccccaaaactcaccagggttcatctacaaaagacaacacacgagatgagtgtttggtcggaataccgaacaataaataggcaaatatgctgaccacgagtactcaacagattaaaagaatgaaatatattcaaaaataagtcaaaacccaaaagtttgaaatttttgaggttagggctaaattttagaagctttgaataagcaaggtgaaagacagacaatgtgcgatcaaaaggccaacgtcatgaaccgcaaagtgttacagattattacaaagaaaattgcgaagtttgaaacctagattttctacctatcttctacagcaaggtcaagaacgcatatttgaaacccagaaattaaacatgaaaagtaaaaagaagaagggattgaaaacttactcactgttcgacgtctgggttcggtccaaacggagctgcttggatgcttttggtagaaatctcacgactgacttgaagtgaaaaccttttttgctctgagtttgtttaatggagaaattggtaaaattaaattcgtgaatgatgttcagccctatttataggcaaaaaagtgaagaaaaaaaagggtaatcatttcaaatgcattagacgcat

SEQ ID NO: 231224 - DNA, 992 bp, Cannabis indica
atggatggtcgatcaagacatgcgaccctagtttgaagagcataaacttgactgataataagttcgtcgatcttgacattgatatctaatactgttctcgatgacggtgaagaatcagcgattagaactgggggtggtgctcttggactctctcgctcatgaatttgaagaagaatatgtatgcagtgatcaatgtaatgctctagagttatctcgttcatcattgcctttcctctacaggctcgaactcaacttgaaatttggatgaaagtggtgaacggacatgtttacaccatatttatgcacacaaatagaaattcgagtattcccagatcaacgactaggtttacgctcaagaaaaaaaggaagaaatatccaacggtctgggaaaaggtacagtcagacatttaatgcaatgttttgaattgagaaaatctgaatgattgtattctccttgagactcacactgatttaatcaactgtcatttcatcaagcttcgccacacacggctcatcggtgaaagttatctccataaactgataatataatgcaacattttgatctattttttaaaaaaaatggagagttgtcaaccacaaacaagattaatgtggaattcttaaaggtccacctttagtctccatctgtccatccatgaggaaggatgcaagtttccataactcctagagttcttgaagcttgggggtaaatgttatttgtgtttttgaatggggacacgtggaattccaacatcaaataccatttagttattttaggcccaacagcggggccaattagaataatggacgaggtccattaggaagaacatactttccagatggaaggcagaaagctcctctaggtgagatactcttcgagcacaacgcacatctgaaagacatcgattaaaacatccagagaagtaaacaatgagcatccagatgtctagctcaaaagcattctcattaattacgagatcttgagatatcaa

SEQ ID NO: 231225 - DNA, 1681 bp, Cannabis indica
tgctaaaggaatatgttgccagggagaagaagtaaagagaagaaaggactggttcgacagcccatgaagccattacaaaatgtttgggagattatcagtatgcactccagtaattcattggtggatggggaatcacttgctatttttcgatgactttgagaagaagaagatggagaagtagaaggcggcacattatgaatgcacattatgaatgacatggagactctctttgccctatgaagtttgggcctgggcttgaagctaattttttttaaaaaaaataaatgtgggcttgaaatgttttatattttgtatgtttttgttgtgcttgttttttagtcttctttttatttttaccaccttgaggacaaggtgattttgaagggttggggagtgttacatgaaaagttatagggactaattagcaattgttagtattgcctagttagtataaatatgtaatactattatacaatgggaatcaatgaatgaaaagagagaaaattaagattattcctattggagtttggcactgactcgaagagtgcaattcgatacaatcggtaattgtatcacagatcgtataagaataggttaaaatattattcattggaactccctattaaatctaaaattagattcaatgtattgtattcctataagatatattgaaattaatttttgataatttgtaagcaaattatctattgttgatgaattaaattatctacttgctagattaataatggaattgcaattaatttgttttggagatattaacaataaaatggtgatttgttgttaatttttggaacaaaattgatttcgttcattgcctgctattgattgttgattttgttttgatgaaataataatgaaaaaaataagtaaatagtaatgttagttaattgcttgtttaatttatgtaatttatttgttattatttatctataatacagtttaaattgagtttcatatatcttgtagtgtaaagttctttttgtgatataaacaatgaaaatgttgatttattgttatttatttacagcaaaatttatttcgtttattgcctgctatgaattgttaatcttgttttaatgaaataataatgtaagaaaaaaaatataaaataatgtatgtttattgctgattgcttgtttaatttatgtaatttattttgtttttgtccatttataatacagtttaaattgagtttcaaaaatcttgttgtgttaatttgtagaaaaataaaattattatcgttgactggaaaagttatcaactgacttggagtctaatatacgctgagtaatcacgaatagagagttaagaataataaataaataaataaaaagaacacataggattatagaggttcggcccccttatatatgtgtaatgacctactttccttttagttatattaattgtaagataatgtcgtgcatataactaaagaagacaaagtgaattctagctacaactctcaggatgtttatagagaatattcaacaaagtgctcttagtgcgagattataatttcaggtcccttccttctgtgaactcattcactatttatagggggaaggttattacaatcgactctgtaaaagaagtgatccaaaagtaaatatccctatattctagtgttgggttttgtgccctaaataaaacccattac

SEQ ID NO: 231226 - DNA, 621 bp, Cannabis indica
aacataaaactgtcatatttttcgaagaaagtttaaaaatattatattaagtgtaatttcctcttttcgaattcaataaaatttacaaaagtaaagatatccaatgggcttgagctgagcatggaccaatgggcttcagctgctagcaaagacccaatctatctcaccaactatgtccgtcacatgcttgttgccgtaagtgtccttgtcttatttgcgtaatagtattcatgattcttattgcctttctgttgaccatatcatgccatttttcacttttgaactttttagggaactcttcttgtcaccaagtgggttcattaggtgaaactcaatgttgatggttcattgtacatgttcaaatagactagtagtaaagggctatatgcaggccctaggtattgactatgagaagacattttcttcagtagttaagccagttacagtcagaactgtactgtctctagttgttacttcaaattgaaaagtcactgaaatggatgttagcaatgcatttattaatggatttctaactaagatagtgtttatgtaacaacctccaaggtttgtagatcagaccaaaccaaaatcatgtatgacttctacacaaggctctttatg

SEQ ID NO: 231227 - DNA, 1168 bp, Cannabis indica
gtgtaagtgtctattgtgttacttattttgtgatttttaatggttttatggtacacgtttatgttgcagttgtgggaattttacttgaagccagaggaaagattttgtggtaaaatcatattctgggctcataatgatgatgttttagtagatattagagcaaaattgactgagaagcagcgtgctatgtttgttgcaacttgttttgggcatttattggatattcagtcttataagttgcagcatcagatttttcacactgcattgaatagggaagtccatcaaccaaattcgaaagagatgtggtttgattttggtcatgatagggttcgttttggtttaggggagtttgctgttattagtggtctgttgtgtaagggtgatattgatatgatgaagtatgttgggaagggagacgtgtttgtagataagtactttagtgatatgacggtgactcatggagccgttaagcagcgttttctgagtagtacttttaaagatgatgactttgcagttaggatggcagtgttgtatttggttactaactacttgttaagcaaacctccagataaacatgttagtattgagttgttacatttggtaggttcgggtgagtttgatagtttcccatggggcaaggttgtttatgatactacattgtactatttgaggcttggtttgaaaggtaagaagggtgctaaattgaaagctcttgctaaggcaaaaggaattgataagaaggggagtgattcaaattgtaaaacttacaaattggctgggtttcctttcatcttccaagtttggttgtatgaggttattcctctttttagaagtcaaaacatttgtacttttgacccttcttcaacatatagggtgtgtatgtggtccagtgcgaaagaagttacttcaagtgaggtagagaggaaaatctacttgtcatctaaggtatggttgcttttttttattatgttgtttttttttgtgtgttttttttcattatctgttttttgagttatgttttgtttgtatttcagctttcagttactcctgtgtttccttctgctgaggagaatgagaaatttgatcttactggatttaatttttcttatttttcattgtctgatgatgattttgagagtgtgaaagtacctaagaggcagttagacaa

SEQ ID NO: 231228 - DNA, 4665 bp, Cannabis indica
tttagggcacaaaacccagcacgtccctgtcctccattgattgtgtcaacaggtgttgttccattacctgggagtggaacgttctttgttccgacattgaaagaacctgtgttgttatctcaattcgtctggtttctagccattatgattttcctccgaaatcaatagtaaaattgcttccacagatggcgccaaatgttgttggaggaatttagacaacaccaaataaaaatataaacaaaagtatgtgattactccacctagaatggcgagtattcaaactatggacactcagacgtactgaaaaatataaataacacaaaagaagtataatggttcagtcaaatcacggtctgcttagtccactgttgcaagggatttctgtcttgttcatttcatattggatcactcctttatatacaaagcaagtgcctttgattagacaaaacttgatttaattatgaatccatttttacattgaatatcaatatttaaatcaatagaaacgtaaatataataaataaagaacagtttcggcccaatttactaattatagcaacatatgtgacctcggtggtgcgagttgtgtgttcatattcttacataagctcacgggcttaatatgcgtataagactaaacgagtcttacgtgtttcagatatctacatcctatttaagtcacgtgtatggatatcttgtaaaaagttgataacttgggacatgctagtccttatcgggttatcgagcatgttaggtcatccgaaccggctcgctgagtaaagaatcgatctttactaactcgcaggaaaacctttatggtcatcgcatatatcttggtatatgcgagtcttaaatctagtcttcggtcatgcatcgtgcgaggcataataatgcgattagactctgtcggggtcacattatctcgctgagtctggttcaggcgaggttcgtactcaagtggtctccttttgacagcttagccctcctcgaggacagtgaatccacgtgtcatatttatgggagtatggtctcgagtttctaggtgaaaaattcacactataacagtgctagctggacttgcagatgtatcccatgagctatcatcaagcattaggatagtaactgtaggtaccattagtgtggcacgcatgcgacactttcaatgtatttgttggtgacacacgcgccaagaggcttgttccttaggggaagttgcaatgatggcaggacgattgaggtgacctctcctttaatacgtacgagacacgagacgtgaaatgatgaatattaaacgtttgggttgtgcattaaatgtaatctttttgacttcccatctgtcggataaaaagatgccttttggaagaggtgatctgggtcgtctatttcaaactgcaatggttacaactggagtataaataggtttcaagaacccatttccccttttttcatcatcttcaacctttagaagccctcttgcaatttttgaatcagagcctttattttccaaacagtctcgccttaccgttacctttaataatgaatacaagaggctctcgactgtcttgtccagtacctccttaaccttcattcattttgtttctcaaatgctgaacccataaatcaagacctatttcatccttaacctcacaagaacttcaatatttaagccagctacaaccacgtgatcgactgggttcaacactagtgggaggatttgcacaaaaacgttccattctccatccaaacatcaagtaagttccttgatgctctgttgaatttatgctatttcatatctaagatataaatactaagtttaagctatgtctagaacatactgcacatttgaatggtcaactgttacccatagaagtgtattccaaggattgggttgtgtgcgaatctcctatgccatgggtgtccgtatcgcgtggcaagttagggtgctagacgatccttggctgccacgatcacacacgttcataatttatgataaacatttcattcttgatcaaatgagggttgttgacttaaagcttgctaatggctcatgagatgttgatttcattaaagcattaataaagacaacacagagctaatcttgactataaccagtggtgactgggggtttgaagataatgtcatgtggccttttagtaaaaatagtgaataattggttagaagtggatataaaacaattgttgcgatgagagaggaatcagtctagtctaatactttgaaaacaaaggcctggtggaaatccttgtggcaccaaaagatctcccctaaagtaaagcattttgtttagaaagtttgtcacaattggctccatacatatcatgctttttagtgagaagggaaagacctacttatccgtactgaagtcattgctcaatggaaaagaaaaaggatgttggtcatgtactgtggggttacttacatatctattattctggtttggaaataatgtggattatgggatcaattccattgatagcgtaccaagagtatcatcaaatttctgagtcatttggctgaggtatggtctttaacaacttttaattattttcttgtggtggcttagaatctctagaatgtctgtaacagtgtgaattgtggggaaactaagcctagagcctcagatatggtggagtggtgtagtcaatttctccaagaataccaagatgcagatggtgttggagacagacaaaaatctaaccagcgggagaaggctagatggaaccgacctgatattgactgctgcaaaattaatgtagatgttggagttaaggttcaggaaaggtatgtggctgctagtaatgttgtcagagaacataatggtgaagttctttttgctgctattaatattttgaaccaaccaatgaatccactaacaactgaaataagcgttattcgagaaagcctaaggtttggtattcaatgggggattccatcagtttatggttgaaacaaattgtcaataagcgatacatttgatcaatgacaaagaagactaatgcaaggaggtgaagagagtggttcttaagatttaaagtttgttcaatcacgatcaagtatttggtttgttttttatttttaggaaagccagtcaagtgtctcgccaatcaagctttgttatctaaagttagtgctatgttgattggagttgcactccgtatgttcgtcaaactcttcagtttgacgagttttttcttttgtaatattttgaattaattgaattccatttcaaaaaacaagtatattatatttgtataaataaagataaatggcaacatgtgtaattattaattatttatttttcatcctcgttttgtcacccataattaatattttagtaactagtgacaattatatagttagttttaccttgaccacattagaaaaagactaatacaaaattacttttcaatacgtggaaatgaaataaattattaaagaaatgtaagcaaataaataaggaattagaatcagaattaatatttataatgtaaaaaatagaattataataattttattttgtttacttcatgagtaaaccaaatcataatatgtaaattgattaatttttttttttgattaaaatataatataagatacttattttgtaagatttattttataagaaaaaattatctttaatattaaaaaagattaaatagccaaatttcttaatggcattcttggagggagaaatatttacattcttttatccattatccattttccatttttccatttgttagtccaaattctgtcgttagtaaataatagaatagaaattactccaagttgaacaaaatagaagtgaatgatgatacacatacaaattaataaataaataaattttggaatgaaattgattgtcccaaaggaaaagtgaatcaatttaaaccaaacaacccaacaaagccgagtgtgaacacaagtgttgaatcattacttggcgaataatttgcatccctacaaaactgacagttggccaactaaagccttgatatgtgtaatgtaagattggaatgatatttaaaattaagaaatggtaatgggcacactggtgtgtagcacatttttatgtgttaatatcattattggtttaattaagtatcaggtcttatatagtttaatataataccttttaagaagtatcgctagtcaatcgcaatgcgacatgtcgagtggttccactaatgcctaataccaatgctctttaaaatttgagaaatactaaaacatatcaatagtgtcaaatatcatcttaggtatcaataacaatattaatgtaattaaatattgaatatctctctcaaaaaaaaaatatttagtatcgagtctcatataattttaaataataaattttaaaaaatttcgctaactaattacaaactgatacctctaaataatactgcaatcacaatcctcttcaaacacaacatcaatcatctttatgcatattagattatgaaatgtaggagcagtggcggaaccagacgacaaaataaggaggggccaaataaaatgtattttcacctaatttttttagtatgtagtattttataaatcaatataagaagttaattagctttaggctaattagtaatttttccctctgaactttgacatgcagtaaatcgtgcccccttaactttt

SEQ ID NO: 231229 - DNA, 960 bp, Cannabis indica
gatctcaaaaagggtaattttatctaaaaaaaaattaaaaagtgcactaaaattcaaagacgtagcaaattaaatggcattaaaaaaaggggaggtcttcacctcataaaaaaaattaaaaaaaaaatcggaactacgtttgacttgattcctataaaaaggatatgtaggcaacttagttgctaagactaagtgcagtcgccaataccgtaaaaatggtataaaacataactctcaaaattccataaaaggtcatacacctaggaattttttccaaattttcaaaagagcatagaattcttgaaaatggtcatatactggaattctatattcaaattttaaaataccacatcctgaactacaagtggcttgatccttcataaagaaggtatgtaggcagctcggttaattaaattgactgagttcaactgcaattaaaaattcactccaaaatttccccaaattattttaatcatctaatatcattgtaattgaaatcaaagggtatctcctttaaataaaataattgtaattaagaggttattctttataatcttggatgggtcgaacttaaacgaataaactcttatacaataaatttggcataggagaaattgtgttttgtatttatttttaatattttaaatgcaaaatttttgcttaacataatttttggcacgcccggtgggacccattctccttttcatctccaactatgatgactattatttaacttcaattttatggtgctaatcatgtttaccattttcaaggaaaaatggcatcataagtcacagtttacttccacaagttaccaacaacctcttctgcccaaggagggaaaagaactgcttcttggcagcatcctctattgatcgagcacccatttcatgcaaggtgcccgaaccaattaagaatgtgaagacacctatgcaaactagaaaggctggaagagggaaa

SEQ ID NO: 231230 - DNA, 1186 bp, Cannabis indica
tttgtttttacggaactcgattccgataaaaattgcaaaagttatgaattttggaaaatcgggattcaatggtgtcgagtgggtgcattcggtgcaccaggcgctcggacaagggagtatacgcgcgcggatggcttctgtctgaagcgcccgtgtctgccctgcaatcggcccacgatcaccctactcattcaacttaagcgtgaggctaagttgaaaaagagccaagcagtatgctcaagaatattcggagcaggagatgccgagcaagaagaagaacaaggctcatccgaccgaccaagggccagtagaacatgctatcaggattagggaacctgatatgcctgttcagccatctgcccctgtagagggaaaaggaaaggtcatcctgttggagcatgaggaagactcttctgacgatcacgtctcgtttgtgcttgtttcggaaaatgcccctacccgcgtacagggtattttaacttgctcttacttctcttatattatgctttcacatatattatatctgcttctaactgcttcattttatttgtgtagaatgtctcagaaggtgctccaggccttgaagaagagagtgggagacagctcaggcaagtctcctcctgccaagaagtctaaagacagtgagactccgtctaaagagaaggcgccagttgacgaggtcattgacctttctgaggagaaacctgttgtggaccttccagttcaaaaggtttcgaagtcaaagagtttgagagtggggagcttggacgggtctgatcaagctaagaccccttcaacaaatgtggcgctgagcacggaggccaagaggggtaaggatatgctccagtattacttgaatcgatcacttcttgaggtgagtgaccaactatccggggcaaacaatgagctatctttggagctggttggtggagtcttgaaggaagctactcgggtaaatatctctttctttgtcttattctcttttgtatagcttgggctctaacacgttttttgcgcaagtcaatgtgaatattacttatgcttattctcgagccaaatcagctgctaccaagaaccttgcctccaccaacacactgtagagggaggtggatgtggccagaaaagaaactcaagacgttaggagtaagctcaaggaagtgaggaatgagcttggggaggtgaacaa

SEQ ID NO: 231231 - DNA, 1009 bp, Cannabis indica
ttcaaaatgtatggatcctgatattagaatgcactaatattttctacctcctgtgatacttgacatcttatatacaaaaatctattatttatggtatcgtttggtaacacttttgttttttaattttttaatcacaaaataaaagtaaaatttttgtttttaaaaatttagtttttaaaaaacaaaaatgcgttctgaaactacttatatttttcaattttaaaaacagaaaacaaaagtatgttctgtaaagttcatttttatttttatttttttgattttatttaagtcaggtctaggtccggggtcgaattcggatccgggttagagttcgtgttcagcacaagggccgtgagagaggatttgggtccgggtcttgtcggagtccaaaattaagagaaaaaactatttaaaaaaatattgaaagtgatatatattttcacttttctaattttaaaaacaaaaaattaattaaaaaagtgttaccaaacgccacctatatatattttttattttgtagtgggactcacatgagtcaaatgactctttttcttctatatgtctcccttgacaacttgttctttttcttttattattcacacaaaccatcaccgcacaagcttagatctactacccactcagctgcgcgtcattttttaaatgcattggaccagtgcgattggtgacctatggtgatctcacacctcactttcggtgacaattgaaactgagacgcactcatacgagtggtgcaaagttttgatgttaaaaactttaagtcaatattacaaccaacttcggcgaccatttgaggaatgattggtacagttggaatcaaagtcatgaaaagaatatcgatcactaagtcatttttggcaactcactaaattttagtaataagattttcctttggaagtattttttttatgaggttggtgcttgtttgggctagcaggttatatatccgtgatctactcgctaagggtgtcattttgatatatgttatgtc

SEQ ID NO: 231232 - DNA, 1247 bp, Cannabis indica
acagtatttttgtaaaaaaaatggcaaaagttagtatatcatgtaaattttcctactaaaaagcaaatagggttcaccgatatatttattttaagattgtattgtagaatattttgaaaatatattttcaaaacaatatatagaaattctgcacttccttaaaagagatatactgatgtactctacctgtttttgtatccaaaataattttttagttaattttttttcatggttatgtacgttataattatttaaaatattttacaaaattttaaaaaatttagaaaaatttaatacgccgaaaacatagttcaaacagtgtattgcacgtatgactattttattttatacacgtatgaaataaactgtttgaacactacttctatactgtaaattatttcgaatttctaaaaattttattagatatcttaaataattacaacatacacgaatataaaatttttttctgaatgccaaaacagatagagagtgcatcaatatatgtcttttaaaaaatacattatagaagcactctataattgcattaaaatcaaaaactactaattttaatatttattttagtttatttttctaatttttacttgagctatcaaattatacaaaggagatcaactctatatattttactcttcttctctatctattctactctcccaaccaaacatagtcctagtttcctcacaattgcattattttttaatgaaactcgatacttttattaataactaaaccaactatttgcagagtagaaagaatatttggtctcagtaataatacaatcataccaaaaataagagttacaaataagacaatgtgcaatcctatgtgcagactgtgaaacaaaataaattacaagtctttgccaacactaacaattaaaccaaatgtaaaaggcatcatcatgagaggattctaaaatgcttgaacgaccactaaactatcaatttcaaccaccatattagaccaactcttcctctttatccaactcaaagtttctttcaaacctatgacctcaataatagtaggttgaacacacgctacattatgcataacaaaagcttcaagtaagagaccactcggaccccgagcaacaagaccagcccttctcaacttcgagaatagctccgtcaatctttgatcttattagtatctggttttgtgcatcactcaccactattgttagtattttggacaaacaaaagtggaataaattttctagattgagt

SEQ ID NO: 231233 - DNA, 1701 bp, Cannabis indica
tactctaacctttgaatcctttcaatagtagaatatcaccaagtaatgaatgtgaatcttcttttcttagaatatgtgacatgtattctacatagtcttccacaatgtcttgggtatcacacatgactagtgtaggcaatttctcaatcactaagaagaagatgatggcaaaaaaaaaaaaacaatgaggaagagagaaggaaattttttaattcccatagcaaataggctattaaaaaattgcatagaaagagaagaaaataaaaccaattgtgtgttgtatattgtttttatccgtaattctggacgaatgacatgtggcataaaataagaagcaaaacctcaaatggtcactaatcaagtcctcttaattggactaggtcacgaagaagccttgtggatccgggaacagatcaagcccaagggctacacggggatttgtcatgcaacatattgccatttgggttctggaggcgtcatcatatctctggaaccctagagaagaccaagctcgacatatgtccacacgacacctggaaggcgttcgaagagtttaacacggataccaatcgcacaaaagatgtaacaccctagtctataaggacaccacgtgtgcgattttataaactagtttagtaataatagattaattaattattaaaatctgtaataatatcaataacttcattaaaataaaatcctaataacagacattataactacactaaaactttgttccgggaattcttgtataaaagttttatcaaaaaggactatatacaataacaaattaaaatacacaacagatatagctcaaaacaactcttgccacctcggcacacaggccggtaggatctatttgtacattcgccagagaagaccgtgaaaaacctaaataggattgtcgacaagtgaaaaacctaacaatagtttcggtttagagtcatgacttatcaaagttgtctcacaggaacaactcggataccgctcccctatattcatatatcatattgcctaattaggcaagcccctgccataatctggcatccatatattgcaccacctaatcaggtggcctgtgtattacattgtcaatacctaatcagacaatatatatcgcatcacctaatcaggtgagcccgtgtatcacattgtcattgcctaatcagataatcgaccatcaagaaacctatcatgtcatgtggtacattatacttttcttacctcaagtctcagtttaggtatgtcagtcgacctgcttggagaacgatcaacaatcccgagccctatgtcataacaacaaaaaggataattaaccaagtaatctaaccttattccaagtccaaaaattcattctaaggatcccctataggtctttagggtattctcacctcaaattgtgggaaaatacaaaaaacggacttcaaaaacaccaacaggaatggtctgccgtttgtgaaactgttaatcattttccttggggtttcctagcaagaaacggttaactatttactccaaatggtgaactgttttctataggaaatgtaaatctcgagttttgcactcttcgaaacaccaccgaaacctatccaaatcattccaaactttacaagatacatgtataccatatataaaacagtctcaatgtaataaaaattaaaaacgagcccttaaacaaaaaacaccattaaaattcgggct

SEQ ID NO: 231234 - DNA, 750 bp, Cannabis indica
ttccttaaatagaaatttatttctttaaatagaaatatatttccttaaataaaaatattcttatacattgttcttacaagtattttattttatttcattgagattaaagaaaagaaaagaaaaatgagaatgatcgagggagctcaagaggaagattttttggatttatggggccagagctcgtgatgaattttttgggttaatggggtcgaagcttgaggaagagaggggattttctgggttgacaaagaagaataagaaatcttcccactttctctctgatctaatttgacactagaaatctttgttcatccatttctgtttttatttcttatttatttttttattggaaaataagaagtgggttcgttgagatatggaggtaaggagaattttgttttttcgctggggtcatgaaattttgttcacatttaattgatttgttacacaaaaaagaaaaaggaagaagaaaagaaaaggaaagaaaagaaaaaaaggaaaaaaagaatttcttttcttgatttttaatattttaaaataatttaaattatttttctaatatttacattattaatattaggtggactaatgaaaatttgctactgtacacttgtgtacaccgtgacagttcactttggtacttaacagacaaaagtagacggaagaactacatagcaaaacgattggagaggttaaggagttcaactataacttttccagtctaagggtttaaccgtactaaacttcaaa

SEQ ID NO: 231235 - DNA, 982 bp, Cannabis indica
attcctgcattagacaatctctttagatttttaatatgaatatgaccaagtttttcatgccataaatcagtaatattatcaatgacagaatgacaagtagcatacatagtgagagtataacaactgtcactagatctgagctcttggaagacaatttcatcaagaatattatacacataacaatgatcactatcaaagctcatagtataaccttgatcacaaatttgactaatgctaaggagattagcttttagtccatcaaccaacatgacattcttcaatcttggaagcccttcaaaattgagagttcctatccctatgaatttttcaacaagaccgttatcaaaagtaacttctccacatttcattggtctagtgttctcaagatattctttttcacctgtcatgtgtctagaacaaccactatcaaagtgccacatgttagtagcaatagttttaaaataagaagaacctaccaagcatttatttttgacaactcatttttgcttttgtaaaacatgtttatttccaagataattagatttaaacatattttgcatagtgatgcatttaggtcgaatgtgaccttttatcccacaaaaatggcaaataggaatgaaatgtcttccattccctttggaattgtcaaacttactgtgctgcttcttttctgtaacaacagagtgttttgccgaagtgacagaatcctgcaaggtagcgacagttcttccagaagaaaaaatatcaaatttaacaaatgtgttattgaaatcaaattgagtagaaacataacctagaccaacatgattagtttggcaagatttttggatcttttcaaaaatgttggaacctggatttaacattttgaaattctttttaatgttttcaagttccttagtcaaagagataatttagactcttttaagatcaattcagatttagaacatttaattttttcttccagctcattgatgttgttaca

SEQ ID NO: 231236 - DNA, 1323 bp, Cannabis indica
gccctaagttagtcgtatgaactattttgccttagcgacacaaattgattcactatagtacttttcgttaaacaaggtctgaaatgtatcccatgtcatgttattcaaatcatgaccttaagacataatttcccatcgaatatgggcatcctcacgtaacataaagatggtacaactagagtatgactagagtacttagtataggctgatattatggtcaatagtattatggtacgaacattctagactcaataccgtgtaggacacagcgataggattatggttgggtgtttgggcacctgatcataattcaagttatatttatgatattgattatatttttcttactgagtctgtcgacacacatatattattttcatgtgtaggtaagggcaaggttaaggttgagcagccgtgaaagtgagcaaatgaagattgtacatgtcgaggctgttagacctagagcgtataatctttgggacaactagttgtattttttatagtcgctgggcgatatcttttgtattacatactttgtaatagttgtaaataatttatactcgggatcccagttatatgtatatgttatttattttagtatttataagtattttaaaaaagttttaattattcatggttttcaataaactggttgattagcaacgagctgcacaattcatatgaaatcacgataacacacctaaagtagtagggtgttacaggctaggtcatgggaccaagctagctctatggctagggaacgctggccagccaacgccaaggtactaagtgggaagctagttctttatcctcaatttagctcgactagctagggtctcgtgatggctttagagacatatacaactatagtcttatgcgtagttccccttgggaactctgtatgagacttggtagtgagtctattaaagtggagtgcataacttaggactcactatatgtttaagtaaatcaaggctggccagagggtggggcagccgaggcgtaagtcctaggccccacaattttggaggcccccaaatataaaaattaatataaatgcatatatagaaaaatataaaatatataaattttggttcaagtaatcatataaaaaaagttatagttcaattggcaaggtatgttgtttatgggctttgggagctgggttcgattcgtaagtcttcaatttttttggttttttggctgtctaaaaaatttaaggttttacatacttacatcttgtaataaattttatataattatgtagatagttatagagtagtttaaatttgtatagattatggaaggtttgtttttttaatt

SEQ ID NO: 231237 - DNA, 1118 bp, Cannabis indica
agaacttaacatgaatgagctcacctatacaaattcctaccagtaatcaatctatgagagtgaaaaacaaagacttgtaaaagctacaaagtctttcatatgaccctttatttatagggaaaaaacccaaagaagcagttgaaaataaccggaaaataaagaacaagaatcgttattacaacttgaaactacaactcacaacccaggctaagtaacaaaattagttacactatcatcccccgtcaagcgaaagggtgatacacacacttgaagcttggtcttgaggtaattgaacctgtcagtcgacaacaacttggtcaaggtatcagctatttgatcaattgaaggaacatagcgcacctcaagctgctttgccaaaatttggtcccgaatgaagtagagttctatctcaatatgcttagagcgggcatgaaaaactgggttggcagcaagggaggcagaaccttggttgtctacccaaattattggtgaagagggtaagtcaatattaagttcttttagtacagagcacaaccattttatctcagaggctgtgttggcaagctttctgaattcactttcggtgattgagcggggcaacaacttgttgctttttggcagaccatgagatcaaattacctccaaagtaaacaacataacctcccgtagaatgcctatcatcagggcagctagcccattcagcatcagaataagcttataaacatagcctggctgctggtctgatatgaagtccctcatatagagttcctttatgataccaaaaaggtctcttgcaagcttcccaatgggttgttgtaggggcgtgaataaactgacttaacctattgatgataaaagccacatctggcctagttaaagtcaagtattgaagcgcccctaatgtgttggaaattattttaccaggatcttagatctactcacaagtatgttgattaacaccctaaatatgaactttctaaaacgatgaaataaacacatataaagtttagtaaaccttacattgggtgcagcggaatataatgactccttccgttcagatatctagcccttgattcctttatgtagcagagcattatcaatatctgaacccggatctc

SEQ ID NO: 231238 - DNA, 1918 bp, Cannabis indica
ttatgtctaaccacgccaaacttactatcattaccttttggaacttcgtcaaatggtggcctaagccgtccatgatgcaattccaagttgattgtgagctatttggggtcgaagatgactctatttggcttggtaaaagtgacattcaggaattgtgcaccatggaatacttgggagccaaaccaataggaatttggtgcaagtatgatttctaactcttaataataaacttgataatgctcttttaacaccgacggttactaattatgactttttaacgggtagatgaatgaaagattgttggacattggtgggctaaattgagtatatgaattttagaatccgagtgtgatttccaccgatgcaggggctgatagtaatcgttgtcaagcactcgtcactcgaatgactagggtgactaatttagacaaatggcttatttctccatataataatcggtatatgtagatttaaaacaaataatttcagtatttataactcgtcataaaatttattatatgtatatataaacagttttacagatatttgtttgtccagtaagatattttactggatgcttgtaatcatatagccaagtacgcatacggtggcgtacttagatttaggcaacggcttcatatcggatgatctgaacttcatcatattcaagtaagttctatatcaaacatcccaatgtgtaagcatattatttatttataaatttatatatgctaattaacattactttttgtgtagatcgttaaccatatataaccaaatgataggacaacctgatcgacctatccagtagataactcctatctctcctaaacaacgcgatggcaaatagtgtggatactacatcatgaaattcattgaaagtttcatgaccgtagaagatccaatacaactgttgacccgacatgataggttctccactccgtacactaatgatgagataaatattatgtgtgattggtagattcattacgtgaaagcagaagcggagcgacaatagttatcgtattaatcagtgtgtatatatttcgatttatcgttactatatagatttgtaaatatatttatattattataattagcattaacttaattatagatttttaaatatatttacacaatattagctttagtttaattattgtgactatacaaaattttaaatatatttagacgatactagcgttagtttaattattgtgactatacagaattgtggaaaaatttaaaattaatgcagagaaaaaattttagaaatttgtttttcttttcctatttttccaatgtaacgactaaaaaaaaccgtcgttgaaaaaaattaaaaaacgtaacgagcctataaggcacgatttaaaacgtcaggaagtctacattagcgacggtttttaaccgttgcctattttgcccgttttgcgacggtcatataggcgacagttatagaaaccgacaggaatactttaaacgactatttaaaaatgtcagaaaaaactatttttttagtagtgaatgctctatatgttccaaatatagatacggtattaattatctattttttctatccaaataatcaatgatcctctatagatgatctacatcgaatatggacaaatttaccgttttacccttcaatgtattttatccttaaaatacttagctacttgtaaataatatttcggtaaactagctatgataattactgaaatgagtactccaccatttaatcttgtttagccatgctcgaaggaaatcatcgtttcacttatatgcatttatagaagctatagaatattatatatctatgattagcactcccactcaattgttctaccatgctaccaagataaaagtattaggaagatctaattggtcaactttaacaaacaagtcaaagaacacaaat

SEQ ID NO: 231239 - DNA, 963 bp, Cannabis indica
gaagtttccagcagagtgtctgagttatgccatgatgttgaggccaatctgagtctgtcgaacaatcataagggggatgtctcgctgaagatatacacgaacacttttatcatggtggacggttctttcaaggatggtaactacgggtgtgctatggtggccctggataaaggttctatggagtggtggcaatgcaactcctcaggtgtgggagagtatgtgttggaagctgagatgcaagctattctggtgagtctgcagtgggcgtttctgcaacagtgggataattttacaattatctcggactcaaaggtgttggtggaggctcttcgttcaaaaaaagctccggcttggaagtgctctgcgcttttttctcttattttactgaagctatctcaattttcttgctgttattttgtttttgctaaaagagagtacttctcttatgttgatggcttagccaagtcggcaagagcttgtaatgctggctggcagaactcttaaggggagggatttccagctgtgaatcccagttcccttctttcttcaatctaattcgaattgaggttctttcaaaaaaaaaacatatagaggaataatagtaatttaaactttaaaatcaaatatcacgcctaaatttaactagccgcatcaagaagtaccacccatacattggagaacactcgaatatgttgagaagcctcgtcgatctatcgtctaagattgacattgagttgaggaaatcaatttgaagtttgagaaattaaaaacaaaaacagagatttaattattttatattcgggaataagaatagaataaaaagaataattaaggtttgaaaaataagatgattgacatgtcatcatgtaataagtaaaaataaaaaatattaatttaaaaaaaaataattaataacaataaatattattcatttgatcaaatctaattgtcaataattaaata

SEQ ID NO: 231240 - DNA, 969 bp, Cannabis indica
ttcctaccttgggggcttcgacattaaagcgctggatgtactttagaatgtagcccgtgggtagtactcctctcatcccatcatcggacggctctccaccatggttgaggggtgacgccttcttcttgatttgctcttgaacaaggggtgcaagcgcgctgtcccctagcacgagattatttggctaaaatcctttcgtaagactatctgttgttcccccgttgcagtcttaccatggcgggtagattcatgttgctttgagcgacctcttaggctctcattttgcgataggccctttccactctcatcctttggagtgccattcgtggatgacatggagttctccctgttgccgtgggttgttgagatctcgcactcttgcccgcgacctttgtacaaaaagtgtgaagtttgagttttgccttcgagaatggtgctcaatactttttgcatgctagccactgtagtttctagcctttggttcttccagcgaagattttttactttgtcttcatagtggagagtttgggattttagactcacagagttagctcgcttttccttttcggagcaatgtcgcaaagtaccaagatctcgcggtgttggtggccgagggtgcctcagtggtgatgggacctccttcctttgtgtcataccttacctttggtcatgacgggggcggtaactccatcgcgttgcttgtccactagggtctttctacagcaacagtctccttgctttgcttgatattcccgcctactcctgccctctcctcctacctgaggctggacaatgctctcattttctcctcttacttgagggttaagaccattaacgccttcttctctaatgacgggtggagggaggtcttgccccaaatcgatgaactggttttcgttaagacgaatctccacatcctaaaggcagtgagagcgtctagggattttgtattgattgtgtgaaaaggaa

SEQ ID NO: 231241 - DNA, 857 bp, Cannabis indica
cgcaggtccagaaagttgtgttcctgttgcatatcttaatactcctgttgggtaatacctgccataagccactatctatgcttctttcaggttaatgtactttgaacccttttataaaagtcttggaggctaagagctccttcatgttgtagctcattctaaaaaagagtcccagtccagattctagcttggagtaaagctaactgttgttcgccatcgacctttttggttttggaagcctcctccttaaatctctttatgaaattcttcagggtctccattgggtagttgttttatgttggtcaaggcacttattttgaggttaaacctccttactgccacaaactgtcaccgaaagctaacttgtagcttgtctcaatagtctacagatttgggttctaacttcttgaaccactcctcagcggatccacttagtgttagtgggaaacataaacactttgcgtcattactgactcaaaaacttgaataggtctgaaagaaatgtagtctatggcctattcataaaaataagtataggtctaaaagaaatgtgggctatggcctattcataaaaacttgcataggtctaaaaaaatgtgatctaagtaatatcagtctacatttcttttagacctacgcaagtttttctgaatattagtcaaatgtacaattactatgagaagctaagtaatatatatgtatttattaattaaaaatacgagcggaagttattctgccaaacgtatttggcgggttggaatcggcaacctatatatatattgttgacctcgcttttagccaacgacaatgagtcaattaataagcgataataaatgtaattaagatagagtaaaaac

SEQ ID NO: 231242 - DNA, 899 bp, Cannabis indica
ggaagagtggtcacttctgttgacgatatctctagggaagtgtcttcctatttcaatgatctttttaagtcgcaggagtccattagcgaagctactcagtacctcctatctgccatcaataaatctctggacagtcaacaaattcagtctctcgactctccttttgaagctcatgaagttaggcaagccttgttccaactttcaggagacaaggctcctggacttgatggacttaatccagccttttatcaaaaaaactggcatatcatggggactgttctcactgctgtgatccttgacactcttaatcatggaactgagttttcctctgtcaatgaaactctcatcgtcctgatccctaagaaatccaatgcctcttctttgaaggattttcgttttatcaacctctgctcaacgatatacaaaatcatatctaaaattctttccaaccgtcttaagagtgttctgggaagtcttatctccccttttcaaagtgccttcttgtctgagcggattatctttgaaaatatttttattgctcaggaagttgtccatgctataaaccatcgaaaacatggtaagtttggttgggtgggtctcaaacgagatatggaaaaggcgtttgatcgagtagagtgggacttccttttggctattcttactaagtttaagttccctctaaaattcattagtttaatccatcaatgtatatcttctgcaaaaattcgttttagtattaatggccacatcacaagctccatacatccttctcgtggtattcgtcaaggggatcccttatcgccataccttttccttctctgctctgaaggcctcactgctgcccttcgacttcaggaattaaatggatcttttaagggcatctctgttgctcgcaatgc

SEQ ID NO: 231243 - DNA, 735 bp, Cannabis indica
tacttgcgtagtgtttataattttcgtaacacaagtcctttgtcttctttcccccaacactagccttacttaccaacgctcattcaagattacttaaacatctctaccagaaataatttggataagtaccttggcttatcacaattctttggtaagagtaagaagcactcttttaacccaattaaagacagaatttggtcctatctcgacaaatggaaaggcaaaccattctctaagggagtaaataaatccttttgaaagtcgtcatcaaatccataccatcctatgcaatgtctatttttaaactaggtacctctttttgcaaatttgtggaaagggaaatggctaacttttggtgggatccaaaaagaaaaaaagaaaaattcattggaataattagaaatctctatttttctatgttcaatggaggtctttgcttatcattcttggagatgtaaacgaggttttttcaggcattactatgaaaatacgtaaagctgtcaactgacatctagatttatcaaattatctacttgagactaatttccaatcttgaccttgacttgaattagtttgaattagcatcccttatcttgcaaactaaatatggcgtgacattttaaacatgtccaaaaaaaataagttcagtaatttacttaccaacaattgtcactctcagattgaaacaacaagcgtatcttcacaactatattattgattattattttctggtct

SEQ ID NO: 231244 - DNA, 2814 bp, Cannabis indica
catgtaaggttccattgaaaaaaagagagaactttggagttttgacacaattcatcaccaaagagatgaatttatcagggaagagcaatcccttgagaacctcctctatgaagtcccattctattgtgtcataagccttttggagatcgagtttgatcatgcaattggcctttttggatatccttccatagtgctgaaccaagtcttgacatatcattatgttgtggccaatgaatcttccttgaacgaatcccccttggttttgtgctatgagttctggcagtatgtgtttaagtctcgagcaaagtatctttgtggctgccttgtatattacattgcaacatgcaatgggtctgaagtcacttggagtgttggggcatttgactttggggatgatagtaagagtggtacagtttatctctttgagtatgtgtcctgagtggatgaacgatctcactgcatcacatatgtccccctcaattagatcccaattgtcttgaaaaaagtagcttgagtatccatccggacctggtgccttagatcccagaatggcaaaaattgcttttctaacttcttcatgtgaagaaatgatattttgcctactggtttagtgtatatgagctgtcataactaattcgtgtggtcccattgttgtaacaaattattgttagaatattccctttgtaataattactttatgattttgtaaaggttattaggtcattctttgtacagtacaaacatgtctataaatacaatcactagccaatgatttccattgagctgatttctcatttcctctgttcatttcttttattgccttttgttctctgcattttctctgcactcaaacttggtatcagagcagctctacaccagtggtgtgttcgtgtgtgtaaatcatggcagagcggactcccatgcatggagaacaaggatctacagctagaagcgcaaccaatggtgttactcagatttcagctcctgctaccagtatcgttggaactcatgtgggtacaactcttactcaaccttttgctttaaaacttgacaggaacaattatactctgtggaagaccatggtatctatgatagtccgtggtcatcgactggatgggtacctaaatggtactagggtcagactagtcgagttcttgccagctgatgcatctttgggtgaagatgctactgttatcaatcctgagtttgaatcatggattgtcaatgaccaactcttccttggttggctctatggctctatgacagagagcatagccacagaagtgatggggtgtgactcgtctacaagcttatggcaagcattggagacactatttggagcacactcacgtgtaaaaatggatgaatatcgtactaagatacagacctacagaaagggaacaatgtccatggcagattatcttcgtcaaaaaacgtcaatgggcagacgttttagctctagctggggatccttatcctgagaaatagcttgtctctaatattctctctggtcttgacattgaatacttgcctattgttcttcaggttgaagctagactatccactacttggcaagaacttcaggatatactcctgattttgacagcaagttggataggttaacaaccttgtctgggtcctctaaacaacctgtctcaggttctccctctgctaacgttgctgcaactagaaaccttggttttgcaggcaacagatccgacaactctgggcagtatggacaaggaaatcgtggtaactcaagtcaggctcgaggaggcagagactcgggtagattcagaggtcgtggaggaatgaatcaagacaatacgaaacccacatgtcaagtgtgtgggagatatggtcacagtgctgcgtattgctataatcgctatgatgagtcttacatgggttcagacccgaatggttccagcagtggaaacaaaggagggcaaaccagccacaatggcaatggtgcatctacatttatagccactcctgagatggtggaggacactgcttggtatgttgattctggagccaacaaccatatcacagccgacttaaacaacctcaccaacaagactgattacaatgttgaggagacattgactgttggtaatggcaataaacttgatattgcccatgttggtaaaagtctaataccctctgttgataatacctccataattttgaggaatgttttacatgtgcctaacattactaagaatttacttagtatttccaagctcacacatgataataatgtgtttgttgaattccttgcacaaaattgttttgtgaaggatctggagtcaaagagggtgttgctacaagggacacttaaagatggcctataccaactcacaaatcaccaagaaggtctttccaaccaaccaagtctaatgtctaagttgaactctgtcaaaccgtttactggtgtggtcactgtttccagccacaaaagtgtcagtcctagttttctttccctaaaagataggtggcacaagcgtcttggtcacccttctaatcgtgttttaaataaggttttaaaccttgctgatgtaaaagttaatatgaatgaaaagagtagtttctgtgaagcatgtcaattcggtaaatcccatgccttgcccttcaataccaattcaaatcgtgcctaacatatgctagaattaatacacacagatgtttgggggcctgtccctatcacatctagttacaactataaattctacattcactttgtggatgattatagtagataaacttggatttatccactcaaaacaaagatgaagcactttcagcctttat

SEQ ID NO: 231245 - DNA, 1279 bp, Cannabis indica
taatttctcttatttgtgtgtgtcgattttggtgtatgaatgtatccagtagtggcgaacaaatatgtagagcttaaagatcacattaacaattcagtgtcgagaatttatcgacggaggacaacttggaagtgtaagaaaagtccctcttacagtggtgtagtagaggctttaggtgattcgcaactccaagatatctattcttcaattcatcataaagttggttgaactcggaaattttataggcattagaagtttcttcaaataatttaacgacacctttaactttaacacgtgctttaatattttgagataatttctacctacaatgcccatgttgtgacttcttataaatatttgacaacccattgatgatgctttgatgcctatccgaaatgaagaccaattcactctcatccggtataagatcatgtaactttgtgagaaactatgaccacgaagcatcattctctgaatcaaccacgccccaagaaatatgatattgatgaaaaattaccaccttgtgtcgttgcaatgagcattactcctttgtacctactctttaaccaagtttcaccaccgcaataacctttctcatacaatgaaatcctttaatggatgtcgcatatgctataaaaacatatttgaatttagggtcttcatccacctccacatgtgtgatcgtgcctggattcatctttcgaaccatgtacaagtaagctggaagatttggaaaacttaatttaggtgaacctctaagaatgttgtttgcaatctttttccctttccaagcttttcaatatgtgatcgagatgtgattgttttgcataattgtcattattactttaggtttcagtgtctctttctgaccgtcaaaacttgaccttaccacattagcaactacttttgcacttgcttgacgatgctttctcttttgactgataagggagcaagtgtgagtgttacaataagttcgtattgagaaacgctctgagttgctaacttttgcttcacgcaccgcccatttgcatgacttgtcaatgcattttgtcacatataatgacttggtagattttgcattcatctgaaagaaagccttcatcgcaatatttttcaacgtaaacttcacctcatctttattcttgaattcttgaccaatcgccaaattcgacccatctgtgaaactaaatatatcttcacttatgagttgattttgttggtctgagtgctccaacggatagtcaaatgggtcgatgtgattttcagtcatcaattcttc

SEQ ID NO: 231246 - DNA, 1658 bp, Cannabis indica
tgccacggtatcggatcataggcagatcttgcttgacactgatgttggagttaactgcaagggtcgcctatttaaatacgaaaacatgtgggcaagagaccaacgctgcttctgggtggtgagagaagcatgggctaaaagactacatcaaaattcgatgaccaatttccatagaaaggtgaagcaaacatgcaggaaactgagttggtggaacaaaacacaatttaagaaactgagccttcaagttgcacaagccacttcagccctggaacaagcggaaaccaaccacccggatgatcatctgggtatcatgaaggcgaaaaagcaacttaatgaagcactactaagagaagaaattcactggaaacaaaagtcaagaatccaatggcttcaagagggaggtaaatgctcgaaattctttatggcatcaacgattgtcagaagaaggaagaattatattcaatgtatcaaaagctttgtggagggtgattggattcgagaccccattgatattgccaactattttttggagagctacaaggaattatacaaggatcaacaaaatagtccacaacctatgcttcaagaggtattccctaaacagatagatgataatgataatttatttcttaacgctatacctgatatagccgaagtcaaggcagcgatagatgaaatggggaaggacaaggctcctagaccagatggttttccgccaagcttctatgtccaccattgggacaccgtcaatgctgatttggtggaaatggttatccattttttctcaaagttagaactgcccaattacataaatgatacgtcctttgttctagtgccaaagaaggacaatccggccttgacgaaggattacaggcccatagccctttgtaatgtggcttacaaggtaatatccaagatcattgcaacaaggctcaggagtataattccgaaaatcatatccccaaaccaagcagtgtttgtcaaaggaagatgcatagccaagaacacaatgatagctcgagaaattgtccattccttatctaaaaagaaaggaaagaggggatacatgctaatcaaattagatatggataaggcgtatgacaagatgtcttgggagttcatgttggcagttcttaaccaactcggcttcagtcatacttttacaaaatagattcgtgcttgtatttttgtacaacaaataaaactccttcttaatggggcggtggcagggaagtttgtgccagaaaagggtcttaggcaaggggaccccctatctctgactctattcatacttgtggcggaaacgctctctagaatcctcctggagaatgaaaaaaaaaaggcctcattaaagggtttaaagttggtagaaatggggtcacggttaaccacttaatgttcacagatgacatcatcctatttgggcaagcaataatgaaagaagctaaagcatttcaagagagtcttgacacctattgccaatggtcagggaaatatatcaaccgtatgaaatcttccatatatttctccaagggtgtgcaaagagggaaggatcaaagtatttcacaatttttggggatgagcaaaatgcattcgaacacgatgtaccttgggctacccctgttcagatcaaccaaacgcacggaagattacaaacc

SEQ ID NO: 231247 - DNA, 1321 bp, Cannabis indica
tgtgtgatgataatgagtttactctagagatatttataggcgctaaaattaactacgaacacaccaatgattagattaaaaatatttgaatgagtcactaaactctaacctccctcttcataatcggtcaaagagaacaaatgagctaaatatgaattcaaatttaaactttatctataactaagtctcctaactgcttccatttgatagccacgtgtaggatagtcaaaataaccaaatatttctataggtttctctctatgccatgcatgtgtctagactaacttccaaggattttctaagtatttacttattcaaacttatcaacatcctccacctaaatctctacagaaaacttgttgagagattagtgccttactccacgtgtgagtaagactccatttataatttgatttcttccatgacacactactaggtatgccactatcattattattatttttacagaatattattttactcatagtttacatctattactttgattaaaaataatgaccaaaattacttcatgttacccacgtccaacctatgtggaaatgattctacttcattccatgcattaatccaaaaataccgcatgaataagactactctaagcaattcttatctccaatttgaaaatcggttactactactaatactcaatattacccttaattataccttaataattagctaacttaatcatactaactaactgtaaaactcctactattatttcttttattatcaaataatactataccattacacacgtttaaggaattataatgctactattttataaaacaagtcaaccccatttcacacctaaaaatgttactgccaccactatttatttgctataattattaacatggtaccgtatataacatcaagcagtatcccatttaccaaataaataactatcactaatagcaatagtattacttcctaacccaatatatattaagaccaaaaatgacataactctcgcagctaaaaaaaaagtctaatatattctataaaattactatctccacatcgagattactaaaactatgtactatagcataataattaatattttggttattaccctttccaaggcctatcccacaaatcaatatcaccctttccaatcaagatctctgccccttcttgacagatgtatcgtgcttccgaaattccctgccagcgtcgagaatctccaacatgcttctcaacatcccaagcatcgaataatggacagtactttcattccataatgctcacccaatgtaacaccctaactaacaaaggcgtattacgtgatttt

SEQ ID NO: 231248 - DNA, 4262 bp, Cannabis indica
caagttttgttgtaactaaaagtaagattttttaaagtcttatatatatacacatttataactataatgtataacatcatacattgaaattaaaaacaaaattgctcttatacagaaggagtgaaagtgatactcctacctaataatttttcaatgaaaatgtataaaaattacttacttttttcaagatagagaaacacatgtgtttcttaatggagactccaagtgttggaggaagaatacgtagaagatactcaatatctacatctttttcttcttgcattctaaaccgaacataattcataatcttggaccctaaatcatcagggattccattttttgatatccacaactctaccttttgctccattgtactcccctcagacttttccactttcattaatttagttacccagccagcaaatgtctacatcaaaataaataattaaatgaacaataaaataaataaataaattttgtttgagactaaaataagattttttgtaagatacaatttgttcacaaacctcatcatgacccttgtgttggtgatcaagattagcatgttcttcaactagaaaaaatagatgtttgacatcaaaatctttgccttctctaatcgttcgacttaggcatctattaatgagtttccttttttcagttggaaggccatggtttgatagataagaatctacttctggttgtatgatgcttatttttctccgagcctcttctgatcttgtagtttccaattgcatatatgtctataatatacatatatatacatatatcattatttgttccaataaaaaaatgttagattgtcatggaaaacatgataagggcatgcatctctacattttaagggtttctaaaggtgcccaataaagtagagtgttaaaaaggagtgacccttaatcctttctctctcttttctgttatgtctgttattgaacctagtcctaatagcagttagaagttagtagtcctagttgttagtatcgattattagttagtttgttaagattgttgtatcggctctagcctaaagcaataagtagcattcttgtaactaaggcatggaactaacttttgtacagatttagacacattcaataaagaacacttttctttttctttattttatattgttttatctctaatccgtgttgtgagctttgatcaagctctagtgattctcaacaaattggtatcgaaaaattaagggagagtttgagtccaaaggtgaagattgtgatcatcaactgctcgagaatcaatcctacgaataatggagaatgctaagtttgatctgaagaatttcacgagcaagaatgactttggtttgtggatggtaaagatgtgagctctttaggtacaaaatggacttcaaggcgccatagaaaatgtaggcaagatcgagggaaaagcagagaaggagacgtccgaactgctagaaaaagctcacattgccatcattctatgtcttggggataaggtcctaagaaacgtatcctaagagaagagtgtggcaagtttatggaagaaactcgagcagctttacatgaaaaagtctctagcaaataggtttttcttgaagtagaagatgtataccttcatattgtcacctaagaaatcgattgaagatcatcttgatgacttcaacaagatcattcttgatttgaaaaacattgaggtaaagatagacgatgaagatcaagtgataatcctcctcaattctttgcctacagaaagctattaacatttcacagacattatgatgtatggtaggagctctttaattaacattggaagaggctcataatgccttgatgtctaaagaaattgaaagaaaatcaaagattaaggaagaaatctcagatgaggggttgtatgttcgagatttctagagtgtaaaggcagttaattttgttatagttggttagagtttgttagtactgtttctctctcattactttctgttatttctattttgatctgtatataaactttccagctcattaatgcaagtaaccttttcagcctttccaatcttttccttctctttctctctgttctttgttctttctctctttctatttgttgttcttgatactctgtatcaatggtgagaaaagcttccaacactaacatggtatcagagcctttcccaccattggtggcgaatatggcaaacgttgctggtgctaactccaactcgacacaatctggacctcctccaggcttcttcgctccaaatcgaaccagaaacagagatgatgaatattccccagtccacttcaatcacacattgtcgatcaggctaaatgatcacaatttcctcctatggaagcaacaagtgttagctgccattagaggaaataggcttctgaagtatattcaagatcaggctccaccttctcaatatcttagtgatgcagatcgtgcttctcacattcaaaatcctgagtttctggaatgggaagttcaagatcagctgttaatatcttggcttctctcctccatgatcgagagcttgcttacgagaatggttggctgcaatactacgagacagatatggaatgctttggaaaaacactttacacttcaagtgtcatcaaaaattctggaatttagaaccaaacttcagaacctcaagaaaggatctcaatcgcttaatgaatatctcctcaaggtgaaacaacatgtagatctactagcttcagttggggaggttctctctgatcgtgatcatatagctgcaatattcaaaggattacccaatgaatatgatacattcattatcctccaatactcgaatcgaaggatattctgtagctgaaattgaagccctgctacttgcatctgagtcaagaatcgaaaagacagatcaagaagtggatctaaatgtcaaccttgctgctgtaaaacaaggaacagatcaggagaatcaatggccctatgaagccttcctagctcactttaatcgtaatttcagaggtgtcaatcctcctcgaggtcagttctcttaccatccatctcagtttccctctcctcaattttctatcagtatctaaatagaggatctaactctggctttactcctcgaggacaatcgaccaattactaccctggaagaggacagtattcgaatcagtatggaggcagatcacaaaccaatctcaacaaacctcagtgtcaaatctgtcacaagattgggcatctggctcttgagtgcttctatagatttgacaaaagctttactggtgccacaccagttcaggaaaataccaaacctattcaagctcatactgctcaggcaattaactcagcacaaggatcagacaccaagtggtaccctgactcaggtgctaccaatcactgcacaccagacatgaataatctggctcagcatgatgaatacaatggtcaagaaaggctgtatgtgggaaatggctcaggtttggcaattcgacacactggttctgctctttttaaatctcaaaattcagataaacctttaatccttaaaaatctattgcatataccagaaattaccaaaaatctcttgagtgtgtcaaagttttcttttgataatgatgtcttctttgagtttcacccttttgtgtgttatgttaaggattcgaagaccaaggacataatcttgactgggaacctgcacaatggcctatatacttttgatccaaggcaatttcaggtgcaatctcaacccacttcctcatgttcaactaccaacttcacagatcaatctcctgcctgttttgttacatctagttctagtaattttcaacagtctagtgacatctgtaattcttgtaacaagccatctttgtctctatttgacttatggcataataggctaggacaccctagtgaaagagtggttcactctgtcatgaaatcttgtaatctctctggaattaataaaagtgaacattctatttgtcatgcctgctgtcttggaaagattcacaaaatgccttttcctagagcatctaaaattgtttatactgagcctctacaactcatagtgtctgatctttggggcccttcttatgtcacctcctacaatggctataaatactacatgagttttgtagatgcctatactagatttacttggatctatctactcaaaaataagtctgaggctctcaagacttttcaaaactttaaaaatgagacagaactccaattaggcagaaagattaaagttcttcaaactgactggggaggggagt

SEQ ID NO: 231249 - DNA, 2753 bp, Cannabis indica
aacaacagtataatcaagtttttctgccaagcataaaatatgtttgaattttgtttttatttcttatgcagaatactgaatctaatttctacaacaggaagaatacatattcagaattatactttattctaccacctatctttacttagagaagtttcccttgcaggtataatttttatctaacacctaaatgactcaaattttattgtatttttatatatgcatatggttttgggttcatgctattatatttttatctacttgtctatttatattaggattgtttcaaaggcatataggccaactcttgatttatgttctttctattacttaaatgactcaaatatcatgatacatatatagttttgttcgtgacattatattttactttgctcaactttctactctattaatttattaggatggtttcaaagacatatatttcaacttatggcttatgtttttctttcattttaatgtatcatgatatatacatgtgtttttcctactagaaatgtcaattgataaaagttggatgactatagagaatcagttatcaatagagtatataaaaggtgtaaaggcatttgttgaaagagcgaaggcttatattaatacacaaggtcaagttaggtgtccatgtggcttttgtttgaatcgaagtttccaagacttatatatagttgagcatcatttggtacaaaataatattcaacaaaaatataccatttggtcataccatggagagtctttccagtctcaacaatatgaaaataacgacttagtggatgatggtgatgatgatagcgatgaaatggctaatgtgttagctgatatttgcggacatgatgagtttggagaaacaagtaatgttaacgaggaatcattaaatggagatcctacaagctgtaatgaagagactatcaaacttgatgaattgttgaatgaaatggagaaagagttatatccaggctgtcaaactttcttagcacttaatttcttagtgaaattaatgcatgtaaaggtgattaataaatggagttataattcatttgatcagcttctcgctttattaaagaaagcttttcctcaagggacgaatttagcagaatctcattatgaaacaaagagaaagttgcgaaatcttgggctagggtacaagtccattcatgtttgtaagtatgagtgtgctctattttggaaagaaaattctaagttagaaaattgcccaatttttggtgaaagtcgttgggttgatagtaagggaagtggaaaaaaagttcctcataaagttctgcgctattttccattgactccacgattgaaacgtttgtatagttctagacatacatccaaggatatgaggtggcatgatgccgagagaccaaaagaaaatggtgtgatgtgacacccagctgatgctcaagcttggaaagactttgatcagaaataccctgactttgcggcagaagtaagaaatgtaagattgggcttggcaacagacggatttaatccatttggaaacatgagtctttcatatagtatgtggccagttattgtagttccatacaacttaccaccttggaagtgcatgaaaccagagtcaatgatgttatctcttttaatacctggtcctaatgcacctggaaaagacatggatatcttttttaggcctcttgtagatgagtggaaggacttatggaaaaatggcgtacttactcgagatgtaatagatgactctatattccgaatgcgtgctgcagtaatttggactattaatgattaccctgcatatgctttaatgtctggatggagtactaaagggtataaagcttgtccaacatgcaatgaagaaaccccgtctgttggaataaggagtaaggtagcttacattgggcataggcgtttccttccaatgaatgatctgatgagaacaagtaaacactttgatggaaaaccagaatttaggccaccacctacactatattctaacgatgtgatcttgagacaattagaaaaactacagacaaagttgcccggaaagcacaagatgtatggaggtgttaaacacaatcgttcacttgctgaacttaattgggctaaaaaaagtatcttttttgagcttgattattggccacatctatcattgagacataacctagatgtaatgcatattgaaaaaaatgtgtgtgatagtgttttggggactcttttaagcattgatggaaaatctaaagatagagataaagcgagacttgatcttttagatatgaatattcgaaaagagttgcatctttataaagtgggtaataagtggaagaaacctcgagctccttacacactcagtgttgatgatagacataaattttgccagtttataaaatcagtcagatttccagatggatttgcagctaatttatcaaagaatgtgaatgaaaaagaggataggatatctggtcttaaatcacacgattgtcatatcttatttcaaagattgttatctgctggcattcgaccatatttgaagaaggagattcgtgaggcgataactgaattttgtaatttttttcaacaactctgtgcaaggactttgaatgttggcgaccttgaaaaacttcaagagaacatagtaatcattctttgcaagttggaaaaaatatttcatccagctttctttgatataatggtccatttggctttgcatttgccacgagaggcaattcttggtggacctgtgcatatgcgatggatgt

SEQ ID NO: 231250 - DNA, 1592 bp, Cannabis indica
gtctctgttcctcactttaggagcaccttgaatcagccgtttgctctcaagttagacaggaacaatttctccctgtggaaaacaatggtcatggccattgtaaggggacaccgtcttgatggctacttaacaggagccagatcaagaccagctgaatacatttcagcacctggtgttgaaggtgaaccaggaactctttctgaaatgaatcccgagtttgagcagtggattgttaacgatcaattgctaatgggatggttatatgggtcaatgactgagagcattgccactgaagttatgggatgctcttcttctgctgatctgtggagtggcttagagtccttgtttggtgcgcattcaaaggctaaaatggatgaatatagaactaaaatccagactgtgagaaagaactccatgaacatgacagaatacctcaagcaaaagaagcaatgggcagatgttcttgctcttgcaggtgacccttaccctgaatctctccttgtttctaacgtgctttctggtttggacatggaatacttgcccattgtactgcagattgaagctagagagaagacaacttggcaaactcttcaagatctactgctgagctttgacagcaagcttgataggctcagctccttctctggaaataccaaacatggaaacaatggctctccctcagctaatcttgctaacaaaggttctgctggtggtggaaattacaacccaggaaactcgagaggcagaggaggaaacaacagtaacagcagtaatcgtggaaggtcaaatggaagaggaagaggtggtagaggtggtccaaaacccacttgtcaagtgtgtgggagatatggacactctgctgcatactgttacaatcgatacgatgagtcgtacatgggaacaacaccacctggaagtgcaaatgaaaatagcaagcctggacaaaatgctgctgcctttgttgctactcctgaaatgcttcaagatgatgcttggtatgctgatagtggtgccagcaaccacattacctctgaagctgggaatctgaaccagaaatccaagtataatggtaaggattctctaattgttggtgatggtaataagctatctattgagcacattggatctggttttatgtcaactaacaatgacaacagccctcttgttctgaaggaaatgctgcatgttcctatgataactaaaatctcattagtatttcaaaattaactaatgacaatgatgttactgttgagttctcatctgattattgttgtgtgaaggacaaccaaacaaagaggaaagtgcttcaagggaagcttaaggaaggactctatcagttcgagccaacctgtgtcaagccatcaaacaaaacctgtcaaagtgtctctgtttcatcagcctctcagcccaagcccacatgtctgtctgctttgtcttctgtttttaatcaaagtgtaactcagtctatgactgataatgtgtctagtttaaattcaattaaggacaaatggcataggaaacttggccatccctccaatcatgtgttgaaccttgttttaaatcaaatgaatattaagaatgttaagaatgat

SEQ ID NO: 231251 - DNA, 1423 bp, Cannabis indica
aggatctatcacaactactagaatcccaatacaccatcttctaaaaggtctctagctttcaacactgagatgatcaaaatttgggaaccctaaattgttcccatgaagacaaatggttcttcaaccttaggctaaaaagtcacagtttttctcttacaatctatactagttgcatattttgacaaaaaaagtccattccaaggataatatcaaaatatcctaaaactagctcgacaagatcagcactttactctcgatcatccattctgatccatatatacctaacccctctcttggagacaactaactctccactaggaaataggattccaaaccctatcataaaattatcacaaggcttacccaattcgtcaattactttggcacacacatgtgagagtgtagctctaaaattaaataatacataataaaataagttgttaataagataatgacatatcaccaatgaagggctagcctcagcatcagcctaagtaatgacaaacactcgagctagcgtgggttttggctactgcgttggttcttccctctttagttatggacaatcccttttgtagtggcccatcaagcaatattggaaacatctcatgcctttacattcacccaaacgatgcttcttacaactagggcattttgggtaagtgtaacggccttcagaatcaccctaacaaccatcgcaatcctgattcgcttagaatctcttgctctggttccaaccgtcggatgctggtggagcttttctcttatgatcaaaggttgaatcactaccattcttaccagatctaaaaagtaagaggagaagtgactccaccaataatgtgattccctcgaggctcttgaataaactcaactgcacccttagcacataattccttatctaccatctaagataggtagtggcatcatctatggtgatcatcagatcatgcttgattttagggtgttgaatccatccatgtacttttctttcttactaaagtcagtaggtgcaatttctaaggccaatctagcaagcctgttaaactaggtcgtatactcagttatcgacattgattccccttgaaccaaatgagtattttgcattgaacaaatcttggaactactcttaggtgattaccaaaacatctcgagttagggataccatatcccaccataccaaggcatcatcttggaattgaaagggagcacaagtcacaatagcattgttagtgactcccataaaattcaaattttatttatagtagttagccattgcttggccttcatcatgtcaaggcctcccaggaaaattggaggtccttacttcctaaacctctcatatagtagctttaatcagttactagtaacaactgttcttctagaaataccaaagctataaagaatggtacctgaggtagagaca

SEQ ID NO: 231252 - DNA, 1104 bp, Cannabis indica
catgtgttgtggaatccaaagtggatctcttaagattacaatgtgagcatcgagttggcaaatctcaagtgagcgagagagtatacctatggcctatgagagagaagggagagagagagttgcattttagacatagagcttcagagctttagtgagcttagagccttaggacttagagaattagggttaggctaatgctctctatataggagagctcacatgaagataataacctaataaccctaaaaaatatgaactacatagtattatttatataataaaataatggatagtaaataggtcaattatccctcaagaacaggggaatagctaatattttctctcctattttcgtggatgttgaagcccaaatcatcgcttggcttgttgtcttggatgaaggctgcgcaccaagtgcctgctaagtgcaggctggggtctggccgaccatgtgcttgccagggtctagccagccatgctcatgctagggtctagccagccatattcctaccagggtctggcaggtcatgttaagttcctgctagggtctgaccgactatgttcctatcaggatctggtggtcaagtgcttgccagcttttgcaagtgttggccagccttagcatgtgttggccaaccttagtaggtgttggctacctttaacatatgtgggtcagcctttgtacaactttccgtacaaaggtcaggcttccttggtcaaacagtccccttcttggtttgacagtcacctttgggcggccagtaggtgctcaaatcctagtcggcctatgtacaccttttggtcgaccagacatggcactactataaaattgggctttagagaccgtttttaaggcctttcaacatcggttttggcaaaattcgataccgacgctattccaggtgacgctaaaagagttaaaaataactgacgctgtagaaaaaaaatagttgttaagtagttaatttattactaactagttactaatgagtaactagttagtaataaacatacatgaatatgaatgaaaattagtaacttgttaagtagttgtagctaactatttactagctactaaaaaaataaaaacacatgaataaaatt

SEQ ID NO: 231253 - DNA, 1494 bp, Cannabis indica
gttgtttgttaatattaaaataaaatataatttattttttcaaaaaaaaaaataagaaatttaatcattatttattttaaatatttttattttttttctatatataaacaataagtcaatatgatttttgtacaaaaaaatttattatactcttttaaccaaaatagttttttctaaaaattggattagagcagctttagcttttagttgtagctccaaaaattcttcaaaaagctattttttgattgcttaccaaacatattgttatcacagctttttcaaaaagtaacttttagctttttcaaaagctgtaccaaacgagcccctaatatggtaagtttgttcatattttaatggtgactgagttaaggttgatttttagtatttttacaattgattcttcacaaaataaccttaactacaagttgttgttcatcagttcaataatagttggttaaatttttcttattaatattcaaatatatggttcattcatagttgtgaatacgttgtttatgcgttgtccaatattcgtcttagaaatatcttataaaaaaaaattcagggattaaaattggtgatgcaagactcatataaagaaaaatttattattgtaagtttgtttatattaataaaaagattttttttgttgtttttaagttatttaatagtcgcctaacaaaacatattatagaaatatctactgatgtaccatgtattatcaacctctgttgtgttttagttgccttacaattgtttaataattgattgtccatacttgtatttttcaaaatttcaagaaatgacaccaattccatttctgatacagctcaatgacaatttatgcgctagtcataacctttgattttcctttttcgtcagataggttataaataaaaaattacagttgtttgatccctttctcgtcagaaagttttgatcaaggcgttataacgattcgaccccttttctgtcaaaaaggtttggtcagggagttataacagttcgaccccttttccatcaaaacagtttggtcgaggcccttaaaagttttcaaaaaaatttattttttgaaatgatgggtttgcatttgtactatgtatttccagattaattccggttaattatacatatatgtccctcaagtaatttcaaagggtttacgctttataattacttgtttgaaagaaatgattattttattcacaacttaagttcaaaatatttcatcagcaatgtgatttacaataattaatctcatgagaacttccctagttaaatcgtttattttatcaatcttccaggagcacctggttttgataaaacgagttttgatgtccagggtcaatccctcacatactccctcaattgtttcaatatctagggtcaatccctgacatatcccggggctccaggtgaagtaatcctggttttgtctttggctgctactggttgacaaccaactttcctcatgacagcttgatatggaaacca

SEQ ID NO: 231254 - DNA, 855 bp, Cannabis indica
caaaagaaaaattcatatagtaagaagaaaagaataacatggtaatattatgtaaaagaagttggaacaacataaaataaatgacaagagtttagctagggtgaaacataatccattggtccataaggctcaaataattcagcaaaaaagcccttctttcttttggggttccaacccatgtccttgcacaactggtcattgtaccatacatgaatggcacctatgcatgatctcctgtagtactgaccagaataacgtctcttgtactcatcccatttaccaacatcttcttccatttctttgatgctaggtagcttaaaagtcccgtcgatgagctccgatacccatcgacatctcatctctgaggtgtacaagtttgatacactttctgagaatccaatcaccgccagctgtggaatttttggatgaacacattccctgataagaatgaaatgtgacccaaatgagtattgtttaagaattaatttgtagaaacataggctaattaagattttttttcccgaacacatctacaaaatcatgttttttgaaccattttggccgtttaaaattctccctaactattgagattgttagatttaaggacttttgtttaattttagtaaaaaaattctaacatagatgaaagttcaggagcataatttagtacatatcaaagtttgagtggcatgatttggtagatatcaaaatctggggagcacataaacaatcactaaaacagtaaaattgaatgaacttagacaaaagtctttaaatctaacaatctcaatagtttagggaaaatttttaacagctacaaaaattcaagggcatgatttggtacatgttaaggtt

SEQ ID NO: 231255 - DNA, 1989 bp, Cannabis indica
tcgtaattcgtgtgttgcttaagggtggtaaggcgtgctttttactggtgcccttgagcttgaatcactgttttcaaaaattacttaataagaaaatgtgatcttgatcaaaaattatagattgtggaagaccatgtaaacgaaaaatcttagtcatgaaactcgcaattgaagattcatatggaggtgcctaaaaataaatatgtgagggtttaggtctaaaaaagacaatattatactaattcgagagttaaggtgaggtgacaacaataaagtagatcaacagcacccaatatatacatatcttgtttaagacatataattaattaagaggttgtcaattggggcaataatcaatttatttctatttcatgcttacatatttttgaatattaatgcaacaagcaccttaaaggaaagattaatgttttataaaagtagaacacttgttaaaagagtagtgttgtagaagttgaacattacacttgggacaatttatgagtaaagatggcctataatgaaacctatatgtaattatatctaagttaattagtgagatcacttatatctaattaaacacttctttgtttttatttttggtatgttactatgctcttgagaaaattgaaagctgatgttgctccacttatatcttgtgacttaaatttttcttcttgcatctcaactgtcacaaacagtcaactccatatcaagtcctttttatacttaaacactagtactcacttctttcaaattaaagtacaaaattctattatttacattaagaaatagaatttatttaagtttgcttcttttatttatatttagttgattaaagataattgtaacaacttaatgtgtaaccaacccaaccatcaaattttttagttgtaccggagaagcacaatgaaataccattggatataattgtgatgatctttgtatgcaagacaaactctcgtagaaaagtaaaatattataaaacattccaataaatatatattgccagtttttcttccatggttttttatcctttttttctttaagacaataggttactcatgttacctagttgttttaaaaagagaaaaatacataggggcttttatacaatgtgttcaaaaatgacttttttcaaaaaagaatatatgtatatatatatacattgtatggaaaagttcaaaaaaaaaaaaataggggagaacaattaaggtaggttaccagttaccttcttaggggaggaaattatatggtatactcatacttgttttaatttttacctccatttttataatctttaatatatacccacttttatagatgatgtccctattaaacccctaagattaatgtaaattatatgttacacttaagtaacgagtgagggtgtattgggcaatccactcaaaaaagtgggtatatattaataaaatataatataagggtgtttttgattaacaggtacaaaaaaaaggtatttttcaacttatctctgcttagggtaactaatttcttgatactgtttccctatatttttaactttttttaaaaaaatcccaaaaaaaaattttttttaaaaaagcaaacatatttatacaaattatgtcttaaaaactataaaaataaaaatcccccttttaaatattgatgaggcactacccactaatcaattaccactattaattttttttattagtgatatgatggtaacttattattaatgttcaaagtagctaagtctatattggcataccattattttaaaattgttataatttttctaaaaatatatgtgaaaaaaaaaatcataaaaatgtacaatttagaattatagaaatagccataaaaaatacacaaaattgaaagaaaaaattacatttatcaaacttattaagaaaaaaaataacattttatgtaatttcctcaagaattataggtatcaaaccactagaaaccctaaacaagaccttttctctttttttttttttg

SEQ ID NO: 231256 - DNA, 652 bp, Cannabis indica
aaaaaaattccaaccctaaataaaaaaattaaaaaattaaaaaattataaatttcagtatgtagtgtaaaaaatccttaaaataaagtggatatacaatgtaatttcttgaaataaataaataaaataaagtttgttactttttattttggctgaaaattagttttatatgtgatagtatgttttatcgctccacttatggcatgtttactaaaggggaatgggaatcaattgtaagggattgattccattcatttgtttactaaattttggaatagaagaaattagtgggacccacacaaattaaagagaaaacaaaaggaaaggttctccctccattttcataaggaatatctttccatttccttaacttactttatattagttatattttgggaaatttgcggcaaaggttgtcaaaatgttcactttgttacagattagtcctcaagctcgagaaatagcgacaatagttctcaaggtcaaactttttatttgtctgttagttctaattttaactgagccgtttatttttaaaaaatttccatgtgtcgaaatattattggtccaaattattattttaattttaaaaaataaaaataaataaataaattatttaaaaataattttcaattttctttttcttttttttt

SEQ ID NO: 231257 - DNA, 940 bp, Cannabis indica
gcttcaagcacttcctccctcgtgaaagactccattaacttcatgaattatcctcttaaacaagaaataacatatgcagaaaatattataaaaagtgaaattatattagaaattgaaatactctgaacaaattgtagtgtggtatttcaaggtagggggagttttgagattcgttgggatttgcctcgccatggaagaattgaacaaattgtagtgtggtatttcaaggtagggggagttttgagattccttgggatttgcctcgccatggaagaattgaacaaattgtagtgtggtatttcaaggtagggggagttttgagattcgttgggatttgcctcgccatggaagaattcggacaaatgtagactacttcaaaagatggagttggtgcagttagagttgtgatttgggacaataatggaggtattatgccttcatgtgctagtgctaagaaagtttcgatcagcagtgttttgcagggtgagaggtggaagctgcagtttatggaatggagcttcttactttgcttaatgagcatgacattgtgctatcaattctcaacaacctcccctttccaacatgtctatttcttttttaaaacttttagatctaatttcagtttctactgcaactcccagtattgcaaaactttaaatggcgcggctcagatcagagccaataatggctttttgaatttctgggaagtgagtccctacatgctcaccaaaattttatcgtctttctaataaaactttgaggtattttagtaaaaaggaaaacgaagattgtagatttaatttgaaagtgttagtgggatcttctcttctgttatatgattcattttagttttgaataactcacgttatatattgaataaagaagaaaggttcaaaggcatagaatgaagaccaacatatgaaatggtctaatgaaaaat

SEQ ID NO: 231258 - DNA, 836 bp, Cannabis indica
gagaccttctccgatggcttcgtgattctcactggtttagtagagtcgtcaacctcctgaaacgtggttggcgcctgagatgaggaatccagtagtgccgcagttgacaagccatgtcgctcaaacatggcgtcagtacgcaactttagggatctaatcatggatcttacgaactcacgaagctcttcgtcagtaatattgtggagctctcaatgaaatctctcggtgagattctctcaatgaaagcaccaattgatagataatagtcctcttcgagacaggacaaatctcctaaaatgcacttttcgagtcagtgccaaactccaattgaacttaaagttctattttctcaatctatatctcacaatagccttacaattacatatttatagtgattcacactctttagaaactactaataagcccctacactatgacagtatcgaagttagaatttctttgctcttatattattatttttcattatttctttctagtattgttgttgtttggatttgtttgccaaaaaggtgatgtttgaaattggcaactggtttggtctgacttactggctgattgatttcacacaatgaaaggattggtgttcaaattctatgaacagattgtaagacaagcttatgaattctgtaatgactgctgtcatttacttcctgtggtagaatataaattgttgtagtcttaaattgtactgcagtgttcctccttttgtgagcagggaaattaaacttgctataaaatatcggtttcttagcctttgcttaaacaatttgaaagtgaaagatttgtatatggaatgtaattaacttgtttagcta

SEQ ID NO: 231259 - DNA, 875 bp, Cannabis indica
acccggtgtttccccttacggatcacgggactactgactgtcacaatatgggtgatttttaaaacatggaattaaaaaaattggttactgatacctgctcgaactgcataggaataacactcgaactcaatcttttcaaacaagtttttttgattttcgggtgcaccaagtttggaccgaacaagtgcatcgggcctttatgtgcagtcctagaatgcacaatatactattgtaaaaatttaagtatttataattatatttttatgtatttttaattaaggtagaatatgcatttaagtccttgtaagaaaaatatacgggtacaattcgaacgcgacacaaaatattaaacttttttatttttatggtcattagagattgtcatgggaagttaattgaagttagttcctctttgcactctggggtttgtcagccggctgtggctgagatattgagcgtcaaggaggcccttaattggttgaagttaaagaatttctccaatgtattagttgagacagattgtattgctgctgttcaagctcttaatagctcggttgctcttccatcagtttttggtttgtttgttcaggagtgtcaattgattctttcttctttacatgatgtttctatttgtcatgttaaacgatctgctaacaaagccgcacattgtgttgctcgcggtacttattttttgtctgatcgtctttttactgagagcaatgttccttctgcttttcaatcaattgtaatagcggatatttctatttaatgaattactttttttcaaaaaaaaaaaaagaagttaactgaaaacgacaagacttatttatatttgtagaatgtcaaaaaaaattggatatttagatgaatttaaa

SEQ ID NO: 231260 - DNA, 864 bp, Cannabis indica
cctcgttcaacgaaaagaggcctgctggtgaggtcatcgatctttctgaggagctaactgctgcaaagggtggggtctgggctgggtcagaggtgaagctgaacaggtgcgggcacctactccgcctttgccggtgcttccagaggccaagaagggcaaagagatgcttgcccactacatgaaccggctggttcctgaggttagtgaccaactggctggtgctgataatgattcttctttagagctactggtgggcgaagtcttcaaggagttcattggggtaagtctttctgaacacttccctttaatcttctgtacttagctcaaatactaaagttttttctttgtgcaggccggtctgaagttggcctacacttactcccgagctaagtctgccgcttccaggagcacgactgtgtccaacaccatgaggtcggaggtggacttggccaggaaggatgctgacgacgctaggatggaacttggagctattaggatggagttgggcgaagccaacaagaagttgtttaccgcccagaagaagataactgagctgactaatgatctcgaggtttctgatcgtcttgaggagaccatcgagaccttatttgctgaagtgaatagtcttcaggatgagaggacttctcttcgagcagttcttcatcgggttgaggaggagaagaagactaaggagaaggagctttcggtcgaggtggcgaggttgaaatagaaggttaatgtgttaggttttatgccctaaataaaactccatttcaatgtaatctattttattcaacatcaataagaaacagaagtatttttcattcatttgtgtatgttttggctcactttatcaattgcttg

SEQ ID NO: 231261 - DNA, 1554 bp, Cannabis indica
cactcaattacttttaatttcccatattcgtttttaaggcgggaagctgaggcgtctgaggttttcttgagatagttacctcttttcgtgacttgcctataaatgcccacaacattggcacataaactcatttcatcacccttctttgctaagtaagctccagagcaaaaagaaagttttctggcttcaaagttgctgaagtgccttcatacaactgctggttggattgacgttgcttgaacccagacacttgaatcttgagtaagtttccaatttcctttatgcttatccttgcatgtttacatatcgaatgcaatgtttactgtgctgtaaaaaaaatgtttaggaaaccctagggttagaaacttctgcgattcttctttatcatgtcttcatgtgggtttacagccacagagcttgtttctaaactgcattgcgtccgtctttcatcttgcttattctaagcttcatgaacttttttgccctaactcaagaaatttttttgacttcttgagttctaacttttctttggacatagtcatcctttaatttgttgagtactcctggtcggcatatttgcttgttttatcgtttgatattccgtccaacactcatctcgtgtgttgtcttttgtagatgaactcaggtgagtcttgggaacttggacatcagatcgacaaggatttgcttcaacttctgcacgaggatcaccctcgtcttcgttctagtcctccttctagtgaaggacattcttctgaccttgtacccagccataggatgatggctcatacaaagaaaactacgggtctagccgacgctactgatcctcaagtggctcggcattccactctgcccagtgccgaacaggattcggccgtctcgatggaggaggatcatgaggggggacgctaaggtccaggaggttgaggagctggatgatgcgcgtccgggcagtccttctgaggcggagggagaggaagaggtcgaaccctcaaattacagggagtacaacgaggttgcgcagccagtcgatgctgacggagacgtcccggtcgagggcgttgactacgtcagtgaggagcttgctgcggtggttcctcataggaggcagggtgctttgggcgccaagtgggtgagtcctccgtccaagattacggaggcatgccttcgaactctggactaggacgggtacctgggtgagctggactgctacattcccacccacactaattgtgccacaaaccctgacaaaaggatgtgcacctggtcgggggcccatggtcagcaaggagcgttgatgcccttgcacaagtacttcaaggatgtggcgaacttctttggtccctgcccgacccaaatcactcttaaaggcattaagtatttgtccgccctcttcgtcctctacgcttcccaaggatggggtactctttctccccacgaggttgcctagttctttgatttgaagtccacccccaaacaaggtcggtcggggtacttctatttctctcagccaggcttcaagtggttgaccggcacggatgccaaggccatcag

SEQ ID NO: 231262 - DNA, 2579 bp, Cannabis indica
ttctaaagttatttctccgatagtttctatgtgggttactatacattttttagttgcaatttaagtttgctccgctagttgcaatgagaatttctatatagaatgccataaaaaaatacaaaaaaaaaaaaaactattttaaagtgtaaaaataaaaaaaacccaaaatatatcctaagaaattttaataattgcgttcattgatatacttggtatattaaaattttctttattttatcaaaaattaataattttttttttaaactactaaataagtaaattaatatatcaatataatttatcggagatgatactctgtcggttccaacaaatacaagcaaagagttccgttaagttcatgagcctaggtttatttcataaatcattttttctagctgttcatgagatgatagttaggttcttcaattttttaaaaaaattaattatttaatttttatcttaaaaaaattaaatatatgaattaaacattgagaaaatgaataaactaatgaaaattgaggtatttcagtcttatatactaagtaaaaaaattaaactcatgacattattttataccattttaaaaaaatataagatatgaatttaaatttaacaaaaatgaatctaaattaatgatatttatctttttatatcatgttcagtatttatcatttggtatctaatttattttctaataatttattattaaagaatgttgacgctgaaaaatggccaacactaactcgttagattgtcgagatgaataacgagtttaaataaataatatagagagacacacaacattcatagtagttcactacccatgtcgcgatggtaatggagccacgtctacttccagtttttatttcttacgacaattacaagagaattgactaaggaaagagctaagatttctaacgagagaaagtagagagagatgctctgaccttatggagacttaatagaatgtaaaaaatgaactagtggagccttttatagggaatgagtacctataattcattaagtacaacatcgataggagctctaattctagaaagttactagttcaacgtacaagctcttcaaacattattagcataaatttcatccaatcatataatacttacgacaacatagtgagaggggtcttttttgatcttttgtgtgtatactattagtatccattaggctaacagatgatcagatctaatatatttgtaacgttcccgcttcaagtctctattaggccttccaccacaaacatattgctcatactcagatacgtcactctggtgcttcctggaatgacgattgaccctacataccaacacgagtatttcgagcatgctttgtcatcactcgcatgcttcttgggaaaaattccttggaggtcacccatcctaagagtactccaagtcacgcatgcttaacttttgaattcttaagggatgggccaccagaaaataatatgcaccttgttgatataggtagtacctattaatccatttaagtcctattaaatggtgtagtcccatacctacatagtctcagaatcatcacacttgacctttcccaagcgatgtgagattgcacaacttacacgatatttcctcttacggatcaagggactactgactatcacaatcagcctcttacaagatccaacatcctcgttgagtacacttctagttgggtcaagactctgataccaactgtgacactctcatatttttccttgcttttcaaaaataccattttaatacgtatataacttgaaaaggttcaaaactacttaaaatacaacggtaggttatagaaatcaaaatgcagcaaagaagattaatccttcattaataaagtaaaatacaataagtaaatgattttaaataatacattaataatcaactgctaaaaataaaactaaggcactaccgacattctacattgcttgtccattcgtagcccctcgtaatatacataccaaaactcaccctactcactatacgtactaacatttccctatctaatacttgtagggggaaagtaaggaggtgagctaaaaacccaataaggaaatggttatcctacaatactatacaataccacatatatcttatacctattttataaccataaccaaataatgctacacatggaaacttttatcatataggtctataactattcacaccatacacatgtacaaagatcataacttgaatatcatactcattacataatcatactgatactataaaataataatgtcgacattatcataatattggcatatcatagccattacatacataatatgggcctaacctagctttaaccggcccatacaataacctagggatatgcaacaatattgtatcataggataggatatctctacattcaataacaatattgttgtatcatacccctaccataataatctcatacacaactcaaaaaatgcaagataaggtatgtctacattcaacgaccttaccttgtatcataccccaccatgatccctcactttacttgagaaattagcatacaaatacaacatacaagatatacaagtcata

SEQ ID NO: 231263 - DNA, 1653 bp, Cannabis indica
ttgacaagcccgcgggttcccaagcccacgacaattccaactaatacaactcataatgcttggtgggcctggaatccaggacccaccacattcacattttttgacccactttccatattgacatctacacggcccataaccacttcagtatcaattatcacagactcattcccatgcaataaggagtcgttgataacagcttgatttttgtcaattgcatatcttttcctttttaattcagcattggtcaactcctcatcatcttcctggctatcataaatgacaatttctttttgtctgggcattgatttcggacggttggctggtggaattcccatagaatccgtggctgatctagtggcaggattatctccacgatttgtgggatgtggagccgattgtggggaacccgtggatctgccaggccggagaaatggagatgcagaaacttgttggtgccgtcgaggcgttgccttcataccgatcctgtaagatttgacgatggagcttgctggtgtgtcgaacaatcgggggcaaaacctttcggagtgtcccataagaccacagataaagcaaaagagtggaacatattcatatttgaagacagcgtagaaactttctccgtcacgttttcagaatttcattcttcactttaatggtttatcaagcgataacgtaacccacaccctgagatattcgcgccaaactccgacaaaattgtatgggtcagattcaatgaacgttcccatgtaattaccagcatcgcgaaccaccttcatcgtaaaaaacccagattgcagctcgtggatttcaacccacagatcaatggagtttaaactgagggtcctgggattatcatcgtctttcagtcgagaaaaaatgatttgttttcaatcatatgtccaagggctacctgttataacccgctgaatgtccacttcgtgatagaactgaaataaaaatcggttttgatcaagttgtttgatgtacatacctctcccgggcttccacagatcagccataacattttgaaacacccaaaaatctgatatctttcccatgagcaaccggccaacgagacaccaccttgtatcaatggcttgttcgtcgtcatcctccccggtattgtcaccatagaaaacttcatcttcctcttcttccacaatttggatattctgccaacgatcctcaatctccttcatgtgactgcttgacaccatggaacaccaacaatgaaccaggaagatggtcgggacgaaaacagagcaaaaacaaaaccagggaaacagagaaagacaaaacggagtgaaaagatctaattcaaatgatcaatcaaaaacagcaaacagacaaagcaaactttttgcatacattcgaaccactcaaaagagagagactttggaacatccttttagtttttgttaacgttagtttttttagaatatagttttcttttttaaaatgttgtaaaattctctatatataaaaaaataaatgctataaaataatataaaatagagtaaaaagtaagagaagaaagaaaacaaagagaaaaagaacttgatagaataaatgagaatttctcattagtttattccaatatggtaaactttttttttatgaatcagaaaacccaaaatacttatgaaaccc

SEQ ID NO: 231264 - DNA, 958 bp, Cannabis indica
ttaaaaaaaataattttaaataataagtgaatataatattataatacttaaaaatataattatcaaattcctaaagaaattttttaatctaaaatagatataaaataactattagtctacaatatatccttataaaaataaatataaacttgaatgtaccatcaaataataaaatataattgactaatttctattattataaaccgtccacataatttgagcaatacgatctcaaacacgtgctattgccgcaacagattcatcaaacaaattaacttcatatcttgacacactggtttcacatccttctatgttgtcttcactctcaagtactttttcttcccattctctaaacatatgatcatattgggtacgttgtcgaataaaattatgaagtgtacaacaagcaattactgtcaaagttagtcgactcaatttataaggtggcatcatctttaatataggaaaacgagctttcagcacaccaaagcaccgttcaatgacatttctaagtgaagaatgtctataattgaatagttctttcatgccacgcggtccattacgtccactattgtattcttttaaatggtatctttcaccgcgatatggtgggagaaaaccttctctacatggaaatccagaatccaaaacataatatcacctacaaaagaattaattttctataagcaccatcactaaatagtaaaataataattcaattttagttacaaataccttctttaggcagtggaaacttatattcaggtgttgtaattgcatctatgaacaccctggaatcatttgcagtgtcctcccaaccagcagatacgaaagtaaagaacatgtcgaaattacaagcacataaaacattttgcgttactacattttttcaacctctgtaactgacttgcttatctacaaggacatgcactcatatgtgttctatcaattgcaccta

SEQ ID NO: 231265 - DNA, 1120 bp, Cannabis indica
ataaagccagccttgtgccaataaaatacttattcgagccaagcatccacaccaaagaagaagtcctcatactcgatacaactcaataacggatgacccccatagttgcttacttagaacaagggacactgcctacaaacaaaaacgaggcaaaaaaaaatgagaagaaaggccacccggtacctaatcattgatggtgtcatgtatccacaagggtactcagtgcccctactacgatgtgtacatcaagaccaagcccaacgactaatggaagacgtctatgaaggtttctgcggtaatcacgctgggggcaaagcttatccaagaagatactaaggcaaggattcttctggccaaccatgatataagactccatggagtatgttcgaaggtgtgaaaaatgtcaaaagtttgcaaaaataccaagggctccacccaacgagctaacacaaatgcagagtccatggcctttcgctatatggggtatagacttgatcggtcagttgcctaagggcaaaggaggagtgcaatatgaagtagtagcggtcgactgtttcacaaagtagacagaagccgagccactagcaactataacatccaagaaggtgcttgactttgttgtcaagaacattatatgtaggtttgtattaccccataaattagtatctgacaacggtaccaatttgacagtgtcatgttcacaaatttctgcattaaacatggcatagtaaagagcttctcggcagtctcgcacccccagttgaccgggcaagtagaggtggtgaataagaccttgaaggacaccttgaagaaaagactcgaagaggcaaaaggaaactggccagaacatttacgcgaagttttgtggtcgtatagggcgacagaaagaacagggactggtgatacccccttctcccttgcttatgggtatgatgcgatgataccgattgagctagacccacccttccaccgaagaacgacatacaaccaagtcagtaatcaccaactaatgggtgaatcgttggacctgttggagagttgtagggaggcctcaaaaatacggttagcagcataccaacaaaaagtagccagatactttaattccaaagttaaggaaaga

SEQ ID NO: 231266 - DNA, 1542 bp, Cannabis indica
ctgattaaaaaagtgttaccaaaggcacctaccatgtttggacctaattatccacacaagttacactcaatacccatactgaacagtgaacacattacaaaatgccctagaaactattgtgtactcaaacagaagaccaaaacaaaagttggatagaatcatctccactctacacaagccactatgccacaaccttcgtgttgcacttgaaatatattccattgtcattagactttatacatcattctatccaaggtgggttccagtgatctctttcacacccaaacaatttgttcatctgcattctttttaaagcatctgagtcagaggtgaaatcctcaacgaaaaccaccactgcataccttcggtataaggctacatcttgcaagaaaggaaaaccagctccaagaccaattttaccgcaattaccagcattcaacgacacaatcactacaagggcctttactaatgggctcagaagtcttttgaaggctggtctccctacgaaatatgaacctttacttcacaatggagttaggactaaacaacagttcaaatccaaatagcccttgttgccaaggccccaacaaaactcactttgatgctgctagcttgaacgtctcttttgtattcccaagaagtcctctcaaatgcaggcttactaccaaggaatacttatgtttccctatgcagtttgattacacaagtaatgtgtcgcaaggactatggcagccatctactggaacgaagctctacaagctgaaatacgattacaatgtacaaattgtattgcatgacacaagtattgtcacagcagaagaccatcccatgcatcttcatggataccatttctatattattggatcaggtttcggcctcatcaacccacaaagtgatcctgctaggttcaacctctttgacccaccacagaagaatatcattggaactcctttaggtcgtcgtgttcttaggcttatgtaatttattctttaaatgaaagaaaggattacaatatcaaagtagagggtttcatttatttttttctaagattctcacctaaccctacaatatttggggactcaaccctcaaacatatgtgatttctttcagaaaaaagactggaaatttaaaaccaatattcattattcatacaacatagagttgaagcatccattttcactatacaaaatttttcaccactaaagaaatcaagcaacaaacttaaagacaacgagtatcattatgtatatagtgttatattattttataatataataagtgtagattaaaatgtagtaatatatattattatgtgaataatatgtattatgtgtttggtaaataaattgtgtaacatataatttatttaacctaaaattgtaacctacactttataacatggagaagagttacaaagttaattgcttttgtaacttcttttggttgatcataatattgtgtaataaaagagatgttacacaatttgatgataggattcaaatggtttgaaatatagttgttacaaactatattaatgctcat

SEQ ID NO: 231267 - DNA, 1126 bp, Cannabis indica
aaaaaaaatagtaattttagcattcaaattgaagaattttttattaaaagttttatttggccagagaactcgagcgtcaaccgtaactgccccacccttagatcggccttacagcaagggtatatgaaagaactaatccaacaatagtaaaattatgtcattgacactataaaatcatcaacaacacaatcaattaagttatatttcaattaatagtcttaatctataactaacataaccaaaaatataagagtaattaatagttattgataagtaaagattgtaaaaagaagatttgatttgcttactttgatggtttggtggatcgaagaacctgtttttagtattttatatattttgataaaattgggaatattttttctaattatattgaaatgaaaacattacatatatataggcctaaccaagatatgaaaatcccaaaaatactcctacataaagtagttatagtatctattcaccttttaaaaaaaaatagttgtagtatctattctataacttttagaaaattaattatgaataatttaggatgttaaaaaataaaatattcagacaattgattaatgttgttgattttattttttaatttctttttaaaaaaaattgtttgttatcagcaccacgtgaccttattccattggatccaaccatgtgatgccatttgtcttagctatcaaaagtccactattttagaatagagtattgctattaggcaccagtggtgcctagcacctttgcaacatgtcgcgttgcgattagctagctatatactccctaaaagctattatattaaattatataggacccgatacttagttggaccaatagtgatattgacacataggagagagtgctaggcaccactggtgccctttaacatttctctttagaatatctctaataagagtattgttagctgttagaggttagtggtgcttaatattttctataaatgacctaaaacaattagttagaaatattctctaaaaattatttttttaagatatattgggctcgatacttatttgcactgatagcagtataatattgaagagattgctaggcaccactggtgccttttattaattctctatctctaatggtg

SEQ ID NO: 231268 - DNA, 1501 bp, Cannabis indica
ttttactgtattatatatactcccattattcatgtaattaatcactgagaaatcaaatacaatacactatatcgcatactgctgctattttcttgctctgctattcctctgccttattttactctgtttcttatcttttaacttggtatcagagcgggtatggcttctccaggcaattcctcagtcaacaatgccagatcccaagctgtcgaagctcctcctcaagctccagctctcgcaccagctgcaccagcccagcccgtgcctctgctgcaaccattggcacctattagcattcgtctggacagggatactatccctactggcactctcaagttgtcccagctgttcgtgcgcatgatctagatggttctctttttggcacaagaccagttccacctcagtacattgatgttcaagatgaggtaaaccccgatttgaagcaacagcaggtaaaccctcaatttactctttgggttcgcactgaccaagactttttaagttggcttttgaactctatttctgaggccatgcttggccatgtattacggtgttgagtctcttatgaactctggtcattactggagaatctcttcaccacacaatctcgagctcgcatattgcagctccgttttcagttgcagtcactaaaaaaaggatcgatgaccatccatgactacatcctcaagacgaagtccattgctgatggcttgaactctgctggtcaaacatttagtgatgatgaccttattttatacattttagggggtcttggagctgaatatgactcagttgttattaatcttacctctcgtgcagactatttaactttgtctgaagtgcagttccttttacaaagtcaggaaatgcgcattgatcaactcaacaccactggtgcaccagatcatgctgccccatctgccaactttgccgctcgaggaagaagaacctttccacagtctaactcaggcagatctgctggttctcgaggccgtggccgtggacatggaaaccaggggcgtataatatgccaactttgcagcaagcctggacacccagccagcaaatgttactaccagtttgacatcaacttcacaccaccagcaaacaacaacaacaaccaaaaccataatcaatatttcaacaccagcaacaatcatcacaaccagaaccagcaggcctttgctgccaactcaaatcagaacactcggcctgatgacaataattggtatgtggacagcggagctactaatcatatcactgataatgtcaacaacattcaagcttcgactgaatacaatggtaagactcgattgacaattggtaatggtcaatctcttgctatctcacatatgggcaactcggttagaaaaaccagcaataaattcaaaccagtcaagttaaataatattctgtgtgttctaaatattgctaaaaatctgttgagtgtttcaaagcttactagagataatgatgcctatgcaaaattctatgctaactc

SEQ ID NO: 231269 - DNA, 1337 bp, Cannabis indica
aaattggaaaagaaagagtcgatttccttcaagttctcagacaaagagaggaaaatggaaaaaagagagaacttactttgaagaagcggaatggagaagagggcaaaggtttttgaaggtatgcctatggagattcctggcagccaacattgatttcgttaagcaaaaagggattggcaatgaattagtggtttgtccttaatcttccattaatgcctcttctgcaacagagtaagacctccctcgttgtcgttgggttttagattttcagggttttagttttaggtttttggggccaaacattttgggactgatcactgatcagggttaaaactggaaacagattttatttacagtatgtcgtttttgagttttattgtcgttttctatatatcaataatatatattttttaatgggaatgaataaatttattaaaggaaaaagaaatcaacttttatttagataaattagcatgtacaactaataataattaagagagcaatttaaattgcaattcaaattcacataataactcatataacaactaccaaaacaatctaaaatataaaaatgaaaaagaaaaaaaaataataatagtaaatggaatgatttcctttttttttaaaatagagatcatgaattcaaatttggctccttttaagaatcttaaatatgagataatattttaagggcatccgttggtgctttgttgaaattcacgtgacacacttcatcgtaataggtgcagacaatacactttaaaaggttttgacgaacattcgtgagcaaaattaaagttgtcataattacacccaaaaagaggagtcacaactcgtatctcctcctctcctttttatcataaaaaaataatcatactaatttttttttacagataagatgaatcgaattccattttaaattcaattggcaatagaatagctcattcattttatacatcacaatttatttccacgcattagcaatataggactaactcttaatattaaaaaaaaaaacttgacataaattaagaatatattacgaaattcaacaccattcttatataaaaagaattttcttgtcgtttactgtgtttttctgtcgtttgcattagttatttcactttggtatgttcgtttctttggaaaagagagaaagaacacacatatttcttaattaaaattataaaacattcttccattgtctacataatattaattgcagaagatacaagcaagcaattgaagattcaaccactgctttcattggctttcattcataaaaatgagatctttaagcaatcttagcacttagaagcaaagactgaatccctctc

SEQ ID NO: 231270 - DNA, 2359 bp, Cannabis indica
ctacgtgcccagttgcaactaggggtggcttattcatggagcgatcttccacgtgcaggttgcactttaatttctgcaaaaagcaaccaaaatattatttaatttcactatagttattaacaatgaataaaaaaattaaattaataagcgaaataatattaccttcttcgatgtaaccgaaggtgctggtgttggtggagtagatgccgtaagaggaggtgctaggcgtggcgtagatgccttgagaggaggcgctgggcgtggagtaaatgccttgagaggaggcgctggggtggagtagatgccctgagaggaggcactgggggtggagcagatgcccccataagaggtgcatggggtcgagcagatgccttgacaaattgagctgagggcggtggtggagaataggctctgcttactgttggtggttcattggatgctcctccaacagctgaaccagatgcatgagaagtaccacaagtgttactttgttgagacctgaatgcttggaggagttcattcatctgttcctcatactgagaaagtcgcctctcgagctcagctatgcgactattgtctctactctcattctttcttctagggcatggggtcttgaaaaattgggtttgggtgacgccacgtcccatccctctaacacgtccagcgtgctcatctgtccccaaggctaacgagagtatgtctttctttccttcctccaccaatgtgccctcctcaacttgcttgcgatattcaacctacatacatataatttcaattaattattaagaattaacagagcacaacacttcaaaaagaattaacaaacgaaacttacaattcgatcagcgacctccttggtagggccttcgatctcaccctttttgttggtgtgcattctcatccatatgtcagatctatcaaactcagtgagttggtggcccaactctttctccatttctgtctcgacctttttcgcaccaccccgtcccgttctatggttgtacatatttttagctctaatggcttgtgcttttgctctcttcttttcccactcaggagttaatctggaagcaacaaaactcttccattgcttctcgtcatagcaactaagataatgctttggaggatgttcgagaagttcaggggcttcatctttatatttgtagatgagttggctggttaattttgttctccaactcttgagtaactctccagctgtttttaagatagaagctctagtttcccccccaatatcaaatgaactctgcaaaattttcaatgataattaaaatctaattaaagatgaaaattgtatgtatgtaaatatgattaacacataaagttacctcaatgtaattccatagcctgtctttatagaattttggcactttaagccaatcattatactttaaagggatgtttcgacgcacatatgcaccattcgtgctcacttgtatgtctcccgactcattaatgggctgaccccacatgttgtactcaacctccatttttttaccttcagcccgatacttttgaagtaccttattaacgcatgcgcccctgacatttttcttccctgctccaacctcggttggtccatcaaccatgtcaccaaaggcatttgtgtgatcatcgtctaaaccaaccgcctccccccatttgtcataatcatcatcagatggtggattatccataatgaatgcacctgcacagttgtataaaacaaatcatattaacattaacatagtaatttagaatatgtaaaaacaaaataataattaagattaccaaaacatgtccattatgggttgatagttgtatcaacccataatccttccccgtcatcacgggtacatacatcatcgtcctcaatggtgacattaggtggtggatttatttcgaaagttttgccattgaccacgagatcgtcaacactagattgttcattttgataatcttttgattgcgttgataaaacaattgaccaacgagcatctagtggatcactcatgtaaaatacttgaattgcttgcgatgccattataaacctatcagacttgtgccctattcgattcaagtcaactaatttgaaaccaaactcaccatctttaaccccattatcactccttacccaattgcatagaaaaacagggattcgaatacttgtgtaatctaattcccaaatttctttgacttgaccgtaaaagttcatatcacattctacagggtttttatcttttgaactagatatttcaaaagctctagcaacaatcataacaccactattttgtgtttttctgcaattgtcccggtcgattgtgttaaattgagtattgtttatgtgatatgattgatattt

SEQ ID NO: 231271 - DNA, 2619 bp, Cannabis indica
tttttatagaatttgttgttacagttttattctttctaactttttcttttcttttcttttttgaggtaatgatagttaaaaaaataactataaactgaaaaaacaactaaaaaatacgtaaaaataacaaaacaaatgcacatatatacaacaaaaatattgtgtgaaataaattaaaaatatacacaaaaagaatgcacataaattaaacaataaatgtataagaaaataatattttagatagaatattctattttttaaagttaattataatatttattaaaaatatttttaaactttattttatttatcaatatgtatcttaaaaaataaatccaaaattattgagaatctaataaataatttaaataaactataagtttttgaagaaaaaaaatcaaacttatttatatttataaactcatatcttaacaaataaagaaaaataattaaaatttcaactaaaaaaaaaagaattatgtttacttagacaaatctacattttttgataaaaataaaatatactcaagtttgttcccgtaaaatttagtttttacaaatttaatttttaatatatttttttaatatctaaatgaattttctaataaaaaataaataatttttattgcttaattagttttaaaattttaatttatttttttaattcttccttaagatctatttttttttcagatttactaaacaaatgttgaatctttcttatttttaatttgatggagtagaatttcatagttgtcaaagtttaggaggcaaaattactaattgatacagatacgtcatcatttaaacagaataataggacggaacctaacagaaagactaaatttctataaatgtaaaagttcaagggattcttaacaatcagtatattgtaagggccaaaattaatattaagttgagaggacaaaattactaattattctatatatatataatacatatttaaatataacagataggctttaccaattataatatttattccttgaaatctattaagtactaaatattttaagaagtacactattcattcatattttcaacatagtacttaaatcttaaaatattgtgattataaagtaatggtaaaccttcttcatataagttactgaattgaaagtaaaattgtatcatcttcccaactaaagaagccttttttatttgaccttgatagtagaacagtaaagcaatttattcacatgtgaataacatattacataatttcaagaacaaagacattactttagcagtaactagtaatactaatgcatgtatcttttggtagccttacataaaccctctttaatataattccatggtcggggtaagatttattgttttattataaagtaatatcttagtaaaccccagtgctcaagtccttcagtgcatgatgtagttcataattaagcttacaatttcataacatcaacgtaagattttccatcaagctcacgagaaaatatacccttgatgtagtctttactttcttgtgttttgtatagcccaggattttcttgagtgatcaaactgttcaccgggcctatagtgcaatctatatttgtattaagaaatgtggcaagagagagcctttcctgcgccgagtttactattgctctgtgctcaatgctaggatatattccatttgttaaaatctgcaagcattatatatacaatataataagaggatttctacttaaagtcatctataatatatgggtaaatactattttaaaactttgtattttacaaaagttatcaattgaaccctttgttttattaaataataaaataaactactgtatttttttaaaattggtacaaatagaaccctgaattggttttttatcaaaataaaatttaataataatttgatctaaatgtatcataacaaaactgtttatattttttatatctgttcgtgttagcaattattttcaagttagttatattaagaaaaaaaattgtctaaaatcaaactcagggtcttattttaccattttaaacaatacagggtccattttgtcatttaacaaaacagaaggtctaatcagtaacttttgcaaaacagaaggttcaaaataatatttataaatgaatgaaacattaataattagtaactatgagattatttacctctagtacatctcctatattgacaatgaaagcatttgggagaggcttgacagggatccacatgccatctttcttgacttggaggccatctacttggtttatttgaaggagaatggtaaggcctacggcatcagagtgaggggtgacacctataacttgctctggttgagggcatggagggtaatagttgatactcattgattgcaatccatcttcaaataagaaatttccttgctttttattcccagaacattttccatttgggagattatatctttggctagcttttccagttctaatgaataaatttccaaactttccctgcaatgtgaattaactataaatatatagtaaacaccttataaggtgtaattgtcaatgaattaaacaaaaattaataaacctcaaaagaagagggaggtttggaaataagtgaggcttcctgaaggcaagtggtaaagt

SEQ ID NO: 231272 - DNA, 1725 bp, Cannabis indica
aagataagtatatttgtaagtgttttatattagtattgatcaccctagtggtgacaactgtatttgacttacaaaatatgaaacaatggaggactctgtgcctggaagctccgccggagcagaggacccgtaggcccaagcctgtggtcccgcttccaaataccggagctcccgatgccagcacttcgggttctggtaagtcccctttataaacacattatgttcctctcgtccgtgagtatacccgtcttaggcctatagggttcgatgagtgtcttcgtaggtttagaatgccttcttcccggtgggggaatcatgccaaggagcattacttttcccacttaggccattatttaggtcggtcccggatgggttctggacctccggcggctattcctttggatcattcagcccatttatcttccagttggtttcttccctctgacaactttctcggggatgatgaagccagtgctatgattcaggactttgctagggccgaattagagagtcagggtaggactagttttattgcttttttgctaagtgtagtttgttttcattaatgtcctaacacttatttctttgttgcagcagccaagcccatggacgatctcctggcaactcttgctgaggcctacagtctagatacttctccacctccggttgcctcccagttaactactcccgggaggtcctcctccaatgctccttcaggcaccatcatcttggtggacgaggaggaggaagttgaagaaggtgaagcggaggacccggccgcccttgagtgcaagcgaaagggcaagatggtggtggcggagccttctaaacggacccggaggggggacactcccgcgcccagcagtgactcagggattccttccaaggtggaggaatacactgtgccgcacggcaaagtgttgactccggttctcgcagacgaggagaggcacaacctccgagtggccaaacacaactacgcccttgacgagtacagccgggggcatgctgaggtggaggccttgaagaagattctgcgggaggagcatcagaacactcttaatgaggacgccttccggaatccgtgggacctaaacatggacccgctgacggattggttcaaccgcttcgtcgggcccaccttggctccctttgcctcggagatgactagctagttcgtctcccacctaacgcaattcccgcctaaaagatatgctgcttgcgcctctctgaactccatctaccaggtccaagacattagctctgccatggccgcgttgagtactttataacttattccatcccttgatattttgtctacggcatctggtcgtacttttacttcttttttcaaattatagttaagatcagtcgcctttccaagactctaattgaccatggctacgtcatgtctaaattcgggggcatagacgaggccatgagaatccttcgggacttgtctgctgaaaggcgggcattccaggaggaagctcaacggagggaggccctcgtggaggcgaagctccgggaggaggccaagaagaaggaggcccttgcagaggcgaagcttcgcgaggaggccaagcagaaggaggccgaggtggaggcgaggcaccaggaggcgctaaaggtggagggtgaggccgctgcccgggccagacgcgagcttcgggaggcaagggaagccatggacgaaatggcatccaaggtgaagtccctagagga

SEQ ID NO: 231273 - DNA, 991 bp, Cannabis indica
tccattccccactttaggagtcttcatgatgacttcggtttttgcaacacttgacgtagagggtggttggttagtacccttatggcatgagcctgaaagtatggtcttaacttccgtgaagcaatcagtaagtaaatggaaagcttctcgatcattagatatctggacttcgtgcctagcagtctcatacttacataatatactagaagttgtacctttccttcttctcacactaatgcggcacttacggtatgatttgacactaccaggtacagaaacgacgactctccatcaattggtttggacaatattggagccttcactaggtgttcttttaattgctagagggctattttgcattctgctgtccattcaaatttgtgatttccttaaagtacattgaagagtagtatgcatttatttgtggattttgagacgagtctgctaagtgctgctattctccctgttaacttctaaacatctttgtgcttttagggcgaaggcatgtctacaaaagctttgattttctcttggttttccttgattcctcaagaactgactatgacacccaagcatttccttgaagaaactccaaaagtgcatttctttgggttcaacttcatttcgtattctcttataatggtaaaggcctattttagatctttatagtggttctcaaaggtttttgacttcaccagcatgtcatcagcataaatctccatattcttccccaggaaattcttgaacattttgttcaccatttgttggtaagtggctccatcatttttcaatccgaatggcatgaccttgtagtagtaaattcctttgtcagtttggaaactagtgtgctcttgatcagccacgtgcatttttatttgattgtagctggcggatgcatccatgaaggttaacaattgaaaccccaaagtagcatcaaccatttgatcaaagtggaaaatgttcttttggataagccatgtttaggtctgtg

SEQ ID NO: 231274 - DNA, 1987 bp, Cannabis indica
gagacattaattccgctgcatcaatgtaaggttttattaactttatatgtgtttaatttatcgttttagaaagtttatatttagggtatttaaacaacatacttgtgagtagatctaagatcctggtaaaatatattccaacagagattactagagacattgaagtttaggaaatggaggaccagggaaaggtatatcctgcaactcaaagaggaaaagggggtagcttgggtgcttccattcggtgaagtcttagaagctagatgggactatttcaggaagaagtataccgaggcttgtccattaagcagcaaaggtccaaagggagctcaatggatttttccaccatccatcctaactttcaagattgactaacctttttgaaaatggtctcctggggcaattcgaatgatgattccttccctctcccaggtagctggcaacagaccttggagagggaactgtgtgtggtcgggtccccacgccaaatagggtgcaatgctaccattacattcgtactttaaggagatagtcaattattataacattagtttgaccaaattcaaatgtaagggcattaagtacttatttgtcctgttcgtgttttatgcctctcaaggatagggtcagccatctgccgatgatacaaactggctatttggcctgaagccaagtcttaagcaaaatagatttgggtatatcagattctctcaaatcgaggaggggtggctgaccggtaccatagataccgaggtgacaaaaattggtggctaaatgcataactattacatcgttaaggacatggacaccaagcatgccaattttcaacacatcccttctattgctgacctccgttcactctaggacatagaaagagggcttaagatattctccatgttcccttagatgatcagattatttctctcttggccactgaagccaattttatcaagtacaaactctacccgttaggtcatggacaaggggccgagcaggcagtaggagaacctatgctagcctaggaaggagaggttatatctaaataggaagcttcaagcaagaagaagaagaggagggctccttaaggcaaccaagtacctattgagtggtctaatcggatttaagacagtcctgagaaggttgctcaatgttccacccaggtggcacgaaagggaaacgtcgtagtggttgagcagaaagaagaaactcttctgttgaagatgccccttccttgcttgttcgggagggtccccatgttcatgtgcagggtactttattttgttcttaaccttgtttacagttgtttgattcatgcttgttctgacatcattgttttcctcatgtatagttatgtctcagaggatgatgagcacactggagaagaggtcaggtgatgcctctggccagaattctccggcaaagcgctcaggtggacgatatactacccaaaagcattgttccaagcaacaagactcctcagatgactattgagaagagctcagctgtccctcctactaaagttttcaaagaggtagtttcagatgtaatcccaccagctaagatgaacccgaaatctagtccatggctgccccatccaaaggttctaatggaggaaacactaacagtgccagactatccaagccttcagtaactcgtaccgcgatgaacccagagactaagaaggggaaggagatccttccattttatcaggatcgagtgctcttcaaagtgaacgaccagctggccagaggagaagacatgtttgtagtgcttctcatgggcagtttgctgaaagaatccattcgagtaagtacttttcctatggttttttttcacacacttttgtccggtcagagtgtaattttacttcattgtgcaactcaacctaaagatggcatatacatactctcgaggcaagtttgcagccttgaaagctataactaccaccaccaaattgaaaaaggatttggaggaagccaagaaggag

SEQ ID NO: 231275 - DNA, 991 bp, Cannabis indica
ttccccaagctagattgccaatctccatttccatctgtaaccacatcctctgattgcaaacagtcctggacagcagactgcgaaggattctcctcgacagagcataaaactgttctgttcattaaatttggaaaatctgacgcaactcctctagttccaccctttcgaggctgagccttcatcttaggccggaacttatgacctgctaaattaaagaagttatacctgcccttaaagcatactcaaatcatcgtaacggtagtagtgaactgatgttcatacttactgttatttgtcttggattcaaaaagcaaatcatccaaaggatccacatcaagctgcattgttacaacctaaagaaagcaaaactatactgatcaatatcaaagatcaccttgccattattaaaattcaagaattcaaatattcacctgtgttactcaaacttgaaagaaaggctgtaaactatcataaattcttgaacagagtaagtaacaaccaagaatggaacatgttaagctttgcctgaaggagtatgaggatttagatttagttatgtcggtactataaattttatttgttttaacattgatctaatgaaattatcaattttctccataattgaccaaatgctgcattcagcttattaaagctccttccacgatcaattttctcactaatatactcactaattattcgatgcaatttcatccaactacaatagcagaaaagtaataatataatgtaagacatataatagataagaaaccctagtttggagccgaaagtgagagtgagagagagcatttgaaagtgttgtgtacagagaatgaatgaagaaagtgagtacaaagattacctgctggttttggagtcggacggtggagaagagcgtgcggttgaaaatcaccggcggagaactactttttagtttattacatattaactaaaaataattttgagatgaatattggaattttaaatattttac

SEQ ID NO: 231276 - DNA, 621 bp, Cannabis indica
agaatttcaacccaacaccacctgttcttgtggtgcaatgaaggtatttcttgagtactataatcaaaatcaagtcttacaatttttaattggtcttaatgagtcatatgcatctgtacgggctcaaatccttctcaatgaacctatccccaatctctctcacgtattttccatgattttacaagaagagaagcaacagaccctcggttcatctgatttgccctcagttgcctcctctgcccgaccctcatcatccaacaaccccactcgatccaagaaaccaataccatcatgtaccaattgtggaaaaccaggacactatgtcgataagtgttatttccttcatggctttccaccgggttatggtgataaaaagaaatcagacaaaggcaaaacctctgccaattgtgctactgtcagcaacaaaccagaaaatgctgcaatcaatccccctattgatctttccctccaatgtcaacaattcatctcgcttctcagccaacaattgagtcaagcacaacctcgagatgaaactaatcctgctcctgcgcttccaacatggctggtaacacctttttttttccaaaaatttctcttagatagttgatagtggagctacac

SEQ ID NO: 231277 - DNA, 1264 bp, Cannabis indica
  modified_base (948)..(948): a, c, t, g, unknown or other
aaaatcagtattagcatcttgacaccaagcacccttagtttcttgcaagaatttatatgcacttctaaccgaataattcccacaagtctcaagtcgccaactccaaccatcattagcggccgaatcactaaactgaatggacaaaataaggtcctgatcatgggcaacaaacaggtccctcacaacatccccatcccacgcgcgagtaccgacttggaagaggcagttgaccgacttattcacaagagcagggtgtcgtgaaacaacatagttgtttgaattatattgaagcaaaggatcattaagaatggatacattttccccattagcaattgttctttgagcacaggcgtgcataagatcttttgcttcaatactaagccaaatgaaactaggattgttttccaatacagtagaaaccaggttaccagtagcataatatttagcattaaaaagcctactaaccaaagaatcagtattaaccaacaaacgccaatattgcttccccaaaagagccaaattaaaatttctcaagcttcgaaatctcaatccccctgcatgtttatggcgacacaatcactctcaactcatccaattaatacccttaccactacttgaatttgagtgccaccagaacttggctataagccgctctaacaccttgcaagtgtcggacggcaagagaaaaatattcatagcataaattggcaagacttgagcaatagatttcaacaataccttctttctcgcacgagataagatacgcccttcccactcttgaattctcttccgaagcttatccttaagaaaccaaggatagcattctatttctcccaatcgaacacggtagacccaagtaatagccatttttcattggcctcataaatttccaacatagcacaaatagaattccgcacctcaattccagtattattgctgaaaaaaacncaaaacacttagcaaaattgatctttgccccgaagaactttattacattatatgtgcataaaaaaaataataaacatataaacatatataaataataaatatgcatgttttatttataaatttatatttaagttttaataaacacattatatcaacatatcatcacaaatttaatcataaaaaaaaaaaatatatcatcacaaatattatcataataaatatatttaattaataattaataaatattacaataataatgtaaacataatgtttatacataaggtcacatttaattaaaatttcatttatttttttt

SEQ ID NO: 231278 - DNA, 746 bp, Cannabis indica
ggatattacaatctgccacagcctagggctcggctcgtgacataagcactaaaatacttattcactaacataattatattattaaaaatacccataatttatcaaataatttttatagcatggatataattatattttcatttaatgagtaatacaaaataaaattgcgagaaaaaatattttattcaatttaattatgtgaatatgttttaattactaatttatgttgaccaaaatatatatataatcacataattaagtagggcaattaaaatagagcaaaagagtgaaaattaggcacaaaaaggactagtcacgtgcccccacgtgcccaaaaaaaattttcttttgaaaaaattgtgaaaacaacatgtaatttgccttaaaaagaggcatgtaatatatccatgaaactatatgtagttcttcaatataaacgacatgtaatttatcagccaatttaaaaatgataacaatactgaataagcgacataaaggagctgaaaccatacaaaaaaatgacaagtcgtttttggggtcgccttcaacctctcgagctgacccgatcgagtttcagcctccgatacactatttttgatgccgtttgaggcgctgtactccaaattttcattttcccttgaactataacatttgctaaaatataaatgatgcactaaccattcttgctcaaaaaagcttcaaaattagtataaagtcagccaaaatacttgtcaaataattacaaa

SEQ ID NO: 231279 - DNA, 1401 bp, Cannabis indica
cgtggccagttgttgcatatattatcatgtctatgtgtggtgatgggaaagaatccttagggtacgccttatttagatcaataaagttgatatagacacaccacttaccattcttattttttaccataacaacgctagccaaccagtcggtgtagtctacttctctcacagatcctatgtctatcaacttttggatctctttgttgataaatcagttgtgttctggagcaaattttctccttttttgtttgaatggaggatggttagggtctacctgcaaattatgaacaataatgttatgattgatacctgtcatgtcctcgtgagaccacatgaagatatggtggtacttctttaggaactcgatgagtcaaacacggaacttaggtgttagctttgatcctatatggacaatatgttctagaaagtctttgatgatgcacacaccgtcgagatcttccatttcaggctcggtaggtgcactattggaaccatagcagtcggtacttactgcggaggcactataggaggaccttgctgcctcagcctctgaatctcttcatcttaagcttgtgtatctacaaatctttgctcccaatccggaggagcttaaggtacattttcatgtctaccaccttgaaaccttccacgacctctccctcgtccaagaggatttagcggattttgacctccccgaccgccttcgatcttaaccatgttatcctgactcctcatatttcatgggacgttcatttaataagtcagtctgtgaatccataagttaggtaggtcagataacgatcacatataatctatgtatcgcactttatggatttttaggcaatgcatttaaacaattataaactattatggtccctccttttctaatcacataaattactaaacaagtaaaggcaactctgataccaaaattataacgccctgatacttaggcgcactacagtaattttctaattaacatgccacctttgctaatcaaaaggttttcctcaaaaatcatgccaaattaaatttttgattttaactattaaactttataaatatatatatatttacaaaaattgggatcccgtgtttaaacttttacaatcttcatcaaaatacttttactacaagttgcacagtgacaacaaaatacaacccaattcatcctgacaccgaacactctaggtcgcgccgtcttgacatgtacaatcatcctccgagctcggaactcactcttgttcagctttcaccttacctttacctacacacaaaaataatatctgtgagtcgacaaattcagtaagaaaagcacataacagataatataatactaacttccatgtaggcgcccatacacctatccacaaggcttatcagataagtaagaacgttctt

SEQ ID NO: 231280 - DNA, 773 bp, Cannabis indica
tttttaaaattaaaaaatcatcttagctttataaatggagatattagtttcacggacgatgaacacttcttgacccatctaattttttaatataatttattaatttctctgttattattgttgcgagtttgttgttacgatgtgaaacagaactcagccttaaccttgaaacacgctcttcgtagcttggtgccctagccgcttggtatctctctctccctatctactttctatatacattgtgatatcttagtgagagattcggtgagttaactgaccgagttaatcaaaaatagctccgattccgaacgactcatcttcttcgtcaatggcagaaacctcaaaacaaaccttccttcctaactccgccacattacccccaaattctctcaatttctcaaagcttctcctcttctatcatcatcatcttcaagaaagcccaattttattcaatcagaaatttttgccattcctcaaaatcttcacacatcaattctctccgcttctaaaaatcttcatttgttcgcttctcaacaaattgctctctatgaactccttcaatcagattcactaatgccaattacatacattttgattatatatgttatatctcagcgagttgatttttttcttcgatttttgtttctgggttctgtgagttttcgtattatatatcttattgtttgtttgccattttattcctgctattttggaattagtattagaatatttataattaaggaaataaaataatattattgattctgataaat

SEQ ID NO: 231281 - DNA, 601 bp, Cannabis indica
aaaaaagaaaagaaaaaaaaaactgttttgaagtgtaaaaatgaaaagccctatttttttagtttaattttttatttttttaaataattttctatttttattagatttttaataatttatccgtattttttaaaatatgaatttgtaaatataaataaactagattttttcttcataaaatcttagtttgattaaaatattttttttaattatttatataaatataaataatttttttttattttttaaaatatgtttttgtaaataaatgaagtttgaaaatgttttttaggaataagttaggtttctttaagttaacttattttttttaatttaataatttatccaattttttaataatttttattttttcagaattcatagaaatttataatttttttctaataaaatgagacagaatttagtattagtcaaaattcaagggtaaaaatactaattatttaataataaaagaaacagaatctaactgaaggacatgattacgaactgctatattttagggagaaattttaacaagccgcatattttaggaggcaagattaggtagtgtcgaaagcttaaggagaaaaaaaatactaat

SEQ ID NO: 231282 - DNA, 2059 bp, Cannabis indica
caacaaccttaaaatatttataaccacattttaaattagatatttacctaattgaattaattaaataattaattaacccaaaaagacaaactccatagggatagcataatgctacaggcgtctaccacgtctatttaggacaaagttgatgtcttttgtcctgataaatcttgtcttgacaaattttgttttaacaatgattttcttttccatatttaattaatttaaaaaattatttatttattacaaaataaataattattttttttctaattcaaaatagattttttcgaacatctttatacaactctttattcctacccttgatagtgtttaaatgtggcaattcggggaccatagacataaattctaagctctaataaactagattatttattgagtctcatcaaccaaataattcatcgtttattaattccatgattactccacaataaatatggaattgaactcttagtaatccatgtgttggttcataattagttttggtaaaaatattgttttacctttctaattacttttttatcctttagtaccattaattcactggtggaagtataattcaaaatcccatctgaatttgcggacaatattccaattccaaaattaacacttaaagggaaccaacattcgatccgttaggaaagttagattctataattgtacatcatgttcccagtcaatcatattattagatttccaaaacaaaatttgtaagaatcatattctctgagaaactttaacgagtgaatcaaaaaaactaataacatgaaccagagtccatgataactgaagatctaggccgatctactatttctcatcgttatgatatgaattaggtctttatgataaacaacatgttaataaagatagcttcattcatatcgatccttgtcatatataatctctattatatacaacaccttcacttagatgtcccattatatcagtaatctaaacaaagattacttgcaccatagaaagggcatcagtgaaccgtactagcaaccattgattaaagattccacaactttaatatattgtgactattttaatcatagctaagtggtctagttctctatacagctacaagccacatcctcatatatgaataataaatattctgatatttaatataaattattcaataattaatattaataacttaacattcacacacatatatatatatcaaatctttaactctttatttaataatgagaaaatatcttcataggctttttagggcataaaccctaacatggagaacttttatttttgagtgcccggtgcctgggtaccaaacgcccaggttgacaatatgtcaaccttggccacttccaagcattagatcaaaaaacagaccatgcatcttcttcgtcttcatcaaaaatagggaaacaagtgcttttggggaagaaataacctaacttggggtgccagaacaagggatgagcacctagtctaacacttggtgcttgcccagcgcctggttgacattttgtcaacctgggccaattctaaggagtttcttcgaaaattattctgggcatattgtccgttcttagcaaagattaaaattctatttctggggagcaaacgaaacttccaggtggtctaaaactggacccaatgctcaggttgacacctggcactgggcccagcgcccaagttgacatattgccaacctgggctatttccaactagtttcctaaaaaagtgttttggacatcttttccatcatatgaaataacgaagatacaagaatactcggggacaaaaccacaatcttgagggcctagaaactgagctgaatgcccaggttgacaatcaacttggtgcgctggttttgatcattcaaatgaaaattctacactgagcactctctttaaaatggtcaaaaatgggatagaagacctcgtactcaagttcaagtaccttggaagtgtcaagacgacatcctggaagctttgaaaagagtacctagtgcctaggttgacaaatggcctggtgcgctgggttctgcttatctgattttgat

SEQ ID NO: 231283 - DNA, 1871 bp, Cannabis indica
ccgcaccaacaaccttacatcatctcctacaaccggccatagtttgtgaaaaaatcccggtgtcataccatctggtcccggggacttatcaggatgcatctgaaacaacgctctccttatctcctcatcagaaatcggctcaagcaacatagtgttatgagcttgcgacacaacacctgacaccgtacccacaacctcttgaacttccaccaaacccggagtaaaaagctgcccaaaataagtagtcatcaagtttggaagaccatcctcccaagttacccaaccaccatcaacattccgaagcttatcaattaagttatttcttctacgagaagaagccatagcatggaagtattttgaattctgatcaccttctctcaaccaaagttgtttacttctttgcttccaaaaaacctccttttgaagtaggacattattgaactcaagctcagccgctttgaattgttgcaccgccaaaggatcacggcccctcttccattttttcatctcagccttgcacttattcaacctttcctgaaaattgccagaatagtttttccccaaataagcaaagcctcactacagaattttattttatccaaaacatgactacccgaattgctactccaaacatcctcaataatcttaaaacatagaggctctttaagccaagagttctcaaagcgaaaaactctaactttgacagccccagccgaatgagaaagaaccaagttaagaggacaatggtcagaagttgtagcctcaaggttccacagtttccctgaaggaaataaatcaagccacgtttggctcacaagagctctatcaattcgcacttctacccattccgaactacccctcccacgttcccaagtaaagggataaccaaacaaatccatgtcaactaactcacactcagttaaagtttcacaaaagccatcaattaaccagtttggataagaattacctccacgtttgtcggattgcgaagtgacattgttaaggtcaccaattatacaccacggcagattagacttggccttcaacattcaaatttcccttctataattgtctcctcttgtatggtctttacaattggttgctacacattcgccaaatcttagtgaaattttggctatccttcatgctgttttttagtgttgattaatcttaggttatgtccatctctatgtggagtactctctacttagactgattaattagtaaccacattaattaaaaaccattgctcgatttcattttacatagaaattattgttatagatatagacactagatatatagatcatttcattgtgttgcacaacacattctttagtaaaactaacattattattggtctaatgattgacattatatacatctatctacttgtattaattctctcttaattagggatcaataaagtgagaaacaaaatgtgataccatgtgaactcaataaagtgtagagaaatgtaattaagggaattaatcatgactctaaagtctaaacctagtgaatcgtttgagcaagagtgtcttattattatatagagaaaaaaaaaatacaaagattaggtacaaattcagttaggtacaagtgattataatagcctcatcctaactaactatatttactcaaacaaaaaggcttattgagaaaattcgagtaaatgtaatattgaagttataattgaaagaaatatcttcttgatcaaggtttggtaataatttcacaaaccaataaaaattattttacttctttaattatactaggtttgatttgtattactataaaaaaaagtgttatttttagtgacaattttctagttataacataattttttggtgactaaaggtaagtttttt

SEQ ID NO: 231284 - DNA, 969 bp, Cannabis indica
atctaaaaacatgtaattcattaccacatcctctcggagagtcaccatgcctctacgagctgagtggtgccttgatgtattctggcaagctcggtcagattgtgcctttctcaaagcctacaataaaaatgtgtaagttacatactagtaaggctcatatatcaaagctaattatataaatgttgtgaatatacatatatgtaccatatgttcaggtgttagacgactcgcaacaaattttacccaatcttcttgatcaatttcaggatggtttttggggggaattgcgagctccttcaccttattctctttggccaaaggcattatgacatcgcatgtcatttttgtcttaaaatccttcataattcgtcctgcaattttaagacaatcttttttccaatctgcacgaacattgaaaccacgctatatgtagaaagcaaacagttagtaaatagtttagaaaacaccataataagtatattttgtataattaacttacttgcacgtctttccaaattttgtccttcaacgattgatccacatatctccagtctttataattgataccgattgtttgtcgacatctaactccaagccacgatatcatctctccaaagtattcccctttgtcattaacttcaaggtctattttttcacctttatccattctttggcatatccgcttcatccgtgtaggacctcgatggttaggaggttgcaaacaataacctaagttctcatctcctgagttctcatctcccgagcaatcatgtgtcggcacattatctgccatatctgcataataaacatatttactaaatattaagatacaattacacatacaatggtagttacatatgtcaataaatcacataaaatattaagaaacaattcaacatacaatggcagttacatatttcaatcacataaaatattaagaaataattacctactaaacacattttcttt

SEQ ID NO: 231285 - DNA, 1153 bp, Cannabis indica
tgtcaacgatacaatagtttttatgatattgcaggtgtttcatatccacaatccaacacaaagctctttaaaaaagattataacatggttagttttattaatatatttatttagttgttataaagtaagtttatagaattctaatagttgtttctccacataatattttaaggtacagttgattgttaatcagtgacaaaagaaacactgacaaattttttcatgacaatgccaattcaaattttctatttctagttgcattttagttgtatattacttaaataatagttgtgctactacaatactattattttaaaaaatagggctccaaattggcaatacatgaatcatacaatgaaaactcgattgtggtaagttttgttcgtgttacataggggtattattaattgttttaaggtttaatattagttgcctcacaataaatataactgttgcattacagtttcatgaaagttatctcatagttgacttacaatgcttaaaatttcaaactgttaggaaaaagatgcaattttgtttctcatattttgcaatggacagtttgattaaggaacaaattatgtaaattacgaagctactagccaataaacttcaatagattgcaaatattaagaactagtacacaaggtaaatcggctgctcaaatgcaaccaagaaaatacccaactgcaactaaaataccaagtgaaggaaggatactaatcgctaaagataaatgacgatccaagtctattcttctacatacaacaaaattaaaagaaccttacttcacaaggtattcattgtgtgcgaacatggtcagcaatgtaaagactcgcttttgaccgagtcaaatgtatatatataacaaataataattaaataataatatatatatgtatgtgtaaaaaaaaatttaaatatatacaataacagacctacgtcccctcctctctctctctacctatctctctttctctttctctctcttcaaagcttcaaaggaaaccaacaaacctccataaccaccacactccagcgacccacctccagccaccgcccgacctcacgcgccggacaaatcagaagcccaagtgctagcgacctcacccctcaagcggcgctgcttctcaaagtttggcagttcaaactt

SEQ ID NO: 231286 - DNA, 1330 bp, Cannabis indica
gtatattctaggaggattgggtcaagaatatgaggcagttgttgtaaatctcacctctcgcaagaatcccataagtctgcaagaagtacagttcatgcttcatagccatgaacttcgaatacagcaacacatcactgagaccctctctaatgttcaagcaaatctggccaatctttcaacaaacaacaatttcagggggggatacaatggtcgtggtcagaggttcaataacagagggggaagtggatactcaagcaatcagggaggtcgtggaaataggccagtgtgtcagctatgtggtaaagttggtcacacagcacaaaagtgctatcataggtttgacataacctacacaggacacacaccttccaaaaacccaggcagtgaaacatcttcagaacatccacaagctaatcttgctgaaactccaaccacaagtgacctctctggcgcttggtttctcgatacaggagccacacatcacatgaccaccgattctcaaaatctgcaaaatcccatggactacaaaggaaaagccaaagttattgttggtaatggtaattctatgcctatctttaaagttggttcaaattaaattaactctaacaatcctaatcaatttctcattctcaaagatatcctacatgttccaaatgtcaccaaaaatctattgagtatttcccaatttaccaaagataaccatgttattcttgaatttaatgatgtttgttgtcttatcaaggacaagacaacgaagcaagttcttctaaagggtactctcaataatggcctttacaagcttcaagtccagccattcaagtcaccctccctgcctcaaaaaccagtcaagatcagccaagaaaatctcagcagtgttcctgctgctcttaattgcactaccactagcaacccggttctagacaagtctaaatctgtttcagtttggcattgtaggcttggacatccatccaagccagttttagccaaaattcttgctcatgttactcctaatgtcaagtgtaaacatgtaactttctgtgatgcttgtcaaattggcaagatgcatcaatttagttttaaacccacaaccaataaaactactacaccttttcaattgattcatattgatgtttggggaccctcttttcatgtttctatggatggttataaatactatctaagtcttgttgatgattttactaaatttgtatggatttttcctatgaaaaccaaagctgaagcaccatccttattcaatcaatttaatgcccttatagagagacaattcaataccaaaatcaaaagtattcaaagtgatcttggtcaagaa

SEQ ID NO: 231287 - DNA, 3372 bp, Cannabis indica
atgtattttttttaatatactcagtaattagaaaataattagttacgaggagagagaagaagagatagaattaacagagttaatcttgaaaattgaatcggttaagtaagaaaagagaaagacacatgacaactatttattgaagagacatgaatgtgacaggtaattggggagagaagatttttttcccaaaaatactattaggattatttacaacattaatgtcatcatcttcttagtacttaatagttttagtttttttatttatttatttataaaagaagcaaatttataggaaaaaattgtgtttttgatcacccattctaagccatttgaccatggctctttgatgccattaagcttcttccttgtttaacaataacaatgtaccaggcaaagattggagatgttcaattttattagtagttttctaagtatatcgcagtgaattttgtagactagcaatatcatggcttagactattaatcttagttttaaaaggtgataaaatgagaagaactccaattttaaatgaaaatatacaactttttttgtttattaaggaaaatctaaaaatgattagtagatttattttcaagcggattcctatctttgaacaaagattctttaacattagaataagaaggttttttcaactaaatattttcaaaaggaaatctcttattagttaaaaattaaggaaatatgtaagaaatatttttcagctcattttctatgagccagagaatctcatatttatagatatgaaagtttgttacaaaagggaatgagcaacggctcaattacaggtggcacccaatacaattcccaaggaagattacataaagcagaatattttaacagaatgcctagggatcgtatcctacatgtgaggaccacaggggacacatgtcacactagtgagagtgagattagatgcagcaaagaacagagtaagactttgtacacgggcaatagcaagttggaaaatctcatttctcaacacctcccctcaaacaaatgggtgaagttctcacaccaagtttgtccacaagaaatgagaaccttgagttggacagtccttttgtaaaaagatcaacaatctggtcatgggaaggaatgtacctaacctccaattgtttctgcaaaaccttgtcacgtacataatggacatcaattttgatgtgtttggttctagcgtgaaatactagattagaagccaatgcactcccacttatattgtcacaccatgtgattgaaggcatgagaagtgggaagttcagttctttgagaagagactcaatccagaaaatttcagctgatacatgagccaaagctctgtactcggattcagtactggatctggagactacaacttgctttttggatgaccaagacaccagagtttcacctaagtacacacaataacctgcaattgaacacctgtcatcaaggcagcaagcccagttgtcatcagaaaacccagtgatgcttagtttgttgttgcagctgatgtgaagccccaatgtcttagttcccttcagatatctcagaactcgtttcacagcactctcgtgaactgttgtgggattttgaaggaattggctcagcttatttacataataagctatgtcaggcctagtgtgacaaaggtactgcagtgaaccaataatgctcctgtagatagatggattttgcattggttcaccatcactaattggagagagggttgcctgctgtaattggagtaggacatggcttgatgttctccatattaaccttcttctggatatcttcaacatatcttgtttgtgtgtgatacaaacttgtggtatctctaaatacttcgattcccaaaaagaaatgcaagggaccaagatcttttaaagcaaacaatttgtgaagtttggagatgaactctgcaacactatgaaagttattgccagtcactataatgtcatctacatagatgagaactagtatgacaatcttttcagttttgtaaaagaacaaagtggtatcagcctgagagtttttgaatttccaagtgacaaaagtgtttttgagtctatcaaaccaagctttgggagcttgtttcaattcgtagagagacttgtttagtttgcaaacccaattttcctttccattctcctcaaagccctgtggttgtgacataaagacttcctcttccaagatgccatttaagaatgcattgtttatacctagttgtcttatgtcccagccacttgacactgctatagtaagaataatcctgacagttgaagctttaatagcaggactgaaggtttcaccataatctatccctggtctttgatggaaacctttagcaatgagccttgctttcaatctttcaacagtgccatctgctcttgattttatcctaaaaatccatttatggcccaccagattttggtcagttgtaggtggtaccagcatccaagtaccattcctttttaaagctataacttcagtgtccatggcacctttccaccctggatgtcgaagggcttcttcaactgttggaggttcaagaaatgtctgtgaagctttggatgagctaaagtaggtttttggcttgaagatctgctttagctctagaaaccatctggtgtgtaggctgtagggcagtagccaatgttggttgtggtgagagagtgacagctggttcagcagtatcagtggcatcagtagtgtcatcaacaggagttggttcaagattaggaccaacagtaaactggtcaatattattagtatcaaaagtgtcagcattaaaatcattattaaagggactttggatttcctcccttgctggtcttgaaccaaaattgaggttatctggggaatgaacctcatgtgatcttggtgatgcttccgagggtgctgcagaatgagtgtgaacatgacttggtgagggttggtctgagagatcaaaagagggaatacgtagttgagaccatgaagagttgtggattatgacaggttgaggagtttggtaattgtttaggaacccttgcttgaatggaaactcaagctcattgaagacaacattcctagaaatataaatacgacctgtgggagtgagacacttatatcccttgtgggaaagattataacccaaattgacacatttcagtgagtaatactgaaatttgtgggattaataaggtcttatacaagggaaacagcagtgccaaatagttttgaggtaggtgtaatcaggtttttgatggtagagaacttcatatggtgacttatgattgagaataggtgttggtaatctgtttatgaggttaaagagtcgtgtgaaaggcatcaacccagtattttaatggcatttgagcttgagcaagc

SEQ ID NO: 231288 - DNA, 1544 bp, Cannabis indica
tgggtgataagttttgtcaaactgccctagtttaattgaccattttatcaatcttccagaagcatctggttttgataaaacttgtctcaggggttgatcagttaataccttaatcagatgtgcctggaagtatggtcgtagtttgcgagatgcgtgaattaggcataaggcaagtttttcaagtgggggataccttgattccgcccccagtaacctcttactaacatagtaaacaggttgctggtgctttccatcttctcgcactattgttgcactaatcgcattgtccgagacaaccaagtagaggagtaaagtttctccagttattggttttgccaaagctggaggtgttgacaaatgcctttttatgctcttaaggcctccttgccttcttctgtccatttgaactttttgttgcctcgcgatacattgaaaaatggtaggcacttatcagttaacttcaaaatgaatctgttaagagctgtcattcttcctgttaaggcctgaacttccttcgatttagttggtgatggcatatctatcaaagccttgatattctcgagattttctttaatgcccctcgcgttgaatatgaatcccaaaatttttcctgaggaaactcgaaaggaagactttttcaggttaagtttcctattgtacttttttgtgtcccaaagcactcggcaaggtctgttgtgtgatctccactatttatcaattttaccaacatatcatcaacgtagacctccatgtttcttcctatttgtcccgcaaacatttcattcactagtcgctgatatgctaccccagtattcttcaaaccaaacggcatgactttataacaataaagccccatgttggttacaaagcttgtatgttcttgatcaaggacatacatttttatctggttatatccaaaatatgtgtccattaatgacataagctcgtgtccagcagttgcatctactaactggtggatccttggtagtggaaagtaatcctttggacacgccttatttaagttcgagaagtcaatacaagttctccaagttccatttggtttggggacatgaatagggttggatatccacaagggataaaacgcctcacgtgtaaagtcattagctaacaacttgtccacttcttgcttgagtgccccttatctcttagaattcaagggtcgtatcttttgtctcttggctaggtaacttaggtcgacattgaagtggtggcagataatcttaaggtatcatatctgagtggctcaaggtaaactgatattggtttgccctcaaaaaacttattagttactattttagtttttcatccaggtttttctcaatgaatacacactttgtgggatttgctggatctagaataacttcttctaattccttagttggtttcaatagattccgttcatctttaatctgaggatcaagatccttatcctgcttctcgccttcttcagtcatgactgccattagctggtgactagcctttctatcttgcagctctatgcggtagcattcgcgagccaacat

SEQ ID NO: 231289 - DNA, 1756 bp, Cannabis indica
atatatatatagatatatagttagagtaatgggggagagaggggttaatcttgaattgactagtacaactcgtcatcactgtaattctttcatattagcatactggttgatatcaatttcacctattacctatatttgtttgctgctatttctgtcttttggatttgtgtaacagtgggctacatcaattgatattggcaataataattcagattttttgattctgggcttaaaagaatgcatggctgatagattggtatagataataactttattaactcttaaattctgtagatgagtagccaaaggctttctgttggaatgacacccaaaacactgaggcttccaaagcctggagagatgcttttatctgtccgcggttctccacttggtgtttacaaggaagacaacatggaagctattcacggtatgcatctctcactcaacaagtttttctattcctcttgttcataacatgaaccccatatgatggacccttttagctatgaagtcgattttgattgaaattgaaaagaagccagctatttatcttacatactgtgataaaatacatactattagtttatcaaattatcattattgaaaatcagtgttctctctgtctactagaaagtgttccccgctgtcaaataatttcataaaattagtgttcaccactgttaaatagtgttacagggtccatcatgctgtttttttcacagctaacacacaccaaagtagttacattctcacgcttaggtaaaatgcaaaaaggttttttgctttgaaaaagcaaattcaactttcttcctttcttgacattgtagcaggagtcgtgcttttcttaatcttttgtttcattcttttgtgaattttggtgcagagtctgaagagagctaactggaaatttctgaagtagttaaatcatgagtgtgctctactggtgccattgaattatatgtattaagatttcatgatgtataacttagtcgcagcctatttcttaatctgtagaatagttttagttttgtaaaactccagggcaaaatccatgttttatataaatattctcaagtattaattgatgtacaatctactttcactctctcacataattgaactgtcaacacttgctcaaatgtgctatggatcaccatcccagttttattgtttttgttaacgaacactgttcaacacagaaacaaatgtctaccaaacgatagtttttttattattggagtcagttagagcatctatttaatattcttaactaaaaagttaaaatagagagcaatttttattgttgttgctagttaatatttgattattttaataatattttataataaaaagtaatagtatttttgattaaaatactattacaaaaaataagcaaaaaagtaaggagcactttacatttagagagctctttgagctatttttgtatggttggaattcatttttcaagtctcacttcatattttaattaaaaaatgtgttcagagaatatagttggaaatactcttaaaaatgtatgtaaaattgtaaagtttttttttgatacagatgtaaaattgtaaagttacatactctatattaacactttttgtagaatttataactaataactaaaactagaatgaaaacgtgagagaaagattctcatatatttctttatagagagataaacagttttagtagttaaaatttcataaaaggatgattcaagtttgaaaggcatgaattgaggaaatag

SEQ ID NO: 231290 - DNA, 1271 bp, Cannabis indica
ggagaagaagaaaaaggcaaaactaagccgagctggtgggatcgagcaggagagagagctcattcaactcaagcgtggggcaaagttgaagggagacaatagagccaagcaatatgctcaataatattcagagcaggagaggttgagcaagaagaagaaaaaggttctcccaaccgaccaagcaccagcagaacacactatcaggattagggaacttgatatgcatgctcggccatctgcccttgtggaggaaaaagggaaagtcatcctggtggagcagaaggactcttcagacgatgatgtcccgtcagtgcttgttcgggaaaatgcccctagccgcgtgcagggtatttttaacttgcacttacttttttttatactatgcttttacatcatatttgcttctaactgcgtggttttgtttgtgcagaaatgtctcaaaaggtactccaagcttagaagaaaatagtagaggatagctcgggccagtctcctccgcccaaaagatctaaaggcggtgagacttcgtccaaagagaaggggtcgtcgaagaggtcattgacctttctaaaggaacgacctaccgtgaaccctcctgtccagaaggtctcaaaatgaaagagttccagaggggggagctcggacggatctaatcagactaggaccccttccacggccgtggcgctgaggacggaggcaaagaggggcaaggacatgcttcagtactatctgaaccgatcacttcctgaagtgagtgatcaactgtcgggggcagacaatgagctgtctttggaactggtcttaaaaggagtcttgaaggaggctacacaggtaaatatttccttctttgttttattctatttttgtagctcgaattttaacatttttctgtaaagatcaatttgaagatgacctacgtctattcccgagccaagtctaatgctgtcaagaaccttaccaccaccaacacaatgcagagggaggttgatgtagctacaaaagaggttcaagacgtgaggaagaagctgagggaggtgaacaagtggagatggagatgggtctgattggttttttttattttgttttttgtttttgttttttttttttgttttttttttataaaaaaaatatatgcaagtgttatttctacaaatctcaattgtattcctatttctttatccttttatttttgagtcaggtagatagagatgaaaagaatcaggaattatgttggaaataactttttcatgtttttgtttaaaaatatatta

SEQ ID NO: 231291 - DNA, 1131 bp, Cannabis indica
agcttcctccaatatctcttttctgagcttgttactactcggaagccttataaagtattccattattcaagattgagaaaccctaacccaaccagctagcactttctctaaaacttaattaactaagaatatcccaactacgtacctttgattcttttaagtaaatcagaccaaagtgctaggttatgaagttttcctatcacaaactcaattctagccttgacaatttttgatgccaactgaggagagatcatcttagtactgaagacctgcccaggaccttttttgttcatagcatccaccaccacattggctttctcggggtgatataaaatcttgtaatcataatctttgactaactccaaccatctttgtttcgtgtttaaatatttttgaataaagaagtacttgagactcttgtggtcaatataaatctctcattactctccataccaacgatgtcaccaaatgtttagggcaaacaaaaaaacaagttccaaatcatgtgtcaggtaatgttgctcatactctttcaactaacgagaagcttaagcaaagaccttgtcagcctacattagaacacactccaaaccatgtctggatgcattacaatacatcataattttttcttgatctgatgacaaagctaatactgatgctaaaatcaaccgatgatttaactcctgaaaactagtttcacacttatcagaccatataaattgttgattctttttggtcaaatctatcaatggcatagagatcttgaagaattcttccacaaagcattgataatacccaactaataaaaaaaccttctaatttcaaaaatttccttagtcagttctaatttaactttccatgaatcaaccatgatcacatcctgtccaacacaatggcctaagaaagacacttgcaataaccaaaactcacatttcttgaatttagcatacagcttgtgatctctaagtcattccaaaactattcaaagatattgttcttgttctgcttttatttgagagtttacaaggatgtcatcgataaacactatgacacagctatcgagaaaatccttgaaagcactgttgataaaatccataaagggtgacagagcatttgtcaaaccaaataaca

SEQ ID NO: 231292 - DNA, 2307 bp, Cannabis indica
tcttcatccgaaacttcaaagacagaaaccctctttcagattgatctctgctattaccctttttgaatcttcaaagttcctgaaacgatcgaaactattcacaggggaatcgtcaaactttcaaggttagttttcgagactatctacgaattttcgtttctgattttgagaaacctgtattttcgaatttttttaggaatagaaaatgcatgtttatttgtagggagtacacataggaccttatttttctgttagagcttggtaattcccagaagagaattgacttgaattttgtataaccgtgaattctaggaagaatactttgaatattcgcgtctttttacttgctattttgaatattcgcaagtattgagatgaatatcgtgaatactcacatgtatacttccttaggaattctggaggtttggtcactctgaccattatttagaacttagggttttctttatattctctgtgtatttttgtgtgggaatgctggttaggtcttccaaatggtgggtgtgtcaccgtagcccaatgttcatgcgtatgatcgcatgtcccttgaggtactgtgatacccccagccatttgtgacgtatagctagctttctcttttcttttacaattgtgtgtttcgactagtaggttttctcgaaacagagaagagtttctgttagcccaatggttatgagagaaaggcatatcccttaggatacaggagactcctcagctgtttcttgtggtatgccactagttggatatgcggggtatgttcgcaggttgtaattggttagacttctcgaaacggtgggtgttccccagtaactccatggtcatgcttaagaacgcatgccccttgggtcactgggtaactcctagccgttttttaagatattctactagtcgcacataagcgatttacactttggaagggttggctcgatttctcgatatggtgggtgtatcttaataccttaatgaccatgtaactacatggacattaggttattgaaggacacctaaccatttcttgagaggccgaaccaattttcccaagaaatcctatttttagtgcgggtgaggtcacttgtgttgtttttcgcactttcaccacgctgaaaagatcttctatctttcaaatgagcgatttgtcagatagcaagatgctcgtctctagaggtgatgccttcgatggcgaccaggaccaggaggatagtttcattctgagtttgatctctgagacagaaactctaattgccagaactgcagagttaggtccgctgtcctctgtggatatagaaagaatggttcaggagctcgttgaaccggggacaatcgagatccgagatagcgagtccacggtgtctgctcgtgaacatcttgttcactctaggcatgctcctgatgttgaagttgaagagatgggcgaggattgggaggctcctgatcgcgagtgagatgaggaggatgatgctgggggaagtggaactgattcagtggataacacacaactgagtgagcccttctcatgcgaggacttggtctcacgagtcgctgaatccgacctcactacctttatgaggttgaatttgctacgacttagcaccatgcatccccgctctactcagagaccccacctttcctttaccaaccccacaataatccccacagaggatgtggttgtctctatacccattcttcgatttggagtatcgattccctttcatctattcattgccgctattcttaagcggtatgacgtatcccccttctaactaaccccaaatagctatcgcatagctcttgggttttatgctatgtacatggagtacgtgcatagggagccttcaattgaggattttaaactatttttatgatataaagaatgtgggcctccacaacggtatctattgcttcagcaaatgggccacttctgaaattaatggggtagaaggaatggtttccaatatgggagattggaaatctaaatggttctgtgtttaaagtaccaggaattagaaccgattttaatcgtcgacctagtacgttgcatattttagcacttagttaataatcgtgttaccttatgatatcgactaacatgttctttcttattgatcgcagatagaccgcctcgacctgtactggacccagctcgcaaagaagtcgctgaagttctcagtagtctccatgttcaagttgtatatatacgagttattgtttatttttaacttatcttttcttgtcctcgcagaaatgactttcctggagcaagctcctgtgctcaatcgcaagtcgaagact

SEQ ID NO: 231293 - DNA, 1562 bp, Cannabis indica
aacataaacaactgctaatttccaaattaactaagcgggctttacaaatcgactgtcacaattacagaccatatccgtcagccagcgccaaaacgctcccttctcccttccataaggcgtcccatagatgcagaataaagtccaaggctccttgtgaccttatttaatacgacactcaaacctcgaattgaatttgtttctaatgctcagcttgataccctttctccaagcaacacaaaaccccccagccgtgcccatcgaagaaatacctctaaattcttaaaatcccaatttcgtagtaattgcatacatcgattcctcatccaccttagtttccatcagataaatcacatcgaacctttcaccccgagaaagcctcttaatggctctctcagccgccggtctccgaagaccgcagcaattccacgctaggcacctcatggcaaaggtggggccatggctctggccgcctcctcgccatttccaaaattttggacataggtaatgggaacatcaacacactgagcaaggacttgatccaaattaataggattaccttcattcgcttctctgatcagtttctttctccttcttgtctttacgcccaaattcttcttcaaagctgaggatgaagccgccctaagccccttcttacgtctcccttttgtcggaccatcacttctgcctgggttgaacggctgaatctccacatcacgcccattactatcctttagcttgtcgatttcaggggcagtagtcacattagtctctacaggggatcgactttcatcttcaaacagtgaatcaaggaattttttagggatgggctgataccaagtatgggctttccttttcttggaccccaaaaggtgtatgatcatcttagatacatttggtgggtttgagattaaagaaggttgggctttgtacatgtttgtatagtccggccctaataactcacagtaaagcttttggagattagggtcatttgagggccatttgaaattagtgggctctgggaaatgatgagccacttgagatttacaagcccaaatgttagggatgtccagacactgaattaaagaaggcccaacatcaggtaattcccccatttcctcccttggccccacgtgagcaaaatcaggggtaggtagctcagatagaattttttgggggggaatattcaaatattcaccacgtgcagtactaacttccacccctgggaccacttgcattcccacattctgggccacgtcatccaatttcgtactccacggacgtccaccaccatgcacagtaccatgcatagtaccatgcaacgtgccaaccgatgtaccttctccagctatcgccggtcgttcagccacagccgccgccttcgaagacccctcccccttcttcgattgaatggataatggtcttcttctccaactaccctttgatcgatggttggctcccgaaagcttcactccttcctcggcatgaatcacatcgcttcgaaaagcaactgctgagaaacaattcccagacggaccatcggttttaatccatgggccatacat

SEQ ID NO: 231294 - DNA, 3003 bp, Cannabis indica
ttcagttcctaaaagagttggttgacaagaaaaggcccaaagttttatttttgtgtgaaacgttaagtaataaggatcgagttgatgggttgagtaggaggttgggttttgaaggatgttttgtggtagaggcccaaggaagaagtggcggtctagctttgttatggaagaatgaagaagaagtggtcattgactcttactccgttaatcatgtggattgtttcgttcattttgaaggtcaaccaaagttccgttttactggtttctatggggagccgaaccgaagtcgtagacataattcttgggagttgttgtgtacccttcatgcaagatatcaagaagcttggtgtgtgatgggagactttaacaatattctccataattctgaaaaaagagggggtagagcttatcctaggcgacttttggaggggtttcaagagacgattcgtcattgcggcttatgtgacattgatttacttgggcaccagtttacttgggaaaaaagtagagacacttcggcatggatggaagctaggcttgatcgggctatgattaactttgcttggttgtctcggtatcctggagctaagctttttaatttggcggtgtccccttcggaccataatcctttgttcctagacatgctgcaacatacacaatcggttggggtccaaccttttcggtttgaaaatttctggacaaggttcgaagaatgtgagactgttataagggagagttggagtcggtcaggtgtgtaccaattgcatgagaaaattgctcaatgtggtcaggatttaaaggcttggggaagtacgatggcggggaatttttcttcaaaaattaagcaatgtaataatgatctcaagttgcttaaaagtagacgtgatcgcgaggggaaaaagctgtatgcggacaccaagagtcagctctttgaaactcttaatcagaaggagattttttggcgtcaacgctcgaaacaattgtggctaaagaacggtgatcaaaacagtaagtttttccattccaaagcttctgctcgtcgtcgtaataataatattgtttgtttgaaagatgccacgggagtgtacaagcattgggaggcgggtttgggtgatttaatgattgattatttctctaatattttttcggctgagcctggcagttgggatgaagtgttgagttgtgttacgccaaaggttaatgaggaacagaatgcttttttaattagaccgattgatgctcaagaagtgaaggatgctttgtttcagatgcatccggataagtctccggggcctgacggtatgaatccaaaattctttcaaaaatattggcacattgttggggcggatgtgacttcttgtgttcagaattttttcttgactgaggagatgcaggaaggtttgaatgatactaacattgtcttgatcccaaagaagaagaagcctgatgagatgagtgaattaaggcctatatctttatgtaatgtagttgcaaaaattattactaaagtattggctaatagactgaaaagtttactctctgggattatttctttgaaccaaagtgcttttattcctggaagactgatcactgataacatcatggtgtcttatgagattcttcattatctcaagcgaagcagagtgggaaggatggttgtatggctttgaaacttgatcttagtaaagcctatgatagagtggattggcttttcttaagagctatgttgtctcggttggggttcagcgataaatgggttcggttagttcatggctgtctttcttcggttcggtacaatattgtgagtagtggctatactttgggtccgatcattcctagtagggggcttcgacaaggtgaccccatttctccctacttgtttcttgtttgtgcggaaggattgtcagctctcataagacgttacgaggaaaggaagctttttcatggatgcaaagtcgccaatggtgccccaatagtgtctcacatgctcttcgcagatgattgctttctttattgcaaggctactgaaagagaggttgctaatgttcagcaattgctccaaacgtttgccaatgcttcgggatagagagttaattttcggaagtcttcagtctttttcagtactaatacgacatctcacatgaaggagacaatatgcaaccgcttgggtattagagaggctgaaggaaatagcaagtatttggggcttcctagttcaataggaaggaataaaactgcggcttttagctttgtggtggagaaggttcagaaaagaattcaaacttgggataataagtttctttctagagccgggaaggaggttcttattaaagcggtagttcaagcattgccagcctacactatgaatttgttccttcttcctgtgggcatttgtcatcaaattgagagtgccattagtagattttggtggaagtctactagttccaaaggcattcattggttaagttgggacaagctcaaggcacataaggttcatggaggcatggggtttcgtgatattcgggactttaatgtctcgttacttgcgaaacaagggtggcggctgttgtcttgtgaggaatctctagctacgaaagtttttaaagctagatatttcccctctggttcataccttactgctactttaggaagtaacccaagttacatatggcggagtgtgttggaagcccaggctttggttcgatctggcgcaaggcgtttgattggtgacggtactcgggtgagcatcctaaatgacccttggctaatggatgagattaatccgtatattgagactgttagtccgtgtctctatgggcaaatggtgagttctctaatgcacattgacaaaatggaatgggatcaggaggtgctctcggatgtgttaaacgaacgggacaaaaaattggtttggcgtattcctatttcgacttatgttagggaggcggattggttttggctaaaagatgacaaaggtaatttctccgtcaagagtgcgtatag

SEQ ID NO: 231295 - DNA, 684 bp, Cannabis indica
gtagcctcatgtatctcacttttaacaatattaagctatgtttttgtaagtttatgaaaagtacttggagattttgaagattacagaaggatcattaaatcttacagttaagtttttttttttaattctttcgattacagctatattgattttttgttgtgtattttacaggttttttttattgtgttgcttaatgatgaaaggagtggaagctttgatagggtccttacactcattaatttgagcatagatgcatgtgatgctaggttttggattacttttgtttcgtgtctattttgattttaaagtcgtttaatctttttgatttttcaagtttgttatccaattttttaaaattatttctatttcatgtcatctcatgcatgaatgagttgtgcatacattcagagtaaatatttaaaaacttgtttcaatgaatttgctctattttttttctgtacactatttatttattataataaaatgttcatatataattgaaaattaacatattataattaacattataattgaaaattaaaaacatattataattagatataattttgaaatatatcctattttttttttttttttagaaataaatagagtactacatattaagaacatctccaatatatatacactaaagttaatgtcaaaaaactatttccactccaaaag

SEQ ID NO: 231296 - DNA, 764 bp, Cannabis indica
gtctcgctatatgtaacccgaagctgttgtgtgattatatttattctacttgagtgaatgaatatcttttttttgtctatgaattccgacgcagatgtatgtctcgtcaatatcagtccaatagtttttatccttgtctcgcttaagactatatagtcaacgagctttgaatattatctttttaaacctttatgtaaaaataacttgttattttaatctgcatttaatgatataattattattatatcattaaagttgattcatcttctttttgttggatacgttttagcttctgaagtgtagccaaattttgagtataccagaaccaactaggcattattgaagtttcttttttcctcaaaattaacttttttcttctcaaaagggcttgaagagcaccaaaataaacaaaaattaaatttcacttgaaaaaacacaaaacaaataccaagcataatctaaacaataaagtggtaaaatatacatatacatatataaaacacattaaaatagactctaaaaatgcataaaacttaacctaacaaatttttccaaatttaattaacatttactcgccctcaagtaaagactatgttaaactaaccaaaaagaaaaaaataaaaacaaacacaaaagtaagccaccatttccataaatactacattgtttttctcatgaaatctcaattacaatttttaatcaaatttttagctcaactgtctcaaagttcaaccttaaaggtcaattagggaattaaataatat

SEQ ID NO: 231297 - DNA, 1191 bp, Cannabis indica
  modified_base (754)..(754): a, c, t, g, unknown or other
agaaaataacaacagagaaaaagtcagccttttggctgagagttgtcatctccatgtgagctcctcctagagatgttcatgtaaaagaaaagagagttttgttagtatcaaaagtgagaaaaacagagagaaatataaagttgtaaatcaaagattgtaacctatttttgagatgaatggattcaagctttgagggcttgatggagaagtagccggttgttttgggcgaactccgagatcaaagttttggtgtcatctactttaatcactgtttgcattctctcatctcactcttattattttctggtatttgtatttgtgtgtgtattgagtgttcttgctatatttcgggttgtgtttttcggtttgggttttggccgtgagtgtgtaatgtttttggggtttgtattttcgggtagaagcttaagtttttctgggttcggtttttgagtgagtgagtgttctaggcatagtttcgggtagaagctttgttagttgtttgggttgttcttggttcgggtagaggctacaaagaagaaaagaaatatttttgaagaaccctaaccttagaacctgtagcaagaaaaaaaaaaggaaaaaatattagaacccatagaatcttagttgctgtaagaaaaagaagagatagaaatctttaccatttcgtggctgccattagtagagataagaagaagcttgaagaaattagaaccccataaaaccctagttgttgctgtaaagaaaagaagaaganagagaaaagaaaaacatttagaaccctagaaccctagctgctgccgtttgagagaaagagagaatatatttgaaaaggtttgaattttttttggtgaaggaatattgtggctgccgtaggtagtgaatactagggttagaaaagatatcttttatattgagtttcttagggttttatctaggtgggctacttctcttgttgggccaaattattgagtgaaatggagagtcttgtttgactcttcactctgaccgaagtaattaaataaacaaagtgtgaaaaaaggttaacctttgattggagagagaatatggaattgggttgctttctcttgggctgatctttattcttgctgggccgaaataaagagtctttgtgactcttgttgcattgatagaaattggcaagagaatattgacttgattggttgttgggct

SEQ ID NO: 231298 - DNA, 907 bp, Cannabis indica
aatgccaaagtctataagccagagtccttgatggataagcatcttcttagtgattccagtaatcatgatgaagatgttgacgaagtacatccggtatcagacgatagtggcagaagtctttccacgaatgatctttgaagaagattaaatgctaacaaagataaatccaaagtagaaaaagctagaccccgtgagaatgatctgagaaatcatataaataaacttgtttacggaagagaatcttcaagtgataagactcaactcctagaatgcaaagtcaaggagctgatgcaaatcacagaaaagatttctagaaaacaaagtggtgtcgtgtctgactttaaggaagaagatacagagccttgtgtgataagaatcattgatgcaccactatcagagcgtttcagaatgcaatagatggagctgtacgaaggacgtatggaacccagggaccatttgtcaaaatacaatcgcatcacgcaagttgccaagaccagtgatgatgcaaaatattatgtttttcgttaacactaagaaattatacagaggactagtggaagaggttgtcttcaggatcgatcaacaactcaagggacctacaagtaatgttcagaattaagggtggcaaaatgtgtcatcgtgtcgtgttcgtgtcatattttatgtgacccgcttttaaattttgtgtcaagcgtgtcgacctattttttgactcgtgtctaattatcttaaccccaaaccaacccgtaaaaaattgtgtcgtgttcgtgtcgacccactatgacctgtttttctattattgaagctggaattatagagaaaaataatagatttaagctccatcagaaaacttgtatacatttatgtacatatagtttgttatatatataataaaaattaaaatatt

SEQ ID NO: 231299 - DNA, 1132 bp, Cannabis indica
tgccttgtatgtgtcagataaatttgagtaagatatgaatttatcaatagggtgtggagttgaagaggagtcctgtatgagtgaatagcactcaaagtctcttaaatgagatggaggtctagtttgcctttgagatcttcttggaatttcctgggagttatttcctgctgctgcactatttcttgttgttgcattatttcttgctgcagcatcactttcagctgctgtattttgggtagctgctgcattatttcgagcagcagtggcatccatttctgtaggtaaaggagtgggaactgcttgctcctctaaaacatcttcagtcctctcaaactcacgagtaaaacacttcattctgtccagtatgatctgtgggatactcacaaatgggaatgtcatcaatcatagaatgaggtaaaacagtttgagtaaaagggtcaagattattatcagctgtattaagtttttgaaagggaaaaatgttctcatgaaacacaacatttcttgaaataaaaatttgattagtatttaaatcataaagtttgtaccctttgacaccttggggatatcccataaaaacacaagttcgggctctaggagagaatttagtcctttgagccatcaaggtggatgcaaaagcgagacaaccgaaagtcctaaggtgatgataatcaggttgtttcccaaagaggagttcataaggagttttgtttcctaagagaggagttggtgtcctatttattaaataggctgaagtaagaacacattctgaccaaaatttaattggcattttagcttgaaaaaataaggctcgggcaacattcaataaatgctggtgttttctttccgctattgcattttgttcgggtgtttcgacgcatgtgaaatcatgcaagatcccatgtttagagaataggtctttgaaaactaactccggggcattatcagatctgaaagttttaaaaacaacattaaactgagtttgaacatatgacaaaaattgaggaataataaaggatacatcagatttatgttgcattaagtaaacccatgtaaatctagatttatcatcaaccaatgtaagaaagtatttaaaattggtgtgtgaagtaacatgatatggtccccaaat

SEQ ID NO: 231300 - DNA, 693 bp, Cannabis indica
cacccaagtcttgtgggtcaatcagttgatagcttgcttcaaattgactcaagagaatgggatactaacttgattcgggatatgttcaatcaacatgatggtgatttaatttttttcctattcagctgagaagttctagtggtgttgatcgctggtattggtctaaagagacaagcgggatatatttagttcgaagtgcttataaactcttgcaatttgttaatggggattggccgaatactggtgggataaaccattggaagcaaatctggaatttgaatgtccctgctaaggttcaacacctgcattagcgggtcattgcaggctgtctcccaaccaagttacagctctccatcaagcatgttccaatcgatcttacttgcctcatgtgtgatcttcaaccagagaccgtgtcacatgttctgttcaggtgcaattttgcacgttcttgctagaaattttcgtcggctgacactgatggtgctgatgacattgacttcagcagctggttttgtgacttgctgctgcattgcaggaaggcagttgtcgaggaagctgctatgattatttggcggatttggacggctcgaaatgatctcttgtggaataacaaatcaactactgtttcgaaggtgattcgatcggcaaaaactaatcttggcaattggcaaaatgctcaatcaaatggttcca

SEQ ID NO: 231301 - DNA, 1236 bp, Cannabis indica
agatatcatcgacatagatcaattctaggatagttaatttagctgatcttttgatgaagagtgagtggtcagatttagagggtgtaaagccaagtgagacaagactgtgatggagcttctcaaaccatgcacgaggagcctgcttcaggccatacaaagccttattaagtctgcaaactagatgagttttgccaggaatttcgaagcccggtggctgggtcatgtaaacttcttcttgtaattcaccatttaggaaagcgttgttcacatctagttgtcaaactgtccacccttttgacaaagcaagaaccaaaaccaccctgatagtaacaggtttgactactagactgaaagtttcagtgtagtcgaaccctacttgctaatgaaatccttttgctacaagccgagccttgtattgatatatagtgttatcaggattttctttttgcctatacacccatttacatcctatagttgtctttccaggaggaagcctgactagaacataggttttgttccttatcaaggctagaatttcatctctcatggccttattccagtgttcattgagtaaggcttcctgaatgcaagaagggagtttagaaaccagaagtactttgggtttgtgaatcccagatttcgatctggttttcatgtgatggttgttggctttgctggtatcatttgaataacctggcatgattggatgctgaaccacattagcatcagcatttgcagatcgaacagcagcagtagtagtgccattagcagtggcaactggtgcagcagtagtttcatcagctgctatgttgacatcagttttaggtgttgagacatgttcatcaacttcagtagtgattggctcagtagatattgggaagcttgaacctggtgtcatagtaggctggggacacacaccagaaataggactctgcaatattggttcacctgtagcagcaagagaattttggcttggagagccattgttagttgcacaaagtagagtaatgttgtctattgaaacatgctgatcaaccctttgattattagtgacagagtgtgagtgcacaagatcattgattgtgtaaggctgcctgtaatgagagcattttggaattaaggctgatataggattgtggattatttgagatgaatcaagggaatcatgatccacaatagtctcataaggaaaggaaaattcatcaaagactacatctcttgagatgtaaagtcttc

SEQ ID NO: 231302 - DNA, 684 bp, Cannabis indica
aatgcataaatgttataaatttctacctattatctgtcacatggaaaaatattcagatcttaaaaagccatgaaatagacaagttgttagaaccagcattattacacgaaacaatccaattctaaacagtaaaagtaaaaacagagtgttggtttacatacagagaggtcctcagtaatattggagatctcctctttgtcctttttggaaatccaaaaacttccaactttggtcagagctttgtccattattggctggtatttttctcactccagttttctcagaccagagaattttataaactcaaaactattctctgtacaaataaaaaaaaatcaaataatatatatataatatcagatctgaagagatcgattaagatgtggactgtggagtttcgactgtcgctgtggctggatgaaggtccggcgaagtggacgggaactgtggaccggcgttgtggcttcgtcgttcaggctgaatgaaggtacggcgctctccacgtccgtctacgctggctggaagtggagaagggacttgagtgggttgagtcgttgatggcttgaggttgggcggcagattgtcgacgatgggagaagagaagaatggaacgagaagagaagaagggggacgagcgactgtgcggtttaagagcttcagacaattagttttagggtttttttt
